United States Patent Application Publication US 2017/0114356 A1 - sequence listing, part 81

SEQ ID NO: 125429 - DNA, 1796 bp, Zea Mays
gtgccacggtcagatgagttaagccctaaacccatttccccctcgtctccactactctggtcgtcctcgcgccgccgcagcgacgccaccgccggtaatggcttccaccgttgtgctccggaacgcctgctcccgccgactcttctgctactccactctccgcgccgccgcaatattgggacccgccgcgccacctgatgcgcccgcggcggcgtcggcccagccgccaccgatggcaggaaccctctgggcgaggtccatggccactttcacgcgcactcggatcaacatgtggcaggaagccacatgtgaacgtcggcaccattgggcacgtcgatcacggcaaaaccacactcactgctgccattaccaaggttctggcagaggcagggaaggccaaagcagttgcttttgacgagatcgacaaggccccggaagagagagccagaggaatcaccattgcaacagctcatgtcgagtatgagactgctaaaaggcattatgctcatgttgattgtccaggtcacgcagattatgtcaagaacatgatcactggagctgctcaaatggatggtggtattcttgtcgtgtcagctcctgatggcccaatgccacaaacaaaggagcacattcttcttgcccgtcaggttggtgtaccttcccttgtgtgtttcttaaacaaagttgatgctgttgatgacccagagctactggaacttgtagagatggagcttcgggagctcctcagtttctacaagttccctggtgatgagattccgatcatccgtgggtctgcgttgtctgctttgcaagggaacaacgatgagataggaaagaatgccattttgaaactaatggatgcagttgatgagtacattcctgatcctgtaaggcagcttgataaggctttcttgatgccgatagaagatgtgttttctatccagggtcgtggaactgttgttactgggcgtgttgagcagggaacaattaaaactggcgaagatgttgagatcttgggtttgacacagagtggtcccttgaagactacagttactggtgttgagatgttcaaaaagatactggaccatggagaggctggtgacaacgttggtcttcttcttcgtggtctaaagcgtggtgatgtcgagcgtggccaggtggtgtgcaaacctggtagtctgaagacatacaaaaagtttgaggcagaaatatacgtcctgacaaaggatgaaggtggccggcacactgcctttgtcacaaattacacaccccaattctacttcaggactgctgatgtcactggaaaggttgagttgcttggtgagacgaagatggttttgcccggtgacaatgtaaccgcgaatttcgagttgatatcgcctgttcctcttgaaactgggcaaagatttgcgatgagggaaggagggaggacagttggtgccggggttgtctccaaagttattagctgatgagtttccactttcttgcccgtagcaatttagtaaagaaatgaatgctgacatgtttcttggaatgcatgggcaaaaaggcagagctggctggtctggccgccattcattctggacagtaccttgtgctttcttgttgaggtggctcatcataaagcatattttgtagccacttttccgagttgatattagtgggttcttaccaaatttaccgcgaaaattgctggtcatgttgggccgatgcgtcgttcttcgataggagatgaagtgctgttatcagtgtcagtgacatcttgaagcggcaagaaacgaagatattgaaatgta

SEQ ID NO: 125430 - DNA, 2100 bp, Zea Mays
gtgccacggtcagatgagttaagccctaaacccatttccccctcgtctccactactctggtcgtcctcgcgccgccgcagcgacgccaccgccggtaatggcttccaccgttgtgctccggaacgcctgctcccgccgactcttctgctactccactctccgcgccgccgcaatattgggacccgccgcgccacctgatgcgcccgcggcggcgtcggcccagccgccaccgatggcaggaaccctctgggcgaggtccatggccactttcacgcgcacgtgagtgctgcttggcacagatccgttccgtgcccgctattttctcgctctagattcatgagttcatttccgttatccatgcatggcattcagtatccgtctatttcttcttgtgattcactttgcaagtcggatcaacatgtggcaggaagccacatgtgaacgtcggcaccattgggcacgtcgatcacggcaaaaccacactcactgctgccattaccaaggttctggcagaggcagggaaggccaaagcagttgcttttgacgagatcgacaaggccccggaagagagagccagaggaatcaccattgcaacagctcatgtcgagtatgagactgctaaaaggcattatgctcatgttgattgtccaggtcacgcagattatgtcaagaacatgatcactggagctgctcaaatggatggtggtattcttgtcgtgtcagctcctgatggcccaatgccacaaacaaaggagcacattcttcttgcccgtcaggttggtgtaccttcccttgtgtgtttcttaaacaaagttgatgctgttgatgacccagagctactggaacttgtagagatggagcttcgggagctcctcagtttctacaagttccctggtgatgagattccgatcatccgtgggtctgcgttgtctgctttgcaagggaacaacgatgagataggaaagaatgccattttgaaactaatggatgcagttgatgagtacattcctgatcctgtaaggcagcttgataaggctttcttgatgccgatagaagatgtgttttctatccagggtcgtggaactgttgttactgggcgtgttgagcagggaacaattaaaactggcgaagatgttgagatcttgggtttgacacagagtggtcccttgaagactacagttactggtgttgagatgttcaaaaagatactggaccatggagaggctggtgacaacgttggtcttcttcttcgtggtctaaagcgtggtgatgtcgagcgtggccaggtggtgtgcaaacctggtagtctgaagacatacaaaaagtttgaggcagaaatatacgtcctgacaaaggatgaaggtggccggcacactgcctttgtcacaaattacacaccccaattctacttcaggactgctgatgtcactggaaaggttgagttgcttggtgagacgaagatggttttgcccggtgacaatgtaaccgcgaatttcgagttgatatcgcctgttcctcttgaaactggtaacggctagattctcagattttctctcataataaagatcaggtcttttggcagcattttgtttctgtcttgtgatgccattacaccactcccatgttccttttttttattttttgttccattggatactagagaaattcattttagatcgtcaactcttattcctctatgcagggcaaagatttgcgatgagggaaggagggaggacagttggtgccggggttgtctccaaagttattagctgatgagtttccactttcttgcccgtagcaatttagtaaagaaatgaatgctgacatgtttcttggaatgcatgggcaaaaaggcagagctggctggtctggccgccattcattctggacagtaccttgtgctttcttgttgaggtggctcatcataaagcatattttgtagccacttttccgagttgatattagtgggttcttaccaaatttaccgcgaaaattgctggtcatgttgggccgatgcgtcgttcttcgataggagatgaagtgctgttatcagtgtcagtgacatcttgaagcggcaagaaacgaagatattgaaatgta

SEQ ID NO: 125431 - DNA, 1004 bp, Zea Mays
aatcacgccatcgagcggccaacccgcgcatccccaccgcccaaacagccacgtggcgagcacgaactctgtcccccgtcctcgtcctctctcactcttccggccacactccggaagcaggagctgcctgcggattacacgcatctcggcgcccgcatggccgatctccgcccgccggagccgggcacgaacgggtccagcgccgtcgtggtcgccgcgctgccggccgtggaggccgcgaaggccgccgccgccgccgctgcggccgcgtgcggagcgcagccgcccgcgccgccctactccaagcgccgccgccgccccagcgtccgcctcggggacatcgacgcccctcccccgcgccggaaccacaaaccctcctcctcgtcgcattcgcgcccgccgcgccgcccgcacccggacgacccggacacgcacggcggccgggggcccaagccgcccgcgcagcgccgccccaggaccgcctggattcccgcggggcccgccgagggctgctacgacgacgaggagcgctactacgacgacgaggaccagtccgactccgcggctgccgctgccgccgccgccgcgatggctagggtttcgggcagccgcgacgccggcggtgacgagtctgacggggtggcggactggggcctccccaacggccgcctctcctccgcgatgcggcatggccgcgtcaaggcctggctcgatgggctggggctttctcggtacgcgccggtctttgagatccatgaggtggacggcgaggtgctcccgctgctaacgctggaggacctcaaggacatgggcattggcgctgttgggtccaggaggaagatgtatgccgccatcctcaagctccggagcgacaacgcgtcctgaggtggtgagcgagctcttagcgtctcattctttccgtagactagagagctagtagtaaagacgagaataactagtgctgctttttcgtcaatccttagtgtgttgtatataggtttcaa

SEQ ID NO: 125432 - DNA, 1704 bp, Zea Mays
gagagagagagacgcctccgccgctggaatcaggcgatgggagacgcggacgcctacgcgaagcgggtgctactcaccgcagctggcgacaccgtctcgcgggggatcgcctctaccctcaccaagcacggctgcagattggtcttgttgggcgacgagggcgcgctggccgcgacggaggaggaggcgcggcgttgcggggtagggggcggatgcgtcgaattggtcgggctggacttcaaggcgtgcggtgaggctgctgccgacgcggcggtggatcgggcctggcgctgcttcgccggactggatgccttcgtcaactgctactcctacgagggggaggtgcaagattgcctcagtataagtgaagacgagtacatgaagaccatcaaagtaaatgtgataacaccttggtttctaatgaaggcgatcgcaaagcggttccaggatacaaaatctggtggatctattgtgttcttgactcagattattggtgctgagagaggattgtatccaggcgctgcagcatatggcacaagcttgggagccatccaccagttggtccgtctgtgtgcgatggagcttgggaaacacaagataagggttaacgccgcctgccgcggcctgcatctgcaagacaagttccccgtgtccgtgggcaaggagaaggcggagaaggcaacggcggaggtgatgcccctgcggagatggctggatccggagaaggacctggcgtcgacggtgctgtaccttgtcggcgacgagtcccggtacatgacgggcacaacaatattcgtggacggtgctcagtccatcgtgcggccgcgcttgcgatccttcatgtagcctagcctagggttaaatgcatcggctgtccctgaacttcaaaaatgtgtttctagtccttaaattgatatttatatataaaaaatagtgtatggtaggtctatttctggaccatatcgatcactgttctcacgtggaagaagccctgcccgtacttatagctatgaaattctaactatctgttactagtatatatataacctttaatttgttgatgatggaatcaaaagaatggatcttttactaccaaggaggcgagaggccggctgagaaagaatggatatcagtggatgcagatgcccggtagcttccactggaactttcccgcgcgtcgctcctcgggtgtgccggcggtgtagttcctccagacgtcgaggaccccgcggaggtcgtggagcttggcgccgaggccgacgcagcagttggcgtggagcgtgcagatcctgttgaggtccttgctgagctggcagaagccgctgatgtaggctgtgtcgaggaactggatggcgaggtccagcctgggcgcctcctcgtgcttgatgaggttgaacacgtcctgctcgtgcttccccaggaagcgccaccgcccctgctgccacgcccggtagaaggcgacggtcttgtccgacgcccgcacgaagaggaagccgccgttggggaagttgcgcaggctgtaggggtcgcccatgtacacgtcgctggagatggcgatgtcggccgccatggagatgtggcggaacgggtcgcggaaccacatcacgtcaacgtcctgcgcgcggccggcacagtcgatagatgttgctaattaaggctgctgctggtgctggatgcacgacgacgacgactgaatgaatgaat

SEQ ID NO: 125433 - DNA, 110 bp, Zea Mays
gtttatttgcctatcaaatatcacacataaactaccacgtcgaccgggaatgcacgttacatacgagatcttcggacgcttacacatagggagatttcaggggtggttcc

SEQ ID NO: 125434 - DNA, 3873 bp, Zea Mays
ttcaatcctaccccaactagctctctgcctcttcccttgctgccttgctctcttccctcgcaccccaccttgcacctccagtcctccattcccagtctagatctcgatccacctccatggcggatctcgccacggacctcttcggggagccgatcgaggcgcaccctccctggttcaagcccgacgccttcctccgcgccagcttcgatccggacgcctacgtcgccgagctccgctcctacgtcccgctcgagagcctcgccgccgagctccgcgcccacctcgacgcgctccgcgccgagctcgtcggcctcatcaaccgcgactacgccgacttcgtaggcctcagcgcgcgccttaagggcgtcgatgccgccgccgcgcggatgcgcgccccgctcgccgacctcagggacaaggtcgccgccttccgcgcgggggcatcagccgcgctcgccgcgctccgggcgggactcgagcagcgcgccgccgccgccgccgcgcgcgagctgctcgagctcttgctcgacgccttccacgtcgtctccaaggttgagaaattgatcaaggaactaccaactgcgccatcggatttatcgaatgctgaagttcctaacagtgacactggaacaccaaatggggtggctggaacaggtgtcagcgaaacacaaagcattctcttagaaagaattgctagcgagatgaaccggcttaaattctacataagtcatgcacagaacctcccttttattgagaacatggagaagagggtccaaggtgctacaaaactgcttgatggtagcttggagcgctgctttgtggatggtctggaacaccgtgatgctaaagttatatacaactgtttgcgtgcttatgctgcaattgacaacacatcatcagccgaagagcttttccgtacagcagtggtgtctccattgattcagaaaataatccctcaaaattatgcaagagctgttgctggggcatcatctgatgagctggaagaggattatcaacaaataaaggaatgtgtacaaaaagattgtaaatttatattggaaatatcttcctcagaaaactctggattgcatgtttttgattttctgggtaattcaatactcaaagaagtcctttctacaatccagaaaggcaagcctggggccttttctcctggaaagcctaaagaattcttgaggaactacaaagcgagcttaggatttcttgattttcttgaaggttactgcatctccaagtctgctgtaacgaagttccgctctgagcttgcttacacagatttcatgcgacaatggaatgttggtgtctacttttcgttgcgatttcaggaaattgcgggcggccttgattctactcttacaaacacttttagtcctactggattgaatgaggctcaagggaaaccattgctcttgaagcaaagtattaagctcttagaaagtttggattcatgttggagtgatgaggttcttgtattctctcactgtgataaattccttcgtctgtccttgcagcttatttcaaggtatacaacatggctttcatctggtttaacggcacgtaaagcttctgacgggagcccgaattcacctgcagatgctgaatgggcactgtctatacctatagaagatttcatatatataatgcatgatgtgcatgctgtaattggcgagctttcagaatcaggcagcttcattggacatgtgaatcagttactagggtcatgccccattgaagtatttaatcttgtgaaacaaagtatactgcaagctgttgaacctttaaaggaacggttgcctgcaataatcaatgttatgattggaatcatagttaagaagtctaacgaggacttgaagcacctgaaaggaataacagcgacatataggatgacgagtaaacttccagtcaggcattctccatatgtatcagggattttacatccgttgaaggtgtttcttgaaggggaccgaatacgctatctatcagaagatgataaaactaagttgtgtcgtgggtctacagataagattactgcaatttactatgacttggtctctgaagttgtcactgtggcaaggaaaaccgagtcttcgttgcaaagactgcgccaaggtgcacaaaggcgagtaggagctagtacagatgcctcagataacatcatatctgatacagacaagatctgtatgcagctatttcttgatattcaggagtacgcacgaaaccttcgtgcgataggaatagacgcgagagagattgattcctacagagctctatggcagtgtgttgccccaaaagacagacaagagaacattcagttttgatgtaaagaacactgtcagtacatatagagttgtctgcccgtagatctctcaaacatgtaggcgtatctgatgttgtccttttcggtttgaagtacttattatggatgcatacgtagagtagatagagagctggattttggtacacattttattgttaggatggatggtcacctccagatataatccagaactggagaacgtgtaccagtatatgattaaattttcatgtgaaatactaggatactgttgaaaatcgtgtgtcctcaagttgtcacgagcgtgaatcttagctctggctagttgtgaaattgattggtctctactgcagggttccctgcatgtctacatgatgttcatgtgtttgttcttaagccctgaccccattggcattacctcttgttactctcgtgcacaacagaacgtgtaattccagatggtggattactgtttttggttgctaaaattgatagctcgtaataaaataaaataaaaatcccagcgatttcaggattcttgtgagggaggatgttgatttaaggattctattctatggagaaacaaaccgcatgttgcaaaaacagctcaaactactgaacctcagcttctcaaagtcaagttctggcacgtcctgctaccacacagcatcacaacagggagaacacgatgggactacagctcatgtgaaaatgatacgatcggcactggttcatccaaatcttcaacggcacctatcagctgctgaaccagcagaagcatcagcaaccatgcaaggaagcatcagttcctgaaccaactgaagcatgagcaagcctgcaaggaagcagcagaacagtgaattcaacacggtcctataagaaaaggcgtttctttcaccatggtcaaattctagaataaaacaatggatagtcatagctacaatagcactaaaattttactgctaacaaagggtctatcatcagtatactaaacattgttgtgttccagttaagaacacactgctgaagtaagcatggggcaatgaaggctaatgccctgtttgtttggcttccaccgactaaattttagtatctatcacatcaaatgtttgaatgctagttagaagcattaaattacaaaactaattactaaagacgaatatattaaatctaattagttcatgattcgctcacatgatgcttaataaatttgtctagtatttagttgtgtaattagttttataaatacactacttgtaaaaggcattcaaacatccaaaccaaacagccctttataaaaccagcaatcatcggattaagtgattctgcagtgctctgaaaccaatggcagccattcatcaggatgtcaaaaatgcaagaaagataaaattgtataagaaacacctgcaaataaatgctttaggccaagaaaatagtttgaaccagcattatggcaacaagtctggagttgactcactgaagattcgtatttgcggccttggttggagcggctataaccaccacctgcgttgccgctggtgatgacaggagcatcgccggac

SEQ ID NO: 125435 - DNA, 2770 bp, Zea Mays
gcaccccaccttgcacctccagtcctccattcccagtctagatctcgatccacctccatggcggatctcgccacggacctcttcggggagccgatcgaggcgcaccctccctggttcaagcccgacgccttcctccgcgccagcttcgatccggacgcctacgtcgccgagctccgctcctacgtcccgctcgagagcctcgccgccgagctccgcgcccacctcgacgcgctccgcgccgagctcgtcggcctcatcaaccgcgactacgccgacttcgtaggcctcagcgcgcgccttaagggcgtcgatgccgccgccgcgcggatgcgcgccccgctcgccgacctcagggacaaggtcgccgccttccgcgcgggggcatcagccgcgctcgccgcgctccgggcgggactcgagcagcgcgccgccgccgccgccgcgcgcgagctgctcgagctcttgctcgacgccttccacgtcgtctccaaggttgagaaattgatcaaggaactaccaactgcgccatcggatttatcgaatgctgaagttcctaacagtgacactggaacaccaaatggggtggctggaacaggtgtcagcgaaacacaaagcattctcttagaaagaattgctagcgagatgaaccggcttaaattctacataagtcatgcacagaacctcccttttattgagaacatggagaagagggtccaaggtgctacaaaactgcttgatggtagcttggagcgctgctttgtggatggtctggaacaccgtgatgctaaagttatatacaactgtttgcgtgcttatgctgcaattgacaacacatcatcagccgaagagcttttccgtacagcagtggtgtctccattgattcagaaaataatccctcaaaattatgcaagagctgttgctggggcatcatctgatgagctggaagaggattatcaacaaataaaggaatgtgtacaaaaagattgtaaatttatattggaaatatcttcctcagaaaactctggattgcatgtttttgattttctgggtaattcaatactcaaagaagtcctttctacaatccagaaaggcaagcctggggccttttctcctggaaagcctaaagaattcttgaggaactacaaagcgagcttaggatttcttgattttcttgaaggttactgcatctccaagtctgctgtaacgaagttccgctctgagcttgcttacacagatttcatgcgacaatggaatgttggtgtctacttttcgttgcgatttcaggaaattgcgggcggccttgattctactcttacaaacacttttagtcctactggattgaatgaggctcaagggaaaccattgctcttgaagcaaagtattaagctcttagaaagtttggattcatgttggagtgatgaggttcttgtattctctcactgtgataaattccttcgtctgtccttgcagcttatttcaaggtatacaacatggctttcatctggtttaacggcacgtaaagcttctgacgggagcccgaattcacctgcagatgctgaatgggcactgtctatacctatagaagatttcatatatataatgcatgatgtgcatgctgtaattggcgagctttcagaatcaggcagcttcattggacatgtgaatcagttactagggtcatgccccattgaagtatttaatcttgtgaaacaaagtatactgcaagctgttgaacctttaaaggaacggttgcctgcaataatcaatgttatgattggaatcatagttaagaagtctaacgaggacttgaagcacctgaaaggaataacagcgacatataggatgacgagtaaacttccagtcaggcattctccatatgtatcagggattttacatccgttgaaggtgtttcttgaaggggaccgaatacgctatctatcagaagatgataaaactaagttgtgtcgtgggtctacagataagattactgcaatttactatgacttggtctctgaagttgtcactgtggcaaggaaaaccgagtcttcgttgcaaagactgcgccaaggtgcacaaaggcgagtaggagctagtacagatgcctcagataacatcatatctgatacagacaagatctgtatgcagctatttcttgatattcaggagtacgcacgaaaccttcgtgcgataggaatagacgcgagagagattgattcctacagagctctatggcagtgtgttgccccaaaagacagacaagagaacattcagttttgatgtaaagaacactgtcagtacatatagagttgtctgcccgtagatctctcaaacatgtaggcgtatctgatgttgtccttttcggtttgaagtacttattatggatgcatacgtagagtagatagagagctggattttggtacacattttattgttaggatggatggtcacctccagatataatccagaactggagaacgtgtaccagtatatgattaaattttcatgtgaaatactaggatactgttgaaaatcgtgtgtcctcaagttgtcacgagcgtgaatcttagctctggctagttgtgaaattgattggtctctactgcagggttccctgcatgtctacatgatgttcatgtgtttgttcttaagccctgaccccattggcattacctcttgttactctcgtgcacaacagaacgtgtaattccagatggtggattactgtttttggttgctaaaattgatagctcgtaataaaataaaataaaaa

SEQ ID NO: 125436 - DNA, 1418 bp, Zea Mays
ttttattttcttccggcttggtttgacaacatatgtggctataaacaagcataaagtggaccttgacatgatcttttggtattgcattatttttgcaggagtacgcacgaaaccttcgtgcgataggaatagacgcgagagagattgattcctacagagctctatggcagtgtgttgccccaaaagacagacaagagaacattcagttttgatgtaaagaacactgtcagtacatatagagttgtctgcccgtagatctctcaaacatgtaggcgtatctgatgttgtccttttcggtttgaagtacttattatggatgcatacgtagagtagatagagagctggattttggtacacattttattgttaggatggatggtcacctccagatataatccagaactggagaacgtgtaccagtatatgattaaattttcatgtgaaatactaggatactgttgaaaatcgtgtgtcctcaagttgtcacgagcgtgaatcttagctctggctagttgtgaaattgattggtctctactgcagggttccctgcatgtctacatgatgttcatgtgtttgttcttaagccctgaccccattggcattacctcttgttactctcgtgcacaacagaacgtgtaattccagatggtggattactgtttttggttgctaaaattgatagctcgtaataaaataaaataaaaatcccagcgatttcaggattcttgtgagggaggatgttgatttaaggattctattctatggagaaacaaaccgcatgttgcaaaaacagctcaaactactgaacctcagcttctcaaagtcaagttctggcacgtcctgctaccacacagcatcacaacagggagaacacgatgggactacagctcatgtgaaaatgatacgatcggcactggttcatccaaatcttcaacggcacctatcagctgctgaaccagcagaagcatcagcaaccatgcaaggaagcatcagttcctgaaccaactgaagcatgagcaagcctgcaaggaagcagcagaacagtgaattcaacacggtcctataagaaaaggcgtttctttcaccatggtcaaattctagaataaaacaatggatagtcatagctacaatagcactaaaattttactgctaacaaagggtctatcatcagtatactaaacattgttgtgttccagttaagaacacactgctgaagtaagcatggggcaatgaaggctaatgccctgtttgtttggcttccaccgactaaattttagtatctatcacatcaaatgtttgaatgctagttagaagcattaaattacaaaactaattactaaagacgaatatattaaatctaattagttcatgattcgctcacatgatgcttaataaatttgtctagtatttagttgtgt

SEQ ID NO: 125437 - DNA, 1493 bp, Zea Mays
cgagcgctctctcactctcactctcactctcactctcacttccacactcctactcctccccgcccccgtcgccttccgccgccgtcttttgcgctaacgcttcgcctttcgatcccctttctgacttcttatagcatcatcccaagtcctcgcccggactccgcagattctctggttgctacgagttcttcgcctggtttttgggcaaggccaaaatttctgatttttttccaccgccgcaaacccctttgctgtgccataccgccattccattcctaagctgggcgtgggcgggtgaagaaaggaagcgaggccggctgtttcgctgaaaccccgccgcctttttttccttttcttttctggacctgattgaagaaccgtagcagattaggggagggaggagcggcggcggccggtcggtcggtcagtatgattcacctgctgttcctcgtgctgttcgcggagggcgcggtagcgctgctcctcatggtgaaggtcgggccgctgcgggagctggcgatgcgcgtcgtggaccaggtgaagacgggcaagggcccggcaaccgtcaagacgctggcatgcacgctctcggtcatcctcatgtccaacgtcgccagcatcctcaagatccagaatcgtgggctcaagctcggcaccgtcagccccatggaccaggtgctctggagaacgcacctcctcgaggcatccctcatcggatacacgctattccttgcatttgtaatcgaccggctgcaccactacctccagaagctgatgacgttgaggaaaacatccagcacgtccagggaggaggtcgagaaacttcagatggagaaccggtcgctccgcgaaaaggaggagaaatcctccggtgaaacgaagaggcttcagcgagaggttgtgaggctgaacgagagcatgaagaagctgaagtccgaggccaaggagcatgagcggaaggcatcggtagcggaggcccatgtcaatgcgctgcagaagcagtcggaggagctgctcctggagtacgaccggttgctggaagacaaccagatcctgcagacgcagcttcttagcagaggctaagctatgagctggtacatgctgcagcttcagttgtttgttagcaaggttcttaccagatggttctgagtgatgacatgcagagcggttcttggcgttcctgacttaattatgatcttgttgatgtctggatgcagcgtgtactttagactttcatgtttcttcctttctggatggatgtaggtaggtacatgatgtaagagccaatggatggattgtaggtacatgatgtaagagccaatgaattgtgatttaattatagaaggtcagactagtgcagtggcgagagctgtgtcgttagatcaggcctagtgcagttgtgagagctgtcattgaccatgctatgtcgtcggtttgaagcagcattttcttatagattgcctcagtttattcttcttttctagacttcattc

SEQ ID NO: 125438 - DNA, 838 bp, Zea Mays
accctttctttattctcttcactcaaaagcggctaggcgacggggcttgccctttccccgccccaagggtacacggtcgccgccacctgccctaggccgcaggagggagcgttcgccgccccgccctccgtctcccgtcgcctcgccccgcgctccgtctgccgcccctctccgtttattgactgccaagtcagctgcgggtttatctactttttatctaggagaaatgtctgagcatctctttgaggacaccttcgtcgtcactagactcgaccctgatggcaaaaagtttgatagagtttctcgtgttgaagctcgcagtgagcagttagatatgtatatgcagctagatgttgccacagatgtttatcctatgcatgctggcgagaaatttaacatggttatagcgcctactctgaatttggatggcaccccagatactggctactatactcaggctggcagaaaaactctggcagacaattatgagtacgtcatgcaagggaagctttacaaaatctcagaagacacatcatccagccaaaacgctaaagtggagatgtatgcatcgttcggcgggcttcttatgctgctcaggggtgacccttccactgccgctagctttgagcttgatcagaggctctttctgctcatccgcaaggtgtaaaactgtggttgctgaccacttaggtgtttgccttgctcgccacttatttaatttccatccgtgggtgaagctgttatatactgttgtaagtactgttttctgtatcgccatggatttatggtaacgagttcatgtttcttgctaaaaagattgctccagcagattccccta

SEQ ID NO: 125439 - DNA, 818 bp, Zea Mays
accctttctttattctcttcactcaaaagcggctaggcgacggggcttgccctttccccgccccaagggtacacggtcgccgccacctgccctaggccgcaggagggagcgttcgccgccccgccctccgtctcccgtcgcctcgccccgcgctccgtctgccgcccctctccgctgcgggtttatctactttttatctaggagaaatgtctgagcatctctttgaggacaccttcgtcgtcactagactcgaccctgatggcaaaaagtttgatagagtttctcgtgttgaagctcgcagtgagcagttagatatgtatatgcagctagatgttgccacagatgtttatcctatgcatgctggcgagaaatttaacatggttatagcgcctactctgaatttggatggcaccccagatactggctactatactcaggctggcagaaaaactctggcagacaattatgagtacgtcatgcaagggaagctttacaaaatctcagaagacacatcatccagccaaaacgctaaagtggagatgtatgcatcgttcggcgggcttcttatgctgctcaggggtgacccttccactgccgctagctttgagcttgatcagaggctctttctgctcatccgcaaggtgtaaaactgtggttgctgaccacttaggtgtttgccttgctcgccacttatttaatttccatccgtgggtgaagctgttatatactgttgtaagtactgttttctgtatcgccatggatttatggtaacgagttcatgtttcttgctaaaaagattgctccagcagattccccta

SEQ ID NO: 125440 - DNA, 806 bp, Zea Mays
accctttctttattctcttcactcaaaagcggctaggcgacggggcttgccctttccccgccccaagggtacacggtcgccgccacctgccctaggccgcaggagggagcgttcgccgccccgccctccgtctcccgtcgcctcgccccgcgctccgtctgccgcccctctccggagaaatgtctgagcatctctttgaggacaccttcgtcgtcactagactcgaccctgatggcaaaaagtttgatagagtttctcgtgttgaagctcgcagtgagcagttagatatgtatatgcagctagatgttgccacagatgtttatcctatgcatgctggcgagaaatttaacatggttatagcgcctactctgaatttggatggcaccccagatactggctactatactcaggctggcagaaaaactctggcagacaattatgagtacgtcatgcaagggaagctttacaaaatctcagaagacacatcatccagccaaaacgctaaagtggagatgtatgcatcgttcggcgggcttcttatgctgctcaggggtgacccttccactgccgctagctttgagcttgatcagaggctctttctgctcatccgcaaggtgtaaaactgtggttgctgaccacttaggtgtttgccttgctcgccacttatttaatttccatccgtgggtgaagctgttatatactgttgtaagtactgttttctgtatcgccatggatttatggtaacgagttcatgtttcttgctaaaaagattgctccagcagattcccctatcttatttgtagaaa

SEQ ID NO: 125441 - DNA, 595 bp, Zea Mays
ccgccccgccctccgtctcccgtcgcctcgccccgagaaatgtctgagcatctctttgaggacaccttcgtcgtcactagactcgaccctgatggcaaaaagtttgatagagtttctcgtgttgaagctcgcagtgagcagttagatatgtatatgcagctagatgttgccacagatgtttatcctatgcatgctggcgagaaatttaacatggttatagcgcctactctgaatttggatggcaccccagatactggctactatactcaggctggcagaaaaactctggcagacaattatgagtacgtcatgcaagggaagctttacaaaatctcagaagacacatcatccagccaaaacgctaaagtggagatgtatgcatcgttcggcgggcttcttatgctgctcaggggtgacccttccactgccgctagctttgagcttgatcagaggctctttctgctcatccgcaaggtgtaaaactgtggttgctgaccacttaggtgtttgccttgctcgccacttatttaatttccatccgtgggtgaagctgttatatactgttgtaagtactgttttctgtatcgccatggat

SEQ ID NO: 125442 - DNA, 1406 bp, Zea Mays
aacgaagaaccgaatgcccagtcctgaatcacgtcttcacccgtgctcgtgcgctgcgcccatcccttccgcctccacgctccccacgtgcaccgtgcacagcaccacacagccaggtccccatggcggcggcggcggcggttgcgtctgcgacgacggcggaagacgaagcgcgcctgctgcgcctggaggagcaggcggagcacggcggcggcggcgcctgggaatacctctgcctcgcccgccggctccgcgcccgccgccccgctcacgtcctccgcgtcggcctcgccctcctcaacaacgcctccgcgcgctccggccttgcctcagaacagtggacgctctacgagcaggtggccacggcggccatggattgccagcgtctcgatgtggcaaaggactgtattggagtcctttcaaaacaatttcctgggagcacacgggttgcccggctagaagctcgtctgtttgaagcaaaaggtgaatgggctgaagctgaaagagcctacgcgctaatcctggaaaacaatccatttgaccagattgtccacaagaggaaaattgctatcgcaaaagcacaaggtggtatgtcgatagtgattgattatctcaataagtatctggaattgtttatggctgatcatgatgcttggagagaacttgctgaaacatacagttccttacaaatgtacaagcaagctgccttttgttatgaggagctaatattagcccaaccaactattccactatatcatatagcctacgctgaggttctgtacactatgggtggcttggaaaatctccaaacagctaagaagtattatgcatcaacaatccagttaactggaggcaagaatacaagagccctctttggtgtatgtctgtgtacttcggcaatcaatcagttgacgaaaggaaggaataaagaggaagaggactcggagctgcagagcttggctgcagaggtactgctgaagaattacaagcagcaggctccatcaaaggcgccccttatcagcagcatgttgaagaacatgaaactcagctgataccaaccagctccacacattcagagtggcctgatttgatagatagttaagttaaattgatgtggcttaatatatgcttgtttttttatatataaaaaaattgtggcaccaacattgtgcaaggcttaaaagtagatgctcccaaggccatgggttgtacaacacctgcttgcttacctcgaaatatgcatggcttcttcagtggatgttctactatatagatcaacaaacccccgattgtacttgagcacaaacaaaattttgaatcagtcgctggtgaagttgtacgtgttgattttcattggtacctgactattgtggtcttttagatgaacccttggcttggaacgtttt

SEQ ID NO: 125443 - DNA, 945 bp, Zea Mays
atgccgcgcagcgacggcgtgcatcagccgtcctgcgtcacggtgccgctgggcaagtcggtgcggcgcgcgctccgggccgccatcggcatgccgaagaagaagaagaagaatccgccgccgccgccgcttggcgtgtcaatggagctgagcagctcgtcgtcggtggcggcgaggaaggaggcggtggtgcgagtggtgatgcggggcggcgtggtggaggtgtacccgagcgttgtgctggcctgcaccgtcatccggaaccacccgccggggctctgcctcgcgcacccggacgtgttccgcaacccgcacggcgccgtcgtccgcccgctcgagccgctcttcccgggccagaagttcctgctgctccccgagagcaccgtcgtcaggctgaagcagaagatccccgagagctcaatcggcgccttcgctgacgacgacgtggaggaggacgacgacgacgaagaagaagaagaaggcgacggcgcggcggtggtgtcgtcgtcggaaggcgaggcggccgcggagggtgacggtactactagtactactacctccatgccgtcgtgcagcgcgagggaatacttcgtgtccagggaccggtggtccgagtgccgctccagggagctagtgccagtggaacaggggctcgccatggagccgaggccgagcaaagacgacgatgagccggccgagagaaagcaggagaagacaaggacaaagaaggggaacaagaagaagaggcggaaagggaggcggcggagagaccgtagtagcccggtgccccagctgccgatggagctcatcaggggagtcgggaggacgtgggagcccagcctgccgtcggtggaggaggagcaggaggaggccgccgccgtcgtaattgtttctcctctccaccctccgccgtcggatgccacagcccacaacacaagatcatga

SEQ ID NO: 125444 - DNA, 1344 bp, Zea Mays
gtcgttctcacatgggcttcgatgccgctgtgtatgggtggggcagaggttcgggggttttctcgacctgtgtgagaaggtcttcttcttaatacaatgcccgggggctgtcttaccccccacaggtcaagtgtactacatcttattgaaaccctatttaaaatagactatacttacaaaagctcacctttcttggaagagctctcacttaagaattgtggtagagtgcactgatgttataaagtgcaatgttataccacacaatggattttgcttacaactctgagtttgtaaaacatctatttgctctaccaggaaaggatacaacttgaaactgctcgcttatacaagttatctggtgttgacccacttgcaggatgcttgcctacccttgtgacaataccagtttggattggtctatacagagctctctcaaatgtagctaatgagggacttctgactgaaggctttttttggataccttctctggctggtcctacaacaattgctgctcgacaaaacggccaggggatatcatggctttttccttttactgatggccatccacctcttggctggtcagatactttggcatacattgtgttaccagttcttcttgtcatttcacagtacatatctactcaagtaatgcagccaccacagagcaatgatcctaaccaacaaggtgctcaggctgtaacaaagttcttaccattgctaattggttattttgctctttccgtgccttcaggactaaggctgtactggcttacaaataatatcctcagtactgcacaacaagtgtggcttcaaaagcttggaggtgcaaaaaatcctgtcaaagaatatattgacaagctttcaagagaagaaacgactactgttcagaagaatgattctactgttcagagtgaacctctctctaaacatagtaaaccccagcctagccaagagccgaaaccaagtgggccacaacgtggtgaaagatttaggaaactgaaggaggaagaatctatgagaaaagaggttatgggacaaggtaaacaatcagaacagtcaagttctgaatctagagtcacggatggaacacaaaattcggatgtgtcttctggagaccaaaaagaccaacaggggtctcatgaaaatggaccggttgtagctagtataaatggtggagtcaaccatattcgaaatgaaaagactcagaacttatcctcagaaaaggtatgcctgttgtttctgttaacatgtcttccagttccagcatgaaaacacaaaaaggatgttcttccatcgaaggactaaaagtttactagtaaattgctcgcgccgcgcgcgagtcta

SEQ ID NO: 125445 - DNA, 1645 bp, Zea Mays
gtcgttctcacatgggcttcgatgccgctgtgtatgggtggggcagaggttcgggggttttctcgacctgtgtgagaaggtcttcttcttaatacaatgcccgggggctgtcttaccccccacaggtcaagtgtactacatcttattgaaaccctatttaaaatagactatacttacaaaagctcacctttcttggaagagctctcacttaagaattgtggtagagtgcactgatgttataaagtgcaatgttataccacacaatggattttgcttacaactctgagtttgtaaaacatctatttgctctaccaggaaaggatacaacttgaaactgctcgcttatacaagttatctggtgttgacccacttgcaggatgcttgcctacccttgtgacaataccagtttggattggtctatacagagctctctcaaatgtagctaatgagggacttctgactgaaggctttttttggataccttctctggctggtcctacaacaattgctgctcgacaaaacggccaggggatatcatggctttttccttttactgatggccatccacctcttggctggtcagatactttggcatacattgtgttaccagttcttcttgtcatttcacagtacatatctactcaagtaatgcagccaccacagagcaatgatcctaaccaacaaggtgctcaggctgtaacaaagttcttaccattgctaattggttattttgctctttccgtgccttcaggactaaggctgtactggcttacaaataatatcctcagtactgcacaacaagtgtggcttcaaaagcttggaggtgcaaaaaatcctgtcaaagaatatattgacaagctttcaagagaagaaacgactactgttcagaagaatgattctactgttcagagtgaacctctctctaaacatagtaaaccccagcctagccaagagccgaaaccaagtgggccacaacgtggtgaaagatttaggaaactgaaggaggaagaatctatgagaaaagaggttatgggacaaggtaaacaatcagaacagtcaagttctgaatctagagtcacggatggaacacaaaattcggatgtgtcttctggagaccaaaaagaccaacaggggtctcatgaaaatggaccggttgtagctagtataaatggtggagtcaaccatattcgaaatgaaaagactcagaacttatcctcagaaaaggaagcagctgacgatcactcacctgatgtccacaaattaacggaccgagagaatggcaatgacgcggtatagagtggatgttagcgatctactgctctctgaagatcagtgagtatcgtatctgcttcatcgacgtatagctgggagatagtgaccaacagtttcacgaacagctactacaggagagttgagaatcaacacgaagaagatgcaaacaggaggcaaaattgtgcaaaccatggtctaggtctaggctcatttatttatttttgtggctgtgctttaggttatgtgaagcatatggcatatatatatatatatatatatatatatatatatatatatatatatattagtagataaatgtacacctggttttgaccgtgcaattcgatattttacctcatgtaaataaataaaa

SEQ ID NO: 125446 - DNA, 387 bp, Zea Mays
atgcttgcattctctgtgatgactctcagagtccgcattacttgttttgtggctctgttctccagatcctgcatgttaaattccacccctgcccctgcaacccgtcggctccgtcgtagcgcagtaccatgttttgtggcaccccttgaccgcttggggaggacaggagcagcaaggagctgtgaatgtgccattgttatcttagccatgaatgatcttcttctagattccatagaagataatggatccaatgaggagtcacatgaatccccaaaattctgcctggaactgtcatcaaaggctaccacctcatgcctgagtggaacagttgagtctgcgtcagccctcctcgctgttccattgtactctaataataatggcccctga

SEQ ID NO: 125447 - DNA, 252 bp, Zea Mays
atgaggcaaggtgacacgcttcggcattgctctctgcattcttcacaagatccaacaccgcaacagtacctacagatgatcttccagattacatatttacatggactggccgacatctcatgttgtttacatggactggcaacagaatgcgcctatgcaatgtacagaatgctgaactatcgctgtcgtctacgctctatgggagggtgtaacaggctcactggaaaactgctcagtatcagcactcaatag

SEQ ID NO: 125448 - DNA, 2333 bp, Zea Mays
agccggtccagcccacagtccacgaggacacgatccccgacctcatatcaggttcccctccccatcccggagagcaaaagcgcttctctcgctagcgagttcggcagtagaaaccctaaaaaaagacaccgccctccccttcgctagcggaaccgccctcccctcgccggggtaggggtttcgggggtagacgcccgccatggacgcgttccggaaacagctggacgtgctcatgggcgccaaccgcaacggcgacgtcgaggaggtgagccgcaactactacgaccgcgacgtctgccgcctcttcctcgccggtctctgcccacacgacctctttcagctcacgaaaatggatctcggtccttgttctaagattcactctcttcaactgcggaaagattatgaagaagcgaaagcaaagggaacagaaaattttgatagagaactcgaggatatgatagaaaggctcattgtggagtgtgacaggaaaattcagagggccctaaaacggcttgcagatgatgatgccaatgctgctattgcgatatcggtctctgaggttactctgacggatgacatactgcagctgtcaaaacagataaaggagaaaatggcagaagttgatgcctttgattttgaagggagaactgatgacaaaataaaggcccaggaagtagtggaagagctaagagctaaaagagctgatatgcaggctaccctcttgcttgatgcttttaacaaggacagagcttcattaactcagcctgctccacctcaagtggcagcagttccaccaccagctccacctgatgctcgtactcaagaaattatcaacgaaaagcttaagaaagctgaagagcttggtgaacaaggcatggttgatgaagctcaaaaagctttggaagaggcagaagctctgaaaaagctggcgccacgttcagagccaccttcagacccttcgaaatatactgctgctgatgttcgaattactgatcaaaaattacgcctctgtgacatatgtggagcatttctgagtgtatatgacaatgatcgacgtcttgctgaccattttggtgggaaattacacctaggctacatgctgattcgtgagaaacagaaagaacttcaggtgctgaatgtaatgtaccattttctgctttaaagagttactctgttttggcccttttggcatatgaattagtccatgttgcgtgattggaatctcatgcgatcatcttcatacccatggatacaacagtcactgtctgttggcaaatgtaagcataggagggtgcagaccatggtatgaaaaaaaacatgtttacttaattgtgacgaactgctcatgtgtctgcttagtattatgttgggcagaagccggaggtttcttttctactgcctgagccatattatgtagaccaggtgataaataatactggttaagttatcctgaaagctttgccaacatttgctgtaagtgacaacttgttctattttttatctgctacctccataagtttgcaagttaaactttgctgaagcagccttgcctgtaaagtatgactcccctttctcttggaacgttgtcgctgacttcatgtatggcaaaatatcatcatttctactgtcaataaataaaatacactatgccaccttgcaggagcagagaaataaaaggagaccgggcaaagctgaagatgatagacgatcaagagagcacagcaaggatcgcaacggccggtcgtccagggatagagaaccagaaaggagagacagggttgagtctcgagatggtagaagagattatgaaagggatcgtgatagacgtcatgatagggacaggcgccatgaccgtgatcgggatagggattatgaccgctcccgtggacatgattcaaggaggagagagcgttcacgctccagggagcgcagcaggcgccacgagagatactaaatgttacaccatgcctgacagatttaggagtactggcggcgtctgttcaagatatggtttgagcttgtgcttcgtatcttctgaagaccggtctacttgacgctaaattcgcatggagtgttaagcatttattaaacgcatctggaatcaaatgaagttgtacttgcgaacggcttcacttaaaattcgcgccatttctaatattgtaataagctgtgcttgaaccttagctgtctctgtgtactcgacgtaccactcgctcccacaaatagcttcgaacatcctgtacctgaaacatgacgctgtttggtggaggtggagctgtaagtgttcttttgcacaattcattataaaaatcccaaatctgagtactaggaaa

SEQ ID NO: 125449 - DNA, 1978 bp, Zea Mays
agccggtccagcccacagtccacgaggacacgatccccgacctcatatcaggttcccctccccatcccggagagcaaaagcgcttctctcgctagcgagttcggcagtagaaaccctaaaaaaagacaccgccctccccttcgctagcggaaccgccctcccctcgccggggtaggggtttcgggggtagacgcccgccatggacgcgttccggaaacagctggacgtgctcatgggcgccaaccgcaacggcgacgtcgaggaggtgagccgcaactactacgaccgcgacgtctgccgcctcttcctcgccggtctctgcccacacgacctctttcagctcacgaaaatggatctcggtccttgttctaagattcactctcttcaactgcggaaagattatgaagaagcgaaagcaaagggaacagaaaattttgatagagaactcgaggatatgatagaaaggctcattgtggagtgtgacaggaaaattcagagggccctaaaacggcttgcagatgatgatgccaatgctgctattgcgatatcggtctctgagacggatgacatactgcagctgtcaaaacagataaaggagaaaatggcagaagttgatgcctttgattttgaagggagaactgatgacaaaataaaggcccaggaagtagtggaagagctaagagctaaaagagctgatatgcaggctaccctcttgcttgatgcttttaacaaggacagagcttcattaactcagcctgctccacctcaagtggcagcagttccaccaccagctccacctgatgctcgtactcaagaaattatcaacgaaaagcttaagaaagctgaagagcttggtgaacaaggcatggttgatgaagctcaaaaagctttggaagaggcagaagctctgaaaaagctggcgccacgttcagagccaccttcagacccttcgaaatatactgctgctgatgttcgaattactgatcaaaaattacgcctctgtgacatatgtggagcatttctgagtgtatatgacaatgatcgacgtcttgctgaccattttggtgggaaattacacctaggctacatgctgattcgtgagaaacagaaagaacttcaggtgctgaatgtaatgtaccattttctgctttaaagagttactctgttttggcccttttggcatatgaattagtccatgttgcgtgattggaatctcatgcgatcatcttcatacccatggatacaacagtcactgtctgttggcaaatgtaagcataggagggtgcagaccatggagcagagaaataaaaggagaccgggcaaagctgaagatgatagacgatcaagagagcacagcaaggatcgcaacggccggtcgtccagggatagagaaccagaaaggagagacagggttgagtctcgagatggtagaagagattatgaaagggatcgtgatagacgtcatgatagggacaggcgccatgaccgtgatcgggatagggattatgaccgctcccgtggacatgattcaaggaggagagagcgttcacgctccagggagcgcagcaggcgccacgagagatactaaatgttacaccatgcctgacagatttaggagtactggcggcgtctgttcaagatatggtttgagcttgtgcttcgtatcttctgaagaccggtctacttgacgctaaattcgcatggagtgttaagcatttattaaacgcatctggaatcaaatgaagttgtacttgcgaacggcttcacttaaaattcgcgccatttctaatattgtaataagctgtgcttgaaccttagctgtctctgtgtactcgacgtaccactcgctcccacaaatagcttcgaacatcctgtacctgaaacatgacgctgtttggtggaggtggagctgtaagtgttcttttgcacaattcattataaaaatcccaaatctgagtactaggaaatttttagtgag

SEQ ID NO: 125450 - DNA, 1813 bp, Zea Mays
agccggtccagcccacagtccacgaggacacgatccccgacctcatatcaggttcccctccccatcccggagagcaaaagcgcttctctcgctagcgagttcggcagtagaaaccctaaaaaaagacaccgccctccccttcgctagcggaaccgccctcccctcgccggggtaggggtttcgggggtagacgcccgccatggacgcgttccggaaacagctggacgtgctcatgggcgccaaccgcaacggcgacgtcgaggaggtgagccgcaactactacgaccgcgacgtctgccgcctcttcctcgccggtctctgcccacacgacctctttcagctcacgaaaatggatctcggtccttgttctaagattcactctcttcaactgcggaaagattatgaagaagcgaaagcaaagggaacagaaaattttgatagagaactcgaggatatgatagaaaggctcattgtggagtgtgacaggaaaattcagagggccctaaaacggcttgcagatgatgatgccaatgctgctattgcgatatcggtctctgaggttactctgacggatgacatactgcagctgtcaaaacagataaaggagaaaatggcagaagttgatgcctttgattttgaagggagaactgatgacaaaataaaggcccaggaagtagtggaagagctaagagctaaaagagctgatatgcaggctaccctcttgcttgatgcttttaacaaggacagagcttcattaactcagcctgctccacctcaagtggcagcagttccaccaccagctccacctgatgctcgtactcaagaaattatcaacgaaaagcttaagaaagctgaagagcttggtgaacaaggcatggttgatgaagctcaaaaagctttggaagaggcagaagctctgaaaaagctggcgccacgttcagagccaccttcagacccttcgaaatatactgctgctgatgttcgaattactgatcaaaaattacgcctctgtgacatatgtggagcatttctgagtgtatatgacaatgatcgacgtcttgctgaccattttggtgggaaattacacctaggctacatgctgattcgtgagaaacagaaagaacttcaggagcagagaaataaaaggagaccgggcaaagctgaagatgatagacgatcaagagagcacagcaaggatcgcaacggccggtcgtccagggatagagaaccagaaaggagagacagggttgagtctcgagatggtagaagagattatgaaagggatcgtgatagacgtcatgatagggacaggcgccatgaccgtgatcgggatagggattatgaccgctcccgtggacatgattcaaggaggagagagcgttcacgctccagggagcgcagcaggcgccacgagagatactaaatgttacaccatgcctgacagatttaggagtactggcggcgtctgttcaagatatggtttgagcttgtgcttcgtatcttctgaagaccggtctacttgacgctaaattcgcatggagtgttaagcatttattaaacgcatctggaatcaaatgaagttgtacttgcgaacggcttcacttaaaattcgcgccatttctaatattgtaataagctgtgcttgaaccttagctgtctctgtgtactcgacgtaccactcgctcccacaaatagcttcgaacatcctgtacctgaaacatgacgctgtttggtggaggtggagctgtaagtgttcttttgcacaattcattataaaaatcccaaatctgagtactaggaaatttttagtgag

SEQ ID NO: 125451 - DNA, 1804 bp, Zea Mays
agccggtccagcccacagtccacgaggacacgatccccgacctcatatcaggttcccctccccatcccggagagcaaaagcgcttctctcgctagcgagttcggcagtagaaaccctaaaaaaagacaccgccctccccttcgctagcggaaccgccctcccctcgccggggtaggggtttcgggggtagacgcccgccatggacgcgttccggaaacagctggacgtgctcatgggcgccaaccgcaacggcgacgtcgaggaggtgagccgcaactactacgaccgcgacgtctgccgcctcttcctcgccggtctctgcccacacgacctctttcagctcacgaaaatggatctcggtccttgttctaagattcactctcttcaactgcggaaagattatgaagaagcgaaagcaaagggaacagaaaattttgatagagaactcgaggatatgatagaaaggctcattgtggagtgtgacaggaaaattcagagggccctaaaacggcttgcagatgatgatgccaatgctgctattgcgatatcggtctctgagacggatgacatactgcagctgtcaaaacagataaaggagaaaatggcagaagttgatgcctttgattttgaagggagaactgatgacaaaataaaggcccaggaagtagtggaagagctaagagctaaaagagctgatatgcaggctaccctcttgcttgatgcttttaacaaggacagagcttcattaactcagcctgctccacctcaagtggcagcagttccaccaccagctccacctgatgctcgtactcaagaaattatcaacgaaaagcttaagaaagctgaagagcttggtgaacaaggcatggttgatgaagctcaaaaagctttggaagaggcagaagctctgaaaaagctggcgccacgttcagagccaccttcagacccttcgaaatatactgctgctgatgttcgaattactgatcaaaaattacgcctctgtgacatatgtggagcatttctgagtgtatatgacaatgatcgacgtcttgctgaccattttggtgggaaattacacctaggctacatgctgattcgtgagaaacagaaagaacttcaggagcagagaaataaaaggagaccgggcaaagctgaagatgatagacgatcaagagagcacagcaaggatcgcaacggccggtcgtccagggatagagaaccagaaaggagagacagggttgagtctcgagatggtagaagagattatgaaagggatcgtgatagacgtcatgatagggacaggcgccatgaccgtgatcgggatagggattatgaccgctcccgtggacatgattcaaggaggagagagcgttcacgctccagggagcgcagcaggcgccacgagagatactaaatgttacaccatgcctgacagatttaggagtactggcggcgtctgttcaagatatggtttgagcttgtgcttcgtatcttctgaagaccggtctacttgacgctaaattcgcatggagtgttaagcatttattaaacgcatctggaatcaaatgaagttgtacttgcgaacggcttcacttaaaattcgcgccatttctaatattgtaataagctgtgcttgaaccttagctgtctctgtgtactcgacgtaccactcgctcccacaaatagcttcgaacatcctgtacctgaaacatgacgctgtttggtggaggtggagctgtaagtgttcttttgcacaattcattataaaaatcccaaatctgagtactaggaaatttttagtgag

SEQ ID NO: 125452 - DNA, 2521 bp, Zea Mays
ctctcgctagcgagttcggcagtagaaaccctaaaaaaagacaccgccctccccttcgctagcggaaccgccctcccctcgccggggtaggggtttcgggggtagacgcccgccatggacgcgttccggaaacagctggacgtgctcatgggcgccaaccgcaacggcgacgtcgaggaggtgagccgcaactactacgaccgcgacgtctgccgcctcttcctcgccggtctctgcccacacgacctctttcagctcacgaaaatggatctcggtccttgttctaagattcactctcttcaactgcggaaagattatgaagaagcgaaagcaaagggaacagaaaattttgatagagaactcgaggatatgatagaaaggctcattgtggagtgtgacaggaaaattcagagggccctaaaacggcttgcagatgatgatgccaatgctgctattgcgatatcggtctctgaggttactctgacggatgacatactgcagctgtcaaaacagataaaggagaaaatggcagaagttgatgcctttgattttgaagggagaactgatgacaaaataaaggcccaggaagtagtggaagagctaagagctaaaagagctgatatgcaggctaccctcttgcttgatgcttttaacaaggacagagcttcattaactcagcctgctccacctcaagtggcagcagttccaccaccagctccacctgatgctcgtactcaagaaattatcaacgaaaagcttaagaaagctgaagagcttggtgaacaaggcatggttgatgaagctcaaaaagctttggaagaggcagaagctctgaaaaagctggcgccacgttcagagccaccttcagacccttcgaaatatactgctgctgatgttcgaattactgatcaaaaattacgcctctgtgacatatgtggagcatttctgagtgtatatgacaatgatcgacgtcttgctgaccattttggtgggaaattacacctaggctacatgctgattcgtgagaaacagaaagaacttcaggtaaattcctgcatgctcaagcccgaaatacaagtaaggtactggagatttatgaaacagattaatagttccagggtttccaaactgtaaatacataaatgaaacaaaatttacattctgtttgcccatcatcagaatatgataatcttgatttgttcccttatccccaatctaaatctatcaaggtgcaatttatcaggtgctgaatgtaatgtaccattttctgctttaaagagttactctgttttggcccttttggcatatgtgagttttcttatctcaagagcctcaaggttctcaccttccctgtatattatttgatttctcacattgccgggcactatggttattacgatagtcattacaggaattagtccatgttgcgtgattggaatctcatgcgatcatcttcatacccatggatacaacagtcactgtctgttggcaaatgtaagcataggagggtgcagaccatggtatgaaaaaaaacatgtttacttaattgtgacgaactgctcatgtgtctgcttagtattatgttgggcagaagccggaggtttcttttctactgcctgagccatattatgtagaccaggtgataaataatactggttaagttatcctgaaagctttgccaacatttgctgtaagtgacaacttgttctattttttatctgctacctccataagtttgcaagttaaactttgctgaagcagccttgcctgtaaagtatgactcccctttctcttggaacgttgtcgctgacttcatgtatggcaaaatatcatcatttctactgtcaataaataaaatacactatgccaccttgcaggagcagagaaataaaaggagaccgggcaaagctgaagatgatagacgatcaagagagcacagcaaggatcgcaacggccggtcgtccagggatagagaaccagaaaggagagacagggttgagtctcgagatggtagaagagattatgaaagggatcgtgatagacgtcatgatagggacaggcgccatgaccgtgatcgggatagggattatgaccgctcccgtggacatgattcaaggaggagagagcgttcacgctccagggagcgcagcagatttaggagtactggcggcgtctgttcaagatatggtttgagcttgtgcttcgtatcttctgaagaccggtctacttgacgctaaattcgcatggagtgttaagcatttattaaacgcatctggaatcaaatgaagttgtacttgcgaacggcttcacttaaaattcgcgccatttctaatattgtaataagctgtgcttgaaccttagctgtctctgtgtactcgacgtaccactcgctcccacaaatagcttcgaacatcctgtacctgaaacatgacgctgtttggtggaggtggagctgtaagtgttcttttgcacaattcattataaaaatcccaaatctgagtactaggaaatttttagtgag

SEQ ID NO: 125453 - DNA, 264 bp, Zea Mays
gcagcatatgatgttagtgttgtgcaatgaaatgttacatttttgtggaatgaatgatggattgctttataatgatgcttgttgttatcttattataataatggtttgtaaatttgtaagttaatacatatttggttatttaatttaatatcaaaagttagaagctagtatgatgatgcgataataatattataaaggttttgggtttgtagtgttaaatatttaaaatatattttttgattatatatatttatgtacatagat

SEQ ID NO: 125454 - DNA, 1051 bp, Zea Mays
ccatttatccgatcggtaatgggtgctaaatatttcttcataacaagtcaaggtttttatcagattctagtaaaaataaataaacatagaacatgtttctaatccgtttctatcgttaaattttaatagcgtaaaatttagagttcaccctactacccatcaatccgtgctgtcaaaccaaacactcctccaagcgcacgcgcgcacagtaagaccgtcggtgggccagggcccaccgtttccagttcctcttgcgtgctgggcctgcccacggcccacctctggctgctcccactgcgcagttccagttccagtgtgcgaaccgaggtcccccaatcccccaaacatttcccccaaacatttttttgtcgaatctgtcgtgagatcctccccgacgagatggcggggaagggagccaaggccacggccgccaagtcggcggacaaggacaaggggaagaaggccggcggccccgtctcgcgctcctcccgcgccgcacctcaggagaattcaactccgaagaaagatgtttatcaattgttcgctgagaaggttagggataacaaacagctggaatcaagatgggcaatcatgcaagaaacccgtgtggagtattttcgtggaaaagatttcaatgccttcatcaagaattatccagaagtcagggaaattttggggccagataaggatttagaagtggaagacattgttaacactttgttgaccaagaaccttgtgataaggtgtgaccgagttatgaaaactgtgaggcctggcaagaaaaagttatcatcatggcctgctcacttggagatacataatgaacaagtgtttactgaaaatgatgggttttatgcttggatgtttctgaaaaggcggaccttgtggcagacagttctttcatttgtttggcctctttttgcactggcagtctgcttatttccagtttacccataccaatgcaagattgttgtactgtactcatgtgctggagctctacttttcattgtctccattcttttgcgtaaaatttctccctctctcccaactg

SEQ ID NO: 125455 - DNA, 330 bp, Zea Mays
ctgtggtgtatcacagaagaattgcttagcacatgtgcaattggtattttatatttggtttggatcactattctgaagccaggggaagaaataataagtttgtgagcttactgtggtatgccattgttgataggaaatattgcccattatagtaataatactgttcttcgcttcttgcaataaactagttaccaagacatgggtgttgaggatttaccaatttttctctgggtttatttccatttgctacgaaacatagggtgttaggatttaccagattttcttgaatttaagctgatttgaaagttgaaaccaggtatccattttttt

SEQ ID NO: 125456 - DNA, 2144 bp, Zea Mays
atggccgcctcggcattggcctcccgcgcgctgcggcctccgcacggccgccaccctcccgccccttcgccgcgtccgcgtccgcgctcggcaaccgccgccgctccaaggacgcgctgccgcgcggtggctgcggacgagcgccccgccgaccccgcgttccccgagcgccagaaccgcgggatttccgggcttcgcctcctcatcgcgtcgcagttgtcgaccagggcggtggagaggccggaggcggacgtggttgtgataggcagcgggctcggcgggctgtgctgcgccggcctcctggcgaggtacggccaggacgtgctggtgctcgagagccatgaccgcccgggaggcgccgcgcactcgttcgatatcaagggattcaacttcgattcagggccatccttgttctccggattccagtccagaggcccccaggcaaatccacttgctcaggtccttgatgcattaggcgaatcagtcccttgtgcgtcttatgactcttggatggtttatgtacctgaaggacaattcctctcacggataggaccaactgaattcctcaaggaccttgagatgtttgttggtgttgacgctgtccaggagtggaaaaaacttcttgatgcagttattcctatgtctgcagctgcaatggctttgcctccgctttccattcgaggtgatctgggcattatatctacagctgttggtagatacactccttcgttgttgaaatcattcatacaaatgggaccgcaaggagctctgggcgctacgaaacttctacgtccattcaaagaaattgttgattcgctggagctgaaaaatccatttgttcgtaactggatcgatcttctgtgctttctacttgctggagttaaatctgatggtgctctttctgcagaaatggtttatatgtttgcagaatggtacaaaccaggatgcttgcttgagtaccctctgggtggaactggagcaataatagatgcccttgtgagcggtattgaaaaatttggtggcagacttgctcttcgttctcatgttgaaaagatcttaatagagaatggtcgagcagttggtgtcaagctacaaagtggacaagttatccgtgcaaagaaagcggttgttagcaatgcatctatgtgggacactttggatctgttaccacccgatgctgtcccaaaatcatatgaagatagagtgaaagcaactccacaatgtgaatcgtttatgcatctccaccttggttttgatgcagagaatgctagagaggaccttgggatccatcacattgtggttgatgattggaacaaaggagttgatggtgaacaaaatgttgttttgatatccgttcccagtgttcttagcaaggacctggcaccgcccggaaagcacattcttcatgcatatactccagggacagaacctttcagtttgtgggagggactggacaggaaaagtgcagaatatcgaagactgaaggaagaacgttctgaggtgatgtggaaagctgtggagcttgctctcggcccaaaatttagccgcgaaaaatgcgacgtgaaattggtcgggacaccgctaacgcacaggagatttctccgaaggaacaggggaacctatggtccagccataaaagccggagaagccactttccctgggcaagcaacaccgatcccccagctcttttgctgcggtgactcgacctttccagggatcggagtgccggcagttgcggccagcggcgcgattgtggcgaacacgctggttccggtgtcgcagcattcagagctccttgacgctgttggaatctgagtggcagatacgtccgtcggtcctgaacgataatcaaagattttcccactgctgttggaaaaagatcgtatggctgaatggagaagaagacgacgacgacgaccgatacagtagagttttctagtcagaacggagactgggaaaatatgttgtacagtatattatttactacgactgcatgaagcttgtgctgcttctgacaaattggtcgcctcgttcgcctgcatgctccttgtattgttctaccgaaagctctgtggcgcatgcaggccttttgtcggacattttttttttctggtatacggaggaaggaccatgtgcttgtttgt

SEQ ID NO: 125457 - DNA, 1072 bp, Zea Mays
cactgagttctctcttctctgactactatatattcatccaagcagatctcgtcgcgctggtggagatggccgaagccgcggagtgcgaggaggagcaggacctgtttgccgatgcgaatgacgacgtagggatcgctggatcggaggtcgcggacggcgaggttcacccccctcaccacgcgcagcttcagcagcccgacgagatggtccagcatggtgatttccctcttcttcaccactgagttctctcttctctgactactatatattcatccatcagaaacattagagaaacaaattgttgggtattttcctgacgtaactgaggtctttattgaagtcgcagaagaagaaaagcagaaagttctttactggcacaacgagaagctgacagttgcttttgcattacttagttcagaacctaatactgtgataagaattgtgaaaaacttgaggatgtgtttagactgccataacacaatcaaattgatttcaaggttgtatggaagggaggttgttgtgagggacagaacacgcttccatcattttagacatggattctgctcttgtaaagactattggtaactccttatgcatcaaccacataacgcagctgcaatctgtagcctaatttttgagctctgagtgatcacctgataggcgagcatgagttctcgctaaaatgtagcattgagtattgactgcagttcagtaagtaaattaaagcatgatagtattgttgatccagtgaacccttcatcctatattctctttgagctaatcttcttgcaccttgatgtaaaccttgacatatctgatggttctgcttgcacaacatttattcagagaaaggtaataatatattctgctacgtgttataaaaaatatgttctacctttgttagagtattgttttgagaatattctgattcaaattattgaatgttgaaatatctattggtggtagagttataagtgtcattcaaattaagaagaagacctttgtttatatttgatcaaagaaccttgtgtggattgtaactagcaatagttgcattcgattaatatctctt

SEQ ID NO: 125458 - DNA, 242 bp, Zea Mays
aagaaatcctaaaatttgctttaatttttggaaaggtaatcatttttggaagggagcagcttgatgagccattacctccagccatggatgccctactaagagtatatcagcaaacaattaacaatgactctttagatgtgggacccgataatgtgattgtgaggcagattcttgcaccaagtgagcaggcaacaagccttattggcgagcatggtgtgatgattaattcaatcatggaagct

SEQ ID NO: 125459 - DNA, 1713 bp, Zea Mays
ttgtaggaaatgaacttccatcagacttgatagacacactactaaagtggatcccaagcaatgatgaggagcttaggcttcgactgtcctcccgtagcaccgccacaccgcacgcgtccgtggcggcgtccgcctcggcgccggtctcgcacaccgctccctggctggggaagttcatcgcctccgagcccttcaacgtggggggattcgactgggcgatctacttctaccccgatgggaagagcggcgaggatggtatgttgaagtgacatgctctgaactgctcttggcttcaggtatgcttatccatggtggaaagaaaaagtgattgactcagacttgaaaagaaaagatggcctttgcccattgacgcctgaggtaagccatcaagttttctattgtatcattttggctggcgtgcaggcagtcaggcgggataacaagcagaggtttagtctgttggaggaagatggcgagctgttgatccgggcgaaccagggacacacagtaatactaaaaaatatagtctggaggtgacctcaatcttattggacagaatactctcttatgagacaaagttgcataagcccatcaaattttgcagtaatcagttccttgagttcatgtgcaggtttgaaacttttaactgctggtcagcaagtgcattgtgatgctgttaagtggggtctagatttagatacttctgtttcaaatgtactggttaaaatgtatggggaatgtggagctatgtcagattactggaaggttttcaactcaatggctgaacacgatgaagtttcttggaacactatgatgggtgtcatggccagttcacaaacacctatttctgaaattgtcaaagttttcaacaatatgatgaggggtggtttgataccaaataaagtaacatttataaacttacttgctgctttgtctccactgtccgttcttgaagacaatgtggtagataatgcactcatatcatgctatgcaaaatcaggagatatggattcctgtgagcatctgtttactaacatgtctgacagaagggatgccatctcgtggaattctatgatttcaggttacatctacaatggcaatctacaggaggctatggattgtgtatggcttatgatacacagtggccaaatcatggattgttgcactttctccattatactcaatgcatgtgcttctgtggcagcattggagcgtggaatggagttgcacgcttttggtattaggtcacacttggaatcagatgtcgtggttgagagtgctcttgttgatatgtactccaagtgtggtagggtggattatgcctctaagcttttcaattctatgactcagagaaatgaattttcatggaattctatgatttatggttatgcaagacatggtcttggaaggaaagccattgagatatttgaggaaatgctgcgcagcagagagagtccagaccatgtcacttttgtcattgtcctatctgcctgcattcatgctggattggtggaaagaggtttagaatacttcgaaatgatgccggatcatggtatactaccacagattgaacattattcttgtgtcatagaccttctcggtcgagcttgtaagattgacaagataaaggagtacattcaaagaatgccaattgaacctaacgctctcatatggaggacttgtcatctttccactttcgtccaattattttga

SEQ ID NO: 125460 - DNA, 1446 bp, Zea Mays
ttgtaggaaatgaacttccatcagacttgatagacacactactaaagtggatcccaagcaatgatgaggagcttaggcttcgactgtcctcccgtagcaccgccacaccgcacgcgtccgtggcggcgtccgcctcggcgccggtctcgcacaccgctccctggctggggaagttcatcgcctccgagcccttcaacgtggggggattcgactgggcgatctacttctaccccgatgggaagagcggcgaggatggtatgttgaagtgacatgctctgaactgctcttggcttcaggcagtcaggcgggataacaagcagaggtttagtctgttggaggaagatggcgagctgttgatccgggcgaaccagggacacacagtaatactaaaaaatatagtctggaggtgacctcaatcttattggacagaatactctcttatgagacaaagttgcataagcccatcaaattttgcagtaatcagttccttgagttcatgtgcaggttacatctacaatggcaatctacaggaggctatggattgtgtatggcttatgatacacagtggccaaatcatggattgttgcactttctccattatactcaatgcatgtgcttctgtggcagcattggagcgtggaatggagttgcacgcttttggtattaggtcacacttggaatcagatgtcgtggttgagagtgctcttgttgatatgtactccaagtgtggtagggtggattatgcctctaagcttttcaattctatgactcagagaaatgaattttcatggaattctatgatttatggttatgcaagacatggtcttggaaggaaagccattgagatatttgaggaaatgctgcgcagcagagagagtccagaccatgtcacttttgtcattgtcctatctgcctgcattcatgctggattggtggaaagaggtttagaatacttcgaaatgatgccggatcatggtatactaccacagattgaacattattcttgtgtcatagaccttctcggtcgagcttgtaagattgacaagataaaggagtacattcaaagaatgccaattgaacctaacgctctcatatggaggacttgtcatctttccactttcgtccaattattttgagacaaatatgttaacttgatgctcatgcctatagacattgttcaagccggtacatttacatgattggggcttcagatgttaaactcgacaaaaagttggttacaaaatatattggatataaattattttggcataatgttttgatgtccaggttgcttttcttcactactataatagtaggggtcacgggtagctgcatataatttttagttcacacttaggaaatatatgtatatttagaaattttcaaacattaaatgtcacaacattcttaatgttttaagtattagttaatagttatcatttttct

SEQ ID NO: 125461 - DNA, 2018 bp, Zea Mays
gccctcactcgctccagtctctccctctcatggcctcagcctcagcctcactcgctcgctcgcaccaccagctttgctccagagtcctgactcctcctagccttctcctccctctctcccctaccaccacacaacgggataaaccccagcacgaggccggagctgctgctggaaccgtcaggccgtgaagagcctgcggttcgatctgctgcaagagctcctcgtcgatctcttctctgcgaggtttcggtctgaggtactggctgtggattctttgatccgagacccatcccctatctctctctctctctcctatgggcgcggctttcgcccgattatcgggaggtattgtatttgggacggattgacccgcttatctgagaggatcttcactccagtttcgagtttgatctgccactatttggagaaagccacggctgttcttctgcttgatctctgggtggttggtgtagcagtgcttctagcgtgttctctgaattggttgaatcaccagcacaagatttgttgcgtttccccccctccgctctatttctgcgattttgcacgaaaatgatcctgtcatggacatttttggttgtcatttaatttgcctggcattcgaattggcaacatgatcttccacaaaagcgaagaaactgcgcgcccagtatttgcccatcttgaccttggtgatctcgattgagccttaccagttaccacattgctggagtggaggtatggcgtattctggacaaaggcatgctggtgttgggagctcctcgaggccagctaatggattcaagggggcagccaactcggtggagttcctgggtagggagatgctgggaatgcgactgagggatgccaagcccgacacagatgatgaaagggagatgtggtcaagttcagatgtgactgatagttctagtaatgaagctggtcatgtaatagcgactactgttcacgggcgcaacggcctgcctaaacagtctgtcacatacatcgctgaacatgtggttggaactggttcttttggggttgtgtatcaggcaaaatgccgagaaacaggggaaattgttgccataaaaaaggtccttcaagataagcgttataagaacagagagctgcaaatcatgcatatgcttgaccatcctaacatcatcggtcttaagcattacttcttttcaacaactgaaagggatgagctttatctcaaccttgttcttgagtttgttccagagacagtaaacaggattgcaaggcagtacaatcgaatgaatcagcggatgcccctcatttatgtcaaactgtacacgtatcagatatgccgagcgcttgcttatatacataactgcattggcatctgccaccgtgatatcaaaccgcagaatgttcttgttaacccacatacacaccaactcaaaatttgcgatttcggaagtgctaaagtattggtcagaggagagccaaacatctcctacatatgctcaaggtattatcgagcaccagagctcatatttggtgcaacggaatatactactgctattgatttgtggtcaacaggctgtgtcatggcagagctgcttctaggacaggctctgtttcctggagaaagtggagtcgaccaactagttgagatcatcaaggttttgggtactccaacaagggaagagatcaagtgcatgaacccaaactatacggagttcaagttcccacaaattaaagctcatccgtggcacaaggtttttcaaagaaggcttccacctgaagcagtggaccttgttagcaggtttctacaatactcaccaaatctacggtgcactgctttggaggcctgtatgcaccctttcttcgatgagctgagagacccaaacactcgtctacccaatggtcggcctctgccgcctctcttcaacttcagatctcaagagctaaaaggcgttcccccagaagtcatcgatcgccttgtcccagagcactcaagaaggcagagtttgttcatggcgctaaggacctag

SEQ ID NO: 125462 - DNA, 1974 bp, Zea Mays
gccctcactcgctccagtctctccctctcatggcctcagcctcagcctcactcgctcgctcgcaccaccagctttgctccagagtcctgactcctcctagccttctcctccctctctcccctaccaccacacaacgggataaaccccagcacgaggccggagctgctgctggaaccgtcaggccgtgaagagcctgcggttcgatctgctgcaagagctcctcgtcgatctcttctctgcgaggtttcggtctgagttaccacattgctggagtggaggtatggcgtattctggacaaaggcatgctggtgttgggagctcctcgaggccagctaatggattcaagggggcagccaactcggtggagttcctgggtagggagatgctgggaatgcgactgagggatgccaagcccgacacagatgatgaaagggagatgtggtcaagttcagatgtgactgatagttctagtaatgaagctggtcatgtaatagcgactactgttcacgggcgcaacggcctgcctaaacagtctgtcacatacatcgctgaacatgtggttggaactggttcttttggggttgtgtatcaggcaaaatgccgagaaacaggggaaattgttgccataaaaaaggtccttcaagataagcgttataagaacagagagctgcaaatcatgcatatgcttgaccatcctaacatcatcggtcttaagcattacttcttttcaacaactgaaagggatgagctttatctcaaccttgttcttgagtttgttccagagacagtaaacaggattgcaaggcagtacaatcgaatgaatcagcggatgcccctcatttatgtcaaactgtacacgtatcagatatgccgagcgcttgcttatatacataactgcattggcatctgccaccgtgatatcaaaccgcagaatgttcttgttaacccacatacacaccaactcaaaatttgcgatttcggaagtgctaaagtattggtcagaggagagccaaacatctcctacatatgctcaaggtattatcgagcaccagagctcatatttggtgcaacggaatatactactgctattgatttgtggtcaacaggctgtgtcatggcagagctgcttctaggacaggctctgtttcctggagaaagtggagtcgaccaactagttgagatcatcaaggttttgggtactccaacaagggaagagatcaagtgcatgaacccaaactatacggagttcaagttcccacaaattaaagctcatccgtggcacaaggtttttcaaagaaggcttccacctgaagcagtggaccttgttagcaggtttctacaatactcaccaaatctacggtgcactgctttggaggcctgtatgcaccctttcttcgatgagctgagagacccaaacactcgtctacccaatggtcggcctctgccgcctctcttcaacttcagatctcaagagctaaaaggcgttcccccagaagtcatcgatcgccttgtcccagagcactcaagaaggcagagtttgttcatggcgctaaggacctagtttttgccgttctttttgcccccttttttcccaccgtttgccaccttgagggaagcttgtaaagctatagcttctcctttcccctcgtccttactttcctcccctctctttcttccgagctttgtgtggatgagagatccttgagatacactgctagagctgtgagttccaggatgtgaggttcgagtgtgtgtgatgtgcagttgtcgcctttgaggtcggagatttcagttgcagtgttgtgagaggcttgtgaagcttttttgtctacttttcagtgcttctctggcttgaagttttccttcaattcttgtgaactggcttcaagatttggcttcgtgaaccctgtgtgcgtgtaaaagtactggttggatgctgctgcaccaattctggaaaaaaaaagcttacaacta

SEQ ID NO: 125463 - DNA, 2009 bp, Zea Mays
ctcgctccagtctctccctctcatggcctcagcctcagcctcactcgctcgctcgcaccaccagctttgctccagagtcctgactcctcctagccttctcctccctctctcccctaccaccacacaacgggataaaccccagcacgaggccggagctgctgctggaaccgtcaggccgtgaagagcctgcggttcgatctgctgcaagagctcctcgtcgatctcttctctgcgaggtttcggtctgaggtatggcgtattctggacaaaggcatgctggtgttgggagctcctcgaggccagctaatggattcaagggggcagccaactcggtggagttcctgggtagggagatgctgggaatgcgactgagggatgccaagcccgacacagatgatgaaagggagatgtggtcaagttcagatgtgactgatagttctagtaatgaagctggtcatgtaatagcgactactgttcacgggcgcaacggcctgcctaaacagtctgtcacatacatcgctgaacatgtggttggaactggttcttttggggttgtgtatcaggcaaaatgccgagaaacaggggaaattgttgccataaaaaaggtccttcaagataagcgttataagaacagagagctgcaaatcatgcatatgcttgaccatcctaacatcatcggtcttaagcattacttcttttcaacaactgaaagggatgagctttatctcaaccttgttcttgagtttgttccagagacagtaaacaggattgcaaggcagtacaatcgaatgaatcagcggatgcccctcatttatgtcaaactgtacacgtatcagatatgccgagcgcttgcttatatacataactgcattggcatctgccaccgtgatatcaaaccgcagaatgttcttgttaacccacatacacaccaactcaaaatttgcgatttcggaagtgctaaagtattggtcagaggagagccaaacatctcctacatatgctcaaggtattatcgagcaccagagctcatatttggtgcaacggaatatactactgctattgatttgtggtcaacaggctgtgtcatggcagagctgcttctaggacaggctctgtttcctggagaaagtggagtcgaccaactagttgagatcatcaaggttttgggtactccaacaagggaagagatcaagtgcatgaacccaaactatacggagttcaagttcccacaaattaaagctcatccgtggcacaaggtttttcaaagaaggcttccacctgaagcagtggaccttgttagcaggtttctacaatactcaccaaatctacggtgcactgctttggaggcctgtatgcaccctttcttcgatgagctgagagacccaaacactcgtctacccaatggtcggcctctgccgcctctcttcaacttcagatctcaagagctaaaaggcgttcccccagaagtcatcgatcgccttgtcccagagcactcaagaaggcagagtttgttcatggcgctaaggacctagtttttgccgttctttttgcccccttttttcccaccgtttgccaccttgagggaagcttgtaaagctatagcttctcctttcccctcgtccttactttcctcccctctctttcttccgagctttgtgtggatgagagatccttgagatacactgctagagctgtgagttccaggatgtgaggttcgagtgtgtgtgatgtgcagttgtcgcctttgaggtcggagatttcagttgcagtgttgtgagaggcttgtgaagcttttttgtctacttttcagtgcttctctggcttgaagttttccttcaattcttgtgaactggcttcaagatttggcttcgtgaaccctgtgtgcgtgtaaaagtactggttggatgctgctgcaccaattctggaaaaaaaaagcttacaactaaacacctacttatgttttgtttagccaaattcagtgccttcctgttatgcattgcggttcaaga

SEQ ID NO: 125464 - DNA, 1972 bp, Zea Mays
gctttgctccagagtcctgactcctcctagccttctcctccctctctcccctaccaccacacaacgggataaaccccagcacgaggccggagctgctgctggaaccgtcaggccgtgaagagcctgcggttcgatctgctgcaagagctcctcgtcgatctcttctctgcgaggtttcggtctgaggcattcgaattggcaacatgatcttccacaaaagcgaagaaactgcgcgcccagtatttgcccatcttgaccttggtgatctcgattgagccttaccagttaccacattgctggagtggaggtatggcgtattctggacaaaggcatgctggtgttgggagctcctcgaggccagctaatggattcaagggggcagccaactcggtggagttcctgggtagggagatgctgggaatgcgactgagggatgccaagcccgacacagatgatgaaagggagatgtggtcaagttcagatgtgactgatagttctagtaatgaagctggtcatgtaatagcgactactgttcacgggcgcaacggcctgcctaaacagtctgtcacatacatcgctgaacatgtggttggaactggttcttttggggttgtgtatcaggcaaaatgccgagaaacaggggaaattgttgccataaaaaaggtccttcaagataagcgttataagaacagagagctgcaaatcatgcatatgcttgaccatcctaacatcatcggtcttaagcattacttcttttcaacaactgaaagggatgagctttatctcaaccttgttcttgagtttgttccagagacagtaaacaggattgcaaggcagtacaatcgaatgaatcagcggatgcccctcatttatgtcaaactgtacacgtatcagatatgccgagcgcttgcttatatacataactgcattggcatctgccaccgtgatatcaaaccgcagaatgttcttgttaacccacatacacaccaactcaaaatttgcgatttcggaagtgctaaagtattggtcagaggagagccaaacatctcctacatatgctcaaggtattatcgagcaccagagctcatatttggtgcaacggaatatactactgctattgatttgtggtcaacaggctgtgtcatggcagagctgcttctaggacaggctctgtttcctggagaaagtggagtcgaccaactagttgagatcatcaaggttttgggtactccaacaagggaagagatcaagtgcatgaacccaaactatacggagttcaagttcccacaaattaaagctcatccgtggcacaaggtttttcaaagaaggcttccacctgaagcagtggaccttgttagcaggtttctacaatactcaccaaatctacggtgcactgctttggaggcctgtatgcaccctttcttcgatgagctgagagacccaaacactcgtctacccaatggtcggcctctgccgcctctcttcaacttcagatctcaagagctaaaaggcgttcccccagaagtcatcgatcgccttgtcccagagcactcaagaaggcagagtttgttcatggcgctaaggacctagtttttgccgttctttttgcccccttttttcccaccgtttgccaccttgagggaagcttgtaaagctatagcttctcctttcccctcgtccttactttcctcccctctctttcttccgagctttgtgtggatgagagatccttgagatacactgctagagctgtgagttccaggatgtgaggttcgagtgtgtgtgatgtgcagttgtcgcctttgaggtcggagatttcagttgcagtgttgtgagaggcttgtgaagcttttttgtctacttttcagtgcttctctggcttgaagttttccttcaattcttgtgaactggcttcaagatttggcttcgtgaaccctgtgtgcgtgtaaaagtactggttggatgctgctgc

SEQ ID NO: 125465 - DNA, 2523 bp, Zea Mays
gtgtgtctgttccctgaaaactaaacatgttactactttaatgtatgtgctaccttgtagaactaaaattgtggcgacatcggtagcttcttggcatccatatttatgttttatcctttgaaacagaatatatattcctcatgttcttcaacagtagcactgtactggaagtatggaacttctattggagttgcctatcaatgattcacattgtttgtttccatgcagaatctaagataaatattattgagacataatggtgacagcttgtcaattatcctgcctttggaattattttctactacttgcttcctatatgtttagagtgatctgtttgaatgatcacttgggtttacgacgcgtgtccaccagacatttaaattcctgagtttagttgacgtagtgattttaatccattcttcacggactagtactgtctgtttattgtatgacttacagttagtgcaggcatgaatgtttgcatgactcaaatcttattttgattcagctgtattttgtcttttatgacagtgagaatatctgctattctgttttaatataattttgtttgctccatacaatcgttggagtcaaacaatttctagctgccttaccttttagtgtcatacccaatcgcagatttctgctttgcattaatttatctaatttgtcctgcagatatgccgagcgcttgcttatatacataactgcattggcatctgccaccgtgatatcaaaccgcagaatgttcttgtgagatatgattttttttcttttctataatgatttttgttgctttacatgtatcattcgcatttgttggatgttttgttgctgggatggtatgataacgccatagaatagcaattggtttttacaagtgggactgaatttttagatcatgtgtagcccgatgtcataattattggtagtttcacccaacatctacggcactagcagtttgaaattggaaatgtcaatccacgtgtgcattatttagtttcatatataggtgctatcccatgtgcatcattttattcctaggctgcacatatcatattttataccctgtgtatgctgtttttcttgtcaatggtatcttactatcttctcttgtggaacatttcgtcatcatctgttcttttataacaaggctggacaaaaaaccatgctcccagttccacagatgtcaattggttctgtacatcccactagtgcgtaaatgctaaactaattcaaaatttatttgagcaaactgtgagcctcggaaaggagcatggaagatcaatgcaactagctagcttgttaacccaccatgactccataaccgcatagattagagattgtttgaagaagcaggagaaactgaaactcaattgtagagtatgtacgaaacgaggtttccataattgccttctttttgtctcctttgaatgctgaggtagctactgtttagctacttgaccttttctttacctcgggaatagcagattacatatttatgatgagtgatgctttttgctaatacttctactgtaggttaacccacatacacaccaactcaaaatttgcgatttcggaagtgctaaagtattggtcagaggagagccaaacatctcctacatatgctcaaggtattatcgagcaccagagctcatatttggtgcaacggaatatactactgctattgatttgtggtcaacaggctgtgtcatggcagagctgcttctaggacaggctctgtttcctggagaaagtggagtcgaccaactagttgagatcatcaaggttttgggtactccaacaagggaagagatcaagtgcatgaacccaaactatacggagttcaagttcccacaaattaaagctcatccgtggcacaaggtttttcaaagaaggcttccacctgaagcagtggaccttgttagcaggtttctacaatactcaccaaatctacggtgcactgctttggaggcctgtatgcaccctttcttcgatgagctgagagacccaaacactcgtctacccaatggtcggcctctgccgcctctcttcaacttcagatctcaagagctaaaaggcgttcccccagaagtcatcgatcgccttgtcccagagcactcaagaaggcagagtttgttcatggcgctaaggacctagtttttgccgttctttttgcccccttttttcccaccgtttgccaccttgagggaagcttgtaaagctatagcttctcctttcccctcgtccttactttcctcccctctctttcttccgagctttgtgtggatgagagatccttgagatacactgctagagctgtgagttccaggatgtgaggttcgagtgtgtgtgatgtgcagttgtcgcctttgaggtcggagatttcagttgcagtgttgtgagaggcttgtgaagcttttttgtctacttttcagtgcttctctggcttgaagttttccttcaattcttgtgaactggcttcaagatttggcttcgtgaaccctgtgtgcgtgtaaaagt

SEQ ID NO: 125466 - DNA, 742 bp, Zea Mays
acacttcctttgctgagatcctatctggcatttcttctagatggtcagattttgcaagcattggatggaggctctgatgcgtttgttatgggattgagttctgctcaatcacagctctcagttctagatagttcttcgcggcttggactaaagccatggcaaaaaaacaaagccatgtattgagatattgtgcaataaccaggttctatcaccagagatgagtttggctactgtgcgaacatatatatggaaaaagccagaagatttgattcttcattacagagtggtccaaccgagatgatcacagcttcagatgtacatgctgacatggttctcagcatggctgcaccataaacggtgtggttgaagacacccttggcttagcgaggaaaccgtcagaaatattttgctcttgggctccggtagccgctctcctagaatcccgacttcgtttgcttctttgtaaagttccttcctgatcttgccctggtagtaagatgtatcatagcacaggtataaggccctctgcttttacatgtagaagatttgggtgcttaataaaggtcaaatggatttttttcgtttttctttgacaaagtttgtaagaaaacgggctggttctcggctcagatcgtggtgttccgacgtcgattattggatttaaacctgtcgcatcctcttggttctgttagcgtaaaaggtggacgggatgtcgggagcaataaagctgtttttttggata

SEQ ID NO: 125467 - DNA, 1344 bp, Zea Mays
atggacgatcgtctcccccacggacaatgcttcttccaaatgctcctgcgtcgcgtccgcatcggagagcacgtggacttcgtccaccatgtcgacgaagtctgcgacgtagtgccggggatcctcgtcgcggacctggagcctgtgccgggctactgcagcgtctggtacttctactgtgccaagaagtacacggacacgcagggcaagctccaggtttacaggaagcgcacgatcacgggcggcggcggcgcgtgctggcacccggagatagaccgcaagatcgtccagggatccggtggcggcacgttttgcaaattaacctacggccgcaagacggtggatggatcgttcgacagaatgggatggcacctggtagagtacgacgatgacttggccgtcactgccagcaactacgtgctctgcaaggtgtatgtgaaagcgaagtcgtcgttgccgtcctcctcttccgggcagaacgagaacgcctcctcgtccaagccaccgacgacggccaagaagatgaagcaggcccgcgatggcggcgatcaacccgagacgtcgtcgccagccaagttgatccagcagccagaggacgtgcaggtgtcggatcatcagcacgggcacggcggcggcggtgatcaccccgaggcgccgccagccaagttgtcccagcagcaggaaagctatccgccaggagaagacgtgcaggagtcagatcatcagcacgggcacggcggcggcctcgacttggatttccaagagttcagcgccaaggactgcatggacatcatggagatgttgcgagacgagccgaaccacccggaggcaccgccagccagcttgatcgtccagcagcaagaagatgtgcagcaggcagcaggcccatacgcggcggagtcagaggagcacgggcacggcggcggcttcgacttcaagaatttcgaagaggtcaacgccgacgagtacaaggacatcctggcggagatgttgcgagacgagcccgagccggagccggagccgggaatgcagcagccaactagagtcgtcgtcgccgagccgccggagcacgaagacgagaatgtgcaggagccggagccggaaatgcagcagccaactacagtcgccgtcgccgagccgccggagcacgaagacgagaatgtgcaggagccagagccggagctgggaatgcagcagccaactacagtcgccgtcgtcgagccaccggagcacgaagatgagaatgtgcagctacacgccgagtggggtgcacacatctgcaaccaagatgcagcgcgcagcagccttcttcaaggacctgcaccgcattctcttctcttttaa

SEQ ID NO: 125468 - DNA, 684 bp, Zea Mays
cgcactagttcgcatcaagcttcaagcatccccacacgcactccgcctccgctccgctgtctccaccggtccgcccctcctcccctcctttgcgcctccccgaatcgcatcagcctttctcctcgtgtcgcgactcgcgagcgaaaccctcgccatggcggaggcgaccgacaccgccgcagccacgccgccgccagcgccagcgatggcgactttgtccccgcctcctaagtcggggatcccgccgcggtacaacctggacgccaagtgggacgcgtgcctcgacctctccatccgtcgagttgcctactcctccctcgccggcgccttagcgggcctcctcctcttccgtagccctactactcgctgggcatcagttacccttggggctggtgtggggataggggctgcatacactgaatgctcatacttgttcagtggtggtcctccaaattggtcacccaaagtatcaacaattccttctgcacactctgaagtaattgctctatcattctcccttaatcctgtttgaactctgtggtgactggtttacaaacatcaatattgctgcattgctatagtcttctactaaactagccagttgtccgtgctttgctacggtttttatatatcatataaataggtattaagatatttattcaaatataattattgtttatttct

SEQ ID NO: 125469 - DNA, 759 bp, Zea Mays
agttcgcatcaagcttcaagcatccccacacgcactccgcctccgctccgctgtctccaccggtccgcccctcctcccctcctttgcgcctccccgaatcgcatcagcctttctcctcgtgtcgcgactcgcgagcgaaaccctcgccatggcggaggcgaccgacaccgccgcagccacgccgccgccagcgccagcgatggcgactttgtccccgcctcctaagtcggggatcccgccgcggtacaacctggacgccaagtgggacgcgtgcctcgacctctccatccgtcgagttgcctactcctccctcgccggcgccttagcgggcctcctcctcttccgtagccctactactcgctgggcatcagttacccttggggctggtgtggggataggggctgcatacactgaatgctcatacttgttcagtggtggtcctccaaattggtcacccaaagtatcaacaattccttctgcacactctgaaggagaagacaagtaaacccttgcccgttggatggtggagttgtggtgtgtgtgaagtactggctgtttgtgctggatattgcactgcctgtggccataccatagcatgcattgagttttctggcaaacccattgaattccccaattgtggtctagcgaggaagtgcctttgcttggtaacttgttcgcgccatacttctggggctgtatcatcgccaaaccatgcgacgcttacttatttcatttggttctctgcatgcttctccccaa

SEQ ID NO: 125470 - DNA, 1178 bp, Zea Mays
cggcggcggtggcggagcgtaaggcgaaggagtagcagcagcaggcggcgccgagtagcggctccccatctcgagcttgccaccatggctagaggattgaagaagcatttgaagaggctcaatgcccccaagcattggatgctggacaagcttggcggagcttttgctcccaagccatcttctggacctcacaagtctagggagtgcctgccactgatcctcatcatcaggaacaggctcaagtatgctcttacataccgtgaggtcatttccatcctgatgcaacgccatgtacttgttgatggcaaggtcaggacagacaagacctaccctgctgggttcatggatgtcatttccatccccaagaccaatgagaactacaggctgctgtacgataccaagggccgcttccgccttcacccaatcagggatgaggatgctaagttcaagctttgcaaggttaggtctgttcagtttgggcagaagggcatcccttatctgaacacgtatgacggccgcaccatccgctaccctgaccccctcatcaaggccaacgacaccatcaagatcgatctggagaccaacaagattgtggacttcatcaagtttgatgttggcaacgtcgtcatggtgactggcggaaggaacactggccgcgtgggtgttatcaagaacagggagaagcacaagggcagctttgagaccattcacgtggaggactccctgggccaccagttcgccacccgtatgggcaacgtgttcaccatcggcaagggtaataagccgtgggtgagcctgcccaagggcaagggaatcaagctgagcatcatagaagagcaaaggaagcgggatgccgctgcccaggctgctgccaacgcataaatcctctgaatgtgctgtgttgagagttttttctagttgctctgcaaggatatagaacaatgttctaagactaccatgtttttaagtctgcctgatgcttataattcatgaacgatttttgcagctagctgtaatgtgactatttatcttatctgcttgttcaaccctgttgtcgtgtgttgattctctgtttcatggtcttttcactcgacagaaacagttatttcttaagaacttcaccattatattcacagctgtgaactatgatattggaagtctttggtcatttttcgttg

SEQ ID NO: 125471 - DNA, 1821 bp, Zea Mays
gtctccctccctcccatggccgcggccacctccaccccatgctgagccaaaccccccaactagtttcagtgtccgcccagcagtcagcagaggaggagcgcgacagatcctcggcgccggcgcgccctccgggtcccccgccccaccaccactcacatcacatcacatggcggactccacgcaccacaccatccgccgcgccgcggcgcgcccgcgcggctggtgctgctcgttcgcgggcgtcccggagagccccgagcaccgccgcgcgctcccggcgcccgcctccgccgccgacgccgtcccgaagcctccgcctccgccgccgccaaagtccccgctggcgccgtcgtcgcacggctcgccctcgtccaagctcgcggggctcatcgacacgcggaggatcctctcgccgggccgcgtgtccccgatcgactccgaggggtcaccggcggcggcgccgagggagcaggccgcgcctttcgtggcggtgcgggaggacgaggacgagggcggggacggcggcgaggcgccggcgctggatctgaggctgtgcctcagggccagcgacggccggtgcgtcgccatggacctcgactccgccgtgctgtgcgggagcagcgccttcttcgccggcatggtgccggacgcatctgcggccgggggaaggagggtcgaggtggatggggtggacgacttggaggcgttcaaggacgcggtggagctcatgttcgagcccgacgccttgcggtggctcgccagggccggcgtgtcacgggcaaccgctgtgctccaggtttgctcctctattgcgttcgacaaaggagtcgaatcatgtttgaagtacatcgaggcagttccatggagcgagagcgaggaagagaagctgaaacacgtttttgccagatgcactttcggcgaatcagttagtaaagatgtgctggcaagattgcagcagcagtgcgcgagcggctcggaggacctggcggtgcagctcgtggaatctatcacgagcggagccaacaacggcgcgaggaaagaaatgcagtctttggtgagcggtctcctaagcagaagctcagtctaccataaggacctgtccggggtgaacaaggggggcctttaccgaatctgccgttcctgcttgagctcacttgtggaacttttcatggaggactcagatggcggccaagctatggcaccttcaggcagaaggcctatggttgaaaggatcagtcagcaaactgagaatctcaactggctcttggacatccttctgaacaacgacatggcagaagaatacgttgagctgtggggtacgcaggaggagctcatcagaatgcacgagcgagcatcgccgatgttcaggtacgagctcagccgggtatcggcgagcgtgttcatggctctggggagagggagaatccagtgccccagcgacacgaggagccagctgttccgtggatggttcaggcccatgcttgtggacttcggctggctgcagaggtgctccaaggggctggatgtgagagtcctggaggagaacctggggcaggccctgctcacccttccgctccacctacaacagagcttgttcgtagaatggtttcagtgctttgcgtctagaggcacaggaggatgccctaatctcagcagagctttccaggtatggtggaggaggtcatttgttaattagatcagctggttcttcttcccattctgtgccctagatgcttgctatacaaacatgagccagtataaatgtaaagcgtcatcataagtatgtttattttttgccctaaagttggcatgaccttattc

SEQ ID NO: 125472 - DNA, 3231 bp, Zea Mays
cccatggtcgcgcacgccgcagcatccgcatccgcatccgcctcctccctgtgagtcgccgagcgacgccgcgcagatgaaggtgtcgtccaggaagaaaccgccgccgcagcaacagcgggaggagacggaggagcaagggtcgtcgggggcggccgaggccatggacgccgccgcagccgcggccgttcaggaggaggcggaggcggaggcggaggcggaggcggaggggaggacagtgctggtaggcgtgcgcgcggacgccgagagccgggcgctgctcacctgggtgctcgtcaatgtggccgcgcccctggaccgcgtcgtcgccgtccacgtcgcgccgccgtccgccgccgaggcggtcgacttcgacgccatgctcgccgtctacgagggcttctgcaacctcaagcagatcaatctaaacctgaagatttgcaaggactcgtcggtgcgcaaggcgctagttcgtgaggccagcctgttcggggccgcaaaggttgtcctcggcgtcgccaagaagaggcgtgcgatttcgtcgtcgcactcagttgcaaagtactgcgcaaagaagctgcccgcgaagtgtgcggtcctcgccgtgagcaatggcaagattgagttccggagagagtcgagcgtccatccaggtaaggtctcggcagaagttctcccgtgtggtgatgatgagatgtattgcgtagtgccgttccgagctcgtcaggctaaagggggcgcactttctttacaagaaaataaagatgacggtgagggtgacgccacgcgtgactttggcaccaagggaagtgaattggagaatttgtcaacggatcaggtcgagatcgacgcagatccttctagtacaaatgctgaagagtcaactgtcaaacagggagacgagatttccgagcttccaggtaagggtgccagtgtgctctactgtgttcttcctgagagaagcagcggttctgttgcaagtacatctagtaggcaagaccaagattcagtggatctgccatctgaaggggctggggagctatattgcttattgccacccaggaatggccattcagtcaggagcattggtgattctaagcgttcaaatgcgagccaaaaggatgataaaccagccaatccatcactggaaggagatggcgatctgtactgccggctgccgaggactggacgaccgggtaggaattctgggggatccaatcgttctgccggtataagaggtgcagttaggcgtagcagtagtttctccagcgatatccatctgagctcagagacatcacctattaagaaggatggctcggttagcatgactgccaccgaaaggagttcttctgctgtatccacagaagctgaggactcaccgaaatacaccgcacgaactgctgaaacaccctcgagctccccaatgtcgctgagacggatggtagaggggagatctgaccgctgtcacctccatagaagaatctttagacatcaaagaagttcatcttttgaatgggcaaagatctcaatggttcaatgggcgatgagacttccgagccgatacacttcggtccacccagatggcaaaccactgaaaccgggtgcaagtccaaggctgaactgtgattctgaaactgagtccactgcagctgttgagccagaatcaatgttttctttcgctttctatgatgtagcatggcctccaagtgaactggaatcactgcgagagaagtattcttcagtttgtaggatgttttcttatgaagaactgaagcttgcgacgtccaactactcacctgatatgttaattgggaagggtggaaccagccaggttttcaaggcacaacttgatggcggaacatttgctgccataaagattctgaaaccctcggttgatgcaatacacgagtttgttacggaggttgagaccgtaaccagcttgcagcatgagaacattgtagcactaaggggattcagcttcgagaactacaaccttgtgttggcatatgattacatgccccgagggagcttggacaaagctcttcatgggaagaatgatggcacagagtttcttgtctgggagaggagaattaagatagcaattgacatcgcaagagcactcgaatttctccatctcggcggtgtgacccagtctgtgatccatggagatgttaagtcttcaaatatcctcctttcagaggattttggggcacggctctgcgatttcgggttagcaaagcgagtgtcggcttcgactccccacctaacatgtactgacatcaccgggacttttgggtacatggcgccggagtatttttcacacggggaggtcaacgagaagattgacgtctacgcattcggagttgttctgctggagattgtttcgggaaggaggcccatcacaccagggagcgcgaagggtcaagaaagcctggtcggttgggcgaagcctttgctgtccagtggcgggatcaagcacctggtcgatccgtttctggggaacgattacgactgcgatgagatggagaggatgacgctcgcggcctcgctttgcacgaggacgtcgtggcactctcgacctgagatgtcactggtcctgaaacttctccagggggacgacgagacgatgggctgggcgaggtcggccagcttcgacgggtcagacgaggaggccatcgcggcgggacctgacctgaacatgcagtcgcacctgagcctcgcgctcctcggggtggatgcggacgacacgctgtcgcgctgcagcagcacggagcgcacctcggccgacggctactggagccggtcgtccagtttcgactagcggtagctgcgtgatggaactgatgcggcagagtagagtagtggtagtgtggttacgtacagcaggcaggcaggcaggcgattggtatgcttggtgagatggatgttcatatcaggattcaggtggttggaatgtggacagctgctgatttagtttagatggcagtgttgctttgctgatttggctaggagtcgagttctgttggtagtatagatctgaatctgaccttacgatgcaattggtttcgtatttgtattgttatcttttttttttcctttatcaagtcttcatgcaagaataggctaccaattggttgttggataggcttgtctagcaacaagcctgtaagataagggacttggtaggaaagaatctgcaggatgaataaacctgtgaggattaaattaatt

SEQ ID NO: 125473 - DNA, 130 bp, Zea Mays
ccgaaatatggttttcgcgatggatttagaaccatcgttgatttagggagtcccaacgtggttggtaaatatagggatggaattgaattttgtagtgagtttgtaaatttaaggacccgctttacgtaac

SEQ ID NO: 125474 - DNA, 1676 bp, Zea Mays
cccatagaggtatggcattgtagccgacggacgaccgacgcgcaccccccgccatgctctccagccgaagatgcttcgcggcggcggccaaccgggtccggccgctcgccagggccttctgcgacgcgccggcctcgcgcgcggatgcgggggcctccgggacgcccagcccgcaggatcacgccgagaaggttgctgccctgaaggatccgcccgatgtgctagacgttgctatcgttggtggaggcatggtgggcttggctgtcgcttgtgcattgtcaaatatgccgttaacgaaacaccttagagtcgctattatcgatagcaatccagcgctgaagtcaaggagttacctggataaaaacagtatacccgattctagggtcagcaccgttacccctgcaaccatttctttcttcaaggatattggcgcctgggagcatgttcaacagcaaagacatgctttctttggtaaaatgcaggtgtgggattacactggacttggatacacgaggtataatgctagagatgtgggcaaagaacaccttggatgtgtggtggagaacaaggtgctttgcaactcactgctcttacgtttacagattggtgtctcttactttcccgttgaagaccagacaagcaggaatgaaaccaacatcaagagaaccattatctgttggtcatactacagaagagttccatcgcagtcatttagttaaacttgatctcagtgatggacggagtttatattccaaattggtgataggagctgatggttcgaagtccaatgttagacagattgcaggcataaaaacaactagttggaattatccgcagagtgcaattatctgtacagtagagcatgttgtggaaaatgattgtgcgtggcagaggtttctcccttctggtccaattgcgctacttccgataggcaataacttcagcaacattgtatggacaatgagtccagaggagtcactgcgccataagtcaatgagcccagaagagtttgtgaattctgtgaaccacgcattggattttggttatggtccgcatccacactctaccgctcttgaccattacatggaacagttcttttctggcattgggagcagtgcagcatctacaaaggaatgcttcgaagtgccaccgaaagcaacccgtgtagtttctgagagaatggcgtttccattgtcgttgatgcattcccatgattatgtttccaaaaggttagcattagttggagatgctgctcatactgtccaccccttagccggccaaggtgtaaacttgggctttggtgatgctgctgctttagcaaaagttattgctgagggagtttcagtgggctcggatgttggggatctgactttgctacagcggtatgagaaggagaggaaggctgccaatgtggcgatggcagcagtgctagatggttttcagaagatgtactctgttgatttggggccccttaatgtagtgagagctgctgcgttccacggtgcccagtacatatcaccactaaaaaagaacatcatctcttatgcaacgggtgacacgaaatggtcactatttcagtgaacagcactgctttgaaactcttgtcctcacctcgttctttgtttcggcatgtactggaaacaaagaacgcaatcagtaatttcgttcgaaagaca

SEQ ID NO: 125475 - DNA, 862 bp, Zea Mays
agaaattcaccatcaaaataggacgaagaaaatctaagaaactgaaatccaacaggggaatttccctttcggctgctgcgaaactgcagccaaccaaggagtggaggagtaggagtagcggcagtcaaagcgtggcgggcggacgggcgggcaagctggaacccgttggatcggtggtatcaaggaatcggaagagggacccggctctcccctccccaccccgcgtcccacgtcggttcccctaatctgcgtccgcggcgtgatatgagacgtttgagtggaagcagcatattggtgaggctgaggcgaatccaacagctacacgaaggaggcaacaggcgcttggaagggaggatgctgttaaagagaaagtaatattggcacaagagaaaaacattcagcagcttaatgagcttattcagagccttcagcttcagctattgcattgccggggcagtaacagttctgctcagaccgcctcaagccacagcgaagtggagggacatgaaatgattggtgactgataacctctcatcccctcccctctgttgacataggtagtttgcttcagagtataaccaagacaagaacagaagctcttcaggcaatggaaactcttgttgtcgccttacggtgggccggtagagttactggtattatgtgctttacgttatcagtatcacctccttttgcattctcacccagcgtgtacagggttttagtatgttggtctaggttactttgctgatcaaggttcgaatgtatttgttcttttaaacatatgcactccgatctttatatgatggaccatttctttgtgtctgtgacggcgtttttttcatgctcggcatgttgcagagct

SEQ ID NO: 125476 - DNA, 1645 bp, Zea Mays
agaaattcaccatcaaaataggacgaagaaaatctaagaaactgaaatccaacaggggaatttccctttcggctgctgcgaaactgcagccaaccaaggagtggaggagtaggagtagcggcagtcaaagcgtggcgggcggacgggcgggcaagctggaacccgttggatcggtggtatcaaggaatcggaagagggacccggctctcccctccccaccccgcgtcccacgtcggttcccctaatctgcgtccgcggcgtgatatgagacggttctgtaattgctgatcggcgtgatgaattttaggccaatagttcttatcttcctcctgctcgtgctcattgtcacatcacagtttgagtggaagcagcatattggtgaggctgaggcgaatccaacagctacacgaaggaggcaacaggcgcttggaagggaggatgctgttaaagagaaagtaatattggcacaagagaaaaacattcagcagcttaatgagcttattcagagccttcagcttcagctattgcattgccggggcagtaacagttctgctcagaccgcctcaagccacagcgaagtggagggacatgaaatgattggtgactgataacctctcatcccctcccctctgttgacataggtagtttgcttcagagtataaccaagacaagaacagaagctcttcaggcaatggaaactcttgttgtcgccttacggtgggccggtagagttactggtattatgtgctttacgttatcagtatcacctccttttgcattctcacccagcgtgtacagggttttagtatgttggtctaggttactttgctgatcaaggttcgaatgtatttgttcttttaaacatatgcactccgatctttatatgatggaccatttctttgtgtctaaagggaaaaaataaacaaagcaagagcaactaaacaaaaaaaaatcacagcgacggctagcggcgaacagcttagcatcccttctgcgatgatcggagcacctcgcaggttgtcttctggaagacgacggcggcgccaccgtccggcgacccgagctgcagactgagtgggcacttggcctccagcctgcaccacgtggtgtgcagttggtacttgacctcgccggagagcttcgcctcgacgtcgaacacccccttggcgctctgcctcctgtacgccctgacgccggcgctcccgagcacgacgctgacggcgtcggcgccgctggagaggcggaacacggcggtcttcctggcggacaggacgtaggggggcgcggagacgacgtcgacgcggtcgaagcgctggtcctcgaagaggtagtcggcctcgagggaccggaaggtggcgcccatggcccagttggggttgcgcacgcccagcgtgagcgtcaggttgtaggagatggcggtggcactgcccccggacggcgaggtggcgacggtgaagcgcgcgagcgaggcgtcgtcgacctcgaacctgggctgcgccgcgtggccgtagccgaggatgagcacgacgatgacggcgaccaaggcgatgacgacgaggccgatgcagaagccgcacgcgaagcgctggtacggggtgcagcaggagcagcagtactcgcagtcgtcgcacatggtggatcggag

SEQ ID NO: 125477 - DNA, 722 bp, Zea Mays
agctatcacaaattctctaattagcttgctctatggcatattttataggttctgtaattgctgatcggcgtgatgaattttaggccaatagttcttatcttcctcctgctcgtgctcattgtcacatcacagtttgagtggaagcagcatattggtgaggctgaggcgaatccaacagctacacgaaggaggcaacaggcgcttggaagggaggatgctgttaaagagaaagtaatattggcacaagagaaaaacattcagcagcttaatgagcttattcagagccttcagcttcagctattgcattgccggggcagtaacagttctgctcagaccgcctcaagccacagcgaagtggagggacatgaaatgattggtgactgataacctctcatcccctcccctctgttgacataggtagtttgcttcagagtataaccaagacaagaacagaagctcttcaggcaatggaaactcttgttgtcgccttacggtgggccggtagagttactggtattatgtgctttacgttatcagtatcacctccttttgcattctcacccagcgtgtacagggttttagtatgttggtctaggttactttgctgatcaaggttcgaatgtatttgttcttttaaacatatgcactccgatctttatatgatggaccatttctttgtgtctgtgacggcgtttttttcatgctcggcatgttgcagagct

SEQ ID NO: 125478 - DNA, 519 bp, Zea Mays
atgtggcggactctatgcgtttgctacacatcggccgctggtgaatcctgcaccgacgcggaggtttccctcttcattcgtatggcaaccatttcccctgcgccgccggaccgctcgcggcacagctacctcaacgacctcgtcgcccgctcgggcgccatcggcatgtccgtctactaccgcctcgcgccggagcacaagctgcccgccgcgtacgacgacgcgtgggcggcgctgcggtgggcggtgacgctcggcgaggacccgtggctgctggagcacgccgacctgtcccgcgtgttcctggcgggctgcaacgccgacgccaacatcgcgcacgacacggccgtgcgagtctccgccgccggcgtggccatccgcgtgtgctggtgtttgtggccgagaacgacttcctgctcaaaataacaatgttaattaaatttgacaattcgaaattattaattcgaaaattaataaatacactttttgcgcatcatttgtatagcgtgaaatgggaac

SEQ ID NO: 125479 - DNA, 751 bp, Zea Mays
ggccttagtactgttagttctcatgatcagtggactccattatctgtcagtggtcttcgtccgaagcctcgttatgagcatggagcaactgtgctgcaaaataagatgtatatatttggtggaaaccataatggacgttaccttagtgaccttcaggctttggatctgaagagtttgacctggtccaaggttgatgccaaattgcaagcagaacctgctgattccactaaaacaacacaaattgctccatgtgctggtcattctttgatttcatggggcaacaaatttttatctattgctgggcatacaaaagatccatctgaaggcgttacagtgaaggaatttgatccacatacttgtacttggtcgattgtcaggacttatgggaaaccaccggtttctcgtggaggtcaaacagtgactcttgttggaacgacgctagttttgtttggtggtgaagatgcagaacggtgtctcttgaatgacttgcacatccttgatcttgaaaccatgacatgggatgatgtggatgcaatgtgagtagcaacctgatggccttaatgcacagtttttcacctagtgagaagaaaagaaaattgctgttagcttcatgtatctttcctatgtgtgctcaaaagttaaaatattactttcaaaagttcctggatgtgatgtgattggcacacttgtctccaacataatcgagatgcatgttaactgttacacatatagtaggttaacacttctcagt

SEQ ID NO: 125480 - DNA, 1715 bp, Zea Mays
atggagaggcacccctccttctccaaggtcagaccatgctgctgcttgccatgctgaccgctatcttttaatttttggtggggggtctcatgcaacatgtttcaatgacctacatgtccttgatttgcagacgatggaatggtcaagacccaaacaacaaggcccgactccaagtccaagagctggccatgcaggtggaactgtcggcgagaactggtacatagttgggggtggcaataataaaagtggtgtttctgaaacacttgtgcttaacatgtcaactctgacgtggtcggttgttagcactgtggaaggacgagtcccccttgctagtgagggcatgactttagtgcatagcaattatggtggttatgattatctcatctcttttggaggatacaatggacgatacaacaatgaggtttacactcttaaacttagcctcaaatcagattcacagtcaactttaaaagaagaaactctctcagatactacatctagggtcatagaacctgaggctgaaatttatcaagatgggaagatacgggagatttctgtggacaacgctgattcagacctgaataacagaaatgatgaagcaagtgaacagcttttagcagatcttaaagctcagaaagaggaactagaagcaacacttagcagggaacagctgcaaactgtgcaacttaaagaagacattgcccgagcagagactagaaatgcagagctgacaaaggaacttcaagctgtccgtggccaacttgcttctgagcagtcaagatgtttcaaacttgaggttgatgttgcggaacttcgacaaaagcttcagagtatggatgcattggaaaaggaggtcgagctgcttcggcgacagagagccgcttcggagcaagcagcaatggacgctaagcagaggcaaagttcgggtggcatgtggggttggctcgctggaagcccgacaccagcagtttagttccgtgattcatatattttacttgtaacattatatatcattgactgacaccctctacaatttttttatttggttacttacgcattcgtgttcattttggaccacacaaagaataaggtgttctagcgatcgttatactcacaattactcaaaatgtattctttaggtttagcaagggggtgttcatgttagtcgatgtgctggttatccttttgacgctgtgctggttgtccatagattgttcgcttcacaaggggatgttcatgttagtcgatgactttttcgtgaaactgcagtttgatatatgaagtgcaagtatcgtgaacatactgacgtcgtcagcttcgaaattagacattgtgtgattgacattgttcgatgatttcatcttattagggccctacgggcaaatgaaaatgcaaagagtacacaactataacggcaacatatttcttctatgggatcttcttcaggaactcatccagaaccccaaacagatcagcatccagtccgtaatctgcagcttggacaattccaatgcccggttggccttaatactggcggacaacacataataatttattaaatgggagaagcaacctgaaatatgggggcatcggcatctttattaacagccacaataacctttgagtctctcgttcctgccaagtgctgtatcgctccagatactccaaaagccatataaagctccggcgccacaattttccctgtctgaccaacc

SEQ ID NO: 125481 - DNA, 1029 bp, Zea Mays
ttgaactcttgcaagattttttataggctttgttgagcagcgtgtcacaaaaagacatttgatcaccactctataatctatatatctaatcagcaccattacactagtgataatgcaaagccggattccacttcgcatccccttttgccccttcggaatcggaacctggtcccgggcgcaccagctcagctcggccgcagctggaattcccattctgccctgcccctcccccgcggccgcctataaataaccccacaccgcgaggcctctgataaaatctcctaccacttagcactacactaccaccgtttcagtgctataggataggattttcttttgacggccatgaaaccccctcagctgccggccggggagcgctcctgggctcacgaggtcaagcaggccctccgtgagaaactccggcgctcctacggcgccgcctccgccacaccggcggccggtgaaccgagccgtggcgccgactgccgcggctcggccgccgaggaccccataaggagagtcatgttcttggctccctggggccacacataaaacacagacccagatctgggcttgcaagagcatggccggatctgcagagaactgctcaagctcaaccatacttaaaaggaactggagcttgtcttgtaaactatggagcatgctgcttgcaccacgaacatgaacgcatggctggttaactaggtagatatgggtgtggatgggagagagagagaaaaaacaaggtatgtagtccacgtctctgatcttggatggagaggcatgagatcttgggatgctcatgcatgggtcatgggtgtggctgagatctggaacttttgtagccatcaacttgtttcccagaaaccatgtaataagggtgacctgtgtatagctatgagacatcaacatatcttgctgctttgtgtgtccacctttgcttccatctcagctggtttggttcagaatgccttcttgtctgaaactattgaaactaccccttctttcactgcctccttgtctgaaact

SEQ ID NO: 125482 - DNA, 119 bp, Zea Mays
tttttaataagattcagccagtcatcctttgaaccctttaaacaaaaatgcagtcatacctacactaacagccattgtcagtggcttcacaaaattgacttgtccagctactatttttc

SEQ ID NO: 125483 - DNA, 2132 bp, Zea Mays
aacaccttcgtccagtcctttcctcgcgatcgcccaaatcctttcctccccgcccgcgccggcgccgctccgaatcccgagacgcccccgatgcccgccgccgtcgctgctgctgcggccgctgcgtcggccggtgcggtcctgctctgcctgctcctcaactgccgcccacagccggcgctggacgcccagagggagagtgaaaggggggaggacgaggcgtcgccgctcctgtcgggctcggggccggggagcgaccgcgaggaggaggagccgtggccggacagggcacccgtgacctgctgcgaggcggccgcggtagccgcgcgcacggcgcggcgcacgtgggagctcaccgtcgggcggtggggcctccacgggctcgccttcggtatcaagcgccacatgaagcgccagagttcagacttcgtacggtcactgtactacgacactgcgcttgcggtgcccctggcgtacccagtacttgagcctgagtcaagatcggctgtatgaatgctcagaagttatggatctgtaagatccaatctgtcgattttctgagtaatacaataagtgtacaatgctcatcgcatcataatattcgaggcatacagacaatgatgccatagttgtgcaagcagctatttgtgagaaaatggaagggtaatttgcagcatgagtacagtggaaatgactgtctccaacttaaaggacatcagacatatactgaagtatcttctctccttgagcacttgaagctttgcatgttcttctcaaagaaatctttttcagcatttctgaagtttggtgggtacaaacaagaagacattcttattcacaaggctagggcgaggctcatgcagccttcttttgcattggtgtgtgacaaaagaaccaagtgcttgctgcttttcattcgaggtgctatcagcactaaagagcgcctgactgcagcaacttctgctgaagttccttttcaccatataattctatctgaaggaaagatcagcaatgtagttttagggtatgcacactgtgggatgcttgctggagctcgttggatcgcaaaacttgttattccccatcttcataacaaaatgcaggaattttctgggtaccacataaaggtcattgggcattcaatgggagctggcattggagcgattctgacttatattctccatgagcattatgagttcttgtcatgcagctgtctggcatttgctcctcctgcatgtatgacatgggagctggcggagtcaggaaaggatttcatcacttctcttgtcaatagaaatgatgtggtaccagcattttcgaaagtttcttcggagagcctgcgatctgaggtgatggtttcatcaaagctggatgatgtgcaggatcactttcaccatggtttattcgccactataagccagcgtgttgccttcatcaggtcccatatgctctccatctctcactcaacagggaagattgcagattacggctctagtatttctgagcctttgcttaaagatacaataccgcccacagcaaatggacacggcgttgactgcagccagcagcaacaggtggttgcctctgaagaaacggtcgttgtactggttaacaataacgaccatttcaccagtttgaaggccgctgattcaggcgtcacatcacaagaaggttcagacagcaacgcggcatcatcggacagtccacaacggccgcccccgccggcagacgaagccccgaaccagaatggcaccggaaaggataagcagaaagaaccggtctcagcgggctgctcgtcgtcgcgccagctcttccctcctgggaggatcatccacatggtcgcgctgccgccgcagcagccggacccaaactccgacgacggcacgagcagcggtgaggtcgttggcatatacgagacgccgaggggtttgtacgggaagatacggctcgcgcccaacatgattaaagaacattacatgcctagctatatacgtacgatggaatcgttgttggaacagctccagaaggacgacgatgatggcagtgtatgtacatgtaccgcaccaagtgacctgtgaattcttgtggagaactcgggcagtgattattccaattctttcttaaccatttcg

SEQ ID NO: 125484 - DNA, 1176 bp, Zea Mays
caccccaacgcgtggaacgggaaagccggaaaggcccccgcccgcacacgccgccgccgctgccaattcggtcaacgtacgataccagccgcgggccggcgagtccaggcggtcgcagtcgcacgtcgcgacgcgccttagcattggaccgagccgcggccacttgctttgcaattgcatttgccgggatccatgccagcagctccgtcctatatgtgaagcacccggccgcaaggctctctcgctcattcacggcaaattaagcgagcgccggccgaggcagacacaacccgcagcaacaacttgcatcggcacggacgaccgattgagagcctcggcgttcgtacgccacgccaccaagagactctgtgcaacaagtgaagggacgaaatgtatccggccaagcccgccgcctcctccagccagccagcggccgagatggcgcagccggtggtcggcatccccatcagcagccccggcgcggtcgcggtcgggccggtcgtcggcaagtggtcctccggcctctgcgcctgctccgacgactgcggcctctgctgcctgacgtgctggtgcccgtgcatcacgttcggccgcatcgcggagatcgtggaccgcggcgcgacgtcgtgcggcgtggcggggaccatctacacgctgctggcctgcttcacgggctgccactggatctactcctgcacgtaccgctccaggatgcgcgcgcagctcggcctccccgaagcctgctgctgcgactgctgcgtccacttctgctgcgagccctgcgcgctctcccagcagtacagggagctcaaggcccgcggattcgaccccgacctcggctgggacgtcaacgcgcagaaggccgccgccgccgccgccatgtacccgccgccggcggaggggatgatgatccgctaagctaagctagctacctcgtcgccgatccggcccaacctccaacgctaaactcagatgcgttgcgtcagtcagatcatcgcgtacgtacgtgttttgtacgtatggtcgtgtatatttgtacgtgatgcgtatatatataatgttatgactgaatgtctgagttttaagatttgtacgtttgaatccttttcttgttcactcggtatatctgtgtgaaaatctttttttcttgaatttaataagtttttgttcttttct

SEQ ID NO: 125485 - DNA, 849 bp, Zea Mays
atggctggcgatggcgagtgcagcagcatgcatgaacagagtttccggtggccttccgatcaggtcgatcggtcgcggtcgttaacgagagcggccgcattgactaaaaaaacgagaccggccgcccgcccgccgggttggtgggccaactcgcgacgcgcattgggcattggacgggacgatcaggccaacccaaacgcaaccgcagctacagcacagcacagcacagcacaacacgtcggcatgtatccgcccaaggccagcggcgatccggccgccggggcggcgccggtgactggcttccccgtcggcgggcctgccgcctcctcccagtggtcctccggcctgttggactgcttcgacgactgcggcctctgctgcctgacgtgctggtgcccgtgcatcacgttcgggcgcgtggcggagatcgtggaccgcggcgcgacgtcgtgcggcacggcgggggcgctgtacgcggtgctggcctacttcacgggctgccagtggatctactcgtgcacgtaccgcgccaagatgcgcgcccagctcggcctccccgagaccccctgctgcgactgcctcgtccacttctgctgcgagccgtgcgcgctctgccagcagtacaaggagctcaaggcccgcggcttcgaccccgtcctcggctgggaccgcaacgccactatgctgcctccgtccgcacaggggatgggccgctgaccgctgaccggccagcctctgcgtaaataaataattaatgcttatatatgtactagtatagtgcccgtgcgttgcgacggcacacaaatatagtgtccgaacttggcaaagacgatgcccatgtccatgcgt

SEQ ID NO: 125486 - DNA, 1067 bp, Zea Mays
atggctggcgatggcgagtgcagcagcatgcatgaacagagtttccggtggccttccgatcaggtcgatcggtcgcggtcgttaacgagagcggccgcattgactaaaaaaacgagaccggccgcccgcccgccgggttggtgggccaactcgcgacgcgcattgggcattggacgggacgatcaggccaacccaaacgcaaccgcagctacagcacagcacagcacagcacaacacgtcggcatgtatccgcccaaggccagcggcgatccggccgccggggcggcgccggtgactggcttccccgtcggcgggcctgccgcctcctcccagtggtcctccggcctgttggactgcttcgacgactgcggcctctgtaagcaaagcaagcaagcatgcatgcatgaactatatatatatatatatatggtcatgtcattaattcattatgtctatgcatgattccattccaggctgcctgacgtgctggtgcccgtgcatcacgttcgggcgcgtggcggagatcgtggaccgcggcgcgacgtcgtgcggcacggcgggggcgctgtacgcggtgctggcctacttcacgggctgccagtggatctactcgtgcacgtaccgcgccaagatgcgcgcccagctcggcctccccgagaccccctgctgcgactgcctcgtccacttctgctgcgagccgtgcgcgctctgccagcagtacaaggagctcaaggcccgcggcttcgaccccgtcctcggctgggaccgcaacgccactatgctgcctccgtccgcacaggggatgggccgctgaccgctgaccggccagcctctgcgtaaataaataattaatgcttatatatgtactagtatagtgcccgtgcgttgcgacggcacacaaatatagtgtccgaacttggcaaagacgatgcccatgtccatgcgtcctaccagatactggagatattgtgtttcagattcactgctagaagcaatcaacatatgcaagtcttaatagctttatgtgttgtgacaaaccacctctcattggacgacaaacatatacc

SEQ ID NO: 125487 - DNA, 941 bp, Zea Mays
ccaagtcgccgggcaagctccggatcggggcgcgcgcgcgcggggccgccgccgccgccattatattgggttattagttaggccagctggtcattgcatcggagagatgtatccggccactacgccctacgagacggcgtccggggtgggcgtggcgccggtggccggcttgttccccgtcgccggagaggccagggagtggtcgtcgaggctcctggactgcttcgacgacttcgacatctgctgcatgacgttttggtgcccgtgcatcacgttcgggcggacggcggagatcgtggaccacggcatgacgtcgtgcgggacgagcgcggcgctgttcgcgctgatccagtggctgtcggggtcgcagtgcacgtgggccttctcctgcacgtaccgcaccaggctgcgcgcgcagcacgggctccccgaggcgccctgcgccgacttcctcgtccacctctgctgcctccactgcgcgctctgccaggagtacagggagctaaaggcgcgcggctacgagcccgtcctcggctgggagttcaacgcccagagggccgccgccggcgtcgccatgtgcccgccggcctcgcaggggatggggcgctgatcatccgtcgaccagccagccagcccgtcggggtttgattcatgtctccgatctgttggttcatgcatgcatgtctccatttaattcatctgttcatatattcatgtctccagatccagacggtacatataataatatattcagttgttttacgtactgttcatcgtccgacaacacagcaccattaattattgtcgcctctttctcttagcacttaacatttctggcgtgtaaatcgcaagatacttctttcaagttatgctgcatacatcacttaattctattgcatcatcttatcgattctgatcacttatcgatttgtttcgtttgt

SEQ ID NO: 125488 - DNA, 705 bp, Zea Mays
atggcgccggttatccttgccatgaacgtgcactgctacggctgcgccggcaagatccgcgaggtcgtcaagaacctcctcggggtggaggaggtgtgggtgtcggtggacacggggctggtggtggtgtccgggacgtcgctggacgcctggctgctacggtgtcggatccagaacagcacccggaggcccgtcaccgtcgtcagcgacgtcgccgcggacacggcgccggagccgcagcacgccgcgccgccgcttggtgggtactacccgcaacaccactacagcggggtgctgcacatggccccgccgcctcttccggccggcgcctatccctactactactactacggcagcggcgacggctgggtgcccgcgccgccgcagcacctgctccagtacgtgccgacgacgacgacggtcgacggctacttcccctcgcgccagtacgtgcccaacctggcccctctacgtactaataaagatctcgaaataaaaagttaccaaaggtacctggaagcggcagatgtagtaggtgggcccgtaggtgcggtggaagtagtcgatgggcgtgacggcggcggcggcggcgcggacgaagatgtggcgcatgaaggcgacgctggtgttgacaagcgccgccacccggtccggccggaacaggcagagcttgttactttaacctcggaacaaaaggctggatag

SEQ ID NO: 125489 - DNA, 840 bp, Zea Mays
gtggaccgcttatactcgatcagacggtcgatctggctctgcgaagatctcgacagcaccgttccgtttccatccccatcgtcgtcgtcgccgccgccgccgccggagatgggccatgcgccagcgaacggcaagcgctcgccgcctccgcctcctctcggacgttgccacttctggctccccaacaagcgccgccactgcgccaactcccccctcccgtcctctcagtattgcggaaaccacctccccgagtccgcccccggggctggccgccgcgtcccctgccccgtcgacccctcccacacggtgctcgaggagaacctggaggcgcacgtcggcaagtgccccctgaagaagcaggtcgccgcgctcaccgcgcagccgtactactccaagggcatcaactccggtacacctgaggcgggctgcggtgtgacgtcggcggagaagcgtgcggccgtgtacaggcttaccgaggaggagttccgccttctgctcgggaagatccggtcggtgcacgcggcggtcgcagcgccgatacgggagtccaacctgatcaccgctgcttgcgacaagtggatgagcggccaggttgataggtgcgggccaaatccagtaatccacattctgggagtgtaaagatcactcattcttctaccggggagtgatttctatttctgggttggactacaggaagatgccgtaccaagagaggcatgtcgcgcagcaggcgtccattgttggaaacatggaggcatttggcttgctgcagaaggctagccatgaggtggttgatggggagaatgcggcggtgagtgctcaggcagttgtggagtttgg

SEQ ID NO: 125490 - DNA, 2296 bp, Zea Mays
gtggaccgcttatactcgatcagacggtcgatctggctctgcgaagatctcgacagcaccgttccgtttccatccccatcgtcgtcgtcgccgccgccgccgccggagatgggccatgcgccagcgaacggcaagcgctcgccgcctccgcctcctctcggacgttgccacttctggctccccaacaagcgccgccactgcgccaactcccccctcccgtcctctcagtattgcggaaaccacctccccgagtccgcccccggggctggccgccgcgtcccctgccccgtcgacccctcccacacggtgctcgaggagaacctggaggcgcacgtcggcaagtgccccctgaagaagcaggtcgccgcgctcaccgcgcagccgtactactccaagggcatcaactccggtacacctgaggcgggctgcggtgtgacgtcggcggagaagcgtgcggccgtgtacaggcttaccgaggaggagttccgccttctgctcgggaagatccggtcggtgcacgcggcggtcgcagcgccgatacgggagtccaacctgatcaccgctgcttgcgacaagtggatgagcggccaggttgataggaagatgccgtaccaagagaggcatgtcgcgcagcaggcgtccattgttggaaacatggaggcatttggcttgctgcagaaggctagccatgaggtggttgatggggagaatgcggcggtgagtgctcaggcagttgtggagtttggagctggaagagggtacttgactcaggtgctggtggactgttatgggattagaaatgtcttcttggttgagaggcggtcctacaaacttaaggctgatcgaagcttgcgtcaaaatgaagatgttaccttggagcgtttgagaattgatattgaggatttgaaactgcacggaattgaggcattgagggggctccaatatctagcaattggaaagcatttgtgtggacctgccacagatatgaccatgatgtgctgtcttcctgaacgatatgaccaaaccgaagaaaacggcaaacgtagtcttcaaggccttgctctagctacctgctgccaccatctttgccagtggaagcattacacgaataaatctttcctctcgggactaggtatcacagaagaagattttcatgccatgacatggtttagcagctgggctgtggatggtgatcatagctacccagatgctcctgtggaggttgaagacacgccctctgaagtcagaggaccagagaagcttgatcaggaggccgtcggaattgagagagtaatccgaagtataccagcaggggagagggccactctgggatccatgtgtaaagatatcattgatacggggaggctactatggcttgggcagaagggtctggttgctgatcttgtaagctatgttccatccagcatttcaccagaaaaccgtctgcttatcgcaaaatgtacatcttgattataggctgaaaagcaagtgcacgcatttcagccctgcaaatttgcaggagcttggattgtataagatactttcaactaataaaatcttgagtttttcagtgtcattccaagatatgttatgtctcaacgattacataaacaaggacatgttttattctgacggctcacaaaatctccgcaaggaagaaacaaattctacaataaaaatgatgaatggaatcgaagcatgttaggctgtaaatatagttgatattgacgatatataagcttacaacagcaaccggatcttgctgcaaatgcaaaggaacttcttcacacggtaattatgttcctttgcgctagagctctcaagttacaaaactgctaggtttatttcatcctaaaatttacatgggtccacgctccagcagctcccatctgaatgtgggcgcggcataaaccctgggaaaggtgtggaggagtatgcccacgcagacacaaaccacagcgactcccatcacagttaacattgctggcctataaaggaaggtccttgccgtagaacttggatgcatccgtgcctgacggctgcagaggaggcaacctggcactgatgcagacattgccctgcatatctcgaggctaacatcgccaggcttaacgccatcggttattacagggcatatactgctcggaacaccgaggacaacgtggccttcgccaagatgcttatcaatcttcttttggaccagattcaggtaagcgccattgcctctctgccgagcatagtcttctggggtaaaacctgtttcgtcccgtgcattgctccaagcactaattccaat

SEQ ID NO: 125491 - DNA, 2466 bp, Zea Mays
atagttatccactttgcccctattgcttatgctttttccgctttgtgtcacactgggacacacaagctttgctccaccccttgtttgttgtacttcaaatcgcggagcccctttccccactgccatttgttttggccatctggtgctcatttccctcgccacaggctgctcagctcagccacatccttgcttgcaaagatctgtctctctctctctctccctccctcccttcttcaatggcggcggcttcctgccctgttgccctcgcattcttctcctcctcctgtattctcctcctccttcaaacaatctgctgttcaggagtatttgtggagctatcatacgactcgacacaggtcaaggtacaggtactgtccacctcagtggtcactgacggctacagagtgatggtcactgacaagcagcgcgcctacctcttcctgaagccgtttgcgtgcagagacaagccatgcggatcggagtccaccgccggctcgttcatcagcgatgttctcggtcccgaccgccggctcaacgtcagcggcatcgtcgtgacggccaccggcacgcggcagctcggcgcgcttctccgcactttgcggtcgcttcaggcttctctcggcgacgctgggttggcggagcgcgtcaaggtctcgccggagctctcgatgtcttctctgcgggtcgtgggcaaggatctcgctcgtgcgaccaagaagcggcggtggggcaaggtcctggagttcgtcaggaggacacgctcgttggtctttgttcgtgtggacacggaggcgggagcgaacggggaggtcgtcgcggtgatcgaagaggccgccgctcaagttgccgctgtgttgggcgctgacgtcggcgtcgtgctccacatcaagagccgtgcggttccaagcgcggcggcaatggaaaagcttaccggccggggggagaagaggtcgttgggtgttctggtggacgtgtcgtttcctcggcgggaccgggagctcggcgaggcgagagcgacggcgcacgacgagttctctccggtcagtaatccggcgacgacgcccgtgagcaaccccgtgaccgtgccggccacgaaccccgtggccaacccgatgtccccgggattcgtcaccgtgccgtcgaccaacccgggcaacgggttcgcgagcaacacgaacctgccgccgctgtaccccgagccgacgacggcgccggtcaccatgcccacgcctgacccgacgacgacgatgccgccgcccgtgaccgtgccgtcccccttcgcgaacccggtcgccgcgccgacgaccaccatgccggggacggtgacgaacccggccacgacgccgtcgcagttcccaccggtcaccaacccggtgaccacgtacccgtacccgcagcagggcggcatgccgggaacgacgccggaggtgtaccagcctcccgcgacgacgacgcccggcacagcgcagcagagcgcgccgtctgtgaccgggcaggggcaggcgtggtgcgtcgccaagtcggggctcatggacgccgccctccaggacgggatcgactacgcgtgcggcgcgggcggcgccgactgctcggccatccagcccatgggcacctgctacaaccccaacacgctgcaggcgcacgcctcgtacgccttcaacagctacttccagcggaacccgtcggcgaccagctgcgacttcggaggcgccggcatgctcgtcaacgtcaacccaagctcgggaacttgcgtgtaccagacatcagcaggtttcggcgccggttacagcccgggtacgacgacgggcggcggtggcgtgcccagcggttacactccggggatgccgggcgccggttacggcgcagcgggaggaggggtgtcgggcaccatgggagggggctccggctcgacggtgctgaacgcaaacaaccccggcggcaactcgatgtacggcggctacgacaacacggcggggctcaccgccggctcggcgccgctaccctgcggcggcggcggctgggccgtcctgtgcctcgtctggatggtcaccttcgcatttgtcaaggagaaagtgtagtgtggaaggagcccgcctcgaggggctggaaggaataggatcacactgccacgtgtttgttactcagttatgtagtgttgtgttgtacagatgagtgagatgtttttttccctttagaggccggagatgagaagactagatgtttgtgtcgttgtgtgtgcgcgcgcgcgctcatggtggcagagctgaatctgaatgatttggccatacatgttgtaggtgaacatacaacatcgagtcccttctccatggaccatgtttggttagtctagcgcaaatatgagtgaaagagtctctagatgagttagttagatgatctgattagcacttattatgtcctaaccctaaatcgtagtgaaaacaaatttaagattggtcttaaaaaagt

SEQ ID NO: 125492 - DNA, 1612 bp, Zea Mays
agatatttggaatacaccccgtttgcggttcctgtcccgaggcgggaaactacacagcggagctttcgcggggaggcggcggcggatccgcgctcggttcgccttgccttgccgacgccgccgacgtgccatgggaatcaagggcttgacgaagctgctggcgcagcacgcaccgacagccgcggtgcagcggcgggtggaggactaccgcggccgcgtcatcgccgtagacgccagcgtcagcatctaccagttcctcgccgtggttggaaggaaaggatcagagcttctgaccaatgaggctggtgaaatcacaagtcatctgcagggtatgttgaaccggacgataagaatgctagaagcagggataaagcccgtgtttgtgtttgatggcgagccacctgaaatgaagaaaaaggagcttgcaaaaaggtccttgaagagggatgatgctattaaagatcttaatagagctatggagattggggatgagaatgcaattgaaaaatttagtaaaaggactgtcaaggttacaggaaggcataatgatgactgcaagaggctgttaaggttgatgggtgtccctgtagttgaggcaccaggtgaggctgaagcacagtgtgcagcactttgtgaaaatcaccaggtttatgctgtagcttcagaggacatggacacactgacttttggtgcccgaaggtttcttcgtcacttaactgaccttggttataagaaatctcctgtgacagaatttgatgtgtcaaaggttttggaagaacttggactcacgatggatcagttcattgacttgtgtatccttagtggatgtgattactgtgagaatattagaggtatcggaggacaaagagccttgaaactcattcgtcagcatggttgcatagaagaagttctgcaaaatctgaaccagacgaggaattccagatttcacgtggacctcaccagatccagagggccttatggatttcttgtcaacagaaaacagtttcagtcctgatagagtaacaaaggcagtagaaaagataaaggttgctagggataggtattccccaggcagaatgaagcatttaacaccagttgctagcttacgaggatctcatactgagaaggaaccccagtgcatactaggttctccaggacaaactctgaaggtcatgtcatctccacaagtatgcaagagtccaagctctggtttcagatatggtagctcaaagccatttatgctgggcagacagtcaggatttcatggaatgccttatgctctctcttttatctaaaatctgtagctgctctggtttatgagaaggttgaccgaagctgtagctgcggctacatttttagatgatggaaaccgatatccggctttcacctcactgggaggatatggccaagtagctgtagctgcagctacatgaaaggatgctcacttataatatgttaatctcgtgctactattgtaatctttccatttctattgtaacgtagttaatcagctactgcagttcatcgttgacatctaatgctggttgctgctacaccggttgaccttaccttttgtcaatatattctgagttttcgggatggtgtttttaaa

SEQ ID NO: 125493 - DNA, 1553 bp, Zea Mays
atgggaatcaagggcttgacgaagctgctggcgcagcacgcaccgacagccgcggtgcagcggcgggtggaggactaccgcggccgcgtcatcgccgtagacgccagcgtcagcatctaccagttcctcgccgtggttggaaggaaaggatcagagcttctgaccaatgaggctggtgaaatcacaagtcatctgcagggtatgttgaaccggacgataagaatgctagaagcagggataaagcccgtgtttgtgtttgatggcgagccacctgaaatgaagaaaaaggagcttgcaaaaaggtccttgaagagggatgatgctattaaagatcttaatagagctatggagattggggatgagaatgcaattgaaaaatttagtaaaaggactgtcaaggttacaggaaggcataatgatgactgcaagaggctgttaaggttgatgggtgtccctgtagttgaggcaccaggtgaggctgaagcacagtgtgcagcactttgtgaaaatcaccaggtttatgctgtagcttcagaggacatggacacactgacttttggtgcccgaaggtttcttcgtcacttaactgaccttggttataagaaatctcctgtgacagaatttgatgtgtcaaaggttttggaagaacttggactcacgatggatcagttcattgacttgtgtatccttagtggatgtgattactgtgagaatattagaggtatcggaggacaaagagccttgaaactcattcgtcagcatggttgcatagaagaagttctgcaaaatctgaaccagacgagattcagtgttccagaagactggccttaccaggaagttcggacattgtttaaggaacctaatgtttgtgcaggaattccagatttcacgtggacctcaccagatccagagggccttatggatttcttgtcaacagaaaacagtttcagtcctgatagagtaacaaaggcagtagaaaagataaaggttgctagggataggtattccccaggcagaatgaagcatttaacaccagttgctagcttacgaggatctcatactgagaaggaaccccagtgcatactaggttctccaggacaaactctgaaggtcatgtcatctccacaagtatgcaagagtccaagctctggtttcagatatggtagctcaaagccatttatgctgggcagacagtcaggatttcatggaatgccttatgctctctcttttatctaaaatctgtagctgctctggtttatgagaaggttgaccgaagctgtagctgcggctacatttttagatgatggaaaccgatatccggctttcacctcactgggaggatatggccaagtagctgtagctgcagctacatgaaaggatgctcacttataatatgttaatctcgtgctactattgtaatctttccatttctattgtaacgtagttaatcagctactgcagttcatcgttgacatctaatgctggttgctgctacaccggttgaccttaccttttgtcaatatattctgagttttcgggatggtgtttttaaa

SEQ ID NO: 125494 - DNA, 2637 bp, Zea Mays
ctgaacgccatccgttccatttcttatcccctcccagtcccagccatcgcctcccgatggcgtccctcgtcacgctccccgccatcgccttctctaaccccgccacagcctccggcgctgtccgcctacgcgccgcggccttccgctgctgggcgctccggcggcgcgggtgggcggtggcggctgccgtggcctcgcccaactccgtgctcagcgagcacgccttcaagcggctccagctcggaagtgacgacgaggacgaagaagggccgtacgggagcgacgccgacgaggggttccagggggacgaggaggagctcgccattgccaggctcggcctgcccgacgagctcgtcgccacgctcgagaagcgcgggattacgcacctgttccccatacagagggctgtgttgattcccgctcttgggggccgtgacctgattgctagagcaaagaccggaaccggaaagacacttgcctttggtattcccatgatcaagcaattaatggagcaagacgatggtcggagtacaaggcgaggtcgtactcctcgggttctggttctagcacctaccagagagttagccaaacaagtcgagaaggaaataaaggaatcagcacccaagcttggcacggtgtgtgtttatggcggtgtctcgtataatgtccagcagaatgcactctcgcgtggtgtcgatgttgttgttggcacacctgggcgcataattgatttgataaatggcggaagcctccagttgggagaagttcagtatttagtcctggatgaagctgaccaaatgcttgcagtggggtttgaggaagatgtggaaacaatattacaacagcttcctgcggacaggcaaagcatgctgttctctgcgacgatgcctagctgggtgaagaaactatccaggcggtacttgaacaatcctttgacgattgacttggttggtgatcaagatgaaaaacttgctgaaggaatcaaacttcatgccatcccactcacagcgacgtcaaagcgcaccattcttagtgatctaattacggtttatgcaaagggtgggaaaaccattgttttcactcgcacaaagaaagatgcagatgaggtatcattggcactgacaaccagtattgcttctgaggcacttcatggtgatatttcacagcatcagcgtgaaaggacactaaatggatttcgtcaagggaaatttactgttctagtagctacagatgttgcggcccgcggtcttgatataccaaatgttgatttgattatccattacgaattgccaaacgatccagaaacttttgtccatcgttctggacgcactggacgtgctgggaaagcaggaactgcaatcttgatgtttaccagcagccagaaaaggacagttatgtcacttgagcgtgatgttggttgcaagtttgagtttataagccctccgtccatagaagaagtgctggagtcatctgctgagcatgtcattgctacattgcgaggggtgcacccagagtcaactcaatactttcttggagcagctgagaaattaacagaagaactaggacctcatgcccttgcttctgcactggcacatctgagtggattttctcagccaccttcttcacgttctctgatcagttatgagcagggatgggtgacattgcaactaactagagaaccgggatatggcagaggcttcttttctcctagatctgttactggttttctatctgatgtttgttcagctgctgcagatgaagttggcaaaatatacataacagcagatgagaatgtccaaggagcagtcttcgatttacctgaggaaattgcaaaggacctgcttactatggaggtccccccgggaaacacattaaccaaaatttcgaagctgcctgcgttgcaagatgatagtcctgctactgatagctatggtcgcttttcaaacgaccgaggttccaggaacaggcgttccaggggtggaggtgcttcaagaggccggggtggttgggacaccgacagtgaggaccgataccggcgtggtggcaggagcttgaggtctgacaacgatagttggtcagatgatgactggtcaggcggtgggagaaaatcaaaccgttcctcctcatcctttggtggccgctcatcatcctacggcagccgtggctcaccatcaccatccttcggtgtccgctcatcatccttgggcggtagggagagcagcagaagcttcagtggcgcttgtttcaactgcggcgaatccggtcaccgtgcatcggactgcccaaacaagtagatggcgcattcttccctgcccaagcaagtagacagctcgagcatcaggacgcacgcagagcgaaaacccaagcgcgcccctgatcgaccagtatactacgcctgacagccagctacagtttttgtgtggctgtctcgtcaggactgaagattttggcatgctgattccagttatttagatccagaggagtccttactctacagggatatgttgagtctcagtagaattgtgtaaccagtaaccacacacacgaacaatggcggaggactaaaatataaaatcatagctggcatattgaacacgtaacatatattgcagttggcatggctcttttcttttcctt

SEQ ID NO: 125495 - DNA, 1531 bp, Zea Mays
tggaaattcaatgcttctggggactactcttctagttcagcctacaaagttcttctccttggagcggttgattttggcccggctgagcggatttggaagtcttgggctccgggtttatgcaaagggtgggaaaaccattgttttcactcgcacaaagaaagatgcagatgaggtatcattggcactgacaaccagtattgcttctgaggcacttcatggtgatatttcacagcatcagcgtgaaaggacactaaatggatttcgtcaagggaaatttactgttctagtagctacagatgttgcggcccgcggtcttgatataccaaatgttgatttgattatccattacgaattgccaaacgatccagaaacttttgtccatcgttctggacgcactggacgtgctgggaaagcaggaactgcaatcttgatgtttaccagcagccagaaaaggacagttatgtcacttgagcgtgatgttggttgcaagtttgagtttataagccctccgtccatagaagaagtgctggagtcatctgctgagcatgtcattgctacattgcgaggggtgcacccagagtcaactcaatactttcttggagcagctgagaaattaacagaagaactaggacctcatgcccttgcttctgcactggcacatctgagtggattttctcagccaccttcttcacgttctctgatcagttatgagcagggatgggtgacattgcaactaactagagaaccgggatatggcagaggcttcttttctcctagatctgttactggttttctatctgatgtttgttcagctgctgcagatgaagttggcaaaatatacataacagcagatgagaatgtccaaggagcagtcttcgatttacctgaggaaattgcaaaggacctgcttactatggaggtccccccgggaaacacattaaccaaaatttcgaagctgcctgcgttgcaagatgatagtcctgctactgatagctatggtcgcttttcaaacgaccgaggttccaggaacaggcgttccaggggtggaggtgcttcaagaggccggggtggttgggacaccgacagtgaggaccgataccggcgtggtggcaggagcttgaggtctgacaacgatagttggtcagatgatgactggtcaggcggtgggagaaaatcaaaccgttcctcctcatcctttggtggccgctcatcatcctacggcagccgtggctcaccatcaccatccttcggtgtccgctcatcatccttgggcggtagggagagcagcagaagcttcagtggcgcttgtttcaactgcggcgaatccggtcaccgtgcatcggactgcccaaacaagtagatggcgcattcttccctgcccaagcaagtagacagctcgagcatcaggacgcacgcagagcgaaaacccaagcgcgcccctgatcgaccagtatactacgcctgacagccagctacagtttttgtgtggctgtctcgtcaggactgaagattttggcatgctgattccagt

SEQ ID NO: 125496 - DNA, 1966 bp, Zea Mays
acatctcacacacttgggttggtgactagctagcttgctcttatccgcctgcattccatggccaccgtcagtctcgcgctctcgctgcgattcgcgccgtcgtcgcgaccgctgaatctccaccgcaggaggcccgacgccgtgacctgccgcgcaaccaccgccacgttccaccggctcgacgccgtcgcagtgagagaggaagagtctaaatttcggagggccgcggcggagggctgtaacttggtgccgatcacgagaagcattttctctgatcatcttactccggtgctcgcgtaccgttgcctagtcaaagaagatgatcgtgaggcgcctagcttcctcttcgaatccgtagaacaagggtccgaaggtactaatatgggaaggtatagcgttgtggcggcccagcctgctatggaggtattggcgaaggctaacaaagtcacggtgatggaccatgagttgaagtcgaggagggagcacttggtgcctgatcccatgaagattccaaggaccatcatggaacagtggaacccgccgcaagttactgatggcctccctgatgcgttttgtggagggtgggttggattcttctcatacgatacagtgcgttatgttgagacaaagaagcttccttttagcaaggcaccgcatgacgacaggaacattcctgacatgcatttaggcctctataccaacgtcattgtgtttgatcatgttgaaaagaaaatgcatgttatccactgggtgaggacggactgctaccaatctcttgacgaagcatatgaagatgggacaaatcggcttgaatctttgctatcaagattacattgcttcaacgtcccaacgctttcttctggttctataaaacttaacgttggaggctttggatcggcgacgctaaagtcaaatatgtcaaaagaagagtataaaaatatcgttgtccaagctaaagaacacatcttggctggtgacatttttcaagcagttctaagccagcgcttggagagacggacgttcgcggacccctttgagatctaccgtgcgttgcgcatcgtcaatcctagcccatatatggcctatctacaggcacgaggctgtattctcgtggcatcaagccctgaaattcttacgcgggtacaaaagaggacagtagtcaatcgaccgcttgctggaaccataagaagaggcaaaacaaaggcagaagacaaagttttagaacaattgcttctgagtgatgaaaagcaacgtgctgaacatataatgcttgtagaccttggaaggaatgatgttggaaaggtctccaaaccaggttcagtaaaggtggagaaattgatgaatattgaacgatattctcatgtcatgcacatcagctcaaccgtcaccggtgagctacgtgatgatcttacgtgctgggatgcgctacgagctgcattgccagttggaacagttagtggagctccaaaggtgagagcaatggagttgatcgacgagctagaagcggacatgcgtgggccgtacagcggtggcttcggagggatttccttcaacggcgacatggacatcgcgctcgcccttcgcaccatcgtcttccccaccgcatcccggttcgacaccatgtactcctacgcgaacgggaagtcacggcaggagtggatcgctcaccttcaggccggagccggcatagtcgccgatagcaagccggatgacgagcaccaggagtgcctgaacaaggctgctggggctgctcgcgccattgacctcgccgaatccacgtttctccaagagtagtcgcctaggcctagctatagtccggaactatgttgttagttgattatggattattgtactggaaaacatatatatgttttatttatttacttggttgaataaaaactcgattgtaataaagttattagtattaaatgtaaaacaaatgaccatctttttagcatcatatata

SEQ ID NO: 125497 - DNA, 1509 bp, Zea Mays
gcaggcaaaaagagagcgggacatcaacccggcgccaaaaggtcctctccgaaaccacgccgcaccgccgcattctcgcaaacacctcgccggcggaggtgacgctccagatggtcaggtccaacgtctctcccggcggctccggcgcgcccccgggttcccccaggctccggcgcgccccagaggtgtcggcgcaggtggacgtggaaggcgcggtggcgtgggcgcgtggcgcggccgcgggggagctgtgggccgtgcgcagacgcaaccgtggcatcgacgtcgacgaggagcagctgagggcggtgatgctggcggtgcggcagttgcgctacgagctcgaccccgacgatcccgacactccctaccccaagaaacagaaaagacatcacaaacaaggcacgaggagttctgaaaggatagctggtcgagtgagtcgcgtatctagttttcttgaatcaacgagcaaacatattgggatagaccctgacaaatgtgcagctgctgtccctgagtggattaatgacccatctgaggaatgtaaggctaactatagaagtcacaatgataccttacaaaggatgggcacggtggtcatgctgccacccattgtagatccaccgaagacaaggaaatcagaggatggtaagtgtaaatgttctgaccctggatctgagacctgtgcaaaagttcatgtaaaagaggcctggaagagggtcaagtatcaattgggtgagcaggctttcagaaactgcgggtttgatgcaatgggtgagcgagttctgaagttatggacagcagaagacaagaaaaaacttgctgatattgagaagttgattcctcagagtaagtgtagtgataaatgcttcatgaaggttgccttgaagcagtttagctcagagagaacaacagatttggctaagtattactacaacatttttcttccaagaagattggccagcctgagtagagcagaggctacatactccatagatgtgagtctagaagatgaaggcaaagatcaagtgcatctctctagagagaagggtaaaggctctggatcgtcttccaaaaggtccctgaagtaggagaaatgccatatatgcggctgaaattttgctgcggagaggaagaggaagtaggaagaacctgaaataccttaattgtccattcttttttgattttctgatcgttgccatcacaattttgacggctccgaaaaataccattagcactcacctattctgagaattgagatacgctattataactcttaggttctcagaaatacgccattctatgcacttcagatatgctattatatttctgtattgcggagtattgcctagatgtcatcttctttctcctcttcccatcgtcaaaatcatccagagctgctacgacctcgggccccttcttttttttgttttcttgagcgaaacagatcctcactctccccgtgtggtggatttggcataccaaattatttcgatattttttgtagag

SEQ ID NO: 125498 - DNA, 1733 bp, Zea Mays
cccagccgtcccagcggccggacggcgacaccaaccacgccccgttccgttgaacagcgtcgagtcgtcgccccatatcaaacgcccacgcagcgccggggatggagcgcggccggcaccagatgagagctgcctcccacacatggcatcgtggccagcagcgtcaaggaggcggtccagcggcggcatgaaaagcgccgagctttcgggctccggtgcttcttacggctatggccggacgtcctcctcccctgatgcctgcggctacggccggcagttctcggcctacagcgcccgctcctcccaggtcagcaggagtggctccttcagtgcggcggcgcagcgggtcgccggcgccttcaccggctgcttcgtgccgcgccggcaggtcaaagccggggaagaggaggaggaggaggagaagaagagcaagcgctccatggattcaggatcctatcatggatggaatgaagcaaacttgagtgcagcagcaggatcatggcaggaaggcagggctctcaccatcgctgacgtgtcgaaggcaacatcaaacttcagcgaaaagaacgtgataaggcagggacgctcaagcaccatgtacagaggaaagctcagggatggttctcagatcgccgtcaaatgtgtcacgaagctgaacgaccagagtccgacggctgaactctggagggagcttgagaagatccagcacaggaatctggcgaggctctttggattcttcgaacgcgcagctgatagtctcgtcgtagtcgagtatgtcggcaatggttccttgagggaacatttggatgaatcatgtggaaatggtttagagctcgcgcaacggctcaacatcgcgatcgacgttgctcaggccatcacctacctgcacgagtacaaagagcgtccgatcatccatggcggcatccggtcgtcaggcgtgctactgaccgacgcgctggcggcgaaggtggccggctttgggctggccgggactgcggcctcggggtcgggctcaggctccgacgcaacgccggcgaggagcgccgccgggtacgtggacccggagtacctgatcacgtaccagctgaccgacaagagcgacgtgtacgccttcggcgtcctcctcgtggagctagccaccggccggccgcccgtcgagcgcagccgcggcggcgaggcccggctcaccaccaaatgggcgttgcagaagtgcagagcaggggaagccgtggtggccatggaccccaggatgcggcggagcccggcgtcggtggccgcagtggagaggacgctggcgctggcagcgcagagcgtcgcggcggccagggatgagcggccgtccatgcggcggtgcagcgagctgctgtggaccatccggagagactaccaccgccaggaggagccgcgctgcggcgccgtcgctgcggaacgtagcgacgagtgggtcatcaggtagcttagcttgccagttgaatggatatgattctgctttggattgatcggcatggaactgtaactagcctgtaagtggatgcgaagttctaggaagctgcagatttttttagtacgtacaacttctgtgattactatcaaatgatgtagtcattgcagccaatacctgcgaatttctagaaaacagtagacgttgtaacaatcagacgactttgctgaagtagccacttgatccctcaatcaaatataaataaccatcgaaggatgaggatgttgatgta

SEQ ID NO: 125499 - DNA, 1649 bp, Zea Mays
gttccgttgaacagcgtcgagtcgtcgccccatatcaaacgcccacgcagcgccggggatggagcgcggccggcaccagatgagagctgcctcccacacatggcatcgtggccagcagcgtcaaggaggcggtccagcggcggcatgaaaagcgccgagctttcgggctccggtgcttcttacggctatggccggacgtcctcctcccctgatgcctgcggctacggccggcagttctcggcctacagcgcccgctcctcccaggtcagcaggagtggctccttcagtgcggcggcgcagcgggtcgccggcgccttcaccggctgcttcgtgccgcgccggcaggtcaaagccggggaagaggaggaggaggaggagaagaagagcaagcgctccatggattcaggatcctatcatggatggaatgaagcaaacttgagtgcagcagcaggatcatggcaggaaggcagggctctcaccatcgctgacgtgtcgaaggcaacatcaaacttcagcgaaaagaacgtgataaggcagggacgctcaagcaccatgtacagaggaaagctcagggatggttctcagatcgccgtcaaatgtgtcacgaagctgaacgaccagagtccgacggctgaactctggagggagcttgagaagatccagcacaggaatctggcgaggctctttggattcttcgaacgcgcagctgatagtctcgtcgtagtcgaaatcatgtggaaatggtttagagctcgcgcaacggctcaacatcgcgatcgacgttgctcaggccatcacctacctgcacgagtacaaagagcgtccgatcatccatggcggcatccggtcgtcaggcgtgctactgaccgacgcgctggcggcgaaggtggccggctttgggctggccgggactgcggcctcggggtcgggctcaggctccgacgcaacgccggcgaggagcgccgccgggtacgtggacccggagtacctgatcacgtaccagctgaccgacaagagcgacgtgtacgccttcggcgtcctcctcgtggagctagccaccggccggccgcccgtcgagcgcagccgcggcggcgaggcccggctcaccaccaaatgggcgttgcagaagtgcagagcaggggaagccgtggtggccatggaccccaggatgcggcggagcccggcgtcggtggccgcagtggagaggacgctggcgctggcagcgcagagcgtcgcggcggccagggatgagcggccgtccatgcggcggtgcagcgagctgctgtggaccatccggagagactaccaccgccaggaggagccgcgctgcggcgccgtcgctgcggaacgtagcgacgagtgggtcatcaggtagcttagcttgccagttgaatggatatgattctgctttggattgatcggcatggaactgtaactagcctgtaagtggatgcgaagttctaggaagctgcagatttttttagtacgtacaacttctgtgattactatcaaatgatgtagtcattgcagccaatacctgcgaatttctagaaaacagtagacgttgtaacaatcagacgactttgctgaagtagccacttgatccctcaatcaaatataaataaccatcgaaggatgaggatgttgat

SEQ ID NO: 125500 - DNA, 1006 bp, Zea Mays
gcaagaaataatgcttttgtgctgatttcagcaagctttcattagagctatattatgggcctcgaggcccatcgccctcggaataaggcgcggacttacaggtgggccctttgtcagtaagcttgccctcgggccatgtatgatgtatcccgttcgggtgcggcccatgtgagaaggcgcgcgcctggacctcatcggtgtttgcttccgcagttccgccgtcggcaaggaaggaaaaagagagcagagaaccctagctagagtttggcgagtggtgcggaggcgcggctgctcctgctcgtcgcgacgtcgaatttcagcgccgcccgcgcgatccttggtctcttcgcccgtgaggtcctgcttcccgtgttgcttctcagctccactcctgacgtgctttctctgagtttctattctgttggttcggtctgtcctctgcaggagaggcgcgacaatggctgggaaaggcgggccgaccaacctggagaaggagcagatgtttgggatggcggagaaggagatggagtacagggttgatcttttcaacaggcttacaaagacctgttttgagaagtgcgttgaaaaaaggtataaagaagctgagctcaatatgggtgagaacagttgcattgatcgatgtgtttcaaagtattggcaggtgactaatttagtaggtcagatgcttgggaaccagcctcagatgtgaaccgagatgcactagttccattttgtagcagaatcctattgctctgtttattctttttggttggtattagaatcccgccacctgctattaagtacaccaatacagcaccagacttgttaatgcgtggatcgctctgaagaaaaatcacggtgtcttgctctttccagtgatgtgcattatctttgaatcatgaacagggaacatgcctgtaataaatttatagagctcgagagtgatcctgtttcgaaagcttgttctctttggtacgttggttcgttaaattctggatgtgtgctc

SEQ ID NO: 125501 - DNA, 919 bp, Zea Mays
gcaagaaataatgcttttgtgctgatttcagcaagctttcattagagctatattatgggcctcgaggcccatcgccctcggaataaggcgcggacttacaggtgggccctttgtcagtaagcttgccctcgggccatgtatgatgtatcccgttcgggtgcggcccatgtgagaaggcgcgcgcctggacctcatcggtgtttgcttccgcagttccgccgtcggcaaggaaggaaaaagagagcagagaaccctagctagagtttggcgagtggtgcggaggcgcggctgctcctgctcgtcgcgacgtcgaatttcagcgccgcccgcgcgatccttggtctcttcgcccgtgaggagaggcgcgacaatggctgggaaaggcgggccgaccaacctggagaaggagcagatgtttgggatggcggagaaggagatggagtacagggttgatcttttcaacaggcttacaaagacctgttttgagaagtgcgttgaaaaaaggtataaagaagctgagctcaatatgggtgagaacagttgcattgatcgatgtgtttcaaagtattggcaggtgactaatttagtaggtcagatgcttgggaaccagcctcagatgtgaaccgagatgcactagttccattttgtagcagaatcctattgctctgtttattctttttggttggtattagaatcccgccacctgctattaagtacaccaatacagcaccagacttgttaatgcgtggatcgctctgaagaaaaatcacggtgtcttgctctttccagtgatgtgcattatctttgaatcatgaacagggaacatgcctgtaataaatttatagagctcgagagtgatcctgtttcgaaagcttgttctctttggtacgttggttcgttaaattctggatgtgtgctc

SEQ ID NO: 125502 - DNA, 875 bp, Zea Mays
gcaagaaataatgcttttgtgctgatttcagcaagctttcattagagctatattatgggcctcgaggcccatcgccctcggaataaggcgcggacttacaggtgggccctttgtcagtaagcttgccctcgggccatgtatgatgtatcccgttcgggtgcggcccatgtgagaaggcgcgcgcctggacctcatcggtgtttgcttccgcagttccgccgtcggcaaggaaggaaaaagagagcagagaaccctagctagagtttggcgagtggtgcggaggcgcggctgctcctgctcgtcgcgacgtcgaatttcagcgccgcccgcgcgatccttggtctcttcgcccgtgaggagaggcgcgacaatggctgggaaaggcgggccgaccaacctggagaaggagcagatgtttgggatggcggagaaggagatggagtacagggttgatcttttcaacaggcttacaaagacctgttttgagaagtgcgttgaaaaaaggtataaagaagctgagctcaatatgggtgactaatttagtaggtcagatgcttgggaaccagcctcagatgtgaaccgagatgcactagttccattttgtagcagaatcctattgctctgtttattctttttggttggtattagaatcccgccacctgctattaagtacaccaatacagcaccagacttgttaatgcgtggatcgctctgaagaaaaatcacggtgtcttgctctttccagtgatgtgcattatctttgaatcatgaacagggaacatgcctgtaataaatttatagagctcgagagtgatcctgtttcgaaagcttgttctctttggtacgttggttcgttaaattctggatgtgtgctc

SEQ ID NO: 125503 - DNA, 919 bp, Zea Mays
gcaagaaataatgcttttgtgctgatttcagcaagctttcattagagctatattatgggcctcgaggcccatcgccctcggaataaggcgcggacttacaggtgggccctttgtcagtaagcttgccctcgggccatgtatgatgtatcccgttcgggtgcggcccatgtgagaaggcgcgcgcctggacctcatcggtgtttgcttccgcagttccgccgtcggcaaggaaggaaaaagagagcagagaaccctagctagagtttggcgagtggtgcggaggcgcggctgctcctgctcgtcgcgacgtcgaatttcagcgccgcccgcgcgatccttggtctcttcgcccgagaggcgcgacaatggctgggaaaggcgggccgaccaacctggagaaggagcagatgtttgggatggcggagaaggagatggagtacagggttgatcttttcaacaggcttacaaagacctgttttgagaagtgcgttgaaaaaaggtataaagaagctgagctcaatatgggtgagaacagttgcattgatcgatgtgtttcaaagtattggcaggtgactaatttagtaggtcagatgcttgggaaccagcctcagatgtgaaccgagatgcactagttccattttgtagcagaatcctattgctctgtttattctttttggttggtattagaatcccgccacctgctattaagtacaccaatacagcaccagacttgttaatgcgtggatcgctctgaagaaaaatcacggtgtcttgctctttccagtgatgtgcattatctttgaatcatgaacagggaacatgcctgtaataaatttatagagctcgagagtgatcctgtttcgaaagcttgttctctttggtacgttggttcgttaaattctggatgtgtgctcctccg

SEQ ID NO: 125504 - DNA, 711 bp, Zea Mays
atggtgtctttcctactttaggacttaggttggaaaataacgatgtatttctagtgtacctcaacacctgcttattgtgaacaaatagttgatctccctccacaggcaacagatgcctggagatatgctcgatcgatgttttttctgtagcatggtgatcttgatgctctgtaaccttcactttagcggtgccacttgcagatttatagttctgcttattccatagcacaatagttttcatgttgcttcacctatgcccaactgcccatgttgatatactgacaataattctcccatttgatatgtgatgtttgctagtttgtgtttcaccatattaacccctatctttcgggttgatcttttcaggtgactaatttagtaggtcagatgcttgggaaccagcctcagatgtgaaccgagatgcactagttccattttgtagcagaatcctattgctctgtttattctttttggttggtattagaatcccgccacctgctattaagtacaccaatacagcaccagacttgttaatgcgtggatcgctctgaagaaaaatcacggtgtcttgctctttccagtgatgtgcattatctttgaatcatgaacagggaacatgcctgtaataaatttatagagctcgagagtgatcctgtttcgaaagcttgttctctttggtacgttggttcgttaaattctggatgtgtgctc

SEQ ID NO: 125505 - DNA, 131 bp, Zea Mays
ggggagttctcgcgtgcattttgcctccaaagccagcaacggtatttgaaaaacatagttttgcaacttgtttttaccttttctacactaattacgaaacaaaatacttggttaacgacatcgatttcccc

SEQ ID NO: 125506 - DNA, 863 bp, Zea Mays
cctttcaattcgtagtactcgaacccgggagagccaccacctaccagacagaggttggaagcgacggcgctgccggagatggagacggagacggaggcggcagcggcgaggcgggcgaaggagtctctggagctggctttccagatgtcccagatcctagacaccggcctcgaccgccacaccctgtcgctgctcatggcgctttgcgaccgcggagccaaccccgaggcattggccgccctcgtccgcgagctctcctctgctgctcccccaacctccgccgcggcttcctcccccgtgagcaacggcgccgcggggccggcctcggcaattgcgcccacgttctcctccggccttcgccgtccctagggtgctgctaaaaagtctgaatggaactggtgtagttttccaagcaagacaagatctcgctgctggaatcgctggatgaaaaggattgcctttacaattccatgtgcgcgctgctgtggtggtgtggttcgaccacaaaacatgtggctgggttcatagagccacagaaatacacgcgcggcgcatccgcacccctctcacgacttcttgggtttaaaacagctgtatggctgtataatcttgtggattgaggagtcattgtctcttgacgcccatgattggacatttggatcagttccacgcctgatccttcgttaaattattctcgctttgacgccacagccttttgcactggcatgtgcttaccctctgagggaacgtgccatgtctacccttcctgcagtgacatctttattatctctacacccctttcctgttatgagtgtatttactgttcctctacttggcctggtctcgatctgatcgaactcttg

SEQ ID NO: 125507 - DNA, 2307 bp, Zea Mays
tatttccatggaaccgaacgcgtgctgcgcctcctgtacggcgcggaggtaggtcaagccgcggttgggacgcggtgtggcgtgggcgagccgaaccaagcggcgatcgatcgaaacgaggcgtcgcgtggcagccggagatgtcgcagaagaggcagccggaggagggcgacgtcccgcggcgcgccgccgatgccggcggcggcggcggaggagacgagcccggtgggagctcgtcgcgctcctctctgccccagcgccacggcgagccgaagcggcagaggatcgcccttcgcgatgtgatcacggaggtgatgcggaacaccagcatcgagaagtttctaatcgcgctcgagcccctcatcaggagagtggtaaaagaagaaattgagtcggcttttgcaaaccatgcctctatgatggcaaggagtgtcacagacagtgttccatctgtgtcaaagaatttgcagctgcagttcatgaccagactttctcttccaatatttactggatccaagattgaaggagagggctccttaagtataactattgctctagtcgacgctttgacaagacaaattgtagcaccaggcaaagagttccagataaaggtcgagattgtagttctggagggggattttgaaagtggagaagatgatgactggacagctcaggagtttaacaataacattgttaaagaaagagaaggcaaaaggcccttgatttctggggatgcattcattgccctcgtcgatggcattggaacagtaggggaactttcattcacagataactccagctggacacggagccgaaagttcaggctaggagcaagaacagaggatggttctttcaatggtgtaagagtacgggaagcaaaaactgaatcatttgtggttaaggaccatcgaggagaattgtacaagaagcaccacccaccatttcttgaagatgaagtctggcgcctagagaaaattggcaaggaaggtgcttttcacaagcgtttgaatagggagaacatttgcactgtcaaagattttctcaccttgttaaatcttgatgcttctaggcttcgaaagatattaggtggtggcatgtcaacaaagatgtgggaggccactgtggaacatgcaaaaacatgtgttctaactgacaaagtgcatcactactatcctgatggtctaaacaaagctggtgttgtattcaatgtagttggagaagtaagagggttaatatctgataaatatgtttttgttgatgactttactgaaaaggagaaggccgaagcacgtgcagcagtgaagcaagcatatgaacactggaaggatgtccatacttgtgacaatgaaacgcttgtggaaaacccttcacatccattcaatttgggatctccatctttgcatgaaaatcagtataaccagttgcccacacaagtttctactgatggttttagtttgagcaattcggccatactatcacccaacattttctcaatggagccatcgagtgctttagacccttgtagtatattggagactgaagaaagcagtgctaatcaatttcagtcggtgttgcccccagttggtggccatgaagtgccccgagaacctcagacgctggataagttctccaactcgttggtatatgatgactgcagcgcccatccctcattcagtgaaagctattacagcactgtagatccaagcatgtccttcgacacacaagatcttggagctgcactgaaaggcttcattgcaaccatatcgaagcctaaggcggcatatagaggatggagaacattgtcttatgtgctaggatggattttctataccaagagaattgttgcaaggagaaagaaacatgggaaataagtgaacacaagtctttgtgtagttaaatgcgaatataagcttagagaatgagagattatgtacattagtttgtttcttgtcacagctggtaagctctgctggtttcttcagctgtacatgggctgtcagctatggttcgctatgcggctgtaaataatcaaatgaagtttgtacagggtgagggatgcgcatagcatttctgatgttttggatggatgccggagcttgctttttgatgcggcccgtgtattatctatgtagtagtatgcagtatgctgcttaattctgcagtattttcgacatttggaatctatatgtcgcatggtaacaagtttaattctgcttattttcgtacacagataatactgcagaattaccatgccgcaaactgatttttatgtagacagtaatgtgtttatggatatggttgacactt

SEQ ID NO: 125508 - DNA, 3297 bp, Zea Mays
gcggcacctacgcggagggcggacgacgacgacgggggagacccggtttgacgcgcggcccgcgggatgcggatgcctctgctctgctctgctcggccgtgcgaatattttactgctcggcctcggccgcggcccgcgggggagccgttgccgttgccgttgccgttggatgtgatgtgcgtgggtggcagtggcagccgcagccgctgccgctgcgtgcgtgagtcaccgcggagtcatcagtgccctgcctgccgttggtgcgctgcctcgtgcctgcgcctacacgaccagttgcttcaaagttcaaatagcgcatcgccaccaccaaagtcggtagtactttcgctagctcccttccgttcccttcccacgaaaaccggagagggagtgagaagaagcaacaagaagcggagagccaacgcgcaacgcaacgccctgagatggcggcgccggcgccggcgccgaagcaggaggagctgcagccgcacgccgtcagggaccagctgccctccgtctcctactgcctgacaagcccgcccccatggccggaggccgtcctcctcggcttccagcactacctcgtcatgctcggcaccaccgtcatcatccccaccgcgctcgtgccccagatgggcggcggcaatgaggagaaggcgcgggtggtgcagacgctgctgttcgtggccgggatcaacacgctggtccagagcttcctcggcacgcgcctccccgccgtcatgggggcctcctacaccttcgtcgcgcccaccatctccatcgtcctcgccggccgctacagcggcatcgccgatccccacgagaaattcgtgcgcatcatgcgggggacgcaaggcgcgttcattgtggcctccacgctccaaatcatcatgggcttcagtggcctttggcgcattgtcgtcaggctgctcagtccgctgtctgctgctcccttggtcgctctcgtcggatttggactctatgagctagggtttccaagtgttgccaaatgtgtggagattggtcttcctcagattttactgctggtggcgctttctcagtacataccacatgcggcccccttgctgagtactgcctttgagcggtttgctgtcataatgtccattgccctcatctggctttacgccttcttcctgacggttggcggtgcctacaagaatgctgcccccaaaacccaattccactgccgtactgatcgatctgggcttgttgggggcgctccatggataagtgtaccctatccgtttcagtggggagcaccaacctttgatgccggtgaagcttttgctatgatggcagcttcttttgttgcccttgtggagtccactggtgcgtttatcgccgtctcacggtacgccagtgcaacaccatgccctccttccgtcatgagccgtggcattgggtggcagggagttggcattttgctaggtggcatatttggaacagctaatggcacctctgtgtctgtcgaaaatgctgggttgctcggtttgacacgcgttggtagtagacgtgttgtgcagatttctgccgggtttatgatattcttctccatccttggtgaggctcatgcttttatgtgatcatgtaatcaacaacttctggctgtaatacttcgtgttaagtagttaatgttaactttaagactggcctgtttaacattgagttgaacaattcatactatgctcctgcacttgtaatgataatcagctgtgatcgtcaacatcgcccactatgcggcttgatcctgtctcggttggtcatatccttcaagctgcttttggtggttctgccaggggattcatggtcctcccgcttgccgatcgggttttccgtttctcggtttcctccagggatgttgggttccacatctacaactccagatgcatcgctcgttctgaattcaaagctttcttcaacttgtggaactcgggtggaccaaattggaactatgagctcaaactattccttcaggaggagaatgccaactggtggtttgtctcgagcaggaaaaaaatctcattcgctgatgtggttaggcgcccgcctttgactggtgcaaatgctgtcccagttcgtcgacatcgtcgttctttctgttcagctggaaaattgattgctccgaggacttctgttttcaatagattgggtttccctttcggagctcggggtccgaggtctcctgccaactcttcgacctcgggggcctcgtcgcgtgatcttcatcgtgagactgcccctacggcgggttttcccaggcctaacgggtgcaggaatggacgcggatgtcggggctgtgatgattgctccctttcaaattcaaagtcaatttcaaattcaactgttgggcggcattggcctcgtaggttgcagtggcggcccattctgcgtaatgggcccctcaggcctgggcttgggcctagaaggatggatttgtcgggctcggcgcctgaaacgtccttggagctcgcgttgggcgtcacttcaacaaaaccccaacctgcttctccaccctttgctctccggcgatcgtctgagaatctgtcaatggcgtaccagcgcgtggacccggggccgttcctccctccagggttcagcgccgcggtggtccagcatcgtgggattatggtcaggtcagtttcgcagcgtttgccgccatttcacgaggactgggcgattataaatacccatcctttaccggagcacgaggtcttgttccctgcggttagggatgtggtcagggagtaccttgttgagcatcagagggttggtgtccgtgccattcagcgctcacatttgggacaagtgttggtgcaattccgtagtgtgctggagcgggataacttggttattcttggtccccagcagtatttggacgctactttcaccgcggccgccattgggtcgtttgggaggttgattctgtgggaggaggaccgaagtaatatctctagaaccctgctccgtgttcgggtcacttcgctagaggaggttccccaatttattgttttttcggaggccgagggttttgctggggattcctggacggtgcaatgtgaaattatccagcagcttttgcttggcggtcaggcacaggatgaggaccccatccctccgccacctgaggatggtcatcagctccccctggccttcttcgggctgggccaacctttgcccccggctgggcttgacctaaactttcctccggaacctgagggtggagtgttgccggctcagcaggatgacttggggcatggagagtgggatcagtggatt

SEQ ID NO: 125509 - DNA, 1790 bp, Zea Mays
caaagttcaaatagcgcatcgccaccaccaaagtcggtagtactttcgctagctcccttccgttcccttcccacgaaaaccggagagggagtgagaagaagcaacaagaagcggagagccaacgcgcaacgcaacgccctgagatggcggcgccggcgccggcgccgaagcaggaggagctgcagccgcacgccgtcagggaccagctgccctccgtctcctactgcctgacaagcccgcccccatggccggaggccgtcctcctcggcttccagcactacctcgtcatgctcggcaccaccgtcatcatccccaccgcgctcgtgccccagatgggcggcggcaatgaggagaaggcgcgggtggtgcagacgctgctgttcgtggccgggatcaacacgctggtccagagcttcctcggcacgcgcctccccgccgtcatgggggcctcctacaccttcgtcgcgcccaccatctccatcgtcctcgccggccgctacagcggcatcgccgatccccacgagaaattcgtgcgcatcatgcgggggacgcaaggcgcgttcattgtggcctccacgctccaaatcatcatgggcttcagtggcctttggcgcattgtcgtcaggctgctcagtccgctgtctgctgctcccttggtcgctctcgtcggatttggactctatgagctagggtttccaagtgttgccaaatgtgtggagattggtcttcctcagattttactgctggtggcgctttctcaggtacgacgattgcatgaggaattcaggacggctgttgtgatttttaatcgaaagggctgctggtgctggtggatccttgagaacgatgtgcaattcctgttcctccttttgcagtacataccacatgcggcccccttgctgagtactgcctttgagcggtttgctgtcataatgtccattgccctcatctggctttacgccttcttcctgacggttggcggtgcctacaagaatgctgcccccaaaacccaattccactgccgtactgatcgatctgggcttgttgggggcgctccatggataagtgtaccctatccgtttcagtggggagcaccaacctttgatgccggtgaagcttttgctatgatggcagcttcttttgttgcccttgtggaggtatgctatttagacaaacccatgatgtttttgcagctttgttatcctagatgggactccatatcatcttcaagctaaatgctccttactgcattatgatgcagtccactggtgcgtttatcgccgtctcacggtacgccagtgcaacaccatgccctccttccgtcatgagccgtggcattgggtggcaggtgtgtattcgaaaatatcgaatgacatctgggaactgacttacccgactaatttgtccgagtgccattccagggagttggcattttgctaggtggcatatttggaacagctaatggcacctctgtgtctgtgtaagtagattctagatggctgcttcaactgatttttatagtgcgatctgaatactcttcaacgtttgtctgattttgaattttattatggaacagcgaaaatgctgggttgctcggtttgacacgcgttggtagtagacgtgttgtgcagatttctgccgggtttatgatattcttctccatccttggtgaggctcatgcttttatgtgatcatgtaatcaacaacttctggctgtaatacttcgtgttaagtagttaatgttaactttaagactggcctgtttaacattgagttgaacaattcatact

SEQ ID NO: 125510 - DNA, 973 bp, Zea Mays
cggcttaccggtagcagtagcactgacaccgattatattcctcccttcgctgcagaaattcgtgcgcatcatgcgggggacgcaaggcgcgttcattgtggcctccacgctccaaatcatcatgggcttcagtggcctttggcgcattgtcgtcaggctgctcagtccgctgtctgctgctcccttggtcgctctcgtcggatttggactctatgagctagggtttccaagtgttgccaaatgtgtggagattggtcttcctcagattttactgctggtggcgctttctcagtacataccacatgcggcccccttgctgagtactgcctttgagcggtttgctgtcataatgtccattgccctcatctggctttacgccttcttcctgacggttggcggtgcctacaagaatgctgcccccaaaacccaattccactgccgtactgatcgatctgggcttgttgggggcgctccatggataagtgtaccctatccgtttcagtggggagcaccaacctttgatgccggtgaagcttttgctatgatggcagcttcttttgttgcccttgtggagtccactggtgcgtttatcgccgtctcacggtacgccagtgcaacaccatgccctccttccgtcatgagccgtggcattgggtggcagggagttggcattttgctaggtggcatatttggaacagctaatggcacctctgtgtctgtcgaaaatgctgggttgctcggtttgacacgcgttggtagtagacgtgttgtgcagatttctgccgggtttatgatattcttctccatccttggtgaggctcatgcttttatgtgatcatgtaatcaacaacttctggctgtaatacttcgtgttaagtagttaatgttaactttaagactggcctgtttaacattgagttgaacaattcatactatgctcctgcacttgtaatgataatcagctgtgatcgtc

SEQ ID NO: 125511 - DNA, 1149 bp, Zea Mays
ctccagtccaagcaggagcaagaacaacaggaagagtcgaagagaggagatcagggacaagaacagccagaaagaggagaggaggctcatcaatcgcaactaattctcgcagtcgcagagacaagcaatcatcagacatgagaacccaggcgctgttcttcctcgcactcgcacttatcggcgccgtcctcgcgcagtccagcaacaggcaccaccaccactaccaccacgcccatgtccaaggcaaaggtaggtgccccagtgccccgactcctactcagctcttgccaaaaagtcgcaaccttggagttttttttgccgacccgcagtcaatccaagatttattttctgttttttccgcactggttctggtcggaaagttcaagatttgttccttccttccttgctatcagcatgcgtgggttgttcagtttggctcatgggtcccgaatcgacctctggtttcagggcagggagccggaggaggaggaggggagctggcgagccgggcgaaggcggcggcgcgcgcgtggccgtgctgtgacagctgcggcgggtgcaccagatcggagccgccgcggtgccagtgcctggacgcggcgccccgcgggtgccacccggcctgcagggactgcgtcaagtccagcctcagcgccgacccgccggtgtaccagtgcatggaccgcgtccccaacttctgccagcgccgctgcaccgccgccgccgccgccgcggcgcactgaccgaccgcgcggggcagccgagccagccgacgactggtttctgcttgcagcttggtattattgacccagcaacctttttgcccacccacccacccgctcgcccgcccgccggcgaatcatggcgtctggagcctttgaagccagccgtggattaggatttttgtttgtttgtgtttgtgtagactgtaactgtaaagagagatgaggaatctgtaatctggtgaacgagcaaccaatccgagcttacgttgtccgtctgtggtgtggtgtccttcttcttcttcttgtgttctgttttctttcattcagttacacactttggtaggtagttggcactgctttgctctgtatggctgactcttgttgtctgtgtgagagagatgagcatgatggatcactgagattt

SEQ ID NO: 125512 - DNA, 1347 bp, Zea Mays
atggcggtacatgtttggttttagtgctccgcttgcagctattatggctattggtatgtggactttaccatcttcaccaagatggctacttctcagggcagttcaaggaaaggcttctttggaggataataaaaagaaggcaattcaagcccttagaacattgaggggccgcacagcaagtgaaaaggttttggcagatgatgttgacgatacaattgtctctattaaggctgcctacgcaggacaggaagctgaaggaaacgtttgggatgtatttgaaggagctagcttgaaggccttcactattggcggaggtctggttctgtttcagcagataacaggtcaaccgagtgttctatattatgctgcttcaatacttcagactgctggattctcagctgcatcagatgctgccaaagtagcaatcttgattgggttgttcaagttgctaatgacaggtgttgcggtatttaaagttgacgatgttggaaggcgcccattattgataggaggtgttggtggaattgctttgtcactcttcctactggcagcttactacaagatcctgaacaacttcccctttgttgctgtcggcgcgttacttctatatgtcggtgcttaccaggtctcatttggtccaattagttggctaatggtatctgagatctttccactccggacaagagggcgtgggatcagcctcgcagtactaacaaatttcggctcgaacgctctggtgacatttgcgttttcacccttgaaggagctcctcgggccagccaatatatttttcctgttcggcgtcatagcagtgctctccctcgtgtttgtgatcctcgtcgttccagaaaccaaaggactgagcctggaggagatcgagtcgaagatcctgaagtaattaaaaaccgttcgtgcgatcataagccccatttggagatattgtaagtagcgatgccattttcaaaacgggcgctcgctcactcgtaggatcggagccaaagctttcagacatgggagtacatatgcaaagggcacgtctcggtgtaaagcttggacatctttctcttttattagcgtagtgaatatttccgaacatacttggtaaattacatttcagttgagtcataatcacgcttctgtagactgtagtccactgtgacctactgtagtagtatgcatgtcactagtaaaagctggtaagctgtgtgatggactgatggtgtagacttgtgcagttgtgctcgcataaggctggccatcagatcgtgtatatagcgacataaaacactattttgcactatagataatactgttataatttacagaatggagttggaaacatgagat

SEQ ID NO: 125513 - DNA, 337 bp, Zea Mays
agccggcggctgtggctggtgggagacgacgagcgggggtctgggcgcgcgcctctccgcctcggcctgcttccgcgcgttgtacatctcctcggtctccacggcgacgaggcgcttcacctgggtgagcatcccgaggagcgacggcgtggtgcggtgctcgacggtgcggtggcagcggcggaggcgcatggcctcgagcgtgcggcggtggaggcgccgcgtcccggggaggccccgcaccagcgtgatgtacagccggggactccacgccaccggcacccgcgacttgaacgcgttgaacgcgctcccgctcatctccgcgccccctcttccg

SEQ ID NO: 125514 - DNA, 583 bp, Zea Mays
tcccagtggatttgggactgcgatggaggagcagttcatcctccgcgtgccgccatccgtcgcagagcggatcgagcgcctcatgaatgaatccgccgcctcctcctccaacccccacgaggcctccctcgacctctccttctcagaggatggaagaaatgacacatttatgatcggtaatgagagctttcctgcatctctcttggatctacctgctgtggtggagtcatacaaaatatatgatgcttctgtactattaaaactgctgatgttggtcaggtaaaagtgcatgtttaatgtatgtcacctgtttatttattaaatttcgtatcttcaaatcgtccactgaaaaacaaactgaaacagatgattatggtaagagaagaaaatgatcctgctccagaaggagttgagtacaagcatgggcttactcctccaatgagggatgcacgcaggcgacgtttccgcagagaaccagacttgaacgtaataaaatttattgccctctagctctacttgttacccagttcatgttcatagaaacacttctaggtggaaccctgattattccttgtacaatttt

SEQ ID NO: 125515 - DNA, 164 bp, Zea Mays
gaaccaccagtgtccctgatgctcaacatgccgctgagtcgcttattttgaacttcccagacatgaggaaggagactgtcagaggagggggattcgagaaggatcgtactgaaggttctggcagcagcagtagctctggaaggaacgattgcctggatgtcccg

SEQ ID NO: 125516 - DNA, 2001 bp, Zea Mays
atggcggagtatatgctggtggtgcagagcaatcttaaccaatgtaataatgaagatatcccgctttctggaacaaaaattgagatggagtcttacgaacaagaatcatctgacagcagtgatgaagagtggtccacacttagcacaccacgaaaaacaaaattacaaggcaacgaaaaagtatcacttactgaatcagtacgttctgcaaagcggtgttctagaagagcgccagctagggagcataataatgaacatactcagagtgagcagcttcatggttcagcattgttgcccaaacctctggagaagggaaagactctgtacttggatgttctgactgtgttcacacactctcttcaaccattcccagaagaaatcactcaagccgaagcacaacttgttgtctatcaggatagtgctcactttctgtcaccttaccctgttaaggctcagacacttgctatcagattgcctggtgggagggttgaatcatacacaaggcatccaaacgcaaaacttgtggattcagaactgaaatatggaccatttcatgatcttcccccgttctcctacttacctgtgattgtgcattttgagaacaacaatccttttgcagttgcaaagaaagttataagggagattgagatatctcactggggaaacgtacagattacggaacactacaacattgctcatggtggtgccagactcaagggtgaattttccaggattgattatcaatctagaccttacacccaactggaaattgaaccaaggtttccattgtttggtgggtggcaaacaaccttcactgttggttatggtttaccacttgaagactttgttttctattctgaaagaaagagatttctcaatatcacatttggttctccattggaggaaattctcattgaaaagcttatcgtaaaggttgttctacctgaagggtcaaaggatatcgaagtttcagctccctttccaacacagcagcagcaagaggttaagtattcacaccttgacattgttggaagaccagttgttgtcttggagaaacctgatgttattccagagcataatttgtatttccaggagtcttacaaacaagaatcatctgacagcagtgatgaagagtggtccacacttagcacaccacgaaaaacaaaattacaaggcaacgaaaaagtatcacttactgaatcagtgttgactgccgatacctggagatgtgacaccgccagatgtgtcgctcaggccagtcacactgctctgctgtttttcaaagaacaacctcttgctgcgtcatcaaggggtagaccagtctctgatgattcgtgtaagaatccttgggagaaagcaagtggtcctggaaatgttaccaggacatctctggccccacaagggctgcaagcacaagtagtgcagatcaacgagtttgtgaagcttggtggggaacaacttgttccctactatgcagatatattgggcgctgtcttaccatgcatatctgacgaggaggagaaaatccgagtggttgcacgcgaaacaaatgaggaactccgtgctataaaagctgatccagctgagggatttgatatcggagcaattctttcaatcgcaaaaagagaattgaacagtgaacatgaggccactcgaatcgaagcattgcattggttcttcactttgctggatcgatattgtgctgagttcttggcttacctgaacgatatttttgatccactcctaaatgcactttctgatccttcggacgcgcctgctcacgagaaaatcggtgtcgttgattcccaatggattgtacaccaagtgattccttctctcgggaaccaggggcagtcggagaatgggagggcgccatgggaagggttaagagagcgttgccggaaagagtgggggcttttccagacaagaatggcagaagctgagaaagcatattacgagatgatggggattacacctccgaatgtaatatttgtctcctag

SEQ ID NO: 125517 - DNA, 641 bp, Zea Mays
ctgaaatactcgttcggagggcaggctctactgatgaattcactcggttgacatctatcacatggatcaacgagtttgtgaagcttggtggggaacaacttgttccctactatgcagatatattgggcgctgtcttaccatgcatatctgacgaggaggagaaaatccgagtggttgcacgcgaaacaaatgaggaactccgtgctataaaagctgatccagctgagggatttgatatcggagcaattctttcaatcgcaaaaagagaattgaacagtgaacatgaggccactcgaatcgaagcattgcattggttcttcactttgctggatcgatattgtgctgagttcttggcttacctgaacgatatttttgatccactcctaaatgcactttctgatccttcggacgcgcctgctcacgagaaaatcggtgtcgttgattcccaatggattgtacaccaagtgattccttctctcgggaaccaggggcagtcggagaatgggagggcgccatgggaagggttaagagagcgttgccggaaagagtgggggcttttccagacaagaatggcagaagctgagaaagcatattacgagatgatggggattacacctccgaatgtaatatttgtctcctag

SEQ ID NO: 125518 - DNA, 1142 bp, Zea Mays
gatgttctagcacaggaatcaaagtatatctggtaacaccgcaaactcgagtacaaatacaagaaatatctgggtcctttttccagcagagggctacttaagatagaacactgaaagaaaacaccaagctgggctccacgcaagtctgccaaccatcgctctctaccaaaatttcaaaaactacacgccatatctacctgagaggaggatttctttgcagaagtatgaactgtgattacaacccaccggagttacaggccaaaaggagtcgtcacctacataacacctaaagtatcgtacgatccatgaggtttctctctctcttttttgcagcagcagcagcatgtctttgtctgcacacctaggaagagcagcaccctcccttcatgttggcagacgaatccgcaacgttgatggtggttccttgacctggaggtccactacctgctgcctcttgggctgcaagcgccttcttgcttatgatctgatggatgtcggagaggacggtctgaaacgccttctcgacgttaagggcttcgagggcggatgtctcgaggaaggataggccttccttctccgctaacgcctgcccatcttcctctggaaccgacctcaggtggttcaggtcggacttgttgccgaccatcatgatcacgatgttggagtccgcgtggtcacggagctcgcggagccacctctgtatgttttcaaatgtctgcttcttcgtgatgtcatagactagaagtgcacccacggctcctctgtagtaagcacttgtgattgcacggtacctctcttgccccgcagtatcccatatttgagctttgatggttttcccttcgatctggtgcgggtggcgaactcgacgccgatggtggacttggactcgaggcagaactcgttgcgggtgaaccgggaaaggatgttggacttgccgacgccggagtcgccgatgagcacgatcttgaagaggtagtcgtactcgttgtccactcggtgcgccatcgccggccgaccactgcccaccgccgcagatcctgcagcacgccggaggctcgtggagagatcggaggccgatggaggtgtcgacgatgccgagaaacggaaggagatgtgggcgtaaacagcgcggcaggggatgg

SEQ ID NO: 125519 - DNA, 1369 bp, Zea Mays
cccactctctctggcacactcgctttcatcagtcgcagtctcccaggcccagccgcccagcccccggccatcatctgctctgcctcgtgcctccataaatacgcgccccccgcccttggcctctcgcctcccaccgtccctgcaccgacgccgcccgcccgcctccgtgcgctgcactgaatctgacagcgcccgtcctgcagcggccggcgaggaagagctctcggcgagagggcgagcgatggcggcggcaatgccggcgctgctgctgctggtggccacggccacggcgatgatgttctcccccgccgccgcccgcattcccggcgtgtacggcggcggaggctggcagagcgcgcacgccacgttctacggcggcagcgacgcctcgggcaccatgggcggcgcctgcggctacggcaacctgtacagccaggggtacggcgtgaacaacgcggcgctgagcacggcgctgttcaaccaggggctgagctgcggcgcgtgcttcgagatcaagtgcgaggaccagcccgggtggcggtggtgccgcccggggagcccctccatcctggtgacggccaccaacttctgcccgcccaactacgcgctgccctccgacgacggcggctggtgcaacccgccccgcccccacttcgacctcgccatgcccatgttcctccacatcgccgagtaccgcgccggcatcgtccccgtcacctaccgccgggtgccgtgccgcaagtccggcggcgtgcggttcaccatcaacggcttccggtacttcaacctggtgctgatcacgaacgtggccggcgcgggggacgtggtgcgcgcgagcgtgaaggcgtcgggcacgggggagtggatgcccatgtcgcggaactggggccagaactggcagtccagcgccatcctcgtcggccaggcgctctccttccgcgtcaccggcagcgaccgccgcacctccacctcctggaacgccgccccgcgggactggcgcttcggacagaccttcgagggcaagaacttcagggtctgagctcaggccgcgagtggcggcgagaagaagccagcgctcaaggccttcttccgccgtactattatatataccgtgattactgctactagtagtcggtataaagcgcgtgttagggtggtgggaatgtacgtgaatgcccgtttagggtcacgccgtctcgccctggttcaagtactctctgaaaaaaaaggagcctttttcttctgaacatatgcgggcaaaagggagataagtatggtgattggatgcttgcttggttgtctcgacgtgatgctgcccgaattttttgtattttagcccctaaaccgaagtaaatttacgtttagacct

SEQ ID NO: 125520 - DNA, 851 bp, Zea Mays
acactcgctttcatcagtcgcagtctcccaggcccagccgcccagcccccggccatcatctgctctgcctcgtgcctccataaatacgcgccccccgcccttggcctctcgcctcccaccgtccctgcaccgacgccgcccgcccgcctccgtgcgctgcactgaatctgacagcgcccgtcctgcagcggccggcgaggaagagctctcggcgagagggcgagcgatggcggcggcaatgccggcgctgctgctgctggtggccacggccacggcgatgatgttctcccccgccgccgcccgcattcccggcgtgtacggcggcggaggctggcagagcgcgcacgccacgttctacggcggcagcgacgcctcgggcaccatgggcggcgcctgcggctacggcaacctgtacagccaggggtacggcgtgaacaacgcggcgctgagcacggcgctgttcaaccaggggctgagctgcggcgcgtgcttcgagatcaagtgcgaggaccagcccgggtggcggtggtgccgcccggggagcccctccatcctggtgacggccaccaacttctgcccgcccaactacgcgctgccctccgacgacggcggctggtgcaacccgccccgcccccacttcgacctcgccatgcccatgttcctccacatcgccgagtaccgcgccggcatcgtccccgtcacctaccgccggtgagacaaggcagcgcttccctcccctctcctgtcgtctcttggcccctgcccgccgttggggacgggtgccagtgccagccagcacaggcacagcaacacccagcaagtagagtactagcaagtaaacgacatgcgcc

SEQ ID NO: 125521 - DNA, 127 bp, Zea Mays
agagacaagcaagttttgttatgatgaagacaacattattacaacaagcataataatctcgtgtctgttgacactaataagttgcaaaagactacatcacttaagttgcaaaagactacatcactag

SEQ ID NO: 125522 - DNA, 795 bp, Zea Mays
tatagaacaatctgctaaagctgagcctggataatagttcatttctgtaatctcgataccttgagcaagtaaacaaaggctacagactatcttgatgcgtcttgtgaccaaacaaaaatattcagaccactcccgttgtccgctctctacggttgtccgctctcgcataagccaactcgaaccagagaaggctagctagcgcttccgccaagcctgcaggccatgccggccagaaccgattgctctgattgattggccaatcagtcagtctgcaatcgtatagtgagtcagctgagcgaagactaatgtttattctcctatgattcgtgtcgtggtaacatcaatcaagagactaatgtttattctcgatgcaactattcgtggactacccttggtcgattactactcctcgcagctgacagcatggaaacacatgctcggttcaggggcagttagccggttcaggggcgctcaccgctttgcagggacggtgcgcttcgtccgacggcggagcgaattaagcaagttcccttgaaggctcaggtggagcagcaccgagcatttggccagcgctgccgggatggtccctcgaaattggatctaagaactcgctgggattggatctaagaactcgccaccgcctgagcagttggatcagaagagacgtaagaaccctaaacgccctagttaagacaggaagaaagaagaccagcgcaccctccaaagtgcaatgagggccactgatctaggccacgagccttcttgatagctcgtcgaccccgtccaggtaagtat

SEQ ID NO: 125523 - DNA, 264 bp, Zea Mays
atgatcacccgagcagctgcaaggaagcttttcacaaatatcagattgaagaggtggtgttttggtgctgagcttgtatacctgtgcaagcgcctcaggatccctatagtagaggtatctgttaactggaccgagtcaccgagatacctggtttcaaagtgcacatgacaattgacaagcatcatgcccacggacacatggtattcgagctcctgctgatcaaagtaggttatggactgggggatatggaaaatctactcgtag

SEQ ID NO: 125524 - DNA, 2448 bp, Zea Mays
tatttaatgagtagagggatatgtagggtaatatttaaggggaacggttgcgggatgagtaaatataggggagagaatcctgctgacgtgactgcatagtaagatttagggggaaaaatttaggggaaacggctccggatagccttatgaaaaatggcgcagggcgaatgatcaaaagttcaaaaccacaatgcctcgcgcctggcggccatgagctcggccacatgccgccgcggcttcaatggcaagttccgtcgcatcgcatccgcgccgtcgccgcttctccaccgcaccggcctgtcgccacccgccgactgtggcgcgcgggctgcggagcagcactgcctccaccttctagagcgctcctccgcgccggccgccgtcctgcagtccctcgccttcctcctcaagtccggcctccacgccaacccgctcgtcctcaccaggctcttcgcgtcctccgctgctgcggcgcccgcgctgcttgagccccttgtcgctgcgctcctcgtgccctccgtccccatcgacgcgttcctcgccaacactctcatccgcgcgcacgccgcctccccgctcccttcggcccgcctccgcgccgcctccttcttcccgctcatgctccgcagcgccacgttgccgaacaagttcaccttcccgttcctcctcaaggcctgcgccgcgttcccgggcgttggtgtccaggcgcacgccgccgctctcaagttcgggttcaccaccgaccagtatgtttccaatactctcatacacatgtactcgtgcttcggcggtgagtttcttggggacgcgcggaatgtgttcgacagaatggccaaatcgagcgcggttacttggagcgcgatgatcggcgggtatgtgcgtagcgggctgtcgagtgatgcagttgggttgttcagggagatgcaggccagcggggtgaggccagatgaggtcacaatgattggtgttctggcagcagctgcagatttgggagcgctcgagcttgctcggtgggttggccggtttgtggagaaggaggggattgggaaatctgtgacgctgtgcaatgcgctgattgacgctctcgccaagtgcggtgatttggatggggctatggcagtgttccaggggatgaaggagcggactattgtttcttggacgtcagtgattgacgcacttgcaatggagggtcgtgggaaggaggctgtggcggtgttcgaggagatgaagactgctggcgtgcggcctgatgatgttgcgttcattggggtgctcactgcgtgtagccatgctggaatggttgatgaaggttatggctactttgagtcaatgaggatggcatatggcattgatcctaagatcgagcattatggctgcatggtagacatgttcggtcgtgctggcatggtcgagcgggcaatggagtttgttcataagatgcccatgaaaccaaacccaataatatggcggacgcttgttgctgcctgccgtgcccatggcaggcttgagctcggagaaaccatcaccaggaaccttctaaatgagtacccggcacatgaggccaactacgtcatgctctccaatgtctatgcgctgacacggaggtggaaggagaaatcagagattaggagagagatgagcaagagagggatcaagaaggtgccaggttgcagccttgttgagctcgatggggaggtccatgagttcatagctggtgacgagtcgcatccacagtggaaagagatatacatgatggtcgaggagatggcgagggagctcaggcgtgctgggcacatctcagctacatcagaggttctccttgaccttgatgaggaggataaggaggttgcgcttcagtggcacagcgagaagctggcgattgcatttgtgctactgaggactcctcctggtacacaggtccgcgtggtcaagaatctccgagtatgctctgactgccatgcagcaataaagtgcatttcgctggtttataaccgggagatcattgtgcgtgatcgcagcaggttccatcgcttcaagaatggctcctgctcgtgcaatgatttctggtgatgcaattgtttttcaccaatttatcctgtttctggctgcccatcaaagagggcaattgcagaagatgatggtaatggtaatttatttcgagggggcttctgcaaatctttcaaggttcgtctgttcatttgaaatatggaagattttggtagccagtagttacgatgcttgtttaaggatattagaagctgtgttgaagtgtatactttttatattagtccctggactaaaggaactaaataaaccctaattttagtagcaaactattagctccagcgtattcaaacactccctaagtctcgtggatacacattaataaagatcacttgtattgtatgcacaaccacaagtttttcaatttgatttattatttttgtc

SEQ ID NO: 125525 - DNA, 2469 bp, Zea Mays
ctcctcgccccctttcccgtctcctctcccacaagtcaactctccccacctctagagcctagctaatgctccccccattataaccgcccaacccttcccccatccgcagctctccgctcccctccagcccgcccgctcacgtcccgccatgggaaactccctcgcctgcttctgctgcgggggcggcgccgccggccgccgccgccacgtggcgcccgcggcgctcccctcggaccccgcctacgacgagggcctcggccactccttctgctacgtccggccggataaggtgctggtgcccttctccgcggacgacgacgacctggtcgccgacgccaaggcggccgccgcggccgaggagcccaccacgttccgggccatatccggggccgcgctcagcgccaacgtctccacgcagctctccacctccgtcctcctcctgctgccggacgaatcctcctccgccgccgccgcctcctcctcctcctccgggttcgagagctccgaatcgttcgccgccgtgccgctgcagcccgtcccgaggttcccgtcgggccccatctgcgcgcacgggggcgggttcctctccgggcccatagagagggggttcctctcgggccccctcgacgcggcgctcatgtccggccctctcccttgcgccgccacatccgcccgcatgggaggaggcgccgtgcccgcgctccgccggagtctctcgcacggcggccgccgcctgcggaattttacccgcgcgcttctcgcgcgggcggataagtttcaggattcgatggatctcggctcggccgccgccgccgcctgtggcgccggttccgccgggctgcagtgggcgcaggggaaggccggcgaggaccgcgtccacatcgtggtgtccgaggagcggggctgggtgttcgtcggcatctacgacggcttcaacggtcccgacgccacggacttcctcgtctcccatctctacgccgccgtgcaccgcgagctccgcggcctgctctgggatcagtgcgagcaggaggagcagcgcgacacagatcccgaccagccgatgagcaccacggcctcatatcaccaggaccagcccgccaacggccgccgcgcccgccgatcaagaccgccgcgcggcgccgatgatgaccaacggcggtggaagtgcgagtgggagcgcgactgctccagcctcaagccgccaactcagcgccctcctaggagcagcagcgagaacgaccacctcgccgtgcttaaggcacttgcgcgcgcgcttcgcaagaccgaggaggcctacctggacgtcgccgacaagatggtcggcgagttcccggagcttgcgcttatgggctcttgcgttcttgccatgcttatgaaaggagaggacatgtacctcatgaatgtaggtgacagccgggctgtgctgggaacaatggacagtgttgatctcgaggagatcagtgggggttcatttgatggattggtcggggatggcactccgctcttgtcagctctgcagctcacctcagaacatagcacgtcagtgcgagaggaagtttgcagaatacggaacgagcatcccggagacccgtctgcaatctccaaggaccgcgtgaagggctcgcttaaggtgacgagagcgtttggagctggtttcttgaaacagcccaaatggaacgatgcgctgctggaggtgttcagaatagattacgtcgggtcatccccgtacatcacgtgcaatccttcgctctatcaccacaggctcagcacgagggacaggttcctgatactatcgtcagacgggctctaccagtatttcaccaacgaggaggcggtcgctcaggttgagatgttcatcgcaacaacccctgagggcgaccctgcccagcatctggtggaggaagttcttttcagagctgcaaacaaagcaggaatggacttccacgaattgatcgagataccacatggcgaccgccggcggtaccacgacgacgtatctgtcattgtgatatctttggagggcaggatctggagatcatgcgtgtaaataggtcagccatactagtagtagattagagaaagaaacgtatatagagagagagaggttcttgaaggcctacttcactcgtcccagctgctactgtacaatatcaatgaagcactgggtggtgggcttgggatctcaagttgaaccacgatgagattcacctggagcgtgccgatgccgacgcagtgccgtatgagatgtccatgcaaaagaggatttgttcaattactaataactcaatcaaatagcgaccaattggtcaactttctttgaccttttgttttgcatcttctgtgttcataccataacatgtgcacgggagactgattcaaagttggacttctgagattctggactttgtgcaaaaaaatgcagatgggttacttggtcagaaatggtttgcggtgttgaccagacctctt

SEQ ID NO: 125526 - DNA, 903 bp, Zea Mays
cctgaactagtagcggtatgtttggcagagcggcaagttagagcgacgtattttgccaaattcctccttctaccccgagcgcaacaatttcctcccagccgcgacctgtctctgtctgttcttctgccccgatcggccgatcccacccacgcatctctctccgcgcccgcggtagtgttcgtgttcctcactcctcccgcttccttccccgacactgcctcagctcagatccgcggcggtttcccggtccctggatctaaagcggccggtgagcaggcctccttccgccgacgcggaccacctggagggaatttatcctggagccgtcttcctcctcgcctcctctcgcggcgcggcgcggaggccggaatcacttggaggtctagctgtgtgtggattgatttcttcgtttgtggtggctagaggcacctggtttgtttcttgccgaagcccgtggtacatgtgaacagcagggcctgtcttctgcttttgcttcttagcaatggcgaatgcaagcaaacacttgcaaccttcaagcaaatcaggcaatgacagaaagtaccagggcacactggttgcttctccagcaaaggacatttcaccgaagtgtgcgaatcgcattgttccatcgaaacaactgatcttgggtggggattcaataggccatctggcatcgattctgattaaggtcgttgctctcgaggcagtcagaagagtttctaaagcaagataccctttcatatggaattctgttcaagcattgcaaatccttgtgtatcctccatttagttggatccaaagatgggcaccactcaaatttcttgtgcagggaattcaggttattcaatttctcatctctccacaacgcatgctatttcgttccttgacataggggaaagacag

SEQ ID NO: 125527 - DNA, 2252 bp, Zea Mays
cctgaactagtagcggtatgtttggcagagcggcaagttagagcgacgtattttgccaaattcctccttctaccccgagcgcaacaatttcctcccagccgcgacctgtctctgtctgttcttctgccccgatcggccgatcccacccacgcatctctctccgcgcccgcggtagtgttcgtgttcctcactcctcccgcttccttccccgacactgcctcagctcagatccgcggcggtttcccggtccctggatctaaagcggccggtgagcaggcctccttccgccgacgcggaccacctggagggaatttatcctggagccgtcttcctcctcgcctcctctcgcggcgcggcgcggaggccggaatcacttggaggtctagctgtgtgtggattgatttcttcgtttgtggtggctagaggcacctggtttgtttcttgccgaagcccgtggtacatgtgaacagcagggcctgtcttctgcttttgcttcttagcaatggcgaatgcaagcaaacacttgcaaccttcaagcaaatcaggcaatgacagaaagtaccagggcacactggttgcttctccagcaaaggacatttcaccgaagtgtgcgaatcgcattgttccatcgaaacaactgatcttgggtggggattcaataggccatctggcatcgattctgattaaggtcgttgctctcgaggcagtcagaagagtttctaaagcaagataccctttcatatggaattctgttcaagcattgcaaatccttgtgtatcctccatttagttggatccaaagatgggcaccactcaaatttcttgtgcagggaattcagaaactatccatgccactgttgtttttgtcagtcacaacaacagtaagtgagctgtcctccaagcgtgatgatgaaccagataacaatacagaacattctgaaacaaatgaattggcatcaacttctggcacaagtgatgctgctgatggcacaaaggaaatcgtacaagagaactggcttgtgttacttttcagggagcttgagaagcaaggcatcactttacccgagaggtttactgaagatgaattacgcagattttatgttgctgcaaatggtgacttttcaagtttactctcttcggttaagaagacaattcgttggagggaaacgtttcacatacttacactgcaagaacttgataaatggtctcacttagtcttttggcatggatttgacacgatgcttcggccttgtttagtaattcgtcttggacttgcatgctccagcataccaccttgtgatagaccccgttttgggcaagcagtagtttctcaaattgaccatggtgttgtaaatttgaccaacaaagaagattcaagaattaccgttttgctggattgccatgggatttctccattcagatttccaatgcaaatgatgaggtcatttgtcactgtagctcaagaaaactacccaaatcgtcttggagtattgtttgttgtccgccttcctccagttgtcagagttattgcacagacatttcttcaagttttgaaaccatctacaaagcagaagttacgttttgagggagattcatacaagaagacgttggcggagttcttgcaggccgtgccagcgtttctgggcggtaaatgcagctgcccacgatgtgagaagcctcgtaatagttcagtggtgcaggcaggggaagggagcaagaaccaggctcgcttggtcagcgttgatggcggatcacctgtcgtggacttcgacttcgatgaagaagagatcccatcaccttatagctgcgagaacgccatcagggctgcgataatctgcctgctgatggtgtgcatcttcatcgcgtttctggctgggatgaacgaccctgcatccgttccgcccagtgcctgagagctatggaatcgcctagtctcccatagtagagcttagattgtcagttgagtatatacacatctgtgttgctatttaggatgctactagggtgttgtattccctggcagcttctttctcggttgtcgtcagatcgccttctctcctaatgtgagcggagcagatgaataaatatcctgtgtgtggcaaatgttggttagcagttcaattagcccttcgatagtgtctttctttgcgtgcttgctgcagtagggcagtgtgatttctcgttagtgtacgtaaactcaaagttttcaaccacaaggcaacaacacactgactctagtggtttcagctcttt

SEQ ID NO: 125528 - DNA, 1380 bp, Zea Mays
cacggagttacggaccccgttctgctgcaaccctgtgttttctttcctccattaacccccactctcccagcgaagagcgtgcgagcactccctcgccgcccaccgcgcctcgtggcggcaactgggcggccgtcgctgccgccctacgccaggtgccgaggtgattttccgcccctttgccggcgacgagcaccaccagatactctgagcctggctgccgaaacttccttttggtgtccctgttacattcggtttcgtttttgatgacttcatcaagaagcaagagcaggagccacagtcgcagcaggagcaggagccgcagtcctcagcgaagagataggttgcgcagcgaacgtgcaccccgccacagtcgcagtcgcagcaggagccgcagcccataccgtcgcagagaacggcgtggatacaaggatctcgtatgcaagaactgccggagacctgggcactttgctaaggagtgcccatctgcgcctacgtgcaataactgtaaccttccaggccacttcgcagcagaatgcacctcaaaaactgtttgctggaactgcaaagagcctgggcacattgcgagtgagtgcaagaacgaggccctgtgccacacctgcaacaaaacaggtcacttggcgcgtgattgccctacttcaggggctaacgtcaagctatgcaacaaatgttttaaatcaggccacatcgccgttgactgcaccaacgaacgggcatgcaacaactgccgtcagccagggcacatagctcgagagtgcaagaacgatcctgtttgcaacctgtgcaatgtctctggccatgtcgcgcgcgtctgtccaaagacgactctggcttcagagatacacatacagggtggcccgttccgtgatatcctgtgccgcatctgtggtcagccagggcacatcagccgcaactgcatggccaccgtcatctgtgacacatgtggcgggagggggcacatgtcttacgagtgcccgtcggcaaggatttttgatcgcgggttccgcaggttctgagagcctttcaccgctttgtttctgatggtttgagtttcgccaggatgtttaatttgtttgtgacaatattggaacaattttccctatggttgttgaggaatgattctgtgaggatgtgttgcgggtgaaactcttttttttttacttttaggttttgtttgattactctagtatttatctcattacacatggattgaggtgtattggggtagcttacatgtgtattgaagtaaatactagagcatccaaacaaggtcttaatcaggatatatggccctttgtggactctaacagtgctgtcacggctcatgtgaaaattgccaggtcatgtttaactcttgtgctc

SEQ ID NO: 125529 - DNA, 1174 bp, Zea Mays
gtgttttctttcctccattaacccccactctcccagcgaagagcgtgcgagcactccctcgccgcccaccgcgcctcgtggcggcaactgggcggccgtcgctgccgccctacgccaggtgccgaggtgattttccgcccctttgccggcgacgagcaccaccagatactctgagcctggctgccgaaacttccttttggtgtccctgttacattcggtttcgtttttgatgacttcatcaagaagcaagagcaggagccacagtcgcagcaggagcaggagccgcagtcctcagcgaagagataggttgcgcagcgaacgtgcaccccgccacagtcgcagtcgcagcaggagccgcagcccataccgtcgcagagaacggcgtggatacaaggatctcgtatgcaagaactgccggagacctgggcactttgctaaggagtgcccatctgcgcctacgtgcaataactgtaaccttccaggccacttcgcagcagaatgcacctcaaaaactgtttgctggaactgcaaagagcctgggcacattgcgagccacatcgccgttgactgcaccaacgaacgggcatgcaacaactgccgtcagccagggcacatagctcgagagtgcaagaacgatcctgtttgcaacctgtgcaatgtctctggccatgtcgcgcgcgtctgtccaaagacgactctggcttcagagatacacatacagggtggcccgttccgtgatatcctgtgccgcatctgtggtcagccagggcacatcagccgcaactgcatggccaccgtcatctgtgacacatgtggcgggagggggcacatgtcttacgagtgcccgtcggcaaggatttttgatcgcgggttccgcaggttctgagagcctttcaccgctttgtttctgatggtttgagtttcgccaggatgtttaatttgtttgtgacaatattggaacaattttccctatggttgttgaggaatgattctgtgaggatgtgttgcgggtgaaactcttttttttttacttttaggttttgtttgattactctagtatttatctcattacacatggattgaggtgtattggggtagcttacatgtgtattgaagtaaatactagagcatccaaacaaggtcttaatcaggatatatggccctttgtggactc

SEQ ID NO: 125530 - DNA, 1103 bp, Zea Mays
ataagtttctccagacataatcccaaacaaacgacccctaagcttctccagacaattgtcaccgagacatgggaagggaacatatcgattacttatttgtagtagtaagttgaacagcgcaacacatgtccatagtccatacataattggcagataacaaggaattacatgatagatccgaaccttcatggtcttctgggagccatgggacctttttttacacagcaacaaacccgcaaatcatcaagcagtctttcacagcaccaagtctataatggcatacaaatccacagtagtaggccgagtccatgatgcatgatcatgatgcctagcgagcccgatccttgatctcatcaaggctgatttcacttgcatcagtagcctgcagttccacctgaatgccattgagcccactcttgaatttttggtttgagcttgcataaagcatcttgctcttcaccttggcggaggatggggaccttgcaattcagaagtagatcatctcatgagtgagcagcttgacagcaagcacgaggggaaaaaaaaagggatgcaagcacgaggtcacaagcaataccataggatatagaagatcctgctcttctggacatcttctgcagtgacaaagtcgaaatcatagatcgcgtatcggcagtcattctcggggaggctgtttgtgaagtcctcgtagctggtagcgcgatccccgacctggtccacaacgatctccttgaacttgtcgtccatcttgaaagttaggaagcggtgcagcctcttcgactgcagctcgccgaacttgagcatgcactcgtcattcacagcgacacccgatctcgcgtttgcctgcgaccacaagttcagtcataaaggaaacaaaaggcccgaaatcaggcgcggagccagcacgccccgcgccgatccggggaggaagccagagcgcgcccgggggaggggaagcggaggggtggagggggccttaccatctcgggcgagctcgcgcgccgaaaaaggggacggggacggccgagggaggaggaatccgccgaggaagcgaagcgaggaggggaaagaggatggatggagctggctgctgctgtgctgcc

SEQ ID NO: 125531 - DNA, 269 bp, Zea Mays
aaatggaggcgggagggagagtgcagatgcgcgtcgaagggttacctgagctggcgatcgtacttggtcttgggctcggcaaccacggcggcggcggcggccatggctgcgggagtgcggggcggaggccggcaggccgctgcgttctctgctctcgctgtggactgagccctggccctggggttctcggagttcggatcgcttcgcccctctacactccgacgaggacgggcttctccgcgaaacagatgggtgcatctgcccggtag

SEQ ID NO: 125532 - DNA, 267 bp, Zea Mays
atggaggcgggagggagagtgcagatgcgcgtcgaagggttacctgagctggcgatcgtacttggtcttgggctcggcaaccacggcggcggcggcggccatggctgcgggagtgcggggcggaggccggcaggccgctgcgttctctgctctcgctgtggactgagccctggccctggggttctcggagttcggatcgcttcgcccctctacactccgacgaggacgggcttctccgcgaaacagatgggtgcatctgcccggtag

SEQ ID NO: 125533 - DNA, 931 bp, Zea Mays
gcataataatatagttataaaatcataacttttacatatgaaatcggatgaagataaagtttatatgaaaattgtagagctcgaagagatctataactttgtagtacatcacatttttgtttaaacatatctttaggccaaaatcattaaaataatgtctaaatttatatcaaaataatagactttatcattttcatgtggggacttaagattatatccatgtgggaacttaggattatctttttataaactatttattaatattggtaacttatttgcaattttcggtcgacgctacaatatttttatgaatttaattgtattttgatgattttctacaacaagaaattaataatacaccaaatagcctaaaaaaaattcatgaatttttacggggacacaacatatatttcacatatagttctcaaaaatatttggactataaaatccacaagatgttggtgtttcttcaattctactcccacttattgcgtgagttacatgtgaaatcattttatgtatcgaagtttcaacataattaatatttcacttatcattttcatgtggcgacttgaggttttatttgaatagaatgtttatttgtttttggtaatctttttgcaattttggatcaaaactagtgtatttatgaattttaattatactttgatgattttatgtagaaagaaattaataatgtataaatagcctcagaatctatgaaattatacgaaggtacaacatatggccacatatagtcataaaaaataatgggaccataaaatccacaggatgtcaacgtttcttctattttatttccacttattgcgtgagttacacgtgaaatcactctaagtatccaagtttcaacataatcaatacttcactttaccatttttacgtgggaacttgagattatcttctattaaat

SEQ ID NO: 125534 - DNA, 2449 bp, Zea Mays
gccaccaccacgaagcaaagcagccaaggcgagtcaccctgcccggctctccatcctccaggtccagggctccagcctccactctccaggccacgggggcgggcgcggggcgagtcgagtccactgtggcaggggtacacgggcctgaaaaggcggctgcggcggcgccaccaaaccgctgccgcgcgagcgccgccaccgaacgcgccccgccggccgggcctcccctctcgcccgcccgccccaggcgtcgcgatcgcccccgcgggcgctcgctcctcaaataggccgcgagggatcacggcccgagcggcgtcgggggaggttcgtcgggttgacttgggcttggatgggcgggaccagcgcgagcggccggcggaggtgggcgcggcggtcctgccggacgggaggacaagccggtggggttgtcaggcggacgatcgcggcgccaactgctccgagggtaaccgaagggtttgctcatgtggacaagcaacggcgtgttcatggagcattatcagatttcagatgcaacagtggatcaacagttcatctttctttggatatcgaggaattcaagcataagggctcccacaaatcttctgttagatgtcttcctagttcacagagaaatgtaacagaaattagtcacatgcaacctgttgcgaggggacttcaagtagataagagcttcagtgataaagggttgtgtcatgcgagcagaactgtttcaggaatgcccattcgacctaagtattatctcagcagtcccaacaacaatttgaagagtcctcccactgtaaagagttgtagtcagatgagtgatttcagttatcgactggtcagaagtgctaaaaggtcagcttctccaggaatgggtttaaccagcacaaactactccctttatgagaaaatgtctttgctacgtcaacgaaggcatggtgataatcatcagaaccaaaaccgtatcaatgccttgaatcgacgacacaaaatcatgaatcctaggggagcagctgatctgctaagtaaagataaggttcatgaacaccttaattcctcattggaaagacattcacaggctttgttaaataatgcattgattagagaaaagcaactgtgctgttcagatatactcaatcaaaaagcacctgaacagatatggagctccgtttccagtgaatctgagaagatattatgcttttcctctggtgacagcattgatgatctgcaaggatcgtattcaagtgaaactagtgatagctccaacttatcatctctgggtgcagtagctggtgatgaatggaatacagccttcaagaaggtatactaccctcagactgcatgcatggactctacatctgtcatgtacactaaagaagtaggtcaggctagcccaatatctgttcttaagcctctatctgaagattgctctgattctgaaaacatcaggcgagagcctgcagatccatatgatctccagctgagactggagcttggcacatttgcaccaacagaaactgctgcggaggcaagtagcattggcagaactagtgactgtttatcctctgaagtgcagccgagcgacgacaaacccatacagcttgttgaagacattctcgaagaactggaagacgatgaggaaagggagttctcttacttgctggacatactgattgcttctggaatccatggaactgtggaggatcaaatgtacaaggtgtgccagtctaccgagtaccctgctagcgacgatgtgttcgagaaggtggaaaagaagtacaccaaagttgtccagtggtcaagatcagacaggaagcttttattcgacatggtgaacacgatactgtcacagatcctcgccccatgcttgaacatgcgaccttgggtcaacactaccaggaacttggctccgctttggggcgcagagggtctcctagagaaagtcttgcaggtgctaactcagagacgggaacaactcgcgcccagtgagactaagccggagaagaaagggttagatccgaagtggccagatttagcagactggatcgacagggcaggaagggacattgagagaatgattaaagatgatatgttggaagagctggcccttgagctactgttcagttaggttagggttccacggccgtagtaggttttattacagcagtacagatcccttgttttcttatctgggttttttagtcagttatacttgttagtagtagggttccatggccgtagtaggttttatgggatgtctgtaggaaaattcttttctgcctcggaaaggagtggggtttgtaagaatagaagtctttcctgtcgagttttgtcggctgtgagagttaaagtctgtaaatgagggcaaattgtagtccccggggcatttgtatttggattggactgttcttgaaaggaagaataagcggcatgttctttttgtctg

SEQ ID NO: 125535 - DNA, 985 bp, Zea Mays
aacaaggccgtagcccgcagcttcgtctgttacgctacgtccggttccccaccgcgccgtgtgaaaaaaatggctgtgccggaggtggtggtggacggcgtcgtcttcccgccggcggcccgcccgccgggctccgcgggctcgcatttcctcggcggcgcaggcgtgcgtggcctcgagatcggaggcaacttcgtcaagttcacggccatcggcgtgtacctggaggacgcggccgtgccggcgctggcgaggaagtgggccggcaagacggccggcgagctcgcgtccgacgccgccttcttccgcgacgtcgtcacgggtgagcggcttcgagaagtttcgcgcggggtgacgatgatccgcccgctcacgggcgagcagtacgcggggaaagtggcggagaactgcgtggcgtactggaaggcggccggcctgtacacggacgccgagggcgtcgccgtggagaagttcaagcaggtgttcaagccccatacgttcccgccgggagcctccatccacttcacgcactcgcccgccggagtcctcaccgtcgccttctccagggactcgtcggtgccggttgccggcggcgtggcgatcgacaacaagcttctctgcgaggccgtgctggagtccatcatcggggagcacggcgtgtcgccggccgcgaagctgagcctcgcggcgagggtgtcggagctcctgaccaaagggaccgccgcagccgcagccgcgctgcgggcggagcccgtctcggttaccgcctgagcggtccagcgaaccgcgaggagaaagagaaccgatcaagcaatcacgtctgccgcccttgcgtgctcctgctccgaacagatgccacgacggacggtgacgctgtcgcgtctgtttgcgctgtggcgttggcgtcgtgtctctgcctttctggccgcatgtgttcgctgtggtaacatttgaataaaagaaaacgcagatttgtttgcactgc

SEQ ID NO: 125536 - DNA, 981 bp, Zea Mays
aacaaggccgtagcccgcagcttcgtctgttacgctacgtccggttccccaccgcgccgtgtgaaaaaaatggctgtgccggaggtggtggtggacggcgtcgtcttcccgccggcggcccgcccgccgggctccgcgggctcgcatttcctcggcggcgcaggcgtgcgtggcctcgagatcggaggcaacttcgtcaagttcacggccatcggcgtgtacctggaggacgcggccgtgccggcgctggcgaggaagtgggccggcaagacggccggcgagctcgcgtccgacgccgccttcttccgcgacgtcgtcacgggcggcttcgagaagtttcgcgcggggtgacgatgatccgcccgctcacgggcgagcagtacgcggggaaagtggcggagaactgcgtggcgtactggaaggcggccggcctgtacacggacgccgagggcgtcgccgtggagaagttcaagcaggtgttcaagccccatacgttcccgccgggagcctccatccacttcacgcactcgcccgccggagtcctcaccgtcgccttctccagggactcgtcggtgccggttgccggcggcgtggcgatcgacaacaagcttctctgcgaggccgtgctggagtccatcatcggggagcacggcgtgtcgccggccgcgaagctgagcctcgcggcgagggtgtcggagctcctgaccaaagggaccgccgcagccgcagccgcgctgcgggcggagcccgtctcggttaccgcctgagcggtccagcgaaccgcgaggagaaagagaaccgatcaagcaatcacgtctgccgcccttgcgtgctcctgctccgaacagatgccacgacggacggtgacgctgtcgcgtctgtttgcgctgtggcgttggcgtcgtgtctctgcctttctggccgcatgtgttcgctgtggtaacatttgaataaaagaaaacgcagatttgtttgcactgc

SEQ ID NO: 125537 - DNA, 665 bp, Zea Mays
attggacagactaccgctagggactgccttatccgtttttgtcgcgcaatcatctcttcctttagcgaacgataccttcgtatccctaaccacgacgacattgctcgcatactacgtgtaaacgccgacagggggtttccgggtatgctaggctctatcgattgtatgcattgggaatggcgcaactgtcctactgcatggcgcggacagttttgtgggcgcaattcgaggccaacaatgatactagaggcagtcgctgggtacgatttgtggatttggcatgccttctttggaatgcctggtaccaacaatgatctcaacgtgcttcatcggtcacctgtgtttgatccgttacgtaatgggacgatgccaccagtgcacttcactattaatgggaccacttacaatttcggatactacttagcagatggcatatatccaaattggcctacctttgtaaaagctattcgccacgcatttgaggaaaaaaggttcactttacaaccaagcaagagagttgtcgaaaagacattgagcgagcatttggagttttgcaggctaggtgggctgttctacgtggacccgcttatggttgggatcgtaatcacctcgcagagatgatgactgcttgcattattatgcacaacatgattgtcgaggacgaa

SEQ ID NO: 125538 - DNA, 1075 bp, Zea Mays
ccccccatagtccattcaactccaccgcgaccatttaagcaacacagcagcggcatctcagctctgttcccagctagttagccgcggcgccatggctcctctgctgttcagggacatgaaggggctctcgtgctcgtcccaggcgtccacggcgacatgcccgagcctggagcggcacccggcgccccgcccacacaaggccagcgccggcgccagccccctggctcccgttcctgctgccgagcccaggaccaggacgcaccggcttgacggcaagaaaggacagcagccgcagcacaaggctgccgtcgtccccgcgaacgccggtggtggcctcgtcagccccgccggctcgtccaggtacctgctgctgagcggccgcttcgccgccgtcgccgaggagatccaggaggtgctggagcctgccccggccgtcgacgccatcgccaagcgggaggaagctagtgacgctgctgatgccaagaccgcgcaggcgcaggagcaggtggtggttgtgctcaaggtatccctgcactgcaaagcgtgcgccgggaaagtgaagaagcacctctccaagatggaaggcgtgacgtcgttcaacatcgatttcgcggcgaagaaggtgacggtggtcggcgacgtgacgccgctgggcgtgctcagcagcgtgtccaaggtgaagaacgcccagctctgggcggcgccaccggcgatagccgccgcctgaatgaagggagccgtatcccggttggccgtgggccgtggctgctgctagggatagggagtcgtcgaccagcatgcgtccaccgtgtcccggctggcagctggcacttgaatgcagcagctttggttctttcctgtgcggtcgtctcgtgagttgttgtggccctctctcctctcttgtttcgctgtggttggcgccatgcgaggtgaatgcgatctcttgcctggtgctgctccagtgcttccatctgcttctgctgtggatgggtcactctgctttctcctctgtgatgtaagactgtaattaacataagaatgggatttcattgctaaagaaaaaaaagcaaataaa

SEQ ID NO: 125539 - DNA, 2312 bp, Zea Mays
ctgaacagccccccggtcgctcctcctccctctaccctccagctccagccgccagccgccagccgcccacgcccggagcaccgccgcaacccgcagcgccgctcgcccggaggccggagcaccgccgctctccccgcacggagcaccgccgcgaccacgccgctgtccatccgccgctccgcgctccctccttcgaccttcgccttggttccgacgcggtgaccgtgcgctaaacccttcgaccttcgcccggaggcgggagcgcggcggaccggagtccggagcaaccgtgagacgagcaggggcggccggcgggcgcggatatttgggcgcaacaactttctgcccttccatttctccaactaagaaggaataggatgccaagagagtttctgcaaccccaatgaagatggcaccagctccgcctccggaggggactgcaattctgctaattcgtggagctcagagttctatcttaacggtgctgctagttatgcttgggtgttagtgctatggctactcattaccaagctgctaccttgattgcctctccgtcttacccaaatgccattgcttggtcaagtgacaatctcgtggctgtcgcatctggtcatattgtaactattctgaacccagctgcgcttgatggaccccgtggattggttggacttcgtcacagtgacccttttcctataggagtggttaagagagaagatctcttggagccatgtttattgcccacttccttagcgcgtgaaactgaaccatgtgcccgatcgatttcatggtctcaacaaggatttgcacctaactatgggtgtttgctggctgtttgcactgtgaatgatcatgtgaagctttaccgatcaccaatttgggagttatgtgatgaatgggtagaggtcgcagatatatcacagttgctgtttaactattataaaattataaacttcggagaggataatggttctcatttgacttcttcgaagaatacaaattctggggaggcagaagttttaggatctacttgtcgatcggaagaatctctttatttcaggggtcctggacagagaaaaataaagccagcaagagttggtggttttatttatgacggcaatgaagttgatttagatgcttcaaaggatgcagacttctcgatggaaccatgctcaaaatcaaagaagaaatctttgaaaaagactgtaaaacccagggatgaagtggttgctgtaaatggacgaaacagcacagggaatgttaaagcatcattgtcctccaatgaacaaaacaaatctcttcctcttatcacggcaaaacagtatgcctgtcgtgctgcacatttgtcttcccttgtagtttcatggtctccagttgtgtcattaagtgatagaacttcttgtttattgaggcattggtgcattcttgctgttggctctaaatctggaaatatttctttttggaaactatataagccagaatattacacaatagatgctggtgtggttaccagtgatccgatgctcatcggggttttgcatgctcatgaatcatgggtcaatgccataacttggcaagttctttctgcgggctcttcaaaatcctcgttgcttttagctactggatgctcagatggaagtgttaagatatggttagggaatattgaagggttaaatcaatgtgcaattggagaagaagtgccatttgtgttagttgctgaggttgccgctaatttatcagctccagtgtcgtcaatctcattgggcatacctgcccggtctcaacatgaggttagtttggcaattggaagagtatccgggttactagaaatatggatatggaatgcatctaccaacaaaattgagagttccagtgcatggcatgcacatgatcaagtggtgacaggtttacgatgggctatcgatggcaattgtttattcagctgcagtcaggccaccagggtaatgggtgtattgagcccttcttcagacaattgttcttgacattaacgttgtttccaatacaccttccaatgctctgtacattgtgagaatgaaaatgaaaaacgtagtgttaaaaatttggtatgatgctatgtgaagcaagcagtattctaggtgcgccaagagggtgaacgcttcaatggcagcatgaggcagcaggaacgtgtggtgagcgtgccttggttataatatatatcaggttgttagtcttcacttcagactttcattttcttaggctataggcagcagactgcgcatatcaccgtgcaaaacactgttttatattgtactactatagactgcactgtttac

SEQ ID NO: 125540 - DNA, 1707 bp, Zea Mays
cataacctttgataaatttaaaagctgaaaatctttcttgattgttgattaatttactaagtcaacataatgcgctatgcaattcactctgttcttcgtcctcagaagttgtatcactcagattttgaaagttgcacctttcaggctgatgcttttcattttattcttcttttaggacaattctacacgttgttggatatctcacgaaaaccaccttgaagaattttttttgcattcagaattttcagagctaagggagtcagaagatgtaagagtagtagacacttaaatgttagttattcttgatgtccaattattttcctccatatggttgggttttcaatatgcatgcagctatcaaaagtttctgatcgatgctatggtcttacgctatcacctggagaagagataattgctgtggtccgcagtttggatctgaaccttttgaaccagatgtatcaagtcaggacacaaaaggcggtggtcgagttcatttggatcggtggccaatttgttggtattccactggacgggagtatcgatatttgcagtccgcagtctgcggacttatcctcaagtaaccttatgtggtggggatccaacatcttgtggtcgctgaagaaatacgaaaatgtcgaaaagaggcttgtgttgtgggacgttgtagctgcgctgcaagagctgaagaaaaccgcgcccgcctttctggagactctagtgcacagttgggcctcagctttatttgcgggcgactcacagtgtgtttctatcactgcccagtcatcacgctcgatgcatgacatgatgccccatgtcagctcgcggaagctgcacttactgaacataatctgcagaaaagtgatgctcggcaatcatgcgcggcatggtcctggtgctggaaacaacagtaatgatggaacaactgatttctggagcactcttttggtagcgagtgaaacggagctgcgagagaggctggtgggtttcacctttgccgcggtcgtgaaacggacagcgtgtctgttcaacggcacctccaccgcaaattgctggttccctgtcggcgtcgcccagatggattcttgggtatccatgaactacgaaaaggtgcacggtcagctgcagtcgatcagatcgaagatcaaagagctaggaagcaggatcgacggatactccgacgtagaaagctgcccctactgctcttcgccggtccgtttcgagtcgcctgacgtggccatctgcggagaaaggcacacgctgtcgcggtgcaggacatccatgaccctgtgctccgtcgcgcagccagtgtggcactgctcgtgctgcgggggcacggtcgacaagctgctgccggagtcgttcttcaccatgcctttggacgccgtccgtgacgacaaaggatcgctcgatctgtcggcagcctccgccccgctttgccccttctgcggcgtcctgctgcagaggtcgatgccggcgttcctgctctccacctcgccggtatagtcttcggatgcccccaggtgttacatgcagtagcaatgcaatgggaatatcgtagtggagccaactaccaagtttgttgtagctgatgctgtatggctgcagagtggcagtgccgtcattggggctcgaaatgtttgtgataggttttgtgacttctttctgcttagcccctctaatatatctcgagatacctattttttattt

SEQ ID NO: 125541 - DNA, 890 bp, Zea Mays
ccctcacacccgactacaaaaaccttccggcgccgccgcctgatcgctccagcgccctcgccgtcggcagctcggccgccgtactcccgctaccgagctaggaggcatcaccttcgccggtccaacatgggtaagacacgtggtatgggagctgggcgcaagctcaagacccacagaaggaaccagaggtgggctgacaaagcctacaagaagagccatctcggcaacgagtggaagaaaccctttgctgggtcatctcacgcaaagggaatcgtccttgagaagatcggcattgaggctaagcagcctaactctgctatccgtaagtgcgctcgtgtccagctggtgaagaacgggaagaagattgctgcctttgtgccaaacgatggttgcttgaactacatcgaggagaacgatgaggtgctgattgctggattcggtcgtaagggccatgctgtgggagatattcccggcgtccgtttcaaggtcgtgaaggtctctggcgtttccctcctcgccctcttcaaggagaagaaagagaagccgagatcttaaaacgctgcaagggttttggagatttaggcctggtggcgcaccgcgcacctgtagcgctcacacaagccatagcagacctcatgttgagatgaaccagcaggtgtttttgccatagttttgttgagacatctgaattcgagctttatatctgaaattgctagtcggtgtgtgatttgtgatgaaccaagcagcgccggtgctacgactgatgggaacctgcttacctgccactgtcgaacttaacacctgtttttttgactgttcgtccacctgaagatctgaaccgctgatgtgcggattgacgtctgtgcgttgctggtgcgattatgctcccg

SEQ ID NO: 125542 - DNA, 5166 bp, Zea Mays
atgggtaagacacgtggtatgggagctgggcgcaagctcaagacccacagaaggaaccagaggtgggctgacaaagcctacaagaagagccatctcggcaacgagtggaagaaaccctttgctgggtcatctcacgcaaagggaatcgtccttgagaagatcggcattgaggctaagcagcctaactctgctatccgtaagtgcgctcgtgtccagctggtgaagaacgggaagaagattgctgcctttgtgccaaacgatggttgcttgaactacatcgaggagaacgatgaggtgctgattgctggattcggtcgtaagggccatgctgtgggagatattcccggcgtccgtttcaaggtcgtgaagcgtacgacatttttctatcctgttgctaatccgggcgaactagcaaagcagtgcaaatctggaaaccgcgacctgatcgcagaacgccagaacaggaggctcgggcccgtaccgtaccgcatccctatcattgccaggtcagcagcctatccggccgcccccgcccggagcacgccgccggcgccgacgtcggcgcgtcgcatggatatggcccccgcgtctgtctacttcaacccgcgctcggtcgaggaaatcttcaaggacttctccggccgccgcgcggggctcgtccgcgccctcacctccgatgtggacgatttctgcagattgtgcgacccagataaggagaatttgtgtctctacggccttcccaacgggagctgggaggtgtcgccgccggcggaggaggttcctccggagttgcccgagccggcgctcggcatcaactttgcgcgcgacggcatgcagcgccgcgactggctcacactcgtcgccgtccactctgactcgtggctcatctccgtcgcattcttctacggtgcccgcctcaacggcaacgaccggaagcgcttgttcagcatgatgagtgatcttccttccgtcttagaagcattcgcggacaggaaacacggcagagataggtctggggttgatagcagcggcaagtccagacactcatcaaagagaggaaaagatggccatgccaagagtttcagggcagcagctcctgccgccaaggagtatgacgaagacgatgacgaggaagacgaggaggagcacacggagaccttttgcggaagctgcggcggcctttacaacgcgagcgagttctggatcggctgcgacatctgcgagcggtggttccacggcaagtgcgtgcggatcacccctgcgaaagcggatcacataaagcactacaagtgcccggactgcagctcgaagaagatgaggcagatctatgatgccgtgattaagacggggacggaatccaacgcgggcaaggccgcgctcgacgcgttgggcgctgagctgactacccctctcgtcgccgacgtgctgcaccgcctccgctacgaggagaagctggcgtttcggttcttcgcctgggcgtcccaacaggacggctacaaccacgaaccgacgacttacaacgacatcatcgacattctctccggcacgcgatacaagagccgccagttcggtgtcctctgcaacgtgctcgatcacatgaagcgccatggctcgaggtcggtgccggttgaggaccttctggagatcctgcgcgcctacacggagaagcatctcacgcacatgagaaagctggccaagaagcggcgggttcggatgcgtacgccgccagagactgatgcgctcaacgttctgctggacgcgttctgcaagtgtgggatggtcaaggaagcagaggcagtgtttggtcgcgtgaagaggaagttgctgggtaatgcagagacatacagtaccctgttcttcgggtggtgccgggcgagggaccccaagaaggccatgaaggtgctcgaggaaatgattcagatgaagcacacgccagagagtttcacctacgttgcagccattatatcattttgcagcgctggattggtgtcagaggcaagggaactgtttgagttcatgaggactgaggggttgacgatatcatcgcccacagccaaaacatattcgattatgattgttgcattagcaaaggctgaccggatggaggagtgttttgaactgctttcagacatgagaagttgtggctgtatgcctgacgtgacgacttataaagatttgattgaagggatgtgcttggtgggtaaactggatgctgcttatcgtgtgttggacgagatggggagggctggatttcctcctgacattgtcactcatcgaaaggctgatgatgcacttgaactctgtgagaggatgatagaggcacactgtgagcccagtgttcatacctataatatgatgatgatgatgttcttcgagatgggagaggcacatagagcattagatatatgtcttgagatggacaaaagaagatgtcaacgtgctatcgatacctacgagataatgatctatggtctctttgattgtggagaaacagaatatgcaactgctcttctagatgaggttataaaccgtgacatgaaactttcatacaagaagtttgatgctataatgctgaggagcttattcaaagctattcgtggtaaatatattaaaaaatgtgctctgaattgtggtctagacatggatcagaaggctgatgaagctattttggaagtgttagaccttcgatgttttgatagtgtgcaggaggtggatattttggcatattacacgttgagtggtgaactcaagtatcagtttgggtctggaagaattcaaggaaaggtagaatatatggcctacaaaaaaatggaatacaaaaaattcttgaggatgttcggtgccaccaaaagacccgagtgccaggtggcagagcctgcacttaatcagaaggaggaagttatgatagaatatcgaccaccagcacctgcagttcattctaggcctgcaccccaatggatatgcccagtgtcttttatagagctcagtaaaactaccttcccttcccctctcgtctatgcatgttgtggaggtttctacctacaagactggtctttagcatggtatggcagcatgtttgtgtatccactctgtagaaaatatcttatgcttcatgtctttagcatggcacttgtgtctcaaatcctttcaacaattggatccattttagtgaaaccaaccatgcggaggccagggtccacgatcaggtggtccaatagtgtcaggttgaagtcccccaagctgatcttcaggatcctcaaagaggaagacgtcggcgcgcgcgcctgcctgaagctgaggccggtgagcgtgctgatgcagctcatcacctgtggctcgctctcggtgaaggatcacgggaacgctggggtcgttcagatgtgcaagccgaggttcccgaaccttaggttgctcccctcgccgctgatctcgcgcaccatgatgatgggcgagctcgactgtctctcagaaaaccccaagttgatggggataaagctgtaggagcaggagtacttcagcgggagccttgttgagaccaagaagacgcaaagagatggtccggctaagaggtatccggcgcttaaacgttcttcttcctacaatgtagaaaggtaagcttgatgagtgctttgctatgttcttgatatcctgcttaatcaaattgatatctgggcacacataaatatgtctaggctaactgttgaaaccctacatgattctttgatgttacttactggttgtcaattttaaagaaaaaatgttgcaacccaactgtcgagaccttctaattcatgactccgtaccattttgcgttgtagagtttgcttaccaatttgatttatgttagttatgtttccttttcgaaaactatgtctcattaagagtagaaccgatgacatgtgggcattggatccaaaattttgcacgaactgttgatagggacgcaaaccgttattgttgggtttaggcttgggatcaaagagttaagaattggagaagagccatgtactgaagaatatttatgaacgctagcaccgttgcttttgtcgttgcctaaaacactaacaggttgataccagaaacattgtatggttgtcatatagcgccagcatgcagctggcatgtatctatcaaacaaaaataccaaagtacgggaatctacctgccgggagagaatttgaggcctgtaggatcccaaatcggtaatgagagatttgtaaatgaggcgtgctcgcaccctgactgttcatctactccaccgtcacctcgcgtccgccctcgtcacattggttttcgtcgaggtgagttctccctccgtcctttttcctctgccccaccggcgttctctgagaatcagccggttctccgtcctccgatacgaagggacaatgtgctccacggagagctagaacaaattggaacgatgaacatggttatgcagtaatttggttctacctcatgtccaaggttgccaatatatacaatagtacaatcaggattgttctctgggttctctttaaattatcatgatattatatgtttccgttgcaacgcacgggcactaacctagttattaccttagtttagtagtcgattgagtgttgcagctcagaaaccacaagtacagcaagccatgactcttggtccacacgcgcgtcatacattatttaccatctcgactaaaaaccccatcatactttttgctcggacagaatttatcggagaaattaaacttggccctatctttagttatagcaaaagatagtagccgggccctcagttttggccaccttcctcgcttcaactggtcgtcggccccggcgccggtgccggagccggcgcagatcccgtctcatcagccagcttcatgtcggaatagacgacgcggccttccgactcggagtcggtgctgttgtccccggccgaggcgtcggagctgttgttgtccccggccgagtcgtcgacgctgtcgaggatgcggattctgttcttgccggcggaggcggtggtggcgaggtggcagatgagcagccccaccagcgccaagctcagcaaggccacgcggatcctggtgggcgccatcgcgcgtggaatctagctagtcgtagcaggtacctccccttctctgctcggatcgtccggctgtgattgctttcctttgttcct

SEQ ID NO: 125543 - DNA, 1478 bp, Zea Mays
cccgcggtgtcagtgccagggacccacaaggcggcatcgcctcgcgggccgccaggcccaggcgtggcgtgaccgaaactaaggaacccttttgtctcggccgggcgccccggtgtgcaaaaagattggcgacgaagcaaggaacgcaccccgaatcccaactcctgtgtccgccatcgcctcgtggcggtcgctcctgctcctgctgctgctgctgctcccccagccgcccccgcccggagcacgccgccggcgccgacgtcggcgcgtcgcatggatatggcccccgcgtctgtctacttcaacccgcgctcggtcgaggaaatcttcaaggacttctccggccgccgcgcggggctcgtccgcgccctcacctccgatgtggacgatttctgcagattgtgcgacccagataaggagaatttgtgtctctacggccttcccaacgggagctgggaggtgtcgccgccggcggaggaggttcctccggagttgcccgagccggcgctcggcatcaactttgcgcgcgacggcatgcagcgccgcgactggctcacactcgtcgccgtccactctgactcgtggctcatctccgtcgcattcttctacggtgcccgcctcaacggcaacgaccggaagcgcttgttcagcatgatgagtgatcttccttccgtcttagaagcattcgcggacaggaaacacggcagagataggtctggggttgatagcagcggcaagtccagacactcatcaaagagaggaaaagatggccatgccaagagtttcagggcagcagctcctgccgccaaggagtatgacgaagacgatgacgaggaagacgaggaggagcacacggagaccttttgcggaagctgcggcggcctttacaacgcgagcgagttctggatcggctgcgacatctgcgagcggtggttccacggcaagtgcgtgcggatcacccctgcgaaagcggatcacataaagcactacaagtgcccggactgcagctcgaagaagatgaggcagtaggtgtaggtccccgcgtgatctgactgacccgtgtgatctgatccaaaccataactccctccgtttgtttgtctcaaggtcgcagctagcagatgtgaattccttcatttgtggggcttgtttatgtggtggtaggaagaggcaaaggactgatagatagagatacatgaccgttttcttttatatatattcgttgttcaccgttttgcctgcttcgtcgcagtcctatcgctgtgtgaaggcatgaactgatgagtgggttgttcactcaatagttgataaagaatttcatcggtttcatgtcatcaaaaaagcatgtacgacaacttataaaatacaaacgaaactataatgaatctctcacaaagactggccacatgagcacatttggtgtgagactaacattgcattgtgtatgatcttattaagcatatcatatatatatctcta

SEQ ID NO: 125544 - DNA, 1770 bp, Zea Mays
atgctgcccacgcgcgcgtgcgtctcccactctccctgctcgtcacccaccactctccagtccacacgagcaaccccttccacccgcctccccccacacccaatccctaacctccctccgcctcccccgacctcgctcccgaataggatctatgatgccgtgattaagacggggacggaatccaacgcgggcaaggccgcgctcgacgcgttgggcgctgagctgactacccctctcgtcgccgacgtgctgcaccgcctccgctacgaggagaagctggcgtttcggttcttcgcctgggcgtcccaacaggacggctacaaccacgaaccgacgacttacaacgacatcatcgacattctctccggcacgcgatacaagagccgccagttcggtgtcctctgcaacgtgctcgatcacatgaagcgccatggctcgaggtcggtgccggttgaggaccttctggagatcctgcgcgcctacacggagaagcatctcacgcacatgagaaagctggccaagaagcggcgggttcggatgcgtacgccgccagagactgatgcgctcaacgttctgctggacgcgttctgcaagtgtgggatggtcaaggaagcagaggcagtgtttggtcgcgtgaagaggaagttgctgggtaatgcagagacatacagtaccctgttcttcgggtggtgccgggcgagggaccccaagaaggccatgaaggtgctcgaggaaatgattcagatgaagcacacgccagagagtttcacctacgttgcagccattatatcattttgcagcgctggattggtgtcagaggcaagggaactgtttgagttcatgaggactgaggggttgacgatatcatcgcccacagccaaaacatattcgattatgattgttgcattagcaaaggctgaccggatggaggagtgttttgaactgctttcagacatgagaagttgtggctgtatgcctgacgtgacgacttataaagatttgattgaagggatgtgcttggtgggtaaactggatgctgcttatcgtgtgttggacgagatggggagggctggatttcctcctgacattgtcacgtataattgctttcttaatgtgttttgtagtcatcgaaaggctgatgatgcacttgaactctgtgagaggatgatagaggcacactgtgagcccagtgttcatacctataatatgatgatgatgatgttcttcgagatgggagaggcacatagagcattagatatatgtcttgagatggacaaaagaagatgtcaacgtgctatcgatacctacgagataatgatctatggtctctttgattgtggagaaacagaatatgcaactgctcttctagatgaggttataaaccgtgacatgaaactttcatacaagaagtttgatgctataatgctgaggttatcagatgtaggcaaccttggcgcgatacatcggttgtcagagcatatgaggaaattttacaatgttgcgatggcgagacgatttgcaatcactcagaagaaaaagagcataggcctgagaaggaaatgagtgtcgtggctattgctgctgctgtttcttgttagttgttactgtggataatcaggagcttattcaaaggatcagaaggctgatgaagctattttggaagtgttagaccttcgatggtatgccattggaccaaagtattaattatatatgcaacgcttgtatcatctgttccactaataccagcagtgtgctattgctgtttgttct

SEQ ID NO: 125545 - DNA, 705 bp, Zea Mays
aaggctgcatttggaaaggtttggtggttgaaagaagctgatggtagtattattggtggaaccatcaagacaaattcaggaaatgagcaagaatccaaaaccacccagggatgcgtaagagattgatgcattttctttttgttccactaattggctgttcccggatatatatgcaacgctcgtgtcatctgttccaatacttgaagaagcagcacgctacgagttgagatatgggcacagaaatagagctacaagaggaggtggatattttggcatattacacgttgagtggtgaactcaagtatcagtttgggtctggaaggtgaagctgatcagttgctgctggatgaggcttctcaacgacggcttctcgacaaacatcattatgcccgagtgccaggtggcagagcctgcacttaatcagaaggaggaagttatgatagaatatcgaccaccagcacctgcagttcattctaggcctgcaccccaatggatatgcccagtgtcttttatagagctcagtaaaactaccttcccttcccctctcgtctatgcatgtattcaaaacctttcttctcttcggtgaagtggaggtaggcttagctgcaaaatcctgtttcttgtcattgattcgaggattgctgctcttttattttaatgtaatccagaatggttcataatattgacagttttggttttacacat

SEQ ID NO: 125546 - DNA, 1270 bp, Zea Mays
ttatttgtttgtacgacgtgttgaatgcatattgtggagctggacagtttggcctgcaaaatgtttctctgcagttttacaatatgtttagcttacatgaactgtatatggctctgtgatcatctacaatatgtacatcaaggcactctggttgcctccctgatgccatcatctacaatatgtacatcgaggggttgtataaactaccaactattatgcatattgtcgcattcgtagaatgatcagtcaaagccttgatcacatacatatgttcaacataacttatgcttcaggtctttagcatggtatggcagcatgtttgtgtatccactctgtagaaaatatcttatgcttcatgtctttagcatggtatggcaacatgtttgtgcatccactctgtagaaaaaagatgtcatatgtactgtatcgacactagaattttgtgttgttttttcatctgaaaatgtaggtggagaacaatgaactttaattgagtatgttatttctccaattatactggatgtttgggcacacccgttcatcagcattgatgttgtcgaagtgttagagtttttaggctatcaaggctcttggatgcttacaggcacttgtgtctcaaatcctttcaacaattggatccattttagtgaaaaatttatgatgtcactgccatggtgaaggtgaccaaccacgtaggcgcccacaccccacgtgtgtgtacctatttgcggcgtacccggcgttgagcttgttgttacagccaaccatgcggaggccagggtccacgatcaggtggtccaatagtgtcaggttgaagtcccccaagctgatgtaagcaacttatagccttaataattcctgctttgagctgcttcgtgcaagatattgctcgcatctgtaggcttagtggtatttagtttatggaatgaaattgtccattatcatctcactctttatttttgtttggtttatggaatgaaatgagttgatcaagctggcttcgacaagtggcaacctcgtgctatacaagtaatcatgttttttgtcagtgagttcgtttcttttgtcacctacggtgcatctggctataagaagataagatttggtaaagacgtttgttctgagttatccaacctagagaccgagcataacgaccttacatatagggattgtataaagtcaagctatcaaggctagctaccatgctgcatccagtggagaactagagattaacacgtattttatggatgcatgtttacatccttaaaac

SEQ ID NO: 125547 - DNA, 1160 bp, Zea Mays
ttatttgtttgtacgacgtgttgaatgcatattgtggagctggacagtttggcctgcaaaatgtttctctgcagttttacaatatgtttagcttacatgaactgtatatggctctgtgatcatctacaatatgtacatcaaggcactctggttgcctccctgatgccatcatctacaatatgtacatcgaggggttgtataaactaccaactattatgcatattgtcgcattcgtagaatgatcagtcaaagccttgatcacatacatatgttcaacataacttatgcttcaggtctttagcatggtatggcagcatgtttgtgtatccactctgtagaaaatatcttatgcttcatgtctttagcatggtatggcaacatgtttgtgcatccactctgtagaaaaaagatgtcatatgtactgtatcgacactagaattttgtgttgttttttcatctgaaaatgtaggtggagaacaatgaactttaattgagtatgttatttctccaattatactggatgtttgggcacacccgttcatcagcattgatgttgtcgaagtgttagaggctatcaaggctcttggatgcttacaggcacttgtgtctcaaatcctttcaacaattggatccattttagtgaaagtgaccaaccacgtaggcgcccacaccccacgtgtgtgtacctatttgcggcgtacccggcgttgagcttgttgttacagccaaccatgcggaggccagggtccacgatcaggtggtccaatagtgtcaggttgaagtcccccaagctgatgaaataggtggattgctctggttgttgagaagtttgttgaacccgatgtttccttggttccaacactgtcatgctccatcgattattttggagagttgatcagtgggcagaaaccgtggaagaaaagctgacatttgcactcacccgagccctatcagcagcgccggccctggcaggggtcgagcagtgccctcaaccaggcccccagattaatggagcctccctttaggtactaaataacattacgtatatacatgcatatatcatatattgtatatgtatgtctgctggctctacagaactttgaaagacgtaattataagcaaggagaattaggcgtagcccgtcaatcttgatttctata

SEQ ID NO: 125548 - DNA, 584 bp, Zea Mays
ggtttatggaatgaaatgagttgatcaagctggcttcgacaagtggcaacctcgtgctatacaagaaataggtggattgctctggttgttgagaagtttgttgaacccgatgtttccttggttccaacactgtcatgctccatcgattattttggagagttgatcagtgggcagaaaccgtggaagaaaagctgacatttgcactcacccgagccctatcagcagcgccggccctggcaggggtcgagcagtgccctcaaccaggcccccagattaatggagcctccctttaggtactaaataacattacgtatatacatgcatatatcatatattgtatatgtatgtctgctggctctacagaactttgaaagacgtaattataagcaaggagaattaggcgtagcccgtcaatcttgatttctatattgcagtagtagtacttcgtagtctcaggcccatctgtctaggctctcggtcgcagacagacaagcggtcgtgtcctctcctctcggtagccaacacacgacattgggtacgacggcgtttttgtcttgccctacacgacgaaaaagaaactaaca

SEQ ID NO: 125549 - DNA, 786 bp, Zea Mays
ggccatatcatacatgaactgattgtcaatcgtgcgatccgtacagaggaaaatgtaacctattttagcctttttgatttgagatggagtttttgttgttcatatatgagcaattaatatttgtgattttgaattgtttgatgagtcatactgtaccttcctataaaatgggatatttaaagttcatgtgaaagttcaatcttgttttctctaatcgtgtgacttggactgttggagaaatgttggctaatttcacttgttttcaggaaataggtggattgctctggttgttgagaagtttgttgaacccgatgtttccttggttccaacactgtcatgctccatcgattattttggagagttgatcagtgggcagaaaccgtggaagaaaagctgacatttgcactcacccgagccctatcagcagcgccggccctggcaggggtcgagcagtgccctcaaccaggcccccagattaatggagcctccctttaggtactaaataacattacgtatatacatgcatatatcatatattgtatatgtatgtctgctggctctacagaactttgaaagacgtaattataagcaaggagaattaggcgtagcccgtcaatcttgatttctatattgcagtagtagtacttcgtagtctcaggcccatctgtctaggctctcggtcgcagacagacaagcggtcgtgtcctctcctctcggtagccaacacacgacattgggtacgacggcgtttttgtcttgccctacacgacgaaaaagaaactaaca

SEQ ID NO: 125550 - DNA, 609 bp, Zea Mays
gcagatgagcagccccaccagcgccaagctcagcaaggccacgcggatcctggtgggcgccatcgcgcgtggaatctagctagtcgtagcagaatttgccacttgggaatcgaaattcgacaggcatactactccactatagctgccgtcggtcggctagctacgaaatgtagcctctgctcttgagggcctccacagcgtccctgatgatcttctccagagggctgaagtgcagccccaacgcgacgagcttcttggacccctcctcggctccctgtcgcaccagcccaggctgggtatccttggggaacctgcaacggtacagctcggcgaccttggccgcgaagtcgctccagtgggagatggactgggcgcagatgtgcctcccggacgctgccgggctctcgaacaccaggatatgcgccatggcggcgtcgtgcacatgcaccgcccccatccagatgtccctgtactcctccgtgcaacctgcgacgacgaacaggccggcatccatcctttattttcttcttcattattgaataattagacaaattttagattaaattctgaatataaatcatgacaaaatcagaagcactgaagtaaaaa

SEQ ID NO: 125551 - DNA, 414 bp, Zea Mays
tgggtatccttggggaacctgcaacgtacgcaacttaatttaagctaagcaatgctctatctatatccaggttttcattttcacagtcacaggacatggtctggtcgggtcgcttacttgggcaccttgtactcagggtacagctcggcgaccttggccgcgaagtcgctccagtgggagatggactgggcgcagatgtgcctcccggacgctgccgggctctcgaacaccaggatatgcgccatggcggcgtcgtgcacatgcaccgcccccatccagatgtccctgtactcctccgtgcaacctgcgacgacgaacaggccggcatccatcctttattttcttcttcattattgaataattagacaaattttagattaaattctgaatataaatcatgacaaaatcagaagc

SEQ ID NO: 125552 - DNA, 2061 bp, Zea Mays
atggcaatggcatatctgcaccacgggcatcatgaggcggttccgcactgtgacttgaagccaagcaatgtgctattcgatgatgatatgacaacgcacgtagcatactttggcatcgtagagctgctactgggtgacgacaactccatggtcgtctccaccatgcgtggagccctggaacacttgggtacatggcaccagagtatggatcccttggaaaggcatcacacaagagtgatgtgttcgactttggagtttggaatcatgctagaagtgacagtgaaggagttcggatccatttgctgttcttcatgtattaattggtcaaaaccactccctaacctctcctcatctaacctctcctcatcgtcttcggtgtttgtatatacacgcacagagctacagcagatttccggcctcggcccgatcgacgacgtcaagatcatggccgggtgcaccccgccgcggaagggccggagcacggccggcgacggcggccttgaggaggcgtggctggtggcggaggcgccggcgccggccaagaagctccacgcgagggctgcggcgtggggcgtcgtcaccgtcagcttcggcacccgcggccacggccacttcaactcgttcgtgctgctgctgctcgtcttgttcgtcgtcctcgccatttcggtcaccaccaccaccaccaccaccaagcagcgggagacgacgacgacgacggccgcgccgccgcctgcggatggcgcccgcgcccgcgccggcgggcaaggcgagtgcaacatgtcgtccggccggtgggtgtacgacggcgctgcgtacccgctgtacgaggagagcgcgtgcaagttcatgtcggaccagtcggcgtgcggcaagttcgggaggacgaatcgcaagtaccagcactggaggtggcagccgcacggctgcgatcttcccaggttcgacgcggtgaagctgctcgagaggctgcgcggcaagcgcctggccttcgtcggcgactcgctgaaccggaaccagtggatatccatggtctgcctcatcgacaccgccaccccgatgctgcataagtccatggccggcggcaacgacagctccctcgtttccttcaggatccatgagtacaacgcgtcggtggacttctactggtcgccgctgctagtggaatcgaactcggaccatccggttcaccaccgggtggccgaccgcgtcgtgcgcgccggctccatcgacaagcacgccaggcactggggcgacgccgacgtgctcgtcttcaactcctacctctggtggcgccgcccgagcatgaaagtcctgaggggttcgttcgaggcggcggcggcggcggcgtacgaggtgaccgacagcctgcgcgcgttcgagatgtcgatgaagacgtggtcggagtggctggagcgccacgtcgaccgcgcccgcaccgggctcttcttcacgagcatttctccgacgcacctccactccgacgagtgggaggaggcggccgggtccgggagcggcgccggcaaccaccgatgctacggcgaaatggagccgatcacggcggaggggcaccgcgggcgggacacggacccggcgttcgcgcgcgcggtggaggcgcaggtggcgcggctgggcgcgcgcggcgtcgccgtgcgggtgctcaacgtgacgcagctgtcggagcaccgcaaggacgcgcacccgtccgtgcaccggcggcagtggagcccgcccacggcggcggagctggaagcgagggcgcgcgaccccagcagcggcgccgactgcatccactggtgcctccccggcgttcccgacgtctggaaccagatgctctatgcgcacctcgtgtcgtcgtcgtagtagctaggtggcgggcggcatacccgctcagcaattccgcagctcattttccgtttttttaattatttttctctacgctttgcatatgtaatttcaaaatcgcatacatacaagtcgacagcgtagtttgtaaaccgaatgaacacggggcagcagtatgtacacaacacgggcagttcttgttatgtgagttggttttat

SEQ ID NO: 125553 - DNA, 1566 bp, Zea Mays
caaccgcatccctagtacagatcgagtgtaccgtagccactccacgtctccacgctccacggtcccactcgcaccccccgacgggtcggaacctcagctcagaggatcggaagaacggacgacggcgagatggcaagcggggaagaaggcaagggcgagacggtgctggtcaccggggccagcggcttcatcggttcgaccctcgtccgcggcctcctcggccgcggctacaacgtccgcgccggcgtcctcgaccccgacgacagggcggagacggaccacctcctcgcgctcgccgccggcgccggccgcctcagcttcttccgctgcgacctcctggacggcgccgcgctgctcgacgcggcaagggggtgctcgggcgtcttccacctcgcgtcaccctgcaccgtcgaccccgtcaaggacccccagaatcagctgatggtgcctgcggtggaagggacgctgaacgtggtgcgcgcggccaaggacgccggcggagtgcggcgggtggtcgtgacctcgtccatctcggccgtcgtgcccaaccccgggtggcccgccggcgaggtcgtcgacgagcgttgctggaccgacatcgactactgcgagaagaatggggtttggtaccctgcttccaagacgctggcggagaaggcggcgtggaagtttgcagaggagaacgggctggatgtggttgtggttaacccggggactgtgctgggcccgatgattccaccagccatcaacgctagcatggccatgttttgtcgcctccttcaaggctgcacggaggagtacgccgatttcttcctagggccagtgcacgtggaagacgtcgccatggcgcatatcctggtgttcgagagcgcatcggcgtcggggaggcacctgtgcgtccactccatctgccactggagcgacttcgccgccaaagtcgccgagctctaccccgactacaaagtgcccaagttccccatggacacccagcctgggctggtgagacaggaggtggggtccaagaagctcaccgcgctggggcttcagatcacccccatggagaagatcatcagggatgccgtcgagagcctcaagagccgaggccacatctcctgaatcctgatggatggcaggatgggcagtgcttgtgatgcgtgaggccgtacgtcatggaccttgctaagttgctagcgtggcttgtgtaactagttgtaataaataatgatgtcaccagacgacgacgacgaacctgagaaggaaaattgagctaatagctcgattttcagttcttaatcacgaagtttcaggtaccgaactggattggattctttgtcgcagatgaggcctagagacacacgctgaacgttctgatagttgccgtcaactgtacttggccacgccatttgctcctcctcttctttggcctgcactctgcacaaagttcagtaatgtgctttggtgcaggatcatgagcaactgtatacagattttttgggggtgcaaaacagtgaagcaccctctaaagcctttcgttcggttgtacgtggatcggaagtggttgagagt

SEQ ID NO: 125554 - DNA, 1515 bp, Zea Mays
tgcacctactttttttccctctcgtctctgttgcccggttgcccctcgctgtgacgactgacgagcaaccaatccacccaaatcccagaccgagctccaatcctcagcgccgccagtcgcgccgcctccgatggccgcgcggcgcgggccccacgtcatcaagctccacgatcccaacccgcccctcctcggccgggcgccggggaccgcaccggccgccatccccgcgccgtcgcgcgatgagggcatcctcgcgcagcaccctcgcgccgccccctcgagcgcatccgcctcgcacccggccttcgcccttatcgaggagcgcctcgtagcccgggaccaggacatccaggagctcctcgtcgacaaccagcggttcgccgccacgcacgtcgcgcttcagcagcagcttatcgcggcgcagcacgagctccgggcggtctccgtcgctgccaccagggcgcgcgccgagcgggaggtcgaggtgcgagcgctggccgaccaggcggcccacatagaggccgaggcgcgggccgtcgccgctgcgcgcgcggaggtcgaccaggttcacgccgacgtccaggtgctcgtcgcggcgcgcactgaccttgtcaaccggctccagggcctacgggagaagctcgcgcacaagaaggctgaggcgagtaagaccgattccgtccgtgcccagattgaaaccatgcgccgggagatccagaagggcagagctgcggttgattttgaaaagaaggcacactctgataaccttgaacaaagtaaagcaatggagaaaaatatgattgctgtggctagtgagattgagaggcttcgaggagagcttgcaaatgctgaaaaaggggccaccgctgtcaacccagcagcagctgttggtaactctgggtatgttgcggcttatggcaattctgagccaacatatactgcaatgtatggcaatcctgatgcaacatatactgcacaggcctatcctgatgcttataacactaatcaggctcacatgcacgctggtgccagttcctattacacgagtcaaccattttcctatggacaatacgagagccagcacaccaatatccaaagatgactgccggcacaagatagctttgactcgtctgccatctcattctcgctgtaaaaggatagtcgcagaatccaccggattaagcatgctagaaaaatctgttgcatcggagcgctggaactcctcgtggtcatgtttgcttttcttttctggctaatttgttccagaatggatgggtcgaattttggagcaaaaatctttctggcttctccatgtactaccataacgatttgtcagttaattctgcagattggtgtggtgttattcagggccgactatgatgcctctagccatttgtgtacatacgtataaatgaactaggtgagtgcccgtgcgttgcaacggaaccgtataataacacgataacttatgtacatatgtgtgttatattgttatgagaaaatgtttcagaatcc

SEQ ID NO: 125555 - DNA, 1061 bp, Zea Mays
ccaccaagttgcgtttgcgtccctggccgaggaggaaagcaactagccagccagtcaccaaacgcgcaacccgatcgagatcgagagatctgcatatgtcagagtccggcccggccgccgatggaggcgccgggggcgggccggctgacgctggcggggtgaggtccatggtgcagcggtggaagatggacggcgcgccggcgcgggcgcggctgctgctgcgggccctggcgtggctcttctccctcctcgccctcgtcgtcatggcgtccaaccagcacggcggcagccaggacttccgcgagtaccccgaatacaactactgcctgggcatctcgatcgtggcgtggctgtacgccacggcgcaggtcctgcgcgacgtccaccgcctcggctccgggcgggacctcatcgcggcgaggaaggcgtcggccgtcgtcgacttcgccggagaccaggtcgtcgcttacttcttgatatcggccatgtccgcggcggcgccggtgacggactacatgcgccaggcggcggataacctgttcacggactcggcggcggcggcgatcagcatggccttcttcgcgttcgtggccattggcctctctgctctcgtctccgggtacaacctctccatggaggctcttgtatagcctgtgaatcacaactctaccatctcatgtgtgatgtgtcacgttacccaacctcgacactgttcatatagtattgcctccaattgttagttgagcatatttctttttctctctgataaagaagatggaatgtgtaactactgtttaatttacatagaccatgcaaagacgaaagtcaaactcactgagaatgatcctttcaaaagccaatacagtatatatatatatatatatatctattactactctataagacagcaaggagggcgtccacagttgtcgtgcccccgctcccgcacatcgcgccgccccatcttccccgactgtcgtcccgccgcagaaatctcgcccgcccctcccccctcgcccgcacgtggacccgcctctcctcgccgtgatctccacttctag

SEQ ID NO: 125556 - DNA, 1300 bp, Zea Mays
ccaccaagttgcgtttgcgtccctggccgaggaggaaagcaactagccagccagtcaccaaacgcgcaacccgatcgagatcgagagatctgcatatgtcagagtccggcccggccgccgatggaggcgccgggggcgggccggctgacgctggcggggtgaggtccatggtgcagcggtggaagatggacggcgcgccggcgcgggcgcggctgctgctgcgggccctggcgtggctcttctccctcctcgccctcgtcgtcatggcgtccaaccagcacggcggcagccaggacttccgcgagtaccccgaatacaagtcagtacagtaggctaaccaaattaaccagcaccacccattctcgatcgatcgaccattggaatcgatgcagtgctgagtttccaagcgtgcagctactgcctgggcatctcgatcgtggcgtggctgtacgccacggcgcaggtcctgcgcgacgtccaccgcctcggctccgggcgggacctcatcgcggcgaggaaggcgtcggccgtcgtcgacttcgccggagaccaggtggtgggttcatccggtgcgcgtgtgtgtgcgccgccgtggaacgatccgatccgatccacccaccgatcgccaaccgccgattactattgtctgtctcgcttttttttttctctgatggaaaatctggaaacgttggtgcaggtcgtcgcttacttcttgatatcggccatgtccgcggcggcgccggtgacggactacatgcgccaggcggcggataacctgttcacggactcggcggcggcggcgatcagcatggccttcttcgcgttcgtggccattggcctctctgctctcgtctccgggtacaacctctccatggaggctcttgtatagcctgtgaatcacaactctaccatctcatgtgtgatgtgtcacgttacccaacctcgacactgttcatatagtattgcctccaattgttagttgagcatatttctttttctctctgataaagaagatggaatgtgtaactactgtttaatttacatagaccatgcaaagacgaaagtcaaactcactgagaatgatcctttcaaaagccaatacagtatatatatatatatatatatctattactactctataagacagcaaggagggcgtccacagttgtcgtgcccccgctcccgcacatcgcgccgccccatcttccccgactgtcgtcccgccgcagaaatctcgcccgcccctcccccctcgcccgcacgtggacccgcctctcctcgccgtgatctccacttctag

SEQ ID NO: 125557 - DNA, 292 bp, Zea Mays
ccatcatcttctcgctactctttttttttttttgtttacaggccgtccactcgaatcccgttgctacctttgccgcccatgtgaatgttttcgtcagaaaattatggcgacgagatcgtccgtttgtctgtattacgcgcactccagtatcgacgctcttggccgcaaaaacgtcccatcaagcattgtgacgcctgagatcaagctactgattagttcatcatatcatgttactgcacgtttcaaaaattagaatgaagcgggttcattctaattaactctccaaccaaac

SEQ ID NO: 125558 - DNA, 1840 bp, Zea Mays
cgcctcctagaccgtccgatcggtgtcgttccagaacaatccgcctccgaatcaacggcgggctctgacaggtgacagccgctcgcgccgtgagccgcttacccgctataaaggcctccctccgcccaaatctgacctcttttctctctccccgtctgcctcgccctccacaccaggccacgccacacacaggatagcgagcgggagcgacggcggcggcggaggagctagggttttgatccggcctcgccggctaggctgcgccgccccgacgccgaagccatggacagggagcttctagagacgtttgacgcggccaagaaggcggccgacgaggcggcaggggacggcaactcgccggaggctggccgctgcctcgacgcgctgcggcggctgcgcgacattcgcgtcaacaccgacatcctcgtctcgacgcagatatgcctcgtcgaatcgacggcctgtttcccctccctctcctctaagacgacgccgggtagacgcgcgcaagaaacagggccttcgtttggaactagatctattgagttcctgtctctattttgggtggatactggataggttggcaaacgccttcgaccccttactaagcatcctcactcaggcattcaagcagttgctgcagacctttttgggtactggaaaaaggttgtccttgaagagtcaggaaagaaaaatggcggctcagagaatgaaagatcaagtgactcttcaggaaaggttgagaaggtgaggcccgtgaagattgaaaagaactctgcatcagcaagcatgaagcttgagaaaagagatgtggatgttaggggtcagaagcctaacaatgtcaaagttgagaagactactagtaatggttccaaagctcaatctgtgaaggtggaaagggtatccaaagaagtcataaggactcctgactcgaagaggccagcatccgtccccaatggccacccaaagcttacatctcttgtcaaatgcaatgatcctacccgagataaaatccgggaactacttgctgaagcctttgtaagtgtttccagagagactagtgatgatgacagagacgaagtgaaaaacatcttggatgaagtcgaggcatgcgacccatacagggttgccgtgacagtagagtctgcactattcgagaggcttggaccttccactgggactcacagggcgaaatacaggtcaatcatgttcaacctgagggctgaaaacaataccgatttccggaggagggtcctcatcggtctagtggcgccggagaggcttccagacataccccctgatgagatggctagcgacgcaaggaagcaagagaacatgcagatcaaggagaaggctctgttcgactgcgagcgtggagcggcaccaaaggcgacgacggaccagttcaagtgtgccagatgtgggcagcggaagacgacttactaccagctgcagactcggagtgctgatgaaccgatgacgacgttcgtcacatgcgtgaactgcaacaatcactggaagttctgctgagtgttcagccttgctaaagtgtttacttagttgtgctgagcacactatcctgctgtgatgtgtgtgctctgttagttgtgactggaagttcgacagggcaggctgaacaactcaacttttttccccttttttaccccccgtaaactaggagcagttatcctcttcctctgtcaggcagcctcctgattcattcagattgtactagtcgaacgcgtgaatgttgttgacttgatcgcatcgtcaccagatgtgaatgttcttgggtggagttagaatagaatggtgccaagtcagacgatgctgatggatt

SEQ ID NO: 125559 - DNA, 1786 bp, Zea Mays
cgcctcctagaccgtccgatcggtgtcgttccagaacaatccgcctccgaatcaacggcgggctctgacaggtgacagccgctcgcgccgtgagccgcttacccgctataaaggcctccctccgcccaaatctgacctcttttctctctccccgtctgcctcgccctccacaccaggccacgccacacacaggatagcgagcgggagcgacggcggcggcggaggagctagggttttgatccggcctcgccggctaggctgcgccgccccgacgccgaagccatggacagggagcttctagagacgtttgacgcggccaagaaggcggccgacgaggcggcaggggacggcaactcgccggaggctggccgctgcctcgacgcgctgcggcggctgcgcgacattcgcgtcaacaccgacatcctcgtctcgacgcaggttggcaaacgccttcgaccccttactaagcatcctcactcaggcattcaagcagttgctgcagacctttttgggtactggaaaaaggttgtccttgaagagtcaggaaagaaaaatggcggctcagagaatgaaagatcaagtgactcttcaggaaaggttgagaaggtgaggcccgtgaagattgaaaagaactctgcatcagcaagcatgaagcttgagaaaagagatgtggatgttaggggtcagaagcctaacaatgtcaaagttgagaagactactagtaatggttccaaagctcaatctgtgaaggtggaaagggtatccaaagaagtcataaggactcctgactcgaagaggccagcatccgtccccaatggccacccaaagcttacatctcttgtcaaatgcaatgatcctacccgagataaaatccgggaactacttgctgaagcctttgtaagtgtttccagagagactagtgatgatgacagagacgaagtgaaaaacatcttggatgaagtcgaggcatgcgacccatacagggttgccgtgacagtagagtctgcactattcgagaggcttggaccttccactgggactcacagggcgaaatacaggtcaatcatgttcaacctgagggctgaaaacaataccgatttccggaggagggtcctcatcggtctagtggcgccggagaggcttccagacataccccctgatgagatggctagcgacgcaaggaagcaagagaacatgcagatcaaggagaaggctctgttcgactgcgagcgtggagcggcaccaaaggcgacgacggaccagttcaagtgtgccagatgtgggcagcggaagacgacttactaccagctgcagactcggagtgctgatgaaccgatgacgacgttcgtcacatgcgtgaactgcaacaatcactggaagttctgctgagtgttcagccttgctaaagtgtttacttagttgtgctgagcacactatcctgctgtgatgtgtgtgctctgttagttgtgactggaagttcgacagggcaggctgaacaactcaacttttttccccttttttaccccccgtaaactaggagcagttatcctcttcctctgtcaggcagcctcctgattcattcagattgtactagtcgaacgcgtgaatgttgttgacttgatcgcatcgtcaccagatgtgaatgttcttgggtggagttagaatagaatggtgccaagtcagacgatgctgatggattagtggtgctgtgctccatttctgtttccattgtctggatgaagatcgagatctatatcagatgatgcgctgtcccatttcggactat

SEQ ID NO: 125560 - DNA, 3695 bp, Zea Mays
atgcagggccacatgctccaggcgttgtgcatccccgccgtgattgtctttgcgagcgccctggtgctggtggccgcggtgttgtgcgccgtcgcggtgcgggcgctgcggcgggcggcggcgcgggagatggcgctgaacgtcgacctggcccggcagaaggaggcgctgcggcaggcagagcgcaagagcatgaataagagcaatgcctttgccagcgctagccacgacatccggtccgcgctgtccgccatcgccgggctcgtggacatgtcccgtcaggaggcgcagtcgctccccgccgtcatggaaaacctcgatcagatgggtgtctgcaccaacaagttgttcgatatcctgaactcaattctagacacaagcaaggtggagtcggggaagatgcagctagaggaagccgagttcagcatggcagacgtcctgcaggagtcggtggacatggcctacgtgacaggcgtccggcggggagtcgaggtggtctgggacccctgcgacttctcagtcctgagatgcgcggctgtcctcggggacagcaagcgcctcaagcagatcctagacaacctactcggcaacgccctcaagttcaccgatgaaggtcacgtcgtccttcggagctgggcgacccgaccgatcaccgggagcaatgtcagagctccgtcaaggtttgtgcacccacggcacggcggcggcggcttcttgggatgcttgttcagggcaaggaagcgtcctggtgaccaggatcatgtgcagaatgaccccaatttggttgagttttactttgaagtggtcgacactggcattgggatcccccaggagaagaagatgtccgtgttcgagaactatgttcaggtgaacaatggccaaggcggcacgggcttggggctcggaatcgtgcaatcctttgtacgtctgatgggaggagagattagcatcaaggacaaagagcccggagaaaggggaacatgcttcgcgttcaacgtgctcctgaggataagcgaggtgcaacagcctcaagacatagaagaaggaccgtcggttccattaggcaccctgaaccgctccatttccatagcctcagcgtttcaagaagccagcaacttcaagggcgtgcactgcgttctctacgttcatgggtatgaaaccaggaggatcctgcagacgtggatggagagcatcgaggtcaaggtctggctggttccgcaagccgagttcatcggttccaccttggagaaggtgcagagcaatagcacggccaccgctaccgcggaatgcggcagcgccgaccggtgcttcagctccaaggagatggtgaacctgttgaggaacaactctagtcctaggagagccatcctcggggggattccttccggtatccttgttgtcatcgacgtgtccggtggtgaaacggaagaaatttgccaggagatggccaagctttccaggatcaagcatcaagccccatgcaaagttgttctgctcgaggatatcaagaccccttccaatgatctgaggaggctcaaggacatgggctgcgatctcgttttgcgaaagccagtgcacgggtctcgccagttcactctccttatgaccctgagagacctccaagttttagatgcacaggcacagtcttcccatgttggccctgagattgctgggaacagccagcaacaagatttgccggatgttgttgttccttgcgtggaagacactgttgcatcaactgaagcttcatgcttggctcagaagcctggagatgataagccgctagccgggatgcgaatcttgctggctgaagacaatctagtgctgcaatcaatccaaaggaaaatcatgaaccagcttggagcatttgtcacagtagctcaaaatggaactatggctgtgaacttgctcagagaagctcttgagcaagccaatgcttcagaagaggatatagtgtccttgccctaccatgtcatcttcatggattgccagatgcccggtatggatggctatgaagcgacgaaactcatccgcgaggaagaacaacgctacggaattcatgctccgatcatcgctttgaccgcgcacgacatggaggaggatctgcagaaggccatcgatgctgggatggatcttcacctggcaaaaccaatatcgcggaagaagatagtggacgctgttcgcagtttctgcaaattttctctttcttcgtcccgtcaggaatgccctccttcctctgagatctcggagtcgccctcctcttgcccaagcccagaccgatcgaggaccagccctgcatccagatctatgttttttgtgcccctccacgtgatccctgctggcggaggtagcaccgtgtgggagaatgacgcccccccacttcggcaatatggtcgcacggtcgcacccgtggtggcctggccacatctacaaagtcaggctcaccgtctcatcgatgacgatgaggtacaccgcggctaccgcgacgggttcatcctggtcgtcttcttcggcgacaagagcacgggtggttcgagcccggcgagctcgtccccttcgaggaccgcttcaccgagaaggcagcccacgccgaggccgtcgacaagacccaggccgcgcggcaacgatttgtgcgcagaaggagctcgactaagtgcttaacgctgccatggctgatggctcaacgggacgcggcggaaaaggctgcacacaccgtgccagggatggagatgaccacgttgttctcagcgtaccgtcgcgcagtgttttcgcccatagaccacctacgcccaagcgttgggacttcggggtggatcccgagcttccgcttgctacggactagagagccacggcggcagagcgagctcaacaagaaccactttggggccaacagtgtcgtaacaaggttcgccctcgactcgagaaccaagttgttaatgaggccaccttccggtgtctagattgctttgttgtcctattcctgttactattatctacacttacagataagccttgtcgatgcattttgatcagctccttttgttcctatgcagagggcccctatcgtgcccacctttgggcgtttcccggcgctcgtgggctaacacaagcgagccccttcactcgctctcaaaacccgggctgtgagaggaggggaaatctcacttataagctcaccacggccccctccggctagcgaggtggtactaaagccgggcgctaacggctaggctcctgacatcccatcccccttttcgggcggtatggcgactgtctgcctctgataccaattgtcagcgaccttcccggcctagcccactcaacgctacacctttgggcgtttcccggcgctcgtgggctaacacaagcgagccccttcactcgctctcaaaacccgggctgtgagaggagggaaaatctcacttataagctcaccacggccccctccggctagcgaggtggtactaaagccgggcgctcctccatattatgctgctaatataacatctagatatttttttactgtaagaaccctcagtgtaggctccaagcggtaagcaccactgcagtctgcagttaaaatgcgtgtttccctctacattgattatgcatctatttaaatttggcagtgttctgctcaacaaatctgcttaacatatcagcaacaataccgtctggaagacaatttctgctaa

SEQ ID NO: 125561 - DNA, 4264 bp, Zea Mays
atgcagggccacatgctccaggcgttgtgcatccccgccgtgattgtctttgcgagcgccctggtgctggtggccgcggtgttgtgcgccgtcgcggtgcgggcgctgcggcgggcggcggcgcgggagatggcgctgaacgtcgacctggcccggcagaaggaggcgctgcggcaggcagagcgcaagagcatgaataagagcaatgcctttgccagcgctagccacgacatccggtccgcgctgtccgccatcgccgggctcgtggacatgtcccgtcaggaggcgcagtcgctccccgccgtcatggaaaacctcgatcagatgggtgtctgcaccaacaagttgttcgatatcctgaactcaattctagacacaagcaaggtggagtcggggaagatgcagctagaggaagccgagttcagcatggcagacgtcctgcaggagtcggtggacatggcctacgtgacaggcgtccggcggggagtcgaggtggtctgggacccctgcgacttctcagtcctgagatgcgcggctgtcctcggggacagcaagcgcctcaagcagatcctagacaacctactcggcaacgccctcaagttcaccgatgaaggtcacgtcgtccttcggagctgggcgacccgaccgatcaccgggagcaatgtcagagctccgtcaaggtttgtgcacccacggcacggcggcggcggcttcttgggatgcttgttcagggcaaggaagcgtcctggtgaccaggatcatgtgcagaatgaccccaatttggttgagttttactttgaagtggtcgacactggcattgggatcccccaggagaagaagatgtccgtgttcgagaactatgttcaggtgaacaatggccaaggcggcacgggcttggggctcggaatcgtgcaatcctttgtacgtctgatgggaggagagattagcatcaaggacaaagagcccggagaaaggggaacatgcttcgcgttcaacgtgctcctgaggataagcgaggtgcaacagcctcaagacatagaagaaggaccgtcggttccattaggcaccctgaaccgctccatttccatagcctcagcgtttcaagaagccagcaacttcaagggcgtgcactgcgttctctacgttcatgggtatgaaaccaggaggatcctgcagacgtggatggagagcatcgaggtcaaggtctggctggttccgcaagccgagttcatcggttccaccttggagaaggtgcagagcaatagcacggccaccgctaccgcggaatgcggcagcgccgaccggtgcttcagctccaaggagatggtgaacctgttgaggaacaactctagtcctaggagagccatcctcggggggattccttccggtatccttgttgtcatcgacgtgtccggtggtgaaacggaagaaatttgccaggagatggccaagctttccaggatcaagcatcaagccccatgcaaagttgttctgctcgaggatatcaagaccccttccaatgatctgaggaggctcaaggacatgggctgcgatctcgttttgcgaaagccagtgcacgggtctcgccagttcactctccttatgaccctgagagacctccaagttttagatgcacaggcacagtcttcccatgttggccctgagattgctgggaacagccagcaacaagatttgccggatgttgttgttccttgcgtggaagacactgttgcatcaactgaagcttcatgcttggctcagaagcctggagatgataagccgctagccgggatgcgaatcttgctggctgaagacaatctagtgctgcaatcaatccaaaggaaaatcatgaaccagcttggagcatttgtcacagtagctcaaaatggaactatggctgtgaacttgctcagagaagctcttgagcaagccaatgcttcagaagaggatatagtgtccttgccctaccatgtcatcttcatggattgccagatgcccggtatggatggctatgaagcgacgaaactcatccgcgaggaagaacaacgctacggaattcatgctccgatcatcgctttgaccgcgcacgacatggaggaggatctgcagaaggccatcgatgctgggatggatcttcacctggcaaaaccaatatcgcggaagaagatagtggacgctgttcgcagtttctgcaaattttctctttcttcgtcccgtcaggaatgccctccttcctctgagatctcggagtcgccctcctcttgcccaagcccagaccgatcgaggaccagccctgcatccagatctatgttttttgtgcccctccacgtgatccctgctggcggaggtagcaccgtgtgggagaatgacgcccccccacttcggcaatatggtcgcacggtcgcacccgtggtggcctggccacatctacaaagtcaggctcaccgtctcatcgatgacgatgaggtacaccgcggctaccgcgacgggttcatcctggtcgtcttcttcggcgacaagagcacgggtggttcgagcccggcgagctcgtccccttcgaggaccgcttcaccgagaaggcagcccacgccgaggccgtcgacaagcgacgtcattttcttccttgtcaatctcccggcattcgacaccaacgttgactaccaccgccaccagacccaggccgcgcggcaacgatttgtgcgcagaaggagctcgactaagtgcttaacgctgccatggctgatggctcaacgggacgcggcggaaaaggctgcacacaccgtgccagggatggagatgaccacgttgttctcagcgtaccgtcgcgcagtgttttcgcccatagaccacctacgcccaagcgttgggacttcggggtggatcccgagcttccgcttgctacggactagagagccacggcggcagagcgagctcaacaagaaccactttggggccaacagtgtcgtaacaagagggcccctatcgtgcccacctttgggcgtttcccggcgctcgtgggctaacacaagcgagccccttcactcgctctcaaaacccgggctgtgagaggaggggaaatctcacttataagctcaccacggccccctccggctagcgaggtggtactaaagccgggcgctaacggctaggctcctgacatcccatcccccttttcgggcggtatggcgactgtctgcctctgataccaattgtcagcgaccttcccggcctagcccactcaacgctacacctttgggcgtttcccggcgctcgtgggctaacacaagcgagccccttcactcgctctcaaaacccgggctgtgagaggagggaaaatctcacttataagctcaccacggccccctccggctagcgaggtggtactaaagccgggcgctcctccatattatgctgctaatataacatctagatatttttttactgtaagaaccctcagtgtaggctccaagcggtaagcaccactgcagtctgcagttaaaatgcgtgtttccctctacattgattatgcatctatttaaatttggcagtgttctgctcaacaaatctgcttaacatatcagcaacaataccgtctggaagacaatttctgctaatgccaactttttgatcctccacttgtgtgcagctttctcaccttagatgcatttaaaatttctctatgcactgatagactacttatgataatctaatgttgattccaacaaacataagtgtcacttcctttggcttagaacctaattttatagatgtgtttaagaagtatgcattcgcggcttctcaccactccctaatgttggtgcgtgttgttttgaccacaaattcgttctgaaaattttaggtttcaaatgccaatacattttaaggagatgtacatgttagaaatatttttctaaaaacttggttagaattagagaagtctgacttagaaccaagattataaccaagattaaatgacctataatttggagcaacgggtccagtttaaaggcattcataaaccactgtaccatcgtaatgcagaatactggagatggctacctgaacttatgctgagaatcaagaatgtttgagtgcggtggagcatgattctctattttatgttgtgacagttgtcaattatggtgaagcaaagttttccttagtaactcgacttttggtcgatatattgtattgctaccataaacttgttaaaaaattttacatgttgttaagaaatggattgtgttcatcaacctttttggta

SEQ ID NO: 125562 - DNA, 1170 bp, Zea Mays
gggactccaaacctcaacatcttacttaccgtttatttatcaaacatctcaatgccgtagctaagtagtggtactaactaactacacagctagttaagttcacggccggcacttactgtgcaatttacatagatcgagcaacgaaaacgaaaacgaaaaccaccccggccgccccagccaaccgcgtgctacgtccacgcacggtccagggtccacctccacccacggcgctcgctcagaccgcgcgctccatcatgtccctgaactcgcggaagctgatgcggccgtcgccgtcggcgtcgtgcgccgcgatcatccgggcgcagtcctcccgcgccgagctcgagccgcccatcccgaggcggcgcagcacgtaccagagctcggcggcgcccacgaacccgtcctcgtcgcggtcgaacacgcggaacgcctcgcgcagctcgcgctccgtcgcctccttgcttcccagcagctcctccaccgccgccaacgccgcgcacccgccgcacgcggtgccgtcctcctcggcggaggagatggaggagcgctccgtgtcgccgtcggcgtcggcgtccaggtgcagggtcgccgtcacggccgccacggtgcccggccacgacgacgcggcgcacagctcgcaatgccgcgggggaggaggaggaggaggcggcgccacgggcacgccgctgcgggtgcgggacgacgacggcaggaggcgcgcgaggaccgcccgcgacgcggagcgcacgcccctgctcgctgaggccacgtcggtgccgccgggcagtagcggctggagcgcgagcatgatcagtagagatgacaccgacacgatgaggcagctgtggaggaggaggtccagcgccggcggcagcaccagcagctccaacatgtctcaatttgacgtacgtactgttgccgtggatcgaagagatcgtcgactccgccttggattaattgcgttggacttggacggacgacatgcgtcgtatcttatatatatacatgcaggccacaggccagccaggtgggcatcagcttggacgacgagcgaggaggtgtaagtgttgggcatgtgggcggcaaacgtagagcaagttcccagcaattgatccacgagcgacggagcgatcgagcgaggggatcatatgtatacccgattcgctg

SEQ ID NO: 125563 - DNA, 105 bp, Zea Mays
ttgatgatttttaccggatctattttcacagagctaagggtttggaaatcctcgagagctgactttggtgagccatgcgcgagccgaccgcacgagtctcgacgg

SEQ ID NO: 125564 - DNA, 3148 bp, Zea Mays
atggccctctccgctgcgcttcgcctcccgctcccgctccctcgccttctcggtccctccgccgtcatcttcggcgccgcctcccgccgccgcgctgccgccgccgccgccaacgcggccgccctccgcctcctctcggcctcgtctcccagtcccgcgtccttctcttcgcggcccacgcgtcccctccgctcgcgccgccgcaaccgcggcgacgatgggagggcggcggcggccggcggggccggcggtggggagggcggcggagctggactggtggtcaaggagcggattctgcccgtcgagctgcacaaggaggccacggaggcctacatgtcgtacgccatgtccgtgctgctcggccgtgcgctccccgacgtccgtgacggtctcaagcccgtccaccgcaggatactctatgccatgcatgagatgggccttgcgtctcgtaggccattcagaaaatgtgccagagttgttggtgaggtactaggtaagtttcatccacatggagatactgctgtatatgaaagcttggttagaatggctcaggatttttccatgaggtacccgcttgttcaaggacatggaaactttggctctgtagatgcagaccctcctgctgctatgcgatacacggagtgccgcttggattcgttagcagaagccatgttcttgactgatctggagctgaacacagttgactttgtgccaaactttgataactcacagaaggagccatctctactgccatcccgtgtcccatctttgttgttgaatggttcttctgggattgcggttggaatggcaacaaatattcctcctcataatctgggagagcttgttgatgtgctttctgtaattattgaaaaccgtgaagctacactccaagaactactggaacgcatgcctggtcctgacttccctacaggagggacaatcctgggaaatcaaggtattttggaagcatataaatctggacgtggccgcattgttgtgaggggaaagactgacatcgaaacaattgacgagaaaagcaagcgcacagctattattattaaagagattccataccaaactaacaaagctactcttgtacaaaagatagctgagcttgttgaagataaggtattggaaggtataagtgatattagggatgaaagtgaccgcactggaatgcgtgtagtaattgagctgaaaagaagtgcagatcctgctgttgtcctgaacaacttgtatcgtcatacagctctgcagtctagctttagctgcaacatggtggctatacttgatgggcagccaaaattgatgggactgaaagaaattcttcaggcatttcttgacttccgatgctctgttatcgaaaggcgtgcaagatataagctttcacaagctctagaaaggaaacatattgtggagggaattgttattggcctcgacaatttggatgctgtgattcaaataatacgagaaacatcaaatcacactgcggcaacaagagctcttgtcaatgaatttgatctatctgagaaacaagctgaagcgctgttggatatcacactaaagaagcttacttcccttgagcggaagaaatttgtggatgaagctaaaaccatgtcagaggaaatttctaagttaaatgagcttctgtcaagcaagaaacttatcttccagcttatacaacaagaagccgccgatttgaaaagcaagttttctacaccgaggcgttctgtgatagatgattcaataagcagtgaagttgatgacatcgatattatccctaacgaggaaatgcttttgaagattcttagtgagaaaggctatgctaagcgaatgaaccccgacacattcagtttacaacatcggggaaccataggaaagtctgttggaaagatgcgaatgaatgacagcacgtcagatttcattgtttgccagacgcatgaccatgttctttatttcagtgacaagggaattgtatactcagcacgtgcttataagataccagaatgtactagaactgctactgggactccgttggtacagttgctacctttatctgatggagagcggataacctccatcattcctgtgagtgaatttggtgagaaccaatatctagtgatgctcaccgttaatggctatatcaagaaagtaccccttaatgccttttcatcaatcagatctactggtatcatatcaattcaactggttcctggtgatgagcttaagtgggtccgtcattgtggcaatgatgacctggttgcattggcttcacagaaaggaagggtaatagtcaactcatgtgataagcttcgtgcccttggaaggaataccaggggtgtctgtgccatgaagttaaaagagggcgatatgatggcagccatggacataattccagcaacggtgcacaaaatgcccgaaagatgcaacagcaggctcagagattcgagtcctccatggttgcttttcatagctgaaagcggtattgggaaacgggtgcccttaaatgctttccggcaatcaaatttcaatgctgtaggcttgcaaggctacaagcttccagcagattgtcgtttggccgctgtatttgttgctggtctttcgctcactgaagacggtgaaagtgacgagcaggttgttttggttagccagagtggcactgtaaacagaatcaaagttaaagatatatccatccagtctcgacgctcgaggggagtgattctgatgaggctggagcatgccggaaagatccagtcagcatcactgatatccgcagcggcagcagaagtaactgaagattagtcttgcacccaagatgcaagtagtttagtctgaatttaatccctggcgtacgctgcagcatgaaatttgtctgctttcctgtggctagtaagcgtcaggagtagtcaggttgttgtacccgctgaactcagcgtaattaggaggcttgacatgtattttttggtgtctagagtggtgaatgtaaaatgccactatggctttcaaattgttgggtgataattttggatggcttgtctgcttttagttttgagcatattcactgtaactaaacactcactctaatcagaaaccactggtctcctgattgccggttaggcttgtttgggatttgcgctgttccatgttt

SEQ ID NO: 125565 - DNA, 2929 bp, Zea Mays
atggccctctccgctgcgcttcgcctcccgctcccgctccctcgccttctcggtccctccgccgtcatcttcggcgccgcctcccgccgccgcgctgccgccgccgccgccaacgcggccgccctccgcctcctctcggcctcgtctcccagtcccgcgtccttctcttcgcggcccacgcgtcccctccgctcgcgccgccgcaaccgcggcgacgatgggagggcggcggcggccggcggggccggcggtggggagggcggcggagctggactggtggtcaaggagcggattctgcccgtcgagctgcacaaggaggccacggaggcctacatgtcgtacgccatgtccgtgctgctcggccgtgcgctccccgacgtccgtgacggtctcaagcccgtccaccgcaggatactctatgccatgcatgagatgggccttgcgtctcgtaggccattcagaaaatgtgccagagttgttggtgaggtactaggtaagtttcatccacatggagatactgctgtatatgaaagcttggttagaatggctcaggatttttccatgaggtacccgcttgttcaaggacatggaaactttggctctgtagatgcagaccctcctgctgctatgcgatacacggagtgccgcttggattcgttagcagaagccatgttcttgactgatctggagctgaacacagttgactttgtgccaaactttgataactcacagaaggagccatctctactgccatcccgtgtcccatctttgttgttgaatggttcttctgggattgcggttggaatggcaacaaatattcctcctcataatctgggagagcttgttgatgtgctttctgtaattattgaaaaccgtgaagctacactccaagaactactggaacgcatgcctggtcctgacttccctacaggagggacaatcctgggaaatcaaggtattttggaagcatataaatctggacgtggccgcattgttgtgaggggaaagactgacatcgaaacaattgacgagaaaagcaagcgcacagctattattattaaagagattccataccaaactaacaaagctactcttgtacaaaagatagctgagcttgttgaagataaggtattggaaggtataagtgatattagggatgaaagtgaccgcactggaatgcgtgtagtaattgagctgaaaagaagtgcagatcctgctgttgtcctgaacaacttgtatcgtcatacagctctgcagtctagctttagctgcaacatggtggctatacttgatgggcagccaaaattgatgggactgaaagaaattcttcaggcatttcttgacttccgatgctctgttatcgaaaggcgtgcaagatataagctttcacaagctctagaaaggaaacatattgtggagggaattgttattggcctcgacaatttggatgctgtgattcaaataatacgagaaacatcaaatcacactgcggcaacaagagctcttgtcaatgaatttgatctatctgagaaacaagctgaagcgctgttggatatcacactaaagaagcttacttcccttgagcggaagaaatttgtggatgaagctaaaaccatgtcagaggaaatttctaagttaaatgagcttctgtcaagcaagaaacttatcttccagcttatacaacaagaagccgccgatttgaaaagcaagttttctacaccgaggcgttctgtgatagatgattcaataagcagtgaagttgatgacatcgatattatccctaacgaggaaatgcttttgattcttagtgagaaaggctatgctaagcgaatgaaccccgacacattcagtttacaacatcggggaaccataggaaagtctgttggaaagatgcgaatgaatgacagcacgtcagatttcattgtttgccagacgcatgaccatgttctttatttcagtgacaagggaattgtatactcagcacgtgcttataagataccagaatgtactagaactgctactgggactccgttggtacagttgctacctttatctgatggagagcggataacctccatcattcctgtgagtgaatttggtgagaaccaatatctagtgatgctcaccgttaatggctatatcaagaaagtaccccttaatgccttttcatcaatcagatctactggtatcatatcaattcaactggttcctggtgatgagcttaagtgggtccgtcattgtggcaatgatgacctggttgcattggcttcacagaaaggaagggtaatagtcaactcatgtgataagcttcgtgcccttggaaggaataccaggggtgtctgtgccatgaagttaaaagagggcgatatgatggcagccatggacataattccagcaacggtgcacaaaatgcccgaaagatgcaacagcaggctcagagattcgagtcctccatggttgcttttcatagctgaaagcggtattgggaaacgggtgcccttaaatgctttccggcaatcaaatttcaatgctgtaggcttgcaaggctacaagcttccagcagattgtcgtttggccgctgtatttgttgctggtctttcgctcactgaagacggtgaaagtgacgagcaggttgttttggttagccagagtggcactgtaaacagaatcaaagttaaagatatatccatccagtctcgacgctcgaggggagtgattctgatgaggctggagcatgccggaaagatccagtcagcatcactgatatccgcagcggcagcagaagtaactgaagattagtcttgcacccaagatgcaagtagtttagtctgaatttaatccctggcgtacgctgcagcatgaaatttgtctgctttcctgtggctagtaagcgtcaggagtatatctaaacgcccgtaagggaaaaaaa

SEQ ID NO: 125566 - DNA, 1050 bp, Zea Mays
tccatcctcctcatataaatttaagatagtcttacctgaactttaaaaagtgatagaatgtcaatagtgaattccaatttctctaaactttagtatctaaacgcccgtaagggaaaaaaagtaggaaaatggagtgcatctaagggatgcttttatatgactgtattgtggaaactcggctctgtaaaagaagtggtgatcaaagatttttcatgggactgttttactgcggaggttttcggtaatcccaaacagaaaggtaaagacccaagtcaattcctggcacaaaaacaggcatctttctgatgtggtgttgaacatatggagcatcaaagaatctcataatgtaataatggcaaccagttaactcaactgaactcttttagctgtttggttcagaaacatctcaaggcccaaattacataaaacaatttaactgtgagaatcttaagcagagctcaaaaactgccgagctcaggggcatacatcttacatacggaaataccaacccaaccctaaatatccagcaccatcatcatcatcatcatccaaaataggtgacataattggggagcttaccttggttgcaatgttgctggacagccagtccaggccttcatacaatccctcacccgttgtagcacaagtgctttgaatgtacctgccgccaaaatccaataaatcaagcaccagctgactgctagctaaataatatactacattaccaagcagaagagcagaactacgacactatgactacatagagcaatataatgaggaaagaagaaatctgttgatagtgtatgataccaatgacgttggcgaagtgaatgcagtccaagcttatcagtgatctcagcggcattcatagcatttggaagatcttgcttgttagcaaaaacaagcaacacagcatcacgtaactcatcctgcaacagcattcggtggagctcatcccttgcttcaacaacacggtccctatcattgctgtccacaacaaagatgagaccctgcgtgttctggaagtaatgcctccacagtggcctgatc

SEQ ID NO: 125567 - DNA, 763 bp, Zea Mays
atgcctattgcctaatcggcggccagttttgatgggccgggcttccgtctgaccatgatcgcctggcccatgcgttccacttccacactcaccaccacggaaccctaaccaagaatccgacccggcgctagacgattcggacggaaggaagacgagaaggccccgaggcgagcgggggatcaaagaagaagatgaaggtccgtgcggcggtgaagcgcctgtgccggttctgcaaggtggtgaagcgccggggaatcgtcttcgtccaatgcacggccaatgccaagcacaagcagcgccagggcttctccaccatcgccgaagcagccgccgtctcgtgcgttcacctgcctccgccgccgcccgctagcggttccgcctccgccgcagcgttcgcagagacttcgaaggtggcgaggcaagagatgtctatgaagttcaattggcggctgggtttagctgccctgttcaagaatggagaaaaataatatatcaggccttctaccatacgctgacatttttaagcagatgttgaatagggccagttggtacgatgatatcaagagaagcatgtagcaaaaactggaaactgcaccatcatgtatttgcagtggaataatatgagcagatattgttactttctcttaaaatgttcgattcttgattgtttaaatgtaatagcacttgcacaaagctgttgtgcttaactctgttttttacatcttgctgcgtggcccatttatcttattgggtggcaccgaaa

SEQ ID NO: 125568 - DNA, 2279 bp, Zea Mays
aacaagttgattaagtgcacagaaacaccctttgaccttgcaaaggcatatggggattttccaatcactcatcctgaaatgtatgcttaagaacatagttttgatatgaaaacatatctgtcaacattcaataaggcacacacaagtattcaattgaacagaaatataatttaagtaacaaaggaataccagtccaatcccaaactaatatgcacaattgctcaacgtcacaaaggagttcaagataacatcacaaagtagaacctgggtaggagcctctgaaaatccatttaatttggcaagaagcacacccacttcattctgcttgaacttttagcttacgataacacataccagctaccaaaacaaagatacatactaaccaataatagaagcacaaatttaacagcctaaccatgctactctcagtctcacaacagaatatagatcaacaattcaagcatagccacaggtgtgaggtgtacactactcattcctcttgtttttggtagaaactaaacattatcgctggcgattagacaagcacatatctattcaattgttatggagcctgaataacaacagagtaattagcgacgctggatgtaacacagcacagcgcaaccaatttgttccttttgattgctcttcatcatacaagaggctgcagaggcaataccctggccgctcagtcgctggagcccgggccgggcgtcttggacccgattccgtacttctcctggagcctggtgatctcgtcctccttcttcttgatatccgacttcttggacatcttggcgggctggtagtagagcacgataaggtagcggttggcgacgttgaagccggagaggtggtcgacggcgttcttggcgtcgtagatgtcctcgtagacaacgtaagcggtcccgcgcgtgtccttggcgttgcccagacggatctgccggatcgcgccgtacttgccgaagatgtcgtacatctcctcgctcgagatgttgaacggcaggttccgcacgtagagcacccggttcacctccggcgggaggcgcgcattccccttcctcaggcccgccgccgccatcgctgccgcgccgagataacctagggtttggggattggggattggggattggggatttgggggtatgctttgcttgttgcgtatggccacctcttcctcttgcgcttcgggtggagccggcgcacggggtcgattagttgccgactccgggagagttcccaccgacatgtggcccttacttctcaagcggggcccatatgtcggcgtcgagtctcgaagcttcgttttggcgcaataaggcgacctgagtcctgaaccgcctcgagccgctctcggcttcgaatcccgacaacctccctccccaagctgcttagccgccggctgggcctcagacctgcgtcaagcttccggcggcagcccatcgagcaccacaatggcgtccggcggagcggccatctcggcggggcctacaccgccgtcggcgacggcgtcgtcggttgagtggcaccagcggccgccgaacccgaagaaccccgtggtgttcttcgacgtgaccatcgggtccatcgccgccggccgcatcaagatggagctcttcgccgacatcgcccccaagaccgcggagaacttccggcagttctgcactggggagcatagaaaaaatgctttgccacaaggttataagggctgccaattccatagagtgatcaaagatttcatgattcagggtggtgacttcttgaagaatgatggtactggatgcacatcaatctacggtaccaaatttgatgatgaaaattttatagcaaagcatacagggcctggactgctctcgatggcaaacagtggaattaactctaatggatctcagttctttataacatgtgcaaagtgtgactggcttgacaacaaacatgtggtatttgggagagtgcttggagacggtttgctcgtcgtgaggaagattgaaaatgttgcaactggagcgaataacaaaccaaagcttgcctgcgttataagtgagtgtggtgaaatgtagtttgatccctttgtgtggctaatcgtggattcttgacgctgctgatgtagaccctgtttggttgatggaagtacttaaacagtggaaacattgatggaaatgtattgtgtctaggcaacctgcagaataatagaccaaaaaaactaatattcttgtttggcttgggagttcggccttctgttgtgcggaacatgtttgatcctgttgtttctgattaga

SEQ ID NO: 125569 - DNA, 783 bp, Zea Mays
cccttgtcctctcttataatatattatggagcacagttctcctgctcttttcgaaaaaaatcatatttcttgttctatctatcgttcttccctcatggtctacatttttcacattattgctctacatcatttgcaacggttcagggtagattacctctgtctgtcccggggctcattttcaccaatgatgtgctgtattgaagttcaccaactgccctttttaattttaaattattcgtttaagcatttaacttgttaaatatcactgtgtttcttcttcaaagcatgtttgatgttccagcaacacgttagcttctgtcttattgatatcaacatttgatacctgtccccctttttttccaggcaaacagtggaattaactctaatggatctcagttctttataacatgtgcaaagtgtgactggcttgacaacaaacatgtggtatttgggagagtgcttggagacggtttgctcgtcgtgaggaagattgaaaatgttgcaactggagcgaataacaaaccaaagcttgcctgcgttataagtgagtgtggtgaaatgtagtttgatccctttgtgtggctaatcgtggattcttgacgctgctgatgtagaccctgtttggttgatggaagtacttaaacagtggaaacattgatggaaatgtattgtgtctaggcaacctgcagaataatagaccaaaaaaactaatattcttgtttggcttgggagttcggccttctgttgtgcggaacatgtttgatcctgttgtttctgattaga

SEQ ID NO: 125570 - DNA, 950 bp, Zea Mays
gccattccttcccgcgctgtagcttgcctaaaatgtcacgcacgacgccgtcgagcccgttgcagcgcgccacgtccccgctctccccggcggccggcggcactccgagccgcctggccgtcgcgccggcctccccgtctaccccgcagtgcgccatcccggcgtcgccccacacgccgggcagggcgcgggcgggcgagcccaccccgccgccggccacgccgcgcacgccgcgcccggagatcacgctccggcagccgtcgtcgcagaagcgcgcgcccgccgccgtccgcaagccgtcgcgggcgctccgcgcgatccgcgcgctgatccggtcgctgcccatcgtcgcgcccgcagcgtgccgcccggcgtccgcgctcccgcggcgctacaccaagccgcacgacgggcacggcggcgcacgcgtcaccggcacgttctacggccaccgccgcgcgcgcatcaccctcaccgtccaggagcgagccggcagcctcccgtcgctcgtgctcgagatcggcgtgcccacggggaagctaatgaaggagctctccgccggcggccacgtccgcatcgccctcgagtgcgaaaagaagtccaagaagtcgacgccgccggaaggcggcaacgtgagtctgctggaggaggcgatgtggacggcgtacgtgaacggtcggcgcgtcggctacgcggtgaggcgggaggcatcggagggcgacctcgccgtgatgcagctcctgagtacggtctcggtgggcgtcggcgtgctgcccggggacgtggtggacgcgccagccggcgcagaggccgacggcgaggtggcgtacatgcgcgcggggttcgacagggtagtcggaagcaaggactcggagtcgttctacatgattaacccggtggggggcgctggtggtggcacggagcttagcatttttcttgtcagggtgtag

SEQ ID NO: 125571 - DNA, 2806 bp, Zea Mays
cggaaagaacagaacgagagaggactcagggggtggcgccatctagcccgcgaaaggagggagaaggcaacgggaaagcgatagcccgtgccgtggcgcgtggtgggattggcggcaaagcaagcgggggcgatcggagagagagatgggagaaattacgcgtcgaccagcagcagccgccgcaaccagcagcccgcccaaccctacccgcgcgcccgtccccctccccgtcctcgcccgcgtcatcgacccggcacccccccttctcgtcttcccctccacctcgtcacgccgcacgggcccggcccaaataccctcgccctcgcgctcccacctctcgcactccacaaaccctaaccctagctcgctgccgcctctggtccctcgtcgtcggcccactgtctgagataaacctctcgccgccgcggttgctggtcgagctattcgtttgctttcgcgctgcttgatttctctcgttgcgtgtggtgtggtgtggtggtggttggtgggggacctcgaggggttttggatttgagggttttattcttcgcgctgcggatcgaagctgttcgtcggcgttcgttgcagctcccgtgccgcgctctcgcactcggcggcagcgaggtgctttattttgatattttgggggggttttctcagtcggtgctctcgctttcattgccggcggtttgttaggcgtatatttgtctcggttcattcgtgagggattttttattatctacgtacagttgttttgttagagggtctattgggcttatcttctctctggcggttgcaacttgattcagtgacatacattagtttttttttcatagagaatgtcatatatactaactgtaatgccgcattggaaacgtgcaggcagcggcggcggagttggctggcgcggaggtcacttggtcgagttaagcgcgtgttgtaatggaggggctcaacgccactgatgctgtgatcaagaagccaaggagtgttgcattcaggaagccaaggtccatgaagcagctcacggttgagtgcaatggcatttgcctgccatctcggagtgctcgtcatgacgatgacactggcgtcgaagctggtgggcagcggaggaaagagctacacctaaatagccctgaaatgaagggctccatgactcataggagtgacgtgcccagtaagataagaagggatgataaatctggaggtgactatgatggtcatggtcggagcagaaaaacgaaggatgccgccaagcatggaagtgaaagtgttcttgccctggagtgcacagcaagaaacattgaatcccttgacaatccacagttggtccccagagatgactctttgcctggtgaaaataggccgagaaaagtaaagttcaaatttaatcggacccaacgtaccaaaaatggccaggatgatggtggcagtggcattcctgccacgtcggcctgctttattaatcagtacaagcaaaaggattctggtggccacacaaccaaagatacccatggtaatcgtgctgaaggaaaacatggtaacaagcatggcaattctctgtctcctgaccttgtttgcaagagcaaaaggattcctaagaaaagaacacttgacgaagattctgatgatggagatggtgaaatacgctatctacaaaaactcaaaggggcaaaagttgcaccagatcctgtgaacactggtcataaagcttatgatttcgttgatgacgcactcaagaaaaaagagctaaccaagctttctaaaaataagagcatcccatatgaagtggacgaagacttcagaatgtctcggtctggcaggaatggtaggaagaagttaggggatgacaatgagtttatagaagatgaggaatctgagatggaggaaaagagtgggctaaagaaagctgattcacctcaagatgtgaagattgaaacccctggtcttacaacaagacagcgagcccttcaaagcaggggtgggaatggtgaaagctttattgaatttcccgatggattaccagcagcttcgtcaagaaagcaaaaggagaagctctcagatgtggagctacaagccaaaaaggcagaagctgcacagagacgtaagatgcaagttgagaaggcagagaaagaacaacaggctgaagcaatgaggaagatactgggtctagattctgagaagaaaaaggaagagaagaagctgaaagaacgggaaaacagggaaaaacaagcgaaattggaagaatgcaagaaaaactgcgtccggactgtcatgggcccaaccggaactgtgattacattccctgagagcatggggcttcctagcatatttaactccaagcctgtcagctatccacctccaagggagaagtgtgcaggcccgtcgtgcacaaacccgtacaagtaccgcgactccaagacgctgctccctctctgcagcctggcgtgctacaaggctgtccagggccgccctcctgaccagggaaccgacgctgcccaggggagtggaggtggccaggaaagcgctgggaagcaagcatgatgaatctagctacctgacgcgattgaaccgtgaccgtcagttggctggagaagtgtatgttaacatgtccagctcgctggtgtgtggtttcctttggcagtagtctaacaatcaacctgacaaaagatggggtgatcgcctgcccgtcgtgaaccaagccgggttttgttaatggcggttcgagtttaaacccatggtgtggtcggatcggtgtatgagactagtcgagaaatatgaagggggaaaaaaacttgtacagcaa

SEQ ID NO: 125572 - DNA, 2482 bp, Zea Mays
gcaacgggaaagcgatagcccgtgccgtggcgcgtggtgggattggcggcaaagcaagcgggggcgatcggagagagagatgggagaaattacgcgtcgaccagcagcagccgccgcaaccagcagcccgcccaaccctacccgcgcgcccgtccccctccccgtcctcgcccgcgtcatcgacccggcacccccccttctcgtcttcccctccacctcgtcacgccgcacgggcccggcccaaataccctcgccctcgcgctcccacctctcgcactccacaaaccctaaccctagctcgctgccgcctctggtccctcgtcgtcggcccactgtctgagataaacctctcgccgccgcggttgctggtcgagctattcgtttgctttcgcgctgcttgatttctctcgttgcgtgtggtgtggtgtggtggtggttggtgggggacctcgaggggttttggatttgagggttttattcttcgcgctgcggatcgaagctgttcgtcggcgttcgttgcagctcccgtgccgcgctctcgcactcggcggcagcgaggcagcggcggcggagttggctggcgcggaggtcacttggtcgagttaagcgcgtgttgtaatggaggggctcaacgccactgatgctgtgatcaagaagccaaggagtgttgcattcaggaagccaaggtccatgaagcagctcacggttgagtgcaatggcatttgcctgccatctcggagtgctcgtcatgacgatgacactggcgtcgaagctggtgggcagcggaggaaagagctacacctaaatagccctgaaatgaagggctccatgactcataggagtgacgtgcccagtaagataagaagggatgataaatctggaggtgactatgatggtcatggtcggagcagaaaaacgaaggatgccgccaagcatggaagtgaaagtgttcttgccctggagtgcacagcaagaaacattgaatcccttgacaatccacagttggtccccagagatgactctttgcctggtgaaaataggccgagaaaagtaaagttcaaatttaatcggacccaacgtaccaaaaatggccaggatgatggtggcagtggcattcctgccacgtcggcctgctttattaatcagtacaagcaaaaggattctggtggccacacaaccaaagatacccatggtaatcgtgctgaaggaaaacatggtaacaagcatggcaattctctgtctcctgaccttgtttgcaagagcaaaaggattcctaagaaaagaacacttgacgaagattctgatgatggagatggtgaaatacgctatctacaaaaactcaaaggggcaaaagttgcaccagatcctgtgaacactggtcataaagcttatgatttcgttgatgacgcactcaagaaaaaagagctaaccaagctttctaaaaataagagcatcccatatgaagtggacgaagacttcagaatgtctcggtctggcaggaatggtaggaagaagttaggggatgacaatgagtttatagaagatgaggaatctgagatggaggaaaagagtgggctaaagaaagctgattcacctcaagatgtgaagattgaaacccctggtcttacaacaagacagcgagcccttcaaagcaggggtgggaatggtgaaagctttattgaatttcccgatggattaccagcagcttcgtcaagaaagcaaaaggagaagctctcagatgtggagctacaagccaaaaaggcagaagctgcacagagacgtaagatgcaagttgagaaggcagagaaagaacaacaggctgaagcaatgaggaagatactgggtctagattctgagaagaaaaaggaagagaagaagctgaaagaacgggaaaacagggaaaaacaagcgaaattggaagaatgcaagaaaaactgcgtccggactgtcatgggcccaaccggaactgtgattacattccctgagagcatggggcttcctagcatatttaactccaagcctgtcagctatccacctccaagggagaagtgtgcaggcccgtcgtgcacaaacccgtacaagtaccgcgactccaagacgctgctccctctctgcagcctggcgtgctacaaggctgtccagggccgccctcctgaccagggaaccgacgctgcccaggggagtggaggtggccaggaaagcgctgggaagcaagcatgatgaatctagctacctgacgcgattgaaccgtgaccgtcagttggctggagaagtgtatgttaacatgtccagctcgctggtgtgtggtttcctttggcagtagtctaacaatcaacctgacaaaagatggggtgatcgcctgcccgtcgtgaaccaagccgggttttgttaatggcggttcgagtttaaacccatggtgtggtcggatcggtgtatgagactagtcgagaaatatgaagggggaaaaaaacttgtacagcaa

SEQ ID NO: 125573 - DNA, 83 bp, Zea Mays
gctggagcggatcgaagggagagacgacgagtcctgcgaggcagggatatgccaccgagacggcactgcagtctgcagcgggc

SEQ ID NO: 125574 - DNA, 3694 bp, Zea Mays
cgttgtgtgccgagtcgaggcagacatcggaggcgcgcgactgactggttggtttagctcgcgttttctttatccggtaccctgcgctactcaatttcgattcttttagctcggatttgagtagctgaaggccttcggcggcgatgacttgattgatgcgaattggggatttcttaccgtttcctctattgatgtcggtgctgaagagctcaaaccaatttgggttttgagggttttttttcccttctgctgctgatcaagctcacaaagatcgctagctccatctaccaatggacgagtccggggaagcgagcgtcggctccttcaggatcgggccgtcgacgctgctgggccgcggggtggcgctccgcgtgctcctcttcagctcgctgtggcgcctgcgggcgtgcgcgtacgccgccatctcgcgcgtgcgcggcgcggcgctgccggtggcggcgtcctggctgcacctcaggaacacccacggcgtcctcctcatggtcgtcctcttcgccctcttcttgcggaagctctccggcgcgcggtcgcgggcggcgctcgcgcgccggcgcaggcagtacgagaaagccatgctgcgtgccggtacgtacgaggtctgggcgcgcgccgccaaggtgctcgacaggatgtctgagcaggtgaggcggatttctacgacgaggagctcatcagggacaggcttgaggagatccggagacggagggaggacgggtcgctccgggacgtggtattctgcatgcgtggcgatcttgttaggaacttggggaacatgtgcaaccctgaacttcacaagggcaggctagaggttcctaagcttataaaggaatacattgaagaggtttctactcaactaagaatggtgtgcgaatctgacaccgacgagatactattggaagagaagcttgcctttgtccaggagacctgacatgcctttgggaggacagcgctgctcttgagtgggggtgcttcactagggtctttccatgtaggtgtaggtgtagtgaaaacattggtcgagcataagcttctgcctcggattatagcaggatcaagcgttggttctattatatgttcgattgttgctactcgaacatggcctgagattgagagcttcttcacagactcatcacagaccttgcagttctttgatgggatcggtggattttttgcagtgatgaggcgtgtcaccacttacggcgcactgcatgacattagccagatgcaaaggcttctgagggatctcacgagtaacttaacatttcaagaggcttatgacatgactggccgtgtccttgggatcaccgtttgctctcctaggaaaaatgagccaccccgctgcctcaactacccgacgtcaccgcacgttgttatttggagtgcagtaactgcctcttgtgcatttcctggactttttgaagctcaagaactgatggcaaaggatagattcggcaacatagttcccttccatgcaccctttgccacagatccggaacaaggtcctggagcatcgaagcgccggtggagagatgggagcttggaaatggatttgcccatgatcagactcaaggagttgtttaatgtaaaccatttcattgtgagccaaactaatcctcacatttctccactactccgaatgaaagaacttgttagagtctgcggagggcgctttgctggaaagcttgctcgtcttgctgagatggaggttaagtatcgatgtaaccaaatcctagagattggtcttccaatgggagggcttgcaaaattgtttgctcaggactgggagagggtgatgtcaccatggttatgccagcaacagtagctcagtatttgaagatcattcagaatccaacatacgctgaactccaaatggctgccaaccaaggccgcaggtgcacatgggagaagctctctgcaatcagagcaaactgtgccattgaacttgtattggatgaatccatagcagttttaaaccacaaacggaggctaaaaagaagcatggaaatgacagcggctgcttcgcaggtccattctaactatgttcggctcaaaactccaaggaggataccatcatggagctgcatcagtcgagagaattcttcagaatctctctcggaagagattgttagcacaccaacacttgctcaccatgctcagcgcaattcttatgatggaagtaagagtgaatcagaaaccatcgaccttaattcctggaccaggagtggtgggcctctaatgaggacatcatctgctgacaagttcatcagtttcattcataaccttgagatcgacacggaattaactagggcatgcactgtggagggtaatgctgcaggtatttggtcagagcctaccttcccaagcgatccaccgccgaacaatagctcaagtgttactatgccaggtagatgcacagaaaattctgagactgaggcatgcaacactgccaacaccagagccagtcaggcttctactcccacgagcatggctgtttgcgaaggggatttgctgcagcctgagagcactagtaacggtatcctacttaacattgtgaaaagaaaagggatgccctacgggctagtgtaactgaattggccgaaagctcctgctcacttgataatgatgcttttgtagcttcgcatcaacctcgagctggtgattagattcttcttgattttggaaggtcattatatagccacagcagcaacgctgtaggacgaaattgtacttgatctatttgaagagcaactatatgcgtgaattcagcaatgatacttggaatgttcaatcatctgttggctacatgaacatgctgcggtttattagtcttgcacacacttgtcacaacagcagaagaaatagcggtaatactccctcccaatcccagagctggcataaatgcctcaactaatcctcaaacgccctgaggttattgtttacggctgtgaagcctccgtccaccatgaggttgaccgcgctgacgtacctcgcctcgtcgctggccaggtagagcaccgcctgggcgacgtcctcgggcatggcgtcgacgcccttgaggttggcctcgccgccgacaaaggccaggaagtccttgagcgcgtcatctgcgcgcgcgccctggggcaggtgcggcatcgacagcgccgtgggcacggcatagggggacacgcagttgacgcgcaccccgtggcggccgagctccgcggcgacgctcttggtgagcccgaccacggcgtgcttggacgccgtgtagacgtgcgggcccgtcccgccgatggcgctggccacgctggccagcgacacgatggagccccgcttccgcgggatcatagcgcgcgccgcgtgcttcatccccaggaacacgccgtgcacgttgacgtcgagcaccctgcgcgcctccgcgaagtccacgttgcggatgtccgtcaccttggtgcccgtcacgccggcgttgttcaccatcacgtccagcgcgccgaaccgctccgccgcagcgtccacggcgcggctcacgtcctcctccgacgtcacgtcgcagtggacgaacatggcgccctgcgcgtcacctcccagggcgtcgcgcagctgctgcccagcctcatcctggatgtccgcgatgcagaccttggcgccgtgctccatgaagaggcgaacgatggcctcaccgatgccg

SEQ ID NO: 125575 - DNA, 2619 bp, Zea Mays
ttattttccgactatgttttgattgttttcttttcgtccactccaagacgaagcaaccggaccagccaacccttccgaccccacccgctgacatccgacgccgacgccggcgcagacagccgcaccagcgccacccaaatcccgcaaaaccctagagacagaagacgcgaggggagagagagaggcgcccggcatggcgagcgcgacgtccccagcgatggccgcgaatctggcgggcaagtcgggcgtgcgggtcgtcgtgatcggcgaccccggcaccggcaagtccagcctcatcgtcgccctcgccaccgagcagtttcccgagaacgtgcctcgcgtcatgccccccacccgcctccccgccgattatttccccgaccgcgtccccatcaccatcatcgacacgtcgtccagcccggagcagaagccgaagttgatcgccgagtgtcaggccgccgatgcggtcgtgctcacctacgcctgcgaccggcccgccacgctggagcggctcagttcgttctggcttcccgagctccggcgactccagctgaaggccccagttatcgtggtggggtgcaagctggacctgagggacgaacaacaagttagccttgagcaggttatggcgcccatcatgcagtccttccgcgagattgagacctgcattgagtgctccgctcttcgccagatacaggtgcctgaggttttctactatgcccagaaggcagtacttcaccctactgcccccctttttgatcaagaattacaatctctgaagcctcgatgtgtgagagcgttgaagcggatattcattatatgtgataatgacaaggatggtgctctcagtgacgtggagctcaatgaattccaggtccggtgttttagtgctcctctccagcctactgaaatttcaggagttaagagagttgttcaggagaagatgcctgaaggcgtaaatgaaactggccttactttgactgggttcctttttctgcatgccctatttattgaaaaaggtcgtttggaaactacatggactgtattgaggaaatttggttacgacaatgacatcaagcttagggatgatctcattgcagtgccaattaaaagagctcctgatcaaactctggaattgacaagtgaagtggtcgatttcttgagagggatattcaacatgtttgacattgataacgatggagctttactacctgctgagctggaggacctattctcaacagcacctgaaaacccatggtcttgcgatccatataaagactgtgctgaaaagaatgtgttgggtggtctgtcacttgaagggtttctctcaaagtgggctcttatgacactgctagacccgacaaatagttatgccaaccttgtatacgttggctatcctggcgagttcagttctgcatttactgtcacaaggaaaagacgtgtggatcgtaaaaagcaacagacacagagaaacattttccagtgttttgttttcggtgccagaggctctggaaagacatcgttgctacaatcattcatcggaaggcaaccttctgatgccctgccatctaacagcgaacgctttgcaacaaattctgtcgaaatggctgatggaactagaaagacactaatattgcgagagattcctgaaggtgatgtgagatcgatactttctgacagagaatcattggcgccgtgtgatgtagcagtatttgtttacgatagctgtgatgaatattcatggcaaagagctagagacttgcttgtgcaagtggctacacatggagaaaatactggctacgaagttccgtgcttgatagttgctgcgaaagatgatcttgaccaatcttcacaagctctacaagaatcaactagagtgagccaagacatgggaattgaaacaccaattccgatcagtgtgaagctgagagatttgaacaacattttctgcagaatagtacatgctgcgcaactgccccatttgagcattccagagactgaagctggaaaaacacgccggcaatatcggcaacttctaaaccgttcgctaatggttgtctctgttggagctgctgttgcagttgttggactagctgcttaccgggtttatgcagctcggaaaaactcttcctcttgaagcctcctggacaagtgggaaaataagttgctttcttcctggagattactttgcaacatcagctggatccatgctggctgattttcgcagctggggtttttacccggaaggaaaccaacgtttttgtacagacatgtcatcagccataatttatccggtcaattggtgtttcagattctatataaatggcagacaccactcggctccattaaatgccgtatctgataatctgttgcctaaattagctcagctaaatattgtcgttactaccctatgtttttgctctcttggagtcttggcccttgcagtagtttggtattggaatttcttttcgttagcaaacatgctgagacatttagttgaacgaacctgagttgttccgagatttctgtcgggattattcaattggaattttgaagcttggtattctattggatctgagaaaagtgcatgctagctcgctatctttgcgtgttattgtc

SEQ ID NO: 125576 - DNA, 241 bp, Zea Mays
acttcctcgtcggccatacactacacctccggcgggccgtggttccagcgctacagggactgcgagttcgccgacctgatctggctgaaggaggccgaggagctcagggtcgagaaggacaagcgcaggctcctcgaggacaagaaaggacgacgccaacatcaagcaagacgaggaggaagcgccggcgcaggagaaggttatgcatgattcactgatgctgcattggatggattgtttt

SEQ ID NO: 125577 - DNA, 903 bp, Zea Mays
agaatgaaaagggggaaaaaaacagggcaccctcacggcgaactccccacctcctatcgcccccctctctctagcgccgcacaaatctctcctcccccgctcgccctcgctgcattgggcgccgccaagcccccgccggatagagaggacgagaagcggcgtggctgcgggaggagcgggcggcatgtgcgacctggtggcccgcacgggccggcaccagcagcggtacgaggatggccgtcggctagtggccggatgcataccatttaggtatagagctaacaatgatgaaacctctggtgacaaaactaagaaagtcgtggaagttctcatgataaattcccagagcggacctggtcttttgtttccaaagggaggatgggaaaatgatgaaactgttgaagaggcagcagctcgagaagctatagaagaagccggagttcgaggtgatatagtgcattttctggggtcgtatgacttcaaaagcaagacacatcaagatgcgtgctgccctgagggtatgtgcagggctgcagtgtttgcgctgcatgtaaaggaagaggccttgctcacaggcttctctgactggcacgacaagtggagcataggtgacggcggtggcggcggtgccaactgtgtgacccggcctaactgctgatgaacccatctgcagtcgtccaatttgtccatcctcccccatttcccctaggctccgacattgcgtaacgcaataaatacagtgtacttctctcgatgctgggttggtcattgacccttggatggttatcttagttattagtgggacgaggtatatagtatttatatctgatgaagacgagaattctcacaacttttaagtgtcgattctcgtgcctgtttatttctcggtttcaggtcagctgc

SEQ ID NO: 125578 - DNA, 1537 bp, Zea Mays
agaatgaaaagggggaaaaaaacagggcaccctcacggcgaactccccacctcctatcgcccccctctctctagcgccgcacaaatctctcctcccccgctcgccctcgctgcattgggcgccgccaagcccccgccggatagagaggacgagaagcggcgtggctgcgggaggagcgggcggcatgtgcgacctggtggcccgcacgggccggcaccagcagcggtacgaggatggccgtcggctagtggccggatgcataccatttaggtatagagctaacaatgatgaaacctctggtgacaaaactaagaaagtcgtggaagttctcatgataaattcccagagcggacctggtcttttgtttccaaaggtactgtactgtaaacatctccatctgaaatacacatgcaacaattagaaagtggacatagccttttgtttccaaaggtattactgttaacatcttcctctgaaatccattgctagttgtttacatggatgacaacttttattgcatacttattctgtttctgtgttttcacataactacatcggaaccattatataccctatagcagtgcatattattatttcaattagttcccaagtgccagtgtgtcttaagtcagcaatccaggaaatccagatgaagtaactggaatgtctgagttgccgatctggattccttgggctgtttatgggcttgtttgcaagcttagttattttcataaacctgttgtaaatgtcactgggatgccatgtagagatttttttatgtttgttttcttgttgcagggaggatgggaaaatgatgaaactgttgaagaggcagcagctcgagaagctatagaagaagccggagttcgaggtgatatagtgcattttctggggtcgtatgacttcaaaagcaagacacatcaagatgcgtgctgccctgagggtatgtgcagggctgcagtgtttgcgctgcatgtaaaggaagagctgaactcatggcctgagcagagcacccggcagaggacctggctcacggttcctgaagctgcatccaggtgccggtaccagtggatggaagaggccttgctcacaggcttctctgactggcacgacaagtggagcataggtgacggcggtggcggcggtgccaactgtgtgacccggcctaactgctgatgaacccatctgcagtcgtccaatttgtccatcctcccccatttcccctaggctccgacattgcgtaacgcaataaatacagtgtacttctctcgatgctgggttggtcattgacccttggatggttatcttagttattagtgggacgaggtatatagtatttatatctgatgaagacgagaattctcacaacttttaagtgtcgattctcgtgcctgtttatttctcggtttcaggtcagctgcagcctgcaggcaggcacgcaccctgcgcactttgtaactctgctcctgattctggagatgcacatcctgtgtatgaactgaactggtataacttgaaaataactgttaagtcaacc

SEQ ID NO: 125579 - DNA, 1118 bp, Zea Mays
agaatgaaaagggggaaaaaaacagggcaccctcacggcgaactccccacctcctatcgcccccctctctctagcgccgcacaaatctctcctcccccgctcgccctcgctgcattgggcgccgccaagcccccgccggatagagaggacgagaagcggcgtggctgcgggaggagcgggcggcatgtgcgacctggtggcccgcacgggccggcaccagcagcggtacgaggatggccgtcggctagtggccggatgcataccatttaggtatagagctaacaatgatgaaacctctggtgacaaaactaagaaagtcgtggaagttctcatgataaattcccagagcggacctggtcttttgtttccaaagggaggatgggaaaatgatgaaactgttgaagaggcagcagctcgagaagctatagaagaagccggagttcgaggtgatatagtgcattttctggggtcgtatgacttcaaaagcaagacacatcaagatgcgtgctgccctgagggtatgtgcagggctgcagtgtttgcgctgcatgtaaaggaagagctgaactcatggcctgagcagagcacccggcagaggacctggctcacggttcctgaagctgcatccaggtgccggtaccagtggatggaagaggccttgctcacaggcttctctgactggcacgacaagtggagcataggtgacggcggtggcggcggtgccaactgtgtgacccggcctaactgctgatgaacccatctgcagtcgtccaatttgtccatcctcccccatttcccctaggctccgacattgcgtaacgcaataaatacagtgtacttctctcgatgctgggttggtcattgacccttggatggttatcttagttattagtgggacgaggtatatagtatttatatctgatgaagacgagaattctcacaacttttaagtgtcgattctcgtgcctgtttatttctcggtttcaggtcagctgcagcctgcaggcaggcacgcaccctgcgcactttgtaactctgctcctgattctggagatgcacatcctgtgtatgaactgaactggtataacttgaaaataactgttaagtcaaccatgcat

SEQ ID NO: 125580 - DNA, 1185 bp, Zea Mays
gatgcacattgtgtagtgttctcggtggttcatgacgctgatgttgaactagttacttcgactggatttattgtttgttgcttggtcaggcatgtccttcatctgccacaagtgggaactcttttggccaatcttaaggttgtaactgacattctagtctgaatgttggatagcacaatcgagattgccatttgttcctgcttgttgctcctataacacttttgtggctgtagcatgcaggatgtttacatagtgtaagacccatgaggtcaatgattatctttttctagaagggtctggtatctcgatgaacacatgtggtgccaatgaaggcagcatttactcttttttcccctcctcttgtacttagtgctgcatcatgatgaaacagtgtccagtgcttgaccttgatgacaatagatgcttatatgctgctagcttttatctgtcattcaatttcgcgaaagtgcctgttgcaacacattgttcttgcttgtataatgctgtttgctttcggatttcagcattttctggggtcgtatgacttcaaaagcaagacacatcaagatgcgtgctgccctgagggtatgtgcagggctgcagtgtttgcgctgcatgtaaaggaagagctgaactcatggcctgagcagagcacccggcagaggacctggctcacggttcctgaagctgcatccaggtgccggtaccagtggatggaagaggccttgctcacaggcttctctgactggcacgacaagtggagcataggtgacggcggtggcggcggtgccaactgtgtgacccggcctaactgctgatgaacccatctgcagtcgtccaatttgtccatcctcccccatttcccctaggctccgacattgcgtaacgcaataaatacagtgtacttctctcgatgctgggttggtcattgacccttggatggttatcttagttattagtgggacgaggtatatagtatttatatctgatgaagacgagaattctcacaacttttaagtgtcgattctcgtgcctgtttatttctcggtttcaggtcagctgcagcctgcaggcaggcacgcaccctgcgcactttgtaactctgctcctgattctggagatgcacatcctgtgtatgaactgaactggtataacttgaaaataactgttaagtcaaccatgcat

SEQ ID NO: 125581 - DNA, 519 bp, Zea Mays
atggagtggccaccgccgtcgacgtcaccatcgccgtcgctggtggtgcgcagccccaggcagacagtcagcctgatccgcaaccggcgaccccatcgtgactgggccccctcatcgaggtctccctctttcgccgcccgtgaccatggccccaagccgtcggaggtgtacggattcgttggatccatcaccaccgtcattgccaccgccgtgtacctcgcctgggcatacacgcccgagcccgtcctccggtcactcggcatcacctactaccctagtaagtactgggcactggcggtgccatcgttcgtggttgtgaccgtggtgccgtccatgggcatctacatgggcctcaacttcgctgccactcctcctccgacttccttcagcactatcttcgatgaaaagagtagggagcacacagccttttctcctgcaactgaggatgagaggcccatcgaacccatctcagacatcggtattgatcggatcaacagtcttatgtatggtgatagatga

SEQ ID NO: 125582 - DNA, 1890 bp, Zea Mays
atggcgacgccctgccgcagcaggggcttcgagcgtgtggagctgcggtgtcccagggagctggacccacggccgagctggacgctcggcgatgtgctcgctgagcttgacgcgctggatgccacccgccgcgctgcgccacccacgcccctgaagcagccgccggattgggctaacggtggtggtgagaaggcctttgtgatgcgggttgatgacgacgacgaagacgacacagaagatgaagacgatggtacaagtggtgggaagtcccgggctctggtggccaaaggagcaaggttctcgtgtaatgatcttgcatcaagtgattcagaggatgaattagatggtcaggttgccccataccacttaatggagaaaagggacctagcgaagagcattcttcttgagctggaacacgagcatcatctaaaagttcaagaagaagttagaagtaagctagcttcattggaggtatgccaccaaaatgaaattcggagaacgatctctgcatttgcccgacttcagaaatatgcagaatcaagaaaggagatagacagaagacttgatgtacacttccagagaagaattgagcagcatttaaggcatcaagcatttcttatactattccaatatttgtatccaaatgcagaagtactcgataaacacttatctatggtccaaagggatcatgaacaaaaatcccagattgttgaacgccgaataagagatgatgcagctcttgaagaagctaaaagaaaagagcaagctgtcaaggaagaaaagttaaggcaggaaagagcccagcaagaagcagaggctagacagaaggaagctgcaaaattagcagctgaagcacgaaaaacagcatttgaggctgctaaaaaggaagcagcagaaaaggaagcagcagaaaaggaggctgctaaattgagagatgcagcagcttctcaacctagtccgaattcccagaataatactgcagaaggcattaaagtttttggcgataaatacgcactagaagcagagtcacggaggcatgcattagtacagaatcaagtgccagaaaacattcatcacagcaaggaattcagcaaatatgaccgacaaattgccaaatccataagtaaacttatgccaactactgacagtgtcagaacaagggctagtgagcttgttaaagctttaaatggacaggattgtccccgtccaatctcttgttgtctatttgctaacaagattatttccattgtcaagagtagaaatacaaaggacaagacctttggaaatttggcctttgcgtgtggatatgtcatgctattagttacaaatcaggtaccagacgcaatggattatcttttagctgagttcaacagagtttgcatatacacggttccaaagcatatgcatgctttgaatgcacaagcacgaaatagagattattacagactgataggttaccaggaagaaaatggacagctcgagagcactgaaagttatctaacatacgtcgttgcatatgttaaactctacgcagcaatgattcagacggaaatcaaaggtgttcgtcatcctcatggtttagctgagggatggaagtggcttgccatgttcctcaattctctcccagctactacagccactgcatgtgcccttcacgctttcctcaagatggctggttttgcacttcacaagaaatatgggtcacagttcatgaaaatcctggatgtaatatcacggtgctttttaccagctttgaaggaacaaggcaacaagatgcaggctgaggctgtcaacaatctacagaattacctgaacgacaagatctacctggaggaaccagaagggcagtacctcgtccagcaactactatccaaggagttgttcatgtaa

SEQ ID NO: 125583 - DNA, 906 bp, Zea Mays
atggcggccgcctcatcccccgctgcatccgccgcctcccccggtaggggtgccggcgaccctcccgcggcagccgcggcggcgacggcgaggacggctgggtgcccctgccccatatgcctcgaagccttcaaagacgaggcctacctcgacacttgcttccgttcctttctgaaactcctagctgcttctgcagattccttttgctacaggtgtatatgccagtgggtaaggatagtagcgagcaagcacgcagaacctttgtcttcagttagatgtccactttgtaagactgagaatctatccgtcatacatgcttttgatggcgaatcatttgagcggtggtacataaatcaggaacctaggaagaggcgtctttcagatgcacacgagttggtgtcacaattctataacatgaaagagaccacaagcaacatttctggggtgcagcaatactgggagcaacaaagatatctccgtaagaaaatttggcttcaaacctggctaagacgggaaattcaggcccttactcgggacgagaacgttgaggtcatagtccaccacattcacggtgtcatgggatccttcatgaagaggctcgaaaaggagcacacgtcgtcaaggtggacgacttcaccggagaaaaggagggaagagttcaggagattggtttccgatgctgctaggccgttcctcctcggccgaacggagcgattcgtcgccgaggtggagctcttcctggcatcggatctcaacatggaagcctacaacaaactgcgcgtccagaggtttagggagtccagctctcatctaacgagagagcaagatgcactgcctcgtgatcggtcgcttgaggagcactacatgtatttcctgtgtaacgacacggactgtgatgagatgtag

SEQ ID NO: 125584 - DNA, 651 bp, Zea Mays
atggaggaggaggcgccgcccatggagttggtccgggagaagaagctctctgagaagatccgcctttgtaagatggaggttctgaagaaatcacatacctctgttgaagacagtgatcacatatttctagagtcctctggcttgcaggatggtttgagttgcaagaaggatctccatagttgcggcaccaaagcttcagatgaggaaatttctgatcggttgcaagagaatcatgacaacacccagccaagtgataaccataactattcggtagatcaaactcaactgccctttcttcaagccctactgagagtacagatgaaacggagtcatcgtttcttggacaaactgccagtggttcactggcatcttctcacagataagtctatagatcctacgtatttggtagtgatgacagcaacagcagcagtaggagctgcaactctactgcagagagtaattcagatacggaccaagccaactcctcccaacccacgaaggccaagttcagttcaggcgtttcactcttcgacatcctgcgcaggacatcagagcagagcaatcaggaaagctgtagcacagtcagcggtgcatcggttctcggcattcaaattattaaagaggttttctagggtgagctcgaaaaattga

SEQ ID NO: 125585 - DNA, 1407 bp, Zea Mays
atgctggcgagctacggaggtggtggccgcggtgtccatctctcctcccacaaggacatcctcctcggccgcggcggccggagcttcctcttgggcaacacgtggtttctcctctccacctacccggcgcgcctcctgcacaccacggaccgccgcgcgcccgccgctttcttggccgtgatcaaccggcccccctgcatgcggccgcaccgcgctgggcagggcctgctgcagaggggtggtattgtcatggctgcttgcggctatgctcttgggcgagctgagctgggtgctgccaagcgccagcagccggataaggatccatctgcagggacgcgctcctcgaatgttgcagccacgggatcactgggcagtgcagcacggccagacgtctcttttaggtacagaggggcggattcttgtaagaaggtagctgcaagcttgaagtcgtctgagccatgggggaacagggcattctggacaaacgccgctgggccaggttggaagttgagctttgctgttgagccatggaccaagggctttagcacgtcgtgtgcggcgccatattctgctggagccacagagcatcaattatcgctcgatgagaaggtggataactccaccgttgcatctgattctgatgggaagtcaccagtttctgaaaaattgaagtttctctctggttcatgttacttgcctcaccctgataaggaggctactggtggtgaggatgcacatttcattagcattgatgagcatgtgattggtgtagcagatggtgttggtggttgggcagatgttggtatcgatgctggactatatgccaaggagctaatgagaaattcaatgagtgcaatcaaagatgagccagaagggaccatcgatccaaccagagttttggaaaaggcttatatgagcaccaaagcaaggggatcatccactgcatgtatcatcactcttaaagatcagggtatccatgctgtaaatcttggggacagtggtttcgtagtagtccgagacggtcgaactgttctcaggtcaccctcacagcagcatgatttcaacctcacttatcagcttgagagtggaggtggcagtgatcttcctagttctgcacaagtatttcacttcccggttgcccccggtgatgttattgttgctggcacggacggactttttgacaatctatacaacaatgagataagtggtgttatcgttgaagcgctcagggttggacttgaacctcaagttgcggcacaaaaaattgctgccctggctcgacaaagagccacagacaaaaataggcagtcaccatttgcatcggccgcccaagaagctgggtaccggtactacggtgggaagctcgacgacataacggttgtggtgtcgtatgtgaaaagcgcttga

SEQ ID NO: 125586 - DNA, 1569 bp, Zea Mays
atggtggtggtagtgtccacctccctatgctccttcctgcccgcgcacccgttcagcctcgcgcgccctcgccgtccccacccaacgaacccgaccgccaaacccctctcccgtaccctctccatccgctgcatcgccacaaccgcggcgggacccccgccgctcccaccgccgaagctggtccgctgcccagctctcgaccgccaggcggcgcgcgcaagccgactccgctttgcgcgcaagctcctcaccctcctcctctccaagccgcgccatttcctcccgctccgcgtgctcaaccgctgccgccgcttcctcggcctcccgcgccgcggccgcccgctcatccccatggtcctccgctacccgaccctcttccgcctcttccaggcccacacctccctcccgctctccccgtccctctccaccctcgcggtcgcgctcactcccgccgccgaggcgctcgccgccgatcttgcggcgctccgcgccaccggcacaggcgcaggcgcgctcgccgccaagatccaccgccttctcctcatgaccccgcgccgaaacattccggtgtccccgttcgagccactggatgagggcgctagtctggagatgttggagcggcgggcgtgtgctgtggtgcgggaggtgctggccatgacggtggagaagcggacgctggtggatcacctcacgcacttcaggaaagaccttggcttgccaaaccggctgcgcgccatgctggtgcgacatccagagctgttttatgtcagtgtgaagggggtgcgtcactcagtgttccttgtggaggcgtttgatgatgatgggaggctcctagtggaggatgagatgctggttgggagggataggctggaggagcttgttcgggagggaaagcggatgaggcgtgctcggaagaaaggtgttctcacgttcgatggtgacagtgatgaggatgaagatgatgatgcagcagaagaggaaggttcattaaaggtggatgatgaatttggggacttgtttgaggatggtgtcattggggaggactgggaggaggtaggcgatggaggtggaagtgatgcatatgaagagtacgatgctgaatcaggtgacatggaggagttttgggtcaagaaggctgtggctcaaggactggttggcaatggtaatgagcaggatgtttggaggtactgctctaaggtgaaagagcaatgctcagcagatatgatacatgctgaggatgcattcaaaagctcttggatttatcatgctgaggtgatgatggctgagttttgtactgtctgcattgaaaagaatttaattgataaaatgattgatctgccctgggattccgaggaagacaaacatcttcacaagttcctcttcaactctgctcgagaagtgcgcatgaaaccaaatgatagtctgcttgttgtctactaccttgggatacaggtctctggatatgctgagaaacctttcatcttaaatggaactggtgtagcccaaaatggccctgctaaaaggtctgtctctggatatgctggctaccagccaaggataacatcttga

SEQ ID NO: 125587 - DNA, 1966 bp, Zea Mays
cattcttcttcacacacgcaacagccagcgtgcacaacccctctcgaacgatccgttccccctctcgtcgcgcctccagctccaagaatccaggctccagcagcgagtagcagcccgtgagctgaggctgatccatgctccacatccaatcacacacacacacacacacacatcaagcccggcaagcaaagcaattcattcgggctggcatttttcatcaagtctcctgtcgtcgtcgacgaccttgctactagctcatatataaccaggccgatactaagctgctaagcgtatagagttaacctgtcgccgatcctgcatgcattcgtccttattattactattagctatgccgacaacaatggtggtggcggcggcggcggcccgtacagataagccgcggcttatgtggttgccgcctctcgtcgtcgcgctgctcttgctgtccggcgccctactagaggctgccgccgccgctgcgggcacgagcaccacctcggccgatgacgccgcgagctcgaccagctccttggccgccgaacgagccgccacgggccgccgcagcaggttgctggtggcgtcgcagagcacgttcttcagcctggacagctacggcgcccgcggcgacgggaggcacgacgacacccaggcgctggccagggcgtgggaggcggcctgcttctcgccgcggccggccgtcctgctcgtccccggcggcaagcgctacctgctgaagctcgtcgcgctctccggcccgtgcaagtccagcgtcacggtgacggtggagggcaccctggtggcgtcgcgggaccggtccgactggattggcggcggcggcggcactgaccggcggcgccactggatcgtgttccgtcaggtcgacggtctcaccgtcggcggcgggggcgccgtcgacggcagcggcgagacgtggtggaagcactcgtgcaagatcaataaggatctcccatgcgaggaggcgccgacggcgctgtcgttccactactgcacgagcttgagggtgcatgacctgaagatcgtcgacagccagcagatccacgtgtccatcgaggattgcaccggcgtgcagttgacaggcctgtcgatcacggcgcccggcaccagtcccaacaccgacggcatccacatcacacgcagcagggatgtgcaggtcaccaactgcaagatcaagactggtgacgattgcttgtccatcgaggcagggacgcacgacctccacgtgtcgcaaatcgtgtgcgggccaggtcacgggatcagcatcgggagcctaggagacgacaactcgagagccgaagtctccggcatcaccatagacacggtgcagctgtacggcacgaccaacggagcgcgcatcaagacgtaccagggcggaagcgggtacgccagggacatcacgttccagaacatggccatgcacggcgtcgagaacccgatcgtcatcgaccaggactactgcgacaagcgccaggctacgtcaccgccgtgcgaggcgcaggggtcgtcgtcgtcgtcagcggtcgaggtcagcgacgtcgcgttcaggaacatccggggcaccaccgtcagcaaggacgccatcaagctgagctgcagctggaacgtcccctgccatggcattaccctgcagaacattagcttggagatgctgggcggcaagggtacggcggagagcacctgccggaacgcgaggtggagaacgtccgggacggttcttccgcagccgtgcacctcattcatagacctggggcacggttccaactgagcagatttgttcggagaagcagcatgcgcgacatagtgtgtgtgtatattacacagtatagggtatctcaatgaatcgatttctggttacaggagataaattagggtgtgtttggttgtaatgacagaacaagataggatatgatgatcgattaaataaggttctttgggttaagtacgtcag

SEQ ID NO: 125588 - DNA, 1489 bp, Zea Mays
ctctttccattagccatcctagccttcgccccctcgacgagaagaaccacctcaaaaccgaacagccgcaaaagaaagctgctagctactctatacatgataactagaacaggaccgtgaagtaatatatatataatgacgaagtcaggggcgctacaacttgctcggagcaccggagggtcgcttagcaaggaccaagtcaaatccgccgttgatcagtatgtgaagtaccacgacctccacggaggcgaacaagaatcaagaaagtcaaattacgctgatttggcaaacaagtactatgatcttgtcactggcttctacgaatatggatggggcgactcattccattttgctggcggtcccatactcccatgcttgtatttcagatatccgggtgaaacttcccgtgaagccattaagcggcaccagcattttatggcactacaattggggctcaagaagggtatgaaggttctggacgtgggatgtggaattgggggacctttaatagaaattgccagattcagctcaacttcaataactggattgaccaacaatgactaccatgtctcaaggggcaaggagcacatcttttcagcaggtttgagtgagcaatgctgctccttgaagggggacttcatgaatatgccaatagctgataacacctttgatgcggcctatgcaatacaggctacatgttacgcaccagaggcacaaggtgtctatagtgaggtctaccgtgtgctgaaacctgggcagtattttgcactggatgaatggtgcctgactgaccgatttgatcccaacaacgctaagcatttgaccgccaaggctgagattgagcttggcgatggcctgcctgacatccgtaccactcgccagtgtgtccaagctatgaaagatgcaggattcgaggtcatttttgcaaaggatcttgctcaagattttccttgcccatggtaccagacgatggatcctaactacttttcatgggctaacttccaatgcacacgcccaggacggataatcacccgtgcaattgtcaatacactagagttcctccgtattgccccagcaggcagcgtgggagcctacaacgtcctaacgagtgcctctgatggccttctaaaaggtggtcgggaaggtatcttcacagcgtccttcttcgtcctgggccgcaagcctctcaaggaaagtgaaatagtgaacggcggcaacctttgagctgcaacatgagtatggggtcgtacttataagagctatgaatcatggccaacgtgttacgtgctgaagtgtgtttaccggtttgtcttatggctcttgcgcgtgtggtgggtcatgttcacgcagtagcatactagcatgtatctgcttgttgtgtgttgtactatgaactatctgaataaaaatgctgtttacgcgttgtattaatcgcaccatttcttggcaacacggctttgatcggaccaatgtattgtctggatctatc

SEQ ID NO: 125589 - DNA, 381 bp, Zea Mays
atggcagcgacgacggcccggtggcctgcactgacccccgcgccattggcgtcgggcgcgggcgcggtggtggtcgtcgcgtcgggcgtgctgtccgtggacgacgcaggcggcgacgccgaggcgccggcgccgctcggatcggtgctggtgctgccgctggggctgggcgacgccgccgaggctgagcgcgcggcgggcgcaggggaaggggcgtcagaggagcgcgtcttgaggacgcggatgctgagcttctgtcccgcggcgcagtggccgggcacgccgcagatgaagaagcggtggccggggctcttgatgacgatcttgtcgtcgccggaggtgtgcgtggcgatcggcgtggagttggtgcagctgtggtag

SEQ ID NO: 125590 - DNA, 1500 bp, Zea Mays
agcgttgttaaaaccagtgccattagccatcctagccttcaccctcgcggagaagaagaaagaaaccacctcacctcaagaacagctagctgcaaggataaaaaaaaacaaagctgctgatctatatataataattaggctttgcagtgtcttgttttggagagcaaaggatcatcgtcaagtgatggccaagtcaggggcgctagaacttgctcggagcaccggagggtcgcttagcaaggaccaagtcaaatccgccgttgatcagtatgtcaaataccacgacctccatggaggcaaacaagaatcaaggaagtcaaattacaccgatttggcaaacaagtactatgatcttgtcactggcttttacgaatatggatggggcgactcattccatcttgctggcggatatccgggtgagacttcccgtgaagccattaagcggcaccagcattttttggcactacaattggggctcaagaagggtatgaaggttttggatgtgggatgtggaattgggggacctttaatagaaatcgccagattcagctcaacatcgataactggactgaacaacaatgactaccacatctcaaggggcaaggagctcattttttcagcaggtttgagtgagcaatgctgcttcttgaagggggacttcatggacatgccaatatctgataacacctttgatgcggcctatgcaatacaggctacatgtcatgcaccagatgcacaaggcgtctatagtgaggtctaccgtgtgctgaaacctgggcagtattttgcactggatgaatggtgcttgaccgaccgatttgatcccaacaacgccaagcatttggccatcaaggctgagattgagctcggtgatggcctacctgacatccgtaccactcgccaatgtgtccaagctatgaaagatgcaggatttgaggtcgtttttgcaaaggatcttgctcaagtttttccttgcccgtggtaccgggtgatggatcccacctacttttcatgggctcacttccaatgcacacgcccaggacggatcgtcacccgtgcaattgtcaatacactagagttcctccgtattgccccagcaggcagcatgggagcctacaacgtcctgatgagtgcctctgatggccttctaaaaggtggccgggaaggtatcttcacagcgaccttcttcgtcctgggccgcaagcctctcaaggaagttgatatagtaagcctctcaaggaagttgatatagtgaacggcggcgtcctttgagctgcaagattagtatggggctgtactcataagagctatgaatcatggccaacgtgttctgtgctgaggtgtgtttactggattgtcttatgggttatggcccttgcgctgtgtgctggcctgctgggtcatgttcccgcagtagcctgtatctgcttgtcagcttgtgtgctgtgtactatgcactatctgaataaaaatgcagttttacgcattgttattaatcgc

SEQ ID NO: 125591 - DNA, 1336 bp, Zea Mays
ttcttgcttccagcaaccgttcgtctagccggcctgacgtcgcggcgcccaacacggcaacgcgcctttttcttccgcacgctgcgctggcccccttctcttggtatgtcaaataccacgacctccatggaggcaaacaagaatcaaggaagtcaaattacaccgatttggcaaacaagtactatgatcttgtcactggcttttacgaatatggatggggcgactcattccatcttgctggcggatatccgggtgagacttcccgtgaagccattaagcggcaccagcattttttggcactacaattggggctcaagaagggtatgaaggttttggatgtgggatgtggaattgggggacctttaatagaaatcgccagattcagctcaacatcgataactggactgaacaacaatgactaccacatctcaaggggcaaggagctcattttttcagcaggtttgagtgagcaatgctgcttcttgaagggggacttcatggacatgccaatatctgataacacctttgatgcggcctatgcaatacaggctacatgtcatgcaccagatgcacaaggcgtctatagtgaggtctaccgtgtgctgaaacctgggcagtattttgcactggatgaatggtgcttgaccgaccgatttgatcccaacaacgccaagcatttggccatcaaggctgagattgagctcggtgatggcctacctgacatccgtaccactcgccaatgtgtccaagctatgaaagatgcaggatttgaggtcgtttttgcaaaggatcttgctcaagtttttccttgcccgtggtaccgggtgatggatcccacctacttttcatgggctcacttccaatgcacacgcccaggacggatcgtcacccgtgcaattgtcaatacactagagttcctccgtattgccccagcaggcagcatgggagcctacaacgtcctgatgagtgcctctgatggccttctaaaaggtggccgggaaggtatcttcacagcgaccttcttcgtcctgggccgcaagcctctcaaggaagttgatatagtaagcctctcaaggaagttgatatagtgaacggcggcgtcctttgagctgcaagattagtatggggctgtactcataagagctatgaatcatggccaacgtgttctgtgctgaggtgtgtttactggattgtcttatgggttatggcccttgcgctgtgtgctggcctgctgggtcatgttcccgcagtagcctgtatctgcttgtcagcttgtgtgctgtgtactatgcactatctgaataaaaatgcagttttacgcattgttattaatcgc

SEQ ID NO: 125592 - DNA, 1856 bp, Zea Mays
gtaacttagccgtattgatatatgcactgatgactggccagaggcgacgatggagacggtctgctagttcaagttctacttccttccgcggccgcacgcgcgtcgttcgacgaattgccggagccagctgaaaatcgccggaggtgctctcggcggtcctggcctgattctctaccgacgcgagctgtggtcagtagccacgtctgtatatccacgtctagctggccatctttgcaccctccccacgtccatggaccctccaagaggtggagcttccacctccagtgaattagaagaacacagcagtggtagggtgccctggtgagcgctcatcatcctctgtgatgacgatgatgatgacaaaagagaggtcatttgttgctaagtcgagacggatgagtattgagtaggcggccttataggagcactaagatgttccgggcaaatttgtggcatttacacacatgctgttactgctgattcttctttaaaagccatggatgtatgtcaaataccacgacctccatggaggcaaacaagaatcaaggaagtcaaattacaccgatttggcaaacaagtactatgatcttgtcactggcttttacgaatatggatggggcgactcattccatcttgctggcggatatccgggtgagacttcccgtgaagccattaagcggcaccagcattttttggcactacaattggggctcaagaagggtatgaaggttttggatgtgggatgtggaattgggggacctttaatagaaatcgccagattcaggcaatgatctgcaataatgtttcattgcccattcaatcaataaattccaacaataatgaagaacatacatacatatatatatatatgtgtgtgtgtgaattttcaattctgtttattgtagctcaacatcgataactggactgaacaacaatgactaccacatctcaaggggcaaggagctcattttttcagcaggtttgagtgagcaatgctgcttcttgaagggggacttcatggacatgccaatatctgataacacctttgatgcggcctatgcaatacaggctacatgtcatgcaccagatgcacaaggcgtctatagtgaggtctaccgtgtgctgaaacctgggcagtattttgcactggatgaatggtgcttgaccgaccgatttgatcccaacaacgccaagcatttggccatcaaggctgagattgagctcggtgatggcctacctgacatccgtaccactcgccaatgtgtccaagctatgaaagatgcaggatttgaggtcgtttttgcaaaggatcttgctcaagtttttccttgcccgtggtaccgggtgatggatcccacctacttttcatgggctcacttccaatgcacacgcccaggacggatcgtcacccgtgcaattgtcaatacactagagttcctccgtattgccccagcaggcagcatgggagcctacaacgtcctgatgagtgcctctgatggccttctaaaaggtggccgggaaggtatcttcacagcgaccttcttcgtcctgggccgcaagcctctcaaggaagttgatatagtaagcctctcaaggaagttgatatagtgaacggcggcgtcctttgagctgcaagattagtatggggctgtactcataagagctatgaatcatggccaacgtgttctgtgctgaggtgtgtttactggattgtcttatgggttatggcccttgcgctgtgtgctggcctgctgggtcatgttcccgcagtagcctgtatctgcttgtcagcttgtgtgctgtgtactatgcactatctgaataaaaatgcagttttacgcattgttattaatcgc

SEQ ID NO: 125593 - DNA, 1484 bp, Zea Mays
cccgacggccacagaccttccaagggcagagcggacccatccataccaggaggcggcggaggagagagcggctgcctcagcctgtctttcttgtgtgcactgcacccaccctgcctcagcttgggcttggctgcctcttcgtttcgccaggaacgcgtaggcgcagcgcagcagcccaggaagcaacacccagccgcctaatcccgcaacaactcgccctcttctacccccatcggctcctctgcatccgcataccggtggcctacaggtttgctggagtgcagtgcacgggcggtggagcagcaaatctgcaactgattcaggatggatcaggaggcgaaggactctaggccctcaaggtctcccagcgagccaaacctcttcctgcaatggggtagccgtaagaggctgcgatgtgtcaagacgcgtgatgacggctcaccatcgccgtcgccgtctcaaggtcttaggcgtgccataccccgttctactcggcccctccttggagcagacattgcagcatttcgttcaccgcggcgccctagcacccttaaccgcaggaaatccgatttgctggtgaatgagtacaagcacacgatggcgctatcgccagagaaggacaagtattacacaacgaggggttcaccatttccctttgaaggaaatgggtttgactttggtaccataacagaggataagggaaccacatcgttgccgagattcttcattgcattgtcaaacaaggagaaggaggaggacttcatggcgatgaagggctccaagctgccacagaggccaaagaagaggcccaagctgatgcagaagtgcttgcttgtaatgctcccttccactaattcattttataagttttcacttcattgctatgatcgtactcattcatttgaacatgtcttctgttacattttttggacaactgtagatggtgagcccaggagcttggttatcagatctatctcatgagagatatgaagttagagagaagaagagttctaaaaagagggctagaggcttgaaggctttgagcatggcgagtgattcagaatagagtttgaggcgaatggatttttggacttgactttagctggtggcaagaatctgtagttaggtggcactgccttctgcctgtcagacaaacctctgcatctaatttggtgctatgagtgctctgatcaaggtctattgatgtcaacagcaaagatgatattagattcctgatctagtgaggtgcagctccatctttctgggtagtgggcgcctttgtgggagagaaaatggagggtgggatacaatagatggtttctcaaaaccacagaggaagtaatgttcaactgttgggaaacattgaaagctggatgttggctgagaaccaatgaatcatgatgtttaatcgtcataaacttgtagctgtaagacttatggtgaccattctgtccattcaatcaagactgaccaaaattttcaaa

SEQ ID NO: 125594 - DNA, 1419 bp, Zea Mays
gtgcactgcacccaccctgcctcagcttgggcttggctgcctcttcgtttcgccaggaacgcgtaggcgcagcgcagcagcccaggaagcaacacccagccgcctaatcccgcaacaactcgccctcttctacccccatcggctcctctgcatccgcataccggtggcctacaggtttgctggagtgcagtgcacgggcggtggagcagcaaatctgcaactgattcaggatggatcaggaggcgaaggactctaggccctcaaggtctcccagcgagccaaacctcttcctgcaatggggtagccgtaagaggctgcgatgtgtcaagacgcgtgatgacggctcaccatcgccgtcgccgtctcaaggtcttaggcgtgccataccccgttctactcggcccctccttggagcagacattgcagcatttcgttcaccgcggcgccctagcacccttaaccgcaggaaatccgatttgctggtgaatgagtacaagcacacgatggcgctatcgccagagaaggacaagtattacacaacgaggggttcaccatttccctttgaaggaaatgggtttgactttggtaccataacagaggataagggaaccacatcgttgccgagattcttcattgcattgtcaaacaaggagaaggaggaggacttcatggcgatgaagggctccaagctgccacagaggccaaagaagaggcccaagctgatgcagaagtgcttgcttatggtgagcccaggagcttggttatcagatctatctcatgagagatatgaagttagagagaagaagagttctaaaaaggtaccctgcatatagatatctttgttttgcttaaagaaagaagtacattttgtacctgagagactgagacctctcaatttaactccaaattgacattctcttaatgcccgttgctgatatgagtgaaacaacctgcagagggctagaggcttgaaggctttgagcatggcgagtgattcagaatagagtttgaggcgaatggatttttggacttgactttagctggtggcaagaatctgtagttaggtggcactgccttctgcctgtcagacaaacctctgcatctaatttggtgctatgagtgctctgatcaaggtctattgatgtcaacagcaaagatgatattagattcctgatctagtgaggtgcagctccatctttctgggtagtgggcgcctttgtgggagagaaaatggagggtgggatacaatagatggtttctcaaaaccacagaggaagtaatgttcaactgttgggaaacattgaaagctggatgttggctgagaaccaatgaatcatgatgtttaatcgtcataaacttgtagctgtaagacttatggtgaccattctgtccattcaatcaagactgaccaaaattttc

SEQ ID NO: 125595 - DNA, 1303 bp, Zea Mays
gtgcactgcacccaccctgcctcagcttgggcttggctgcctcttcgtttcgccaggaacgcgtaggcgcagcgcagcagcccaggaagcaacacccagccgcctaatcccgcaacaactcgccctcttctacccccatcggctcctctgcatccgcataccggtggcctacaggtttgctggagtgcagtgcacgggcggtggagcagcaaatctgcaactgattcaggatggatcaggaggcgaaggactctaggccctcaaggtctcccagcgagccaaacctcttcctgcaatggggtagccgtaagaggctgcgatgtgtcaagacgcgtgatgacggctcaccatcgccgtcgccgtctcaaggtcttaggcgtgccataccccgttctactcggcccctccttggagcagacattgcagcatttcgttcaccgcggcgccctagcacccttaaccgcaggaaatccgatttgctggtgaatgagtacaagcacacgatggcgctatcgccagagaaggacaagtattacacaacgaggggttcaccatttccctttgaaggaaatgggtttgactttggtaccataacagaggataagggaaccacatcgttgccgagattcttcattgcattgtcaaacaaggagaaggaggaggacttcatggcgatgaagggctccaagctgccacagaggccaaagaagaggcccaagctgatgcagaagtgcttgcttatggtgagcccaggagcttggttatcagatctatctcatgagagatatgaagttagagagaagaagagttctaaaaagagggctagaggcttgaaggctttgagcatggcgagtgattcagaatagagtttgaggcgaatggatttttggacttgactttagctggtggcaagaatctgtagttaggtggcactgccttctgcctgtcagacaaacctctgcatctaatttggtgctatgagtgctctgatcaaggtctattgatgtcaacagcaaagatgatattagattcctgatctagtgaggtgcagctccatctttctgggtagtgggcgcctttgtgggagagaaaatggagggtgggatacaatagatggtttctcaaaaccacagaggaagtaatgttcaactgttgggaaacattgaaagctggatgttggctgagaaccaatgaatcatgatgtttaatcgtcataaacttgtagctgtaagacttatggtgaccattctgtccattcaatcaagactgaccaaaattttcaaatgtggacttgcatgccgta

SEQ ID NO: 125596 - DNA, 1012 bp, Zea Mays
ccagccgcctaatcccgcaacaactcgccctcttctacccccatcggctcctctgcatccgcataccggtggcctacaggtttgctggagtgcagtgcacgggcggtggagcagcaaatctgcaactgattcaggatggatcaggaggcgaaggactctaggccctcaaggtctcccagcgagccaaacctcttcctgcaatggggtagccgtaagaggctgcgatgtgtcaagacgcgtgatgacggctcaccatcgccgtcgccgtctcaaggtcttaggcgtgccataccccgttctactcggcccctccttggagcagacattgcagcatttcgttcaccgcggcgccctagcacccttaaccgcaggaaatccgatttgctggtgaatgagtacaagcacacgatggcgctatcgccagagaaggacaagtattacacaacgaggggttcaccatttccctttgaaggaaatgggtttgactttggtaccataacagaggataagggaaccacatcgttgccgagattcttcattgcattgtcaaacaaggagaaggaggaggacttcatggcgatgaagggctccaagctgccacagaggccaaagaagaggcccaagctgatgcagaagtgcttgcttgtaatgctcccttccactaattcattttataagttttcacttcattgctatgatcgtactcattcatttgaacatgtcttctgttacattttttggacaactgtagatggtgagcccaggagcttggttatcagatctatctcatgagagatatgaagttagagagaagaagagttctaaaaaggtaccctgcatatagatatctttgttttgcttaaagaaagaagtacattttgtacctgagagactgagacctctcaatttaactccaaattgacattctcttaatgcccgttgctgatatgagtgaaacaacctgcagagggctagaggcttgaaggctttgagcatggcgagtgattcagaa

SEQ ID NO: 125597 - DNA, 2012 bp, Zea Mays
gaaacagacaggccctgaattcccagagttttctgaagtctcatcactcaggagcatgtgacatcgttatagaatatgtgttagtccttcaccttgaaattactaagttttctaggacaaacctttggccaaaaggaaaccatttttttattcatactatgaggttcgtatagaaaaaatgtttgcttacgattatcatttatcatacaaattacatcaatagaataattgctggtcaaaagacttgtcttcaacgaatgaaataaggctttgtaaatttgttaagctttgttttgttgctgtaaatcttgtggttgtatgcctgtatttcagatttgtgacttgaacgatttgtgggccggtcgttaaaccgctacaggtgtctgggcctgatgggccagctccctccccatagcgcttctattctcccccgcccaccgcggcaccgccgccgactccgatctcggtcgacctacccagtccgccaccgtctaccgccgcccccacgacgatccagtctctgtcgctgccccgcctcccctcctcttcccgctgcctctctcggtctccctgccccgcgcgcaaccggatccaggtgactccggcctggacacgtcaccagacttcctctccgccgtctgatcgggttagcaaaaggaaaaccggcctgcttcgcgaggataagaaaaggtagcaatagcacgggtaagtaaaaacgagctgtagctgtctgccggtcggtctgtccggtccatccccgagacccgactgcgttccttctccttgtcgatggaggaaaccctagccgtcgaatccgccgccggcgagacggcggccgcgcaggcgcccgagctgaacgaagagacgctcgaggaggtgctctcgaggcatagaaaagagaaatcgaaactccaggataaggaaacgagcctcaagaaagctgctgcaaaaggaagcaaagctgagcagaaggcgaagaaaaagcaggtagaggaagagatcacacgcctctcatctgagttagaggcgaaccatgctgcagagcttgcttcctttgggtacaaaccctctggtagctcagagaagggaaacctcgacaacttagtgaaggccatagccggtgtttcagtttccagcaattcggattcagcaaagctcagcaagggagcacgccggcgagagaagaaggcgaaggaggaagctgcccgagagcagcggatccaagaggaacaaagcaatctcgtgagcgaccgcatgctagaaaacgagaagctcgaaaggaagctcgagcccttggggctgaccgtccaagagataaagccggacgggcactgcctgtaccgagcagttgaaaaccagctgtcgctccactccaatggcgctgcacggtacagttaccaggacctacggcagatgacggccaagtacatgagggagcacgccgccaatttccttcccttctacttagcggaaggcaaggccgatgttggaccagatcccatggcgagcttcgagaggtactgcgaggagatggagtccaccgcagcttggggcgggcagctcgaactcggcgcgctgacccactgcctgaagaaacatatcgtcgtctactcaggctccttcccggacgtggagatgggtaaggagtacaaatctggacctggaggtagtggcgccggcggtgcgagcatcaggctgtcgttccacaggcacgcctatggtctcggcgagcactacaactcggtggttccagccggatcatcctagcaagagaaaggtggatgctctgatggcctctaatacttcttgatttgattgtttacgggtggcacttgtctgagtctgaaacacaataggccacttttctttttcccagttgctgtaatccctgtcatgagtagatgaaggttgagtgtaccaatcaaagctgtaccggggagtttgtttcccaaacaattttgctctcatcagttttatgtctgtggtttgatttgaagttgtgtgctgctact

SEQ ID NO: 125598 - DNA, 2068 bp, Zea Mays
gagaaggaacagagtggcaaagccactgggacatcacataacttgccagctatccaaacaaagtgtttataagagatggcaaagcaaaaacaaaatgaaacgaaagaacatatattggagagcctccatagcattctgatgaacaggcactcagactcaacaaaacgttttctgctagcactaaagaaaagggggcaggtgcagaagcaaattgtgatcctgcaaaaaaaaaaaaagagccctattcaagcttccacgcatgcaggatcagcgagaaaccaagaccttgcaactgggactccctaaaaatctgcgagtacgaccatggcagcgacttctcaggcgcctggcatgtctgaaacatgaacaccgcgttgctcgccgttgatccaaagagccagctgtgaacgtcccagaacacctccacaggcaagccgtcgacgagaatcgtctggtttcccctgaacttccacgccaggcgcttcacctgcatcacgggcttcttgtcaactcttatttcaagacacggatccttcaggtcgacggtgtcgcagtctatgacaatgtcatggaactggccattgtcgcagaactgcgccttggcggagtaggtcttcttgccgtatatgtgctccctcctcgccacaaacgcggcgttcagcatcgaccggttggctccagtcttcctgtaggcatccttcttcatgtcgccgagcaagagcacgagctcaaggtcgaacaccactgcgacatagaacccctccaccggctctggcccagcgccgaacttggcgcccgacaggtcccagaagatgtcgatcttgccgtcctcgacgtcgaggctcttggaccccttcttcttggagaagagccacggcttgatgtccgccttgcagaggcagtggccggacaggtcgtcgacgccgacgctgaggccctgccccatgaggctcctgctccacgtgagcgagatcacgcagggccggcccgagaactgcgtctggtagaggcaggtcaccaggttctgcgccgcgcccttgccggcgctggacgacgacgacgacgcgtccgcgatctggacgccgctctcgccgaagcaggaagggaagtccctcatggctggctggcccggtcggggtccttcgtcgaacacctggcgtgcagccgcccgcccgcccgccgcttggatcagcacctctcctccgcactcctcaccgcaagcaatccacaccgcccggcgagcccgcctcgcaatgccggcgaagagatgaacagccacgcacagatcggccacgcaggtacgcaggccaccgccggaggttgctcgatccagcaacgccgccgccgccgccgccggacgcgagatcccacctcttactgcgaaaggcagcaccgacaaccgcccgaaaatcgaggggcagaggagggattggcgtcggagcaagattccttcacggccccgccccgcccctttccaccgcgtaggccaccttcttggccgcgaaaccgcggcgacggagcaatcttccctccgccgggactccgtccgtcgacggatcagccttccacctttataccacagcagcggcagcggcgaaacagaaggtttcccccaggcggcaggctaaggctaaggcttccgcttcaaggcaggagaagcatgcaattaccgtagatgtatgcttgcacacccatggccaaaggggatggagtggatcgagaggagcaggtggggagaacactggcaaccactccaaccagtgtacaggctagagatgaggggagcaagcagccgcagcaaggagctcacaactcacaggtactggtgggaggagggggcggaggtggttttgtgggggaaggagacaaagggttagcgagaggaggggggatacagtacagccatacaagatacagcacgcgctggcagccaactcacttcacctcatctgctcaggctgctcaactcatggagatggagggagggagggagggaaggagagggcatctattctcagcagcttcagcttcagggcagggaggaagagctgcagccgctggatcgctg

SEQ ID NO: 125599 - DNA, 775 bp, Zea Mays
atgacatatttgatagcgggccgcaggctaagccattccttctaactgcaactgctgctcctctttgtctcccccgttccgttctccactgaactcctcgccctcgtcgacccgtgacccgtgagcctcttccactgccgccgtcgacgagagctgcgttagccgctagggacaggtgatttcggctgcttccctcatggcgaccgcgctcaagtcgttcttgaacagccccgttggccccaagaccacccacttctggggccctgttgccaactggggcttcgtcgtcgcgggcttggttgacatgaacaagcctcctgaaatgatatctggcaacatgacagcagccatgtgcgtgtattctggactgttcatgaggtttgcatggatggtacagccccggaattatttgcttctagcatgccatgcttccaacgagagtgttcagctctatcagctgtctcgctgggctagggctcaggggtacctggagaagaaagagccagagacacaacagtaaagagggtatgcaacactgcagtgacttgttcctttagtgaccatgcagtatgccgaggagatttcatatacctagcgccgttacaagcttctgcttgcttacttttctgtgcatttggtttttacaatgcgttatgcaatgagtttcccccaaacacgcaatgagtttgggcactattttcgttttacctggctcatgtgcccatagtgctttgtaaaagaccagtcgttgcaaaattttggtccggtcctcggc

SEQ ID NO: 125600 - DNA, 2075 bp, Zea Mays
ctgccacgaaatggacacacgcgcgcacgtaaaaacgaaaaaaggtccccggccgagaccgagagccgcggtccagagcggggggcggccggcaaggacgaaacggcccaacgccaccacctccaccacctcgtcctcgatcgacacctcccccgtcgccgtcccgtgactccccgtccagccgtccaggcccagctgcccccgcgacccagacgaccacgtccgcctcggcctgcgcctccccgctacaagagtccgtccgcccgccagcgctgcggtgccagcgagcccctccctcctccactctctgcggcgcggagatcccgtcctttctctgtgcccccggtaccgcgaggagccactgccaggcgccggcgtttttggaactgggcatggaggcggcggcggcgtcggcggcggcggtcgggggttcgggcgctggactgaccaggtggcaggcggcggcgcttgcggcgctggccggctgggtgtgggcggcctccttctacgacctcacgcgccgggcgcgcgcgctcgtccagccgtgggtcacgcgccgggtgcacgccgagacgccggccatcctcaggttccagaagttggagcacaagttgctggacaatttcttctctgtgctgtcatgtgttgtctccgtgcccttctacacgggattcctccctctcctgttctggagtggacacggcaggctggctaggcagatgaccctcctcatggctttctgtgactacctcggcaactctgtcaaggatatggtgtcagcccctcggccatgctctccacccattagaagagtgacggctacagaagatgagaaggaaaatgccatggaatatgggctaccgtcatcgcatgctctcaacactgtttgtttgacgggatatttgttacattatgtcctcacatacggagaacatggcagtcttacagttgctgcgggtttatctctagctctcttacttgttatgctagttggcattgcgaggatatatctgggtatgcacagcttgaccgacgttgtcgctggaattggtttcggcatcgtcatcctcgcattctggctggctgttcatgaccatgtcgacgcctttgttgtctccgggcaaaacgttgcaaccttctgggcaggccttgctctactgatgtgctttgcgtatcccaagccagaattccctaccccgagctttgaattccacacagcattcaacggggtcgctttcggaatcgtgtacggcatccagcaaacctacttccacttccacgcccccgacgcgccgatcgtcttcagcgccgagctgcccttcctcgcgttcgcggggcgcgtcctcgtcgggatcccgaccatcctggccgtgaaatcgtgcagcaaggcgctctccaggtggctgctgcccgtgatgtgcagcaccctgggcatccccatcgtgtcgtcctgctacgtccccgccctgaaaatcgacggcggcagcagcaagagcaggcaggccgccggcgggcacctccagcgccttctctctcacttcccccagaaggcgtacgacgtggacaccggcatcaggttcgtccagtacgccagcctcgcgtggtccgtggttgacttggtgccggccatcttcgcccatttggatttgtagccagctacttaaaatttcagtttcgtttttttttctggaggtctcaataaggccctcctactcgtaagacatgtgtcatcttatgaggctgtaaatccgatgatctggccctttcttctttttttgtattgtattgtgtgtatgaatggacgaatggttccctagctgttttcatcagggtgttcagtaagtagaaatcagtggtacatttcttattctttaaattagatatggttattgtcttatatactaggttagagagggtattgatttgtagctatgagactatcgatattgttcggttccatgataagcaccactaagggtctatttggttttgctagaaaaaaagttgaaacaaacacaacttgcactggactggattatcttattcttggcatcgaagaaatgccttttcttgcc

SEQ ID NO: 125601 - DNA, 347 bp, Zea Mays
atactgttctataacttaaaatgagtttttggtggagaaaagatatcttaatgttctaggttttttatcctctatctttaatgggaataaataaattaagtcacgaaactatagaagattaaagaaataaagaatgaagcacaacgcagactgtagccctgctcatgttacaccatctcacctagcactaaacctctccaactatggtgtcaacactctaaaaggatggcaccatgaccgtcttgatgttgttgttcttgatctggacctctctgcctatggtctcaaggctctagaaggttggcaccatgaccatcccgacgttgtcattcttggcctagatctac

SEQ ID NO: 125602 - DNA, 116 bp, Zea Mays
gaaaacaagacaacacatagaataactacagtgcagccattgctaactaaactgagacacatgttcgtaggatacatcatacatgtcacgatagtattttctgccttaaaacagct

SEQ ID NO: 125603 - DNA, 306 bp, Zea Mays
atgatgaattcccggctgttcgttgagtcgtcgtcctctggcagcagcgggtacagtgaggccaagccagctgcggcggtgctccgcgcctcgaggccgcgcagggcccaggtcaacccttgcagcgtcgtcctcggcctgccccccttcatgatcaacaagaaggtcgtcctcggcctgccccccttcatgatcagcaaggaggtactgggtcaaatccagactgtgagcggaatccccttcggctcccaaatgaagattggaaatatagcccccgctgaggagcgtcttccccaggacgggtga

SEQ ID NO: 125604 - DNA, 399 bp, Zea Mays
ggtacagcgactcagcggcccagtcccacaggcggagagcgtagagtcgctcagccacagaccctagcctcctcagcgcccgccgcccagtcctcaaccactgctcgcctgctcctatggcgcgagcgcgactgctcttgctcggctgctgctcctggcctatatgcactccgctgtcagttgcctagacccctaaggcggaggccccgacgggcaacggctggccagcgtcggactccattgcatgccacactatgttctgcaacttctcccaaccagagttgtagagcaggcgcaagttcccatgtgtgtttgttgccatagtgcttcgtgtgaagttggttaaactagaccattatgtggccgcatttttctagattataaacatgttaatatgta

SEQ ID NO: 125605 - DNA, 1393 bp, Zea Mays
acctggaacacacgcaccgtcccaagttaacctctcgtgctcgggcactttctttttccttcccccctgtgcgctcggccgcctccgccgctgcctcgctccctccgcgcccaccacggaggcgcacgcgcgggcgcagcgtccctcgcgtgcctcgccttccgcactgctctgtccgcccgcctggctcctgcctcctcctcctcctcctcctctagggttagggcacgcgtcgcgggggcccgtggcgcccggcgcaatgcggaggccgtcgggggccggcgtgccgagccgccgccgccgcgcgatccaggtgctcgtggcggtctccctcgcctacgcggtcgccgtgctgctcctcgagtcgcccctcgtgtccacgtcgctgcccggggcgggggcgtccgccgcggcgtcgcggaagctccacctcgacggcgcgtgggagggcgcgggacgagcagcgccggcgcgccccgcgaagcacccgcacagggagaccctctcggcggacgcggggcggggacgggcgcgccggttggcggggatcgtctctggcctcgagctccgccacctcaactccacccgctccggctcgctccgcaaggtcgccgcggaggccgccgagtcaggggcccgcgtgttctccgacctggaggctctagcgacggccttgactttctcgggcgattcgtcaggggaggaggaggagaagagcaagtgcccgcactcgatcgtcctcagcggcgacgagttccgggagagggggcgggcggtggagctgccgtgcgggctcacgctgggttcgtatatcacggtcgccgcgacgccgcacgaggcgcaccctgagcgggatcctaagatcacgctgctcagggagggggaagagccgatcatggtgtcgcagttcatgatggagctgcaggggctcaagacggtggacggcgaggatccgcccaggattctccacttcaacccccgcctccgcggcgactggagcggcaagccggtgatcgagcagaacacctgctaccgcatgcagtggggcactccgctccgctgcgatggctggaggtcccgtgccgacgaggagactgtggatgggttggccaagtgtgagaagtggattcgggatgatgaagggcggtccgaggagtcgaaaacatcatggtggctgaaccggctcattggccgtacgaagaccgtctccgttgattggccatacccattcgtggagaaccacctgtttgttctaactctcactgctggattggaaggttaccatgtgaatgttgatggacggcatgtgacatcatttccataccgcactgtaagtggctctcgcttgtacatgaatggatggggaatgcaatgcaatattaatattggtgca

SEQ ID NO: 125606 - DNA, 2725 bp, Zea Mays
acctggaacacacgcaccgtcccaagttaacctctcgtgctcgggcactttctttttccttcccccctgtgcgctcggccgcctccgccgctgcctcgctccctccgcgcccaccacggaggcgcacgcgcgggcgcagcgtccctcgcgtgcctcgccttccgcactgctctgtccgcccgcctggctcctgcctcctcctcctcctcctcctctagggttagggcacgcgtcgcgggggcccgtggcgcccggcgcaatgcggaggccgtcgggggccggcgtgccgagccgccgccgccgcgcgatccaggtgctcgtggcggtctccctcgcctacgcggtcgccgtgctgctcctcgagtcgcccctcgtgtccacgtcgctgcccggggcgggggcgtccgccgcggcgtcgcggaagctccacctcgacggcgcgtgggagggcgcgggacgagcagcgccggcgcgccccgcgaagcacccgcacagggagaccctctcggcggacgcggggcggggacgggcgcgccggttggcggggatcgtctctggcctcgagctccgccacctcaactccacccgctccggctcgctccgcaaggtcgccgcggaggccgccgagtcaggggcccgcgtgttctccgacctggaggctctagcgacggccttgactttctcgggcgattcgtcaggggaggaggaggagaagagcaagtgcccgcactcgatcgtcctcagcggcgacgagttccgggagagggggcgggcggtggagctgccgtgcgggctcacgctgggttcgtatatcacggtcgccgcgacgccgcacgaggcgcaccctgagcgggatcctaagatcacgctgctcagggagggggaagagccgatcatggtgtcgcagttcatgatggagctgcaggggctcaagacggtggacggcgaggatccgcccaggattctccacttcaacccccgcctccgcggcgactggagcggcaagccggtgatcgagcagaacacctgctaccgcatgcagtggggcactccgctccgctgcgatggctggaggtcccgtgccgacgaggagactgtggatgggttggccaagtgtgagaagtggattcgggatgatgaagggcggtccgaggagtcgaaaacatcatggtggctgaaccggctcattggccgtacgaagaccgtctccgttgattggccatacccattcgtggagaaccacctgtttgttctaactctcactgctggattggaaggttaccatgtgaatgttgatggacggcatgtgacatcatttccataccgcactggatttgttcttgaggatgctactggcttatcattgaatggggacctggatgtgcaatcagtgttcgcggggactctgcccactacacatcctagcttttctccacagaaacatctagagttgttacccagttggcaggcccctccccttccagacgaaccagttgagattttcatcggtatcctgtcagcaggcaaccattttgctgagcgtatggctgcaagaaagacatggatgtctgctgctcagaagtcgtcgaatgttgtggcccgtttttttgttgccctgcatggcagaaatgaggttaatgtggagctgaaaaaagaggctgagttttttggtgacattgttattgtcccattcatggatagctatgatttggttgttctcaagacaattgccatatgcgagtatggggtccatgttgtatctgctagatacataatgaagtgtgatgatgatacttttgttagacttgattcagtaatggctgaagtgaagaaaatccagaatggtgaaagtctctatatagggaacatgaattatcaccacaagccattacgtgatgggaaatgggctgttacttacgaggaatggccagaagaggattatcccatctatgcaaatggtcctggatatgttatatcctctgatattgcaggttccattctatcggaatttttaaagcataaattaaggcttttcaaaatggaggatgtgagcatgggcatgtgggtagagcggttcaacaacaccagacttgttaaatatgtccacagcatcaaattttgtcaatttggatgcatagatgattattacactgcacactaccaatcaccaaggcagatgttgtgtttgtgggacaaactgcaggctggaaaagcccaatgctgcaatatgagatagcaagaatggatgtggtggtactggtaagcttttctgtggtggtagtgcccatcctaattcacgaaggagttgagaacctaatagccccaagattaacttcaagaatattggctggaaataaattaagcccttgagatgactaacaaatggacatttaacggaattcttttggtatagctgaccaggtggtgtttgagctggaaatggaaacaaggggaacagacagcagcctgtaacgcctttccctcttcttttctcaacgtatagaccgagttctttgagcagtatgagacctgcttggggacttgatttgtaaatggaacggttagaaagcttagttaaataactgttactttttggcaccattggctgtggttgctgtcagacaacccagctggtacacatgagcgatcttggtggacaagaattttgctgtgtaacttctcttaacatggtcataatttatgatttgatcagttggtggatgta

SEQ ID NO: 125607 - DNA, 1688 bp, Zea Mays
actgacgccgtctctacaatctttttttaccaataaaaaggtagagaatataagaaaccgtcacgaccgcctccgccgtgctcttccatccgttccatggcgccgccgctcgccctgctccttctcgccgccatcgtgctctcgcgggccgtctcccacgcccacggcggcggcggcggcttctacgacccggcgagcgtcactcagctctcctcgcgccccagggcgttcctgtacagcggcttcctctcggacaccgagtgcgaccacctcgtcagcctggtgggttgggttggggttgggttcgcgaatcggcctttctgcagcgccgccgcgcgcgtcgtggcgatgatcagaggcgcgctcacgtacggagccgtttccattttgctttctgttgggtttcaggcgaaaggcagcatggagaagtcgatggtggcggataacgactccgggaagagtgtggcgagccaggcgcgcaccagctccggcaccttcttggccaagcgcgaggtaatcaatctcctgtcctcattgccatggcaatgtgcacaactgactgccattgctgccacggacgcacggtggtagagactcaagtgaacatgtaaacaaaaagcatatacagccacccacaactgcatgccaaacacagctttgcatcaaaatactccaaacagttactgatgtggggcactgatatatacttgttcatgttgagcccaccccaaccaaaggatgagatcgtgtctgcgattgagaaacgcgtagctgcttggacatttctcccggaagaaaacgccgaatcactccaggtcctgcgctacgaaaccggccagaagtatgacgcccacttcgactatttccacgacagaaacaacctgaagctcggcggccagcgagttgcgaccgtccttatgtacctcacagatgtcaacaagggtggagagactgtatttccaaacgctgagggaagccatttacagtacaaggacgaaacttggtcggagtgttcaagatctggcctggcagtgaagccaaagaaaggagacgcgctactgttcttcaacctccacgtcaacgccacagccgatacaggcagtctccacgggagctgcccggtgatcgagggcgagaaatggtcggcgacgaaatggatccacgtcaggtcgttcgacaaccccccagacgtgaggacggacgcgccgtgctccgacgacaaggagctctgccctagatgggctgctatcggggagtgccacaggaacccgacgtacatggttgggaccaaagacactctcgggttttgccgcaagagctgcgggatctgtgatgcttgaacgtgcatgttttgggggtagattttgatcccatcatgttttcactctctctgctcataacagatgaatcagtaacctagtgtaatgcgaatttcggtacagtcgcctccattggactgtttcgtccaccagatgttctaatactaatgatctaatcatcctttaccaacatgttagtccactaattgtcgcaattacaaaaaaaaaaacaaatatagagcttccacatgtggcgacgtgttcctcccatacatcttggcccacaccattgggcccctatccgtcggcctgctagcccgcagatgttcagctgctagccaggcaggggacggtccttctccccctggg

SEQ ID NO: 125608 - DNA, 581 bp, Zea Mays
cggaagacgacgcagcgcggcggcgaccggcgggtgtcatggcaaggtcggccgtggccgtgaggcgggcggcattggccatcgtgttcggagggcttctcctgatgtcgttggttatggacgacgtcaagaaagcggcgatcggcgggaggaggatgctggccagaggcgacggacgagggcagagcactctggaggatttccaggctgctgatgttcccttccaggacagcaagagaagggtgcccaacggtcctgatcctatccacaacagctctatcgggtatcagatgcagagcaaaggggagacagagatggatcctgttcctgcgcttgcgctgcatgcctccagtccagaggcgttgctttctactctctgtttgtttgggatccaaaaacagtgcgcacatggtggcgtaattgatatccaaatatttgatacgagttcagtaaaaccaaacaccctctacgtgattcttcgatgcccggcacctgacgagagaccatttaccacttctggcgcattctcgtacctgactgctgccgcggcggtgcaccgatttttttttaaagccaaatag

SEQ ID NO: 125609 - DNA, 137 bp, Zea Mays
cgacgccggcggcggcaagaagcccaaggagccgaagcagaagaagggcaagaagccgaaccccttctcgatcgagtacaacggctcggcgccggcgagcgcgccgaggctggtggtgctgcgggagcccacgggtg

SEQ ID NO: 125610 - DNA, 2167 bp, Zea Mays
cgccgttacccgctggtcctaaaaccctagcgaaggcgagccttccacttccctcaacctgccgccgccaccgccaccgccgccgccatgtgcccagcagcggcgaccacgagctccgccaagccgtcgaagaagcggaaacagcccgtcatagcgccgccggagtcggactctgaggaggaatctgtctacgacactgcctccgacgatgacgaggaggaagaggagacgcaggagttagagagtgaggatgtagacgaggaggtggaggaggggagcgagggcggcgaggaaaatgaaattggtgacgatagcgaggtggaagaagaggaggtgaaggagaaaaaagaaaaggaggagacggtgaaggagaaaaaggaaaagaaggacatgaagcaagagggaaagaaggcgaagaagcaagaggaaaagaaggcgaagaaggacaagaaggaagaggaaaaaaaggtgatggaggacaagaaagaagaggaaaagaaggcgaagaagaagagcgaggggagtggaatcctgtctaacaagctcttctcggagctccccctctctgagctcactgccaaggccatcagagagatgaactacacccacctcacccagattcaagctagatcaataccacatctgttggaggggaatgatgtgatgggcgcagccaagactggctctgggaagactcttgcattccttataccagcgattgagatgctatatcacacacacttctcaccgaggaatgggactggagctattgtggtttgcccgacacgggaacttgctatccagacacacaatgttgccaaggagttaatgaaatatcactcacaaactctcagatatgtcattggtggtaataatcgaagaagtgaggctgatcagcttgcaaaggggatcaatttattagttgctaccccaggcaggcttttggaccatctacaaaataccaagagtttcatatacagaaggctaaaatgccttgtcattgatgaagccgatcgcatacttgagcaaaactttgaggaagacatgaaacaaatatttaaacgccttccccagaataggcagactgttcttttttctgctacacaaactccagaggttgaaaaatttgctaaactgtcatttgagaaaaatgaagaaagtaaaaaaaaacctgtttatgttggagttgatgatgataagtcaaaggctactgttgaaggcctgcagcagggttattgtgtcatttctagcgataaaaggttcttggttctgtatgctttcctaagaaagaagcggaataagaagataatggtgttcttctcatcatgtaattcagtaaagttccacgctgaacttctgaatttccttgggatagagtgttctgatatccatggaaaacagaagcaacagaagcgaactactacattctttagcttttgcaaggcagaaaagggcatcttattgtgcactaatgtggctgcccgtggacttgatattcctgacgtggattatatcttgcaatatgaccctccagatgaaccaaaggattacattcacagagttggtcgtaccgcacgtggtgagaaaggcaaaggaagtgcattgctgttcttactaccagaagaactgaagtttctaatttacctgaaggcggccaaggttaccctgacggaatatgagttcaatcagaagaatgtgccaaatttgcaatcgcagcttgagaatattgttggtgagaattactttctgaaccagtctgccaaagaagcctacagatcctacgttttggcatatgactctcactctatgaaagacatttttaatgtccatcaacttgatctgcagaaagtagctgcgtcattcggtttcaagaatcccccgaaagtgaacctggacctggatagcagtgcggcgaagcatcggaagaagatgaggagagtagacggtgggaagaggcatggcatcagcgcttcgaacccgtacgggaggaaggacaaaggcggtgccggcgataaacgacagttggcgagattctagaaaggaaggaagagcaggagcgtttcactattgttgtgttcgtaccagggctttgattgatgttacctggcttgggaaaaatcttgacaggccactaagattggctataaattttgggttgtcttgatat

SEQ ID NO: 125611 - DNA, 1090 bp, Zea Mays
gttttaggttagctagaaggaaagcggagatgcttcagtctccaaaatttcatgtgtcgagaacaaggcttatcatctacaatttgcctaagactatgaccattaatgacgtaaagaagctttgcagagaagcagtcatttctcgtgctacaaaacaaaatcctgtcatccggaaggtgaatatcctgaagaatgaaaagaaaggcatacagaagcattcacgcggtgtagcctttgttgattttcaagaacatgaacacgctcttgttgctctaagggttctaaacaacaatcctgaaacttttggttcagaacgtcgcccaattgtagagtttgcgcttgaggatgttgaaaaggtgaggcttcagaagattcgaatggaacggcatcgcaagtcagcagcagaaactgcagaagttcagcagaccccttcaggggatcaacctgcaagtgaaggccgtaacgcagataacagcaggactttcagaaaaggaaacaagcggaaatcacacagtttaccatctaaaccctccgactctgttgaagggctggccaaggatcctctagttcctggagttcgaaacgcgaaagctgcaaagagagcaaggaagtcaaatgtggggaccattttgccggaccgaggtctaacagctgcaaccccaaacactgctcagaatcaagttgcgtcaagtgagcttgatcaggcagctgctccaaagaaaagaaaaaacagaaaagacggtcaggcagagcaaaagagaggaaaggttacaaaaaggacaaggaaagaaccttccggggaaggaggcgtggacaagtcgctggtggagcagtaccgtttcaagttcttgcaacatggtgtgagcaagaccaagaccaagaccaaaggatagttgacttgggaactgtgggaagtgggattgatgttgaagagcagcacggtgtcccggaccaccgtataacgtttcgaagagcaagtctccacaaactttctgaggccaaaatttcgattgtgatgcttaatagttttgtgtccatctgtactgatatttataactgatctagttacagccgtataattatgaatcat

SEQ ID NO: 125612 - DNA, 1386 bp, Zea Mays
cgggcgcccaatttctgtgaacaggtcaaacccccccgcggcgccccacccccgcacgcagcgagtcagcgacgccccggccccgcgtcttcgtattcataacgccagagtccagactccagagtcctcagtcctcaccggcttctcctcccttcccgtcaccgatggagctgttcgcgcgcgcgaaggtggtgcggctcaggagccaccacgacaagttcctgtacgcggacgaggacgaggtgcgcgtgacgcaggaccgggacgggtcctcggcgaacgcgcggtggaccgtcgaggcggcgccgcacagcgcgggcgccgtccgcctgcgcagccgctacgggcgctacctcaccgcctccggggagccgttcctgctggggatgacggggcggaaggtgaggcagacggcgcccgccgcgccgcgcccggccaacgcgtccgtggactgggagcccctgcgggacggcttccaggcgcgcctccgcaccaaggcgggccacttcctccgcgccaacggggggctcccgccctggaggaactcggtcacccacgacgtgccccaccgcaccgccacgcaggactgggtgctctgggacgtcgaggtcgtgcagctcctcacgcccgcgccgcggcccgagcgcaccggctccgcgcccgtcgccaagttgccggactcgccgcccgcgccggacctcggcaagccaccgcaggcgcatgggccgcaccaccgcccatccaagtcctacgcgacgccaccgcccacgctcgagcccgtggcgccgccgccgccgccgccgccgccgtccaggctcaataagctcgagtcctccctttctttctccgcccccttgcacaaggtggagggacgtgccatccattaccatattgcagatgatctgggcaatgtggatgaaggcacagtgggacactccttcacattcaatggcagcaacttggaggagctcgcccacaagttgcaggaggagaccggtctggaggacatcattatatgcacacgcagccctatcaacgggaagctcactcctctccgtctgcagctgccaccgaacaacgcagcgatgcatatcgtgctcgtccaggagtcctcaaaggtggccaaatcatttccttggccatatggttcataaaccacaaacctttggcggagacagggccttgagttctggtggagaaaatgccggttgtgcagttacaccgggctatcagaagcaacctaccgtaaacttcatccgtgtacagtaaaaagaggcacctccgctagtatatatagcgtaaaaccagcggagattagtcgtgcggtatactgagagatgtgttccattaattaatttataccctgaatcgtgtatccttggtttt

SEQ ID NO: 125613 - DNA, 778 bp, Zea Mays
ttggccatttgatgatttggggtcatcatattaaaaatttctcttaacgcgtttctgattttttttacctacaatggtaaacccgatttcattaccaaggcaacaaaattacagggtcacagttcaagttcataagcaaaaaaaaagcagccattccccgaacaatcatatatttctgatcacccccgcaaaaaaaaaaaacaataaaagcttccacagagaaggcaagccataaattctaggcttatgatacacccttggcctagttcacagcacttgttaatggatttcagtttggttcagtgtacagcctggttgttagaatttttcaccagtttgtgatctactgatccttttcatgctccaactgaccattcttctttgtctgttgtgaattttcagtggccaaatcatttccttggccatatggttcataaaccacaaacctttggcggagacagggccttgagttctggtggagaaaatgccggttgtgcagttacaccgggctatcagaagcaacctaccgtaaacttcatccgtgtacagtaaaaagaggcacctccgctagtatatatagcgtaaaaccagcggagattagtcgtgcggtatactgagagatgtgttccattaattaatttataccctgaatcgtgtatccttggttttatattggttgcacattgttggaacttgctctctgctgcaagtgggccaacgggggtgaacaatggcgacaacagggttacgtgcacgggggcaatagctctgttgatct

SEQ ID NO: 125614 - DNA, 466 bp, Zea Mays
acacgcgacgaacagagctgaacacaaacacccgcatcaatccaagccgagcctcccctcggggacagcctacgcgagcgagatccaacccaagtcccgacgccgcgggcgagggcgaccagatccacctcctcagtcgtctcggatggcggcagcatcgacgtcggtacgggtgctccccgacggcggtgctgacgacgaggagcgctggctcgccgagggcatcgccggcgtccagcaaaacgctttctacatgcaccgtgccctcgtaagccccctgcggaactatacccccacctgcctaccggctaccgctgcttccttcctcggtccgtgttccaatcatgcaatttgggcgcaggattccaacaacctcaaggacgcactcaagtactcggcgcagatgctatcagagctgcgcacctcgcgactatcgccgcacaagtactacgagctttgtgagtaa

SEQ ID NO: 125615 - DNA, 2934 bp, Zea Mays
caaacacccgcatcaatccaagccgagcctcccctcggggacagcctacgcgagcgagatccaacccaagtcccgacgccgcgggcgagggcgaccagatccacctcctcagtcgtctcggatggcggcagcatcgacgtcggtacgggtgctccccgacggcggtgctgacgacgaggagcgctggctcgccgagggcatcgccggcgtccagcaaaacgctttctacatgcaccgtgccctcgattccaacaacctcaaggacgcactcaagtactcggcgcagatgctatcagagctgcgcacctcgcgactatcgccgcacaagtactacgagctttacatgagggcgtttgatgagatgaagaagctggagatgttcttcagggaggagactcgccgaggcagctgctctgtggttgatctgtacgagcttgtgcagcatgctgggaatgtcttaccgagactctatctcctgtgcacggtggggtctgtgtacatcaaatcgaaagaggctcctgctaaagatgttcttaaagatctcgttgaaatgtgccgaggcattcaacatcctcttcgtggcctttttttgagaagttacctttctcaaataagcagagacaaattgcctgatattggttctgagtacgaaggcgatgtggaaaatattaacgatgcggttgaatttgttcttcagaatttcatagaaatgaacaaactctgggtcccggatgcagcatcaggggcctgcccgagaaaaggaaaagcgtgggaaggaaagaaatgaactgcgtgatctggtaggcaaaaaccttcatgttctaggccagattgacggcgttgaccttgatatgtacaaagaaactgttcttccaaggatattagagcaggtggttaattgtaaggatgaccttgcacaattctacctgatggactgcataatccaagtctttccagacgaataccatttacaaacattggaaacgttattgagcgcatttccccagcttcagccaagtgttgatataaaaacagtactctctcaacttatggacagattgtctaactatgctgcctcaagtcctgaactgttgccagagttcttgcaagttgaagcttttgctaagttcagtaatgctattggaaaggtgatagaagcccaacctgacatgccagttgttggagccataactctatatgtatcacttctgacctttactctccgtgtacatcctgatcggcttgattatgttgaccaagtgctgggtgcatgtgtcaagaaactttcaggcaaggcaaaacttgaagatagcagggcaacaaagcaaattgttgcacttcttagtgctcccctggaaaaatatagcaatattgttactgcattagaactttcaaactatcctcgggttatggattatcttgataatgctacaaccaaagtgatggctgtggtaataattcaaagcataatgaaaaacacaacctgcatatctacttctgacaagattgaggcactattcgatttaattaaggggctgataaaggatatggatggagctcaagatgatgagcttgatgaagaagactttaaggaggaacaaaactctgtagcgcgtctcattcacatgctgcacaatgatgatcctgaagagatgctgaagatcttatgtactgtacagaagcatatacttcagggaggccccaagcgtctaactttcactgtgccttcgttagtattctcttctcttaagctggtcaggcgattacaaggccaagatggagatgtcactggggaggatgttcctgcaactccaaagaaaatattccagatattgcatcagactattgaagcactttcttgtgttccttctccagagttagctctgagactatatttgcagtgtgcagaggctgccaatgactgtgatttggaaccagttgcttatgagttctttactcaagcgttcattttatatgaagaagaaatcacggattcaaaggctcagatcactgcaattcacctgataattgggacccttcagcggatgaatatatttggggtggaaaatagagacaccctcactcacaagacaacagggtactcagcaaaacttctcaagaagcctgatcaatgccgagcagtatatgcgtgttcacatcttttttggactgatgaccaagatggtataatggatggtgaaagggttctcctttgtttgaagcgtgccttgagaatcgcaaatgctgctcaacagatggctagtgctacaagggggagcagtggatctgtaaccctatttattgaaattttgaacaagtacttgtacttctttgagaaaggaattccacaaatcacaaacactgtgattcaagatttgattgaattgattagaacggagaagcaaagtgataactctgtagctgatccatctacagaggcattcttttctagcactttgcggtacattgaatttcagaagcagaaaggtggaaccataggcgaaaaatatgaacaaataaagacaagttcatgactcggaacaaacacgtcacgatgactggttttgattttgttaagagaattggatcatttgtttgacatggttcagtgaaatagaaaccgccagttttagtagcatccaactaaaggatgtttacatgagctgttattctcaaatctcacggtctgagcgggtttgctcgcccattggcaacattttcaggtttagtcaggtggcaataagctgtcctttggtgagcacaggtctgtacaggattacttgtgttcgtgattggttctactgctacctgagtttcattgttgtatatttccgcccctcatacaaagcttatggattttagatttctgtaacatttggagtgcatgcctccatttctgagttctggctggacatttgatgattgtttcatagc

SEQ ID NO: 125616 - DNA, 1361 bp, Zea Mays
cagtttttttaaccttttgtccttggaagagcctgggaataacacatgtttttaggcattaattatatcaaaagtttctggtaaactatggttaataacacagggcacccaatttttacattcgtaattataaaaaaaacatttcataacatctccatattcttctgcacatttgtcattgttttcatttttcttgtccagactattgaagcactttcttgtgttccttctccagagttagctctgagactatatttgcagtgtgcagaggtatgtttgtgatactgcgtattttcataattcttcatcttactctctgattatgtttttaatttaggctgccaatgactgtgatttggaaccagttgcttatgagttctttactcaagcgttcattttatatgaagaagaaatcacggattcaaaggctcagatcactgcaattcacctgataattgggacccttcagcggatgaatatatttggggtggaaaatagagacaccctcactcacaagacaacagggtactcagcaaaacttctcaagaagcctgatcaatgccgagcagtatatgcgtgttcacatcttttttggactgatgaccaagatggtataatggatggtgaaagggttctcctttgtttgaagcgtgccttgagaatcgcaaatgctgctcaacagatggctagtgctacaagggggagcagtggatctgtaaccctatttattgaaattttgaacaagtacttgtacttctttgagaaaggaattccacaaatcacaaacactgtgattcaagatttgattgaattgattagaacggagaagcaaagtgataactctgtagctgatccatctacagaggcattcttttctagcactttgcggtacattgaatttcagaagcagaaaggtggaaccataggcgaaaaatatgaacaaataaagacaagttcatgactcggaacaaacacgtcacgatgactggttttgattttgttaagagaattggatcatttgtttgacatggttcagtgaaatagaaaccgccagttttagtagcatccaactaaaggatgtttacatgagctgttattctcaaatctcacggtctgagcgggtttgctcgcccattggcaacattttcaggtttagtcaggtggcaataagctgtcctttggtgagcacaggtctgtacaggattacttgtgttcgtgattggttctactgctacctgagtttcattgttgtatatttccgcccctcatacaaagcttatggattttagatttctgtaacatttggagtgcatgcctccatttctgagttctggctggacatttgatgattgtttcatagc

SEQ ID NO: 125617 - DNA, 995 bp, Zea Mays
gcaacagctcgtggcctgaacaaattatcgttacaaataatcacatataacaatcatttgtttggcaacagcccgtggcctgaacaaatactaataacaatgtcgcatacggtgtaaactgagtacctaataataaaaaggagtactgaaataaaaatacagtggcttacagatgtaagtttatgctctagcggatcatccggtgtgatcgagagttcgtccgtcaatacatgctatgcacaggtcaaggagccacttgtagagctttctagccccccaagttatcccagctgtccaactcacagaagtaatgcaggcaccagaacatgccctcccactcattctctcgctctcaggttctctctctacttcatcactctccctgtatatactctctcgaccaagataagcatggttttgttcttcactgtggttttcaatttgatacaatgagtagatttagtccccgccaaggcattaagggagggttggcaaaagtcttcactgagtatctttgctacagccatctcattcaggagacctctgcatggcgttgctcaaacttctccccacaatggaaatagagattgttggccttaaaatactctctggattgctcgtccctccacaagttaccatacattttttttatcatgtctgaattgtggcggttctggtgtggcaggatttctgtgttatttgagtttgcttctgtctaagaccctttgttggattttagcaacgacaaatgctctgtccactgtacaaggcacttcaggttcggctgttgccctgatttcatctttgaggccactgacatacttcgaagcaaataagaggtcgttatagtggcaagctggcagctgtgcatggtaaaatcatattgcaaggactggagttgagatatgtattcttccactgtccctatttttcttctcctgatctccgagattcctctcgattctacatggctttgtgctttgagggacgggaag

SEQ ID NO: 125618 - DNA, 1131 bp, Zea Mays
atgggcaagcggaaacagcgcggcggcggcgacggagaacccgccgcggaaggcggtgctggcggaggacacagcccctccaccgtgttcgtttccaacctcccctacaccttcaagtcctccgatctcgaggcggtgtttagcgaggtcggcccagtgcggcgctgctttatggtcgcggagaaagggtcggagaagagtcgaggcttcgggttcgtgcaatttgcaactgttcaagatgctgatcgagctcttcaacaaaagaatggatctcctgttgctggtaggaaaatcagagttaagctagcaatgaatcgtgctccactgaaggaacgtttgcaaaaggggaatatgcaagtgaaggactctgatgcaaaagatgaagcagacgaaatttctcctgctgaaaagcataaggggaaatctcataaaacagatccagagcaactgcatttgttgtcaaatgatgctaaggtatcaaaggaagctcccattggcgactccgaaaaagtgaaaaattctgaaaagcaaagggttgcaaagacggtgatttttggtggcctgcaagactccgccatggcaaccgaggttttccgtcaagctcgagagattggttcagttgtatctgtaaactatccacttcccaaagaggaaatgagattcaatggacttgctcgagatggatgcacatcagatatggcagctgtactctttgcaagtgtcaaatcagcttgggattctgttgtccaactgcataataaggaagtcaagggagctactgtttgggctcgtcaacttggcggagagggctcaaagatcagaaaatggagagcgattgtcaggaacctgccattcaagattacagagaaggagatcgtggatatgtttagttcagcagggtttgtctgggatgtgacaattccacataagtctgatgaggggatatcaaaaggctttgcttttgtatctttcacacggaagcaagatgcagaaaatgctataaaaaatattaatggaaaagatgttgcaaagagaccagtggctgttgattgggctgttccgaaaaaagtctacactgttgctgcaaaagttgatgctaaggataatgggaacagggttatcttctgttaa

SEQ ID NO: 125619 - DNA, 3088 bp, Zea Mays
tcccctcgcaggtcccggctggtcaggctcgcgcccgccagccccacccaaacctggggaactcttcgttcgtcctcttcttcccctgtcgcctttcccaaaaggccaaaaccctaaaccatacgcgcctaactccgcgtcctcccccccctccctcgaagcggccaaggcggcggcagcagtgccggcatgggcgcaatgtcggcttcgatttcgtcggtgaattggctagtcgaggatgacatccttctcaagaacgccgtcgaggctggtgcttcgttagagtccttagccagaggagctgtatgtttttcccgtaaattcactcttcatgaaatacaggaccgctggaattcattgctatatgacccagatatctcaacacaagcagcttctcggatggctgagtatgagaatgaactttctacttccgatccagccaaggcacataaacttttcaactcaaaagcaaaggatttttcatttcagaaacggaaaatagacagtgtaaagaatctatattatgcgatgagaaaaagagtacgcaatgatccacgcaacagtggcgaccttggatttcttgtcccctgttcgtgtacggcaattggtagtgagtgtatctgtggaggcctacctaacaatattgaaccagagctgaattcagtaagccgctatgggcaagtaggttcaaggtacaccattggacattcatattctgaaatgaacgaacatgcttttcatacgaagcatactgaaagcatgacaagagatggggatggcaccagtaatgttgtgtatggctactcagatgtaggccaactatatgaacatcatgcgtacacagcgaataatcatgggaatagagaagggaacaatctttctctaaagagtatcacaaattttcaggattctatgcagtttcagcagttggacaacaatcaatgtggtaatggggtggtagactcaaaggctttggtgatccctaaccatttcagtggaagtgtgcaggaacctatgcctctccaaatgattggtcaacctgagggttctgaagcaccaggtggtgcaatcttgagtcttcagcgaagcgacaggctcgctcttgctgatgataaggatgtaaaatcagaagacagggaccctctcacatttgaagcgcatttagatggtgggatatctggtttagatcacgctactgagtttatggacttcccatatttcactaatagtgaagaccttgatatcctgaatagtgaaaatcttttgaattctccaagtgagggaatccaggaggatttagacgatactgcattagttgttcatggggttagatcaaccatgcaaaatctggttcatgctgatgaagccaatatgtcctgtgatcaaatagatcttggtgatgtgaaaaataatgtagatgcttctggtataatcttatttcctacttcattagtagtgccctgtcctggcctgtatgttgagtgcaaattgaacacagaagatactgaaattccttgcaacgacgatgtttctacaccaacagagtatcctcttgaatgctgtacttctacctttgggcagaaatctgagaatactatctattccgtctcccctgcaatcagccctccatcaattgctgaacagcccaacccatccacttcagaacaaaaagaagattcagtggctcatgacgaaggtggtgtcctaggagctaaaccatcagaaggtgctttaacagttggaggccttttgcctggtaacattgacacaaatgatgcaaacacatgcatgctagctttgccttcttttagcactgctggatttggtgaaggatcaccttgtagtttaggaccacacgagagctttgataactctcatggtttgactttgcaaaattcagttcaagctcctgatcagatgcaacacaactcacttgatggtaaaccagaattaggtgacaaggctgctctacagaactgtatgccatcaaatgcactgcccgatttggatattcagaacactattgcaaatgcgccaacaccagctcaagcagaagaatgccctgactatgaaaaagatgttccaaattactatgatctagaagctttgattcttgaccaggatcttatcccgtgggaccaagactccgattttatgcatcctgaagttaccggatttcctcacccggaaagcaggaaggcattgattagattggagcaaggtgctcggtcttgtatgaacagagctatcatgtcgcatggtgcctttgcagttatctatggattgcacttgagatgctacataaaggatcctgaggttactcttggaagagagacagaagacattaaagttgacattgatttaggaaaagaagggagggcaaataagatatctcgccgacaggcggttatcaagatggatgaatctgggtattttcatattaagaacactggaaaatgtccaatctttgttaatagcaaggaaataccaagctgcaaacgcatcaacctaagctcagactcattaatcgagataaaggacatgaggtttattttccatgtaaaccaagaggctgtgaggcagtacattgatcgtgacctgaagccagaacgctaatttcccctggctttccagtcagcagcagcctgtgagtgactgcctcattaacagcaatagaagtagcatagcagtaaatttgagtaagcattgctcgtttaggatgttccttcatatgatgttaacaagttaggttcacttggctccggtctgtaaatggttgtagtttgttgcgttttctgtctgtttggcgggcataaatcatgcatataaccagcgcatttgcttccagtttgtacctacactcccaggaatgatttcatttgtaatactggcaccctagattgtggtgactgccgccaagagcaagaggcaaccaatgcaataaagtgcggaaaagaatcaatagaagggtagattctagggtagaacaggaggagggtgcacttgtgcaagaaaccattcggttcttgcgacgctataagcataaactttattggtttttatttatataccctgatgatcttgaagc

SEQ ID NO: 125620 - DNA, 2496 bp, Zea Mays
atggatgaaataaagagattgatccctgcttccccgttttcccttaccttctccatcttcacgtctgcccctgtgttcctcgtcggccatcagcacggcacctcttcgtcgcccgtctctgaggccgcgaccggagatcttccacaagctggtgcttcgttagagtccttagccagaggagctgtatgtttttcccgtaaattcactcttcatgaaatacaggaccgctggaattcattgctatatgacccagatatctcaacacaagcagcttctcggatggctgagtatgagaatgaactttctacttccgatccagccaaggcacataaacttttcaactcaaaagcaaaggatttttcatttcagaaacggaaaatagacagtgtaaagaatctatattatgcgatgagaaaaagagtacgcaatgatccacgcaacagtggcgaccttggatttcttgtcccctgttcgtgtacggcaattggtagtgagtgtatctgtggaggcctacctaacaatattgaaccagagctgaattcagtaagccgctatgggcaagtaggttcaaggtacaccattggacattcatattctgaaatgaacgaacatgcttttcatacgaagcatactgaaagcatgacaagagatggggatggcaccagtaatgttgtgtatggctactcagatgtaggccaactatatgaacatcatgcgtacacagcgaataatcatgggaatagagaagggaacaatctttctctaaagagtatcacaaattttcaggattctatgcagtttcagcagttggacaacaatcaatgtggtaatggggtggtagactcaaaggctttggtgatccctaaccatttcagtggaagtgtgcaggaacctatgcctctccaaatgattggtcaacctgagggttctgaagcaccaggtggtgcaatcttgagtcttcagcgaagcgacaggctcgctcttgctgatgataaggatgtaaaatcagaagacagggaccctctcacatttgaagcgcatttagatggtgggatatctggtttagatcacgctactgagtttatggacttcccatatttcactaatagtgaagaccttgatatcctgaatagtgaaaatcttttgaattctccaagtgagggaatccaggaggatttagacgatactgcattagttgttcatggggttagatcaaccatgcaaaatctggttcatgctgatgaagccaatatgtcctgtgatcaaatagatcttggtgatgtgaaaaataatgtagatgcttctggtataatcttatttcctacttcattagtagtgccctgtcctggcctgtatgttgagtgcaaattgaacacagaagatactgaaattccttgcaacgacgatgtttctacaccaacagagtatcctcttgaatgctgtacttctacctttgggcagaaatctgagaatactatctattccgtctcccctgcaatcagccctccatcaattgctgaacagcccaacccatccacttcagaacaaaaagaagattcagtggctcatgacgaaggtggtgtcctaggagctaaaccatcagaaggtgctttaacagttggaggccttttgcctggtaacattgacacaaatgatgcaaacacatgcatgctagctttgccttcttttagcactgctggatttggtgaaggatcaccttgtagtttaggaccacacgagagctttgataactctcatggtttgactttgcaaaattcagttcaagctcctgatcagatgcaacacaactcacttgatggtaaaccagaattaggtgacaaggctgctctacagaactgtatgccatcaaatgcactgcccgatttggatattcagaacactattgcaaatgcgccaacaccagctcaagcagaagaatgccctgactatgaaaaagatgttccaaattactatgatctagaagctttgattcttgaccaggatcttatcccgtgggaccaagactccgattttatgcatcctgaagttaccggatttcctcacccggaaagcaggaaggcattgattagattggagcaaggtgctcggtcttgtatgaacagagctatcatgtcgcatggtgcctttgcagttatctatggattgcacttgagatgctacataaaggatcctgaggttactcttggaagagagacagaagacattaaagttgacattgatttaggaaaagaagggagggcaaataagatatctcgccgacaggcggttatcaagatggatgaatctgggtattttcatattaagaacactggaaaatgtccaatctttgttaatagcaaggaaataccaagctgcaaacgcatcaacctaagctcagactcattaatcgagataaaggacatgaggtttattttccatgtaaaccaagaggctgtgaggcagtacattgatcgtgacctgaagccagaacgctaa

SEQ ID NO: 125621 - DNA, 934 bp, Zea Mays
ggccctcctccaaatgaaaaaggtcaaaaggccgaagacccacgcgattcgagtcataaacctagcacactactttcttttcttcacctcatcaggattcaggaccacccgccggcagcagatacgcccaacaaaaaccaaccacccaccaagccagcaagcacctctccaagcagacagacgggaagggagggcaaccgagagcgatcggcgatgggctccttcctctcgagcttagtcacgccccctccggccgccgacgaccccaactgcgccgtggtggccgcccactccaaggccacctacgacgagcagtgggcggcccacaagagcagcagcaagctgatggtgatcgacttctcggcctcctggtgcgggccctgccgcttcatcgagccggccttcaaggagctggcctcccgcttctccgacgccatcttcgtcaaggtcgacgtcgacgagctcgcggaggtcgcaaggacatggaaggtagaggcgatgccaacgttcgtacttgtaaaggatgggaaggaggtaagccgtgtggttggggccaagaaggacgagcttgagaggaagatccggatgttcacgtcatcttcctcatcgtaaactcctgtggttcgcctgggacggagttgctgaagtgaaatggttcccttctctgaatgctgaaaaaaagaaaaaaaaaactatgtgaaaatgatggtagacgtgtctgggtcagtaataagagtttctaaaatctgaatgagatttgaatcgctccccgttgatgaatttctcatggtctgtgtattccaccatgattcataaggtcattctcagtgatgagttttaatacactgtttctaatgctgccacatcaaatttaaactaaccagggaactgtatagacagagtttcatccctataaagtctatcattttctatg

SEQ ID NO: 125622 - DNA, 2060 bp, Zea Mays
ggccctcctccaaatgaaaaaggtcaaaaggccgaagacccacgcgattcgagtcataaacctagcacactactttcttttcttcacctcatcaggattcaggaccacccgccggcagcagatacgcccaacaaaaaccaaccacccaccaagccagcaagcacctctccaagcagacagacgggaagggagggcaaccgagagcgatcggcgatgggctccttcctctcgagcttagtcacgccccctccggccgccgacgaccccaactgcgccgtggtggccgcccactccaaggccacctacgacgagcagtgggcggcccacaagagcagcagcaagctgatggtgatcgacttctcggcctcctggtgcgggccctgccgcttcatcgagccggccttcaaggagctggcctcccgcttctccgacgccatcttcgtcaaggtcgacgtcgacgagctcgcggaggtcgcaaggacatggaaggtagaggcgatgccaacgttcgtacttgtaaaggatgggaaggagcgagcttcgtcccaccttcttattacagtatcacagacaggtggtcccattgtctttccaccccaccctcgtgttacttttcagaaaagggccccactcccagcggatagtcgagtcccctgtcccctccgaactccgatggcgcgaggtcgcgaacaggaacagcctcgttctgtccaagtccaactccaacgaggcaacgactcgtcagtggtcagtacactacaccgtaaccgtcgccggaatcgatcgacccaaagctccctttagagcccgagctctatccaacccacgaacgggatcccgatgcccgtggcggcctcggttctcgccgcagcggcggtctcgcccccgctgacgtggcggagatggactcctcttctcgccgcgtcacatccacaggcgaacccgcctcccgcactgcgcccgcgggcgcccgctcctcctctccgggcctcctccgttccccgcgattcctgcgccggagccgccgtccggaggacgccgtgtgcggcggcggcggcacttggtggatgtgtgaaggcggagtccacggagcgggaggcgctcgatcgggatgctctgaagcgggtggcgctactcgcgcttggctgctgcgctgcagccgccgcgctcggctgcggcgctgcagccgccgcgctcggctgcggcgcggcgcgggcagcggcggaggactccatcaaggcgtcaggattcgggctgcgggtggcggagtcgctgcggaggctcggatggcccgacgacaccgtcgtgttcgcgctcgcgacgctgccggtgatcgagctgcggggggcgatccccgttgggtattggctgcggctccatccagtccgcctcaccatcctatccgttcttgggaacatggtgcctgtaccattcatcatcctctacctgaagaaactcgcaacgtttctgtctcagaacagcgcgtccgcgactcgaattatggacctcctctttgagcgggcacggcgcaaggctgctcctgttgaggaattccagtggctcggcttgatgctgttcgttgccgttccattcccaggcacgggagcgtggacaggggccttcattgcatctgtactaggcatgccgttctggtcaggttttacagcaaatttcgtgggagtcgtccttgcagggctgctggtgaacttgctcatgaatcttggcctgaaatacgcgatcgtcactggagtagttttgttctttgtctcaaccgtcatgtggagtgttcttcgttcccttaagaagtccgttaatgtcaagtgatctagtagtctttatcaaactgttcctaatcccttcagagttcagccttgcgtaggaagcttagttgtgtaattttaagtggaactttcagcttccaagtggatttacaagagagagtaacactccatatctccagcgagctgagaattggccatgcttatttaagtcgcaagtaaaaatgtctttctcatccaataattgaatatgcgatattttagctattaggctatgccaat

SEQ ID NO: 125623 - DNA, 1460 bp, Zea Mays
tcccctccgaactccgatggcgcgaggtcgcgaacaggaacagcctcgttctgtccaagtccaactccaacgaggcaacgactcgtcagtggtcagtacactacaccgtaaccgtcgccggaatcgatcgacccaaagctccctttagagcccgagctctatccaacccacgaacgggatcccgatgcccgtggcggcctcggttctcgccgcagcggcggtctcgcccccgctgacgtggcggagatggactcctcttctcgccgcgtcacatccacaggcgaacccgcctcccgcactgcgcccgcgggcgcccgctcctcctctccgggcctcctccgttccccgcgattcctgcgccggagccgccgtccggaggacgccgtgtgcggcggcggcggcacttggtggatgtgtgaaggcggagtccacggagcgggaggcgctcgatcgggatgctctgaagcgggtggcgctactcgcgcttggctgctgcgctgcagccgccgcgctcggctgcggcgctgcagccgccgcgctcggctgcggcgcggcgcgggcagcggcggaggactccatcaaggcgtcaggattcgggctgcgggtggcggagtcgctgcggaggctcggatggcccgacgacaccgtcgtgttcgcgctcgcgacgctgccggtgatcgagctgcggggggcgatccccgttgggtattggctgcggctccatccagtccgcctcaccatcctatccgttcttgggttcgtattgtttaacaatcctcttcgtctatgctcttgtcttgtcgtccctttcggaacatggtgcctgtaccattcatcatcctctacctgaagaaactcgcaacgtttctgtctcagaacagcgcgtccgcgactcgaattatggacctcctctttgagcgggcacggcgcaaggctgctcctgttgaggaattccagtggctcggcttgatgctgttcgttgccgttccattcccaggcacgggagcgtggacaggggccttcattgcatctgtactaggcatgccgttctggtcaggttttacagcaaatttcgtgggagtcgtccttgcagggctgctggtgaacttgctcatgaatcttggcctgaaatacgcgatcgtcactggagtagttttgttctttgtctcaaccgtcatgtggagtgttcttcgttcccttaagaagtccgttaatgtcaagtgatctagtagtctttatcaaactgttcctaatcccttcagagttcagccttgcgtaggaagcttagttgtgtaattttaagtggaactttcagcttccaagtggatttacaagagagagtaacactccatatctccagcgagctgagaattggccatgcttatttaagtcgcaagtaaaaatgtctttctcatccaataattgaatatgcgatattttagctattaggctatgccaat

SEQ ID NO: 125624 - DNA, 95 bp, Zea Mays
cgtagtatactcgtattatatatttccgttgcaacgcacgggcattcagctagtgtacaatataattatgcataaatcaatgaattagtgagatt

SEQ ID NO: 125625 - DNA, 1094 bp, Zea Mays
atattgtgtcagggaattatatagtagctattcactaagaagtacatttgcagtacacaatgagaagaagcaacgcagtacataatgagaagaagcaacgaatatgaactgcagcatcagttagatgacagagggatggcccaaacactaccaagcactttaactagttgttgctgatgcatcgagctatctcatcatcgagccatgcactttgcctgttttagtgttttgtatgcgtactgattatgctgctcaaagcttacctcctgtttcgcttcagaatccatgtttagaactgacaggccctgcgcgtgctgtcatgatgtatggtcgtgtgatatttgaggcttcattgtatgtgaaaggtgctactagatctgatgacaaagaattgagccttctagctattacttcattggggaatttgtctgatgctcactcatccttgattgagtgttcttgcagtagcagacttagcacactggaactgatgcttggtaaaatcttacttactctgtggaagctacaattcacttgcgggacatggccagctgatggttttcgttgcatctttgtggccaatgctggcatagggacaatggattgtgttgcttgagactgcagatgatcgcgctggtgataagatcagccttgcacggcaggttgtttgtgttgactgtgatagagagctgaaggttgtggccagcattacgaatggttctgctacctatacagatgaaaagggcttcaaacctctgaaaatgggtgcaagctccaaggaacttgtatcggtggcttacgggacgtttggtttgaggaatcacttcatccaaaatatggtggtgcatcatgggtctattcctcaaatttggtggaatgaccccattcctcatattagtactaactaaataactataaggaatgaggtgatgatggatcaactcaatccattccacaaaccaaacaaaaaagtaaggagcgagaagacgatggactagatcattcctcaaaccaaacagcttattagggttggaagtcactgtttattggtcctgcttcccatttgcaccggtttagtttcgttgaaagtgctg

SEQ ID NO: 125626 - DNA, 362 bp, Zea Mays
caaacaaacacaggcagcggcaaccccacacgagagcacacaaaactgctaagggtcatcgttgtcaagcaaggatgcagagcatccagcaactcccaaagcagccgacagacgaaccaaacgaaaagcagacagacagcccgaagcgaaaggtctcaacaggtcatcgttgttgggctcaaggcacagagcagctccgacttccaatcttgaccctctgccctgcctccggtttttgctcgacctttgaaacattctggaccacgaagaaaagaggttcgcctcatgttatcgttgccgagccacatcccctgacatagcagctccgacttcacgttgcaaaaccccacctccaccggcat

SEQ ID NO: 125627 - DNA, 1277 bp, Zea Mays
cgaagaccgttggatgtggctggatcgagcggaccacattcaatgtggggggcgctgatgggggcaatccgagacgaggccgtatggaccaatcagcgcgaggcgttgggctctcctcgtctacgtgccgtcgccacaatttaagcacggcttcctccgccacgacctccacacatcaccagcgcacagctctcctcatcggcgcacccgagctcgccctctccttcctcatcgaggcccgagtcctgctctgatggcgaccgacgtggctgagactcccgcgccgttggtggatgcggcccctgaggcgcccgcggacaccccggcggcgcctgctgttgacgcgaagccggccaaggccaagaaggccacagcgccgaagaagcgcgccagcccgacccatccgccgtacgccgaggtaattggagccttccctttgacccttctgccgtgctgtgcgtgcctctccgccgcatctggatctgacggaattgtggatggtctgtgcgcagatggtctcggaggcgatcgcgtcgctcaaggagaggacggggtccagcagctttgctattgccaagttcttggaggacaagcacaaggacaagctcccgcccaacttccgcaagcttctgaacgttcagctcaagaagctcgtcgccggcggcaagctgaccaaggtgaagaactcgtacaagctgtcgtccgccaccaagccaaaggccgccccgaagaagaccaagaccggcgtgaagaagcccaaggccgctgccaaaccgaaggccaagtcccccgcgaagcccaagcccgccacaaagcccaaggcggccgcgaagcccgcttccaagccgaaagcagcagcaaaacccaaggcaccagccaagcccaaggccaagcctgctgccaaggcgaagcccaaggctgccggcgctaagccgaagccagctgccaagaaggccggccgccccgccaaggcggccaagacgtcggccaaggccacgccaggaaagaaggcgccggtggccaagaagcccgcggccgccgcgaagaaggcgccggtagccaagaaggccgctccggcgaagaaggcggctgcccctgcccgaaaagcgccgtctcggaaggcgaagaagtagaggaggggtaggcgtcggagaaatgtagggtttggttctcgtattacgctagatgtttgctctccctttagcctaggtggtgtctgtgtgtgcaatgttgtaaatttgatatcggatgctgggaacactaagtcaatctttcag

SEQ ID NO: 125628 - DNA, 1234 bp, Zea Mays
cgaagaccgttggatgtggctggatcgagcggaccacattcaatgtggggggcgctgatgggggcaatccgagacgaggccgtatggaccaatcagcgcgaggcgttgggctctcctcgtctacgtgccgtcgccacaatttaagcacggcttcctccgccacgacctccacacatcaccagcgcacagctctcctcatcggcgcacccgagctcgccctctccttcctcatcgaggcccgagtcctgctctgatggcgaccgacgtggctgagactcccgcgccgttggtggatgcggcccctgaggcgcccgcggacaccccggcggcgcctgctgttgacgcgaagccggccaaggccaagaaggccacagcgccgaagaagcgcgccagcccgacccatccgccgtacgccgagatggtctcggaggcgatcgcgtcgctcaaggagaggacggggtccagcagctttgctattgccaagttcttggaggacaagcacaaggacaagctcccgcccaacttccgcaagcttctgaacgttcagctcaagaagctcgtcgccggcggcaagctgaccaagccaaaggccgccccgaagaagaccaagaccggcgtgaagaagcccaaggccgctgccaaaccgaaggccaagtcccccgcgaagcccaagcccgccacaaagcccaaggcggccgcgaagcccgcttccaagccgaaagcagcagcaaaacccaaggcaccagccaagcccaaggccaagcctgctgccaaggcgaagcccaaggctgccggcgctaagccgaagccagctgccaagaaggccggccgccccgccaaggcggccaagacgtcggccaaggccacgccaggaaagaaggcgccggtggccaagaagcccgcggccgccgcgaagaaggcgccggtagccaagaaggccgctccggcgaagaaggcggctgcccctgcccgaaaagcgccgtctcggaaggcgaagaagtagaggaggggtaggcgtcggagaaatgtagggtttggttctcgtattacgctagatgtttgctctccctttagcctaggtggtgtctgtgtgtgcaatgttgtaaatttgatatcggatgctgggaacactaagtcaatctttcagtagctgttgtgaatggtcggtggcgaacgatgacgatggagtttttgttattttttctcgggagggttcatttccgtggatgatggt

SEQ ID NO: 125629 - DNA, 1763 bp, Zea Mays
cgaagaccgttggatgtggctggatcgagcggaccacattcaatgtggggggcgctgatgggggcaatccgagacgaggccgtatggaccaatcagcgcgaggcgttgggctctcctcgtctacgtgccgtcgccacaatttaagcacggcttcctccgccacgacctccacacatcaccagcgcacagctctcctcatcggcgcacccgagctcgccctctccttcctcatcgaggcccgagtcctgctctgatggcgaccgacgtggctgagactcccgcgccgttggtggatgcggcccctgaggcgcccgcggacaccccggcggcgcctgctgttgacgcgaagccggccaaggccaagaaggccacagcgccgaagaagcgcgccagcccgacccatccgccgtacgccgagatggtctcggaggcgatcgcgtcgctcaaggagaggacggggtccagcagctttgctattgccaagttcttggaggacaagcacaaggacaagctcccgcccaacttccgcaagcttctgaacgttcagctcaagaagctcgtcgccggcggcaagctgaccaaggtgaagaactcgtacaagctgtcgtccgccaccaagccaaaggccgccccgaagaagaccaagaccggcgtgaagaagcccaaggccgctgccaaaccgaaggccaagtcccccgcgaagcccaagcccgccacaaagcccaaggcggccgcgaagcccgcttccaagccgaaagcagcagcaaaacccaaggcaccagccaagcccaaggccaagcctgctgccaaggcgaagcccaaggctgccggcgctaagccgaagccagctgccaagaaggccggccgccccgccaaggcggccaagacgtcggccaaggccacgccaggaaagaaggcgccggtggccaagaagcccgcggccgccgcgaagaaggcgccggtagccaagaaggccgctccggcgaagaaggcggctgcccctgcccgaaaagcgccgtctcggaaggcgaagaagtagaggaggggtaggcgtcggagaaatgtagggtttggttctcgtattacgctagatgtttgctctccctttagcctaggtggtgtctgtgtgtgcaatgttgtaaatttgatatcggatgctgggaacactaagtcaatctttcagtagctgttgtgaatggtcggtggcgaacgatgacgatggagtttttgttattttttctcgggagggttcatttccgtggatgatggtggatctgttcctggttgaggtaaggcttatgtggtgataattttttttttgtaccgtgatatacctgctacaaagggcgtcgctatctgctatcttgagaatttgaccgcagatttgcccagaatttggttaagacaccaatgtagcagcgcgaagcctgaaacagtcgtaaatacagtatgatcggatgccatttaggtgctgtttgggaacaaagtttttctgcagttttggaagaatactgcagtattctcaaatactgcagtattatatacataatggtgttgggcaagctgggtaaaaactctgttttcaaaactgaatacataatggtgtttggcaagctgggtaaaaactctgttttcaaaactgaagtattgcaaatactatagttgttttaaggcattctaaacttagctctggacctcagttttcaaaactgcggtattataaactacgatattgtcataactaaagtataatatagtatttc

SEQ ID NO: 125630 - DNA, 631 bp, Zea Mays
ctgccaaggggtgcttttggccattgtaatatactacatatcattgaagttaaaaataccctatgcaacctctggtcgcgtatacatatttccaccacacaaatctggacctttttagccaatcaaaacaaaaggaacataatcatagattgtcgctcttacattacatcacgacgactaaaaccattagcattcttgtcagctcctatacacaagatatgcaagctgaaacacgaattggattgtataaactctgaccttgtcagcagcagcctgtagagtctcatggtcaccccattgactgtttctgttagtttatatacaagaaaaatgtcatgttagaacaagcatccacatgcacttattctaggttccattataaaaattgcttggcacggtgtggaactaaccatgcacttattctaggttccattataaaaatggacatactgaggaccacctttttcccgactataaaatcatgataaatttcaatgttactgttgtgttcatataatttcaccatggtatattacagctacacacatcttaatcctatccaccattccttttatttgataaaatatctttaggcattatgccttgagatttgcttggagggctaaccttg

SEQ ID NO: 125631 - DNA, 1339 bp, Zea Mays
ttttttttatggaagcttcaaaagacatgcctcttcattgtattagattagaaaaaaaggataatccacaagacccaacacacattggaaaagaaaacgaaaatacaaaaaacactatccactgatatatctaagatagactaaaagcttccaacttgatcattcaccagttacagaaacacaaccaccagtttatagtagtaataacacagtcctccatcgccactagcctcagctatcggtctcggatactgaatgaccagtgtacccgagcctctccgatatcaaatttacagcatcgcgccccccttcttggccgctttacttcttggccttacgggacggcgctttccgcaccggggtcgccgccttcttcgagggagcggccttcttggcaggggccttcttcgcggcagcagcggacttcttggccaccggcgccttcttccctggcgtgtccttggccgacgtcttcgccgccttggcggggcggccggctttcttagcaagtggcttcggcttagcgccggcggtcttgggcttcgccttggcagctggcttggccttgggcttggcgggtgtcttcggcttcactacggctttcggcttcgcggcgggcttgggctttgtggcgggcttcgccttggcgggggtcttagctttggtcttggcagcggccttgggcttcttagcgccggtcttgggcttcttcggggcggccttgggcttgggattcggcttggtggcggcggacgacagcttgtacgagttcttcaccttggtcagcttgccgccggcgacgagcttcttgagctgaacgttcagaagcttgcggaagttgggcgggagcttgtccttgtgcttgtcctccacgaacttggcaatcgcatagctgctggaccccgtcctctccttgagcgacgtgatcgcctccgagaccatctgcgcaccgaccatccactattcagtaagatccagacgcggcggagaggcacgcacagcacggcacggcagaaggatcaaagggagggcaccaattacctcggcgtacggcgggtgggtcgggctggcgcgcttcttcggcgcggtggccttcttggccttggccggcttcgcgtcggcagcaggcgccgccggggcgtcggcgggcgcctctggggccgcatccaccaacggcgcgggagtctcagccacgtcggtcgccatcaaagcaggactcggacctcgacgtggaaggagggagcgagctcgggtgtgccgatgggagagagaaggcgagagctgtgtgctggttatgtgtggaggtcggggcggaggaagccgtgcttaaatcgtggcg

SEQ ID NO: 125632 - DNA, 210 bp, Zea Mays
atggcgtggcggcctgaggcaaatggcggcatgaagaagaagaagctggagaaggagtcgtcgctggactgggagcttttcaatctcaggagacggccatgtcagatgtctggccaacatcctgcttctcccaaggtcattggccagtacaaggcaccagacctatccagtgtgggatcctgtggcacatcggatacctcgagggcttaa

SEQ ID NO: 125633 - DNA, 681 bp, Zea Mays
atgtcctcctccaccgcgtcgtggtcgcgctacggcgccctccccacctccccccctgcgccgcagctcaagccggaggacgtcgcggccgcgggcggcgatgcggcgccctcctcctcctcggcggcggcaacggcggcggaggccggggtcgccttcttctcccgcgcgcgagcgttcgccggggccgcggcgggccggccgcgcgcgtggcgtgaggtgctggacccgacggcgttctcgtgcccggacagctgcggggaggcccgcgcgcgggcgcgccgcaacctcgcctacttccgcgccaactacgcgctggccgcgctcgcgctcgtcttcctcggcctcgtctaccgccccgcgtccatgctcgcgttcctggcgctcttcgtcgcctggctcggcctctacttcggccgcggcggcggggagccgctcgtgtgcctccgccgcgaggtggacgaccgcgtcgtgctggccgcgctctcggccgccaccgtgctcgccgtcgcgctcacccgcgcggggctcaacctcctcgtctccctcgtcgtcgccgcggccgtcatcggcgcgcacgccgccttcagggtcaacctgtacctcgacgagagcgacgcgttcgatgtcgccggcgcctcgttcacggacaccgcatacggctacgcgctccctagctga

SEQ ID NO: 125634 - DNA, 669 bp, Zea Mays
cttgctttcatgtgctgatgtgttctacttttttcttcacttggtgtgctaatgttacatgtaccaaccttctgcagggaaccagcatccagtgcttcaggtagggcagcatctggcatgtcaagtgatgaaaagaaccagcgtcagagagatgctcgagttcttatgccgccaccacgctcattagccccaaatagaggcagacatgcagataaacgtgcgatatccagctcgagcagtacttcaaacagcacaagcggcgaatcatttaaaaatagaagagtaccaaatcgccccgcggataataacagtaatctgagctcaaattctgatgttcataaaccacggcgcaaaaggaggcataagaagaaaagaaagctggtataactttgcatccacaccataaacccttcttttgtgccactttttatggacatgtttcagaaaacataggatgaaccgtgtctgaaacttccgtgtatcctttttttttcaatcttcactatgggttccgagctcattcatcaccttatatggctacttctgcctaaactgtgaattgtttatccaattgtggtgccttggacactgctgtgaaatctatattttggtaaccatcaaatgaccaagctatcgaagtttatccattgggttttatagagatcataa

SEQ ID NO: 125635 - DNA, 726 bp, Zea Mays
cttgctttcatgtgctgatgtgttctacttttttcttcacttggtgtgctaatgttacatgtaccaaccttctgcagggaaccagcatccagtgcttcaggtagggcagcatctggcatgtcaagtgatgaaaagaaccagcgtcagagagatgctcgagttcttatgccgccaccacgctcattagccccaaatagaggcagacatgcagataaacgtgcgatatccagctcgagcagtacttcaaacagcacaagcggcgaatcatttaaaaatagaagagtaccaaatcgccccgcggataataacagtaatctgagctcaaattctgatgttcataaaccacggcgcaaaaggaggcataagaagaaaagaaagctgcaggcatgatgaatattcccaaagcgcgtgaactgtggggggtacggtggaaattcagattcccagcgaagtttggactttcagcatggccaatttggagaagttgaaaaaaaagaagacacagcatgtgcgatgtgtctgagcaagttgattgattctgtatcctcactcctaaatcctgatgtaaaacgactgtacatccatctgttcatggatatcacttgcggtggtcagatcttgccagtgtaccgaatgcgtgtccgtcatttccgccgtgaaattatgtatgcttttttcccccgatggtctccgatgattctgtagtacttgggaagcgcggaacag

SEQ ID NO: 125636 - DNA, 718 bp, Zea Mays
atgcatatgcatacaacaggtccttgcatcctcgttgcttggttatcttgcttcggaccccctcatgatcctgagcttcttgcaagaacagatgaacatctcccatggcacgtcgccggcgagcatgaggtcgccgtccttgtcctcgtaggcgacggcgaactggcatccgccgtcggccgaggaggagaagcagccgaagagcgcgtccagcgcgtccctcagctcacggtagccgccgtaggtccgcaggtccaccttccggaggtatggcgccccgtccatgctcaccttcacgtacaggcctcctcctccctgctgctcgccccgcctggtcctcctcgcctccgccgccgcgtggaacgcgttcttccggtacactctcaccggcggccaccccaccacctgcaccttggaggtcggtgcggcgtcgtcatggtcatggtcgtccgtcccggacgcctcgctctccaccaccgacgacgacggccgtttcgccgccgccaacgaaggctgcacgacgttgatgacgtctctgttgctgctgccgggcggacccagacgcagctctgcgtcgatcatctccatggccgtacgtcgcgcgcgccgatcgatcacagaagcaaaatgctcgccggccggacgacgaaaaagacgtaactcgcgccgagaatatagatgcacgatggatgaggcaagaagagaacagctagcgtga

SEQ ID NO: 125637 - DNA, 994 bp, Zea Mays
ccccatttttttatctccgcttccactgttccaccaaaccaagccgagaaatttctcctaaatttcagatcaaatcctcctcctcctccccctctccctctccgaggattctgcccagcagcgcggcgatccgcctcgatccggaatggagcgcgtcttctccatggaggagatccccaacccctactgggccccgccgcaccctcaaccggcggccggcggcgctgttgctgcaccaggtggagtaggaggagcgggggacgcggcgggcgcgatgaaccggtgcccatctgagtggtacttccagaagttcctcgaggaggccgtgctcgacagtccgggtcccgtcgccggcgtgggtagaagcagcggacaagctggagttgaggcggcggagagcaagccgctgggcgccgcggcgccggcgtccgtctcgagctcggtcgttgaccccgtcgagtacaacgcgatgctcaagcagaagctggagaaggacctcgctgccatcgctatgtggagggtacggccacttgcctttagctgcagctcacctgcaatactgtttgcttcgaatagtcagagctcgtagtagcttacttgtgttcttatgtgaccggtgtatgatgtacatgtactgtactgtactatactgctccgcgtagttttcttagagatttatagtggactggaggataagaaacagcgagcagtccagcacagtatctcgtattcctagccctttacaatgagatggcggtgcaagcgatcatgtgcttttaggactagcgaaatgtggaattcgtggagaacttgtgcatttatggcattaggttattgcagagatcctacatttttgttgtgagctgatgattactgtcatttcatgtgcgggtggtcaaattcaactgctgttggctcataggtgattgtacactatttgagtatgtgaatagtcagcttcatttgtctcctatccatttttgttgtttctgtg

SEQ ID NO: 125638 - DNA, 769 bp, Zea Mays
ccccatttttttatctccgcttccactgttccaccaaaccaagccgagaaatttctcctaaatttcagatcaaatcctcctcctcctccccctctccctctccgaggattctgcccagcagcgcggcgatccgcctcgatccggaatggagcgcgtcttctccatggaggagatccccaacccctactgggccccgccgcaccctcaaccggcggccggcggcgctgttgctgcaccaggtggagtaggaggagcgggggacgcggcgggcgcgatgaaccggtgcccatctgagtggtacttccagaagttcctcgaggaggccgtgctcgacagtccgggtcccgtcgccggcgtgggtagaagcagcggacaagctggagttgaggcggcggagagcaagccgctgggcgccgcggcgccggcgtccgtctcgagctcggtcgttgaccccgtcgagtacaacgcgatgctcaagcagaagctggagaaggacctcgctgccatcgctatgtggagggcttctggtgcagcacctccagatctttctgcgactgctgcttccttgccaagtgtcggtgctccgcatgcagctcctcttaaacccgtcggaggtgatcacccaatcatcattttgccgcgtcttcaaatttattatgaaacttggctcaaatgtgtgaatgaccttatgtctcttgtctcagtgctctatactcatgtaataggtattagatcttcggttcctctctgtccttgtaatcatcaggtt

SEQ ID NO: 125639 - DNA, 1692 bp, Zea Mays
ccccatttttttatctccgcttccactgttccaccaaaccaagccgagaaatttctcctaaatttcagatcaaatcctcctcctcctccccctctccctctccgaggattctgcccagcagcgcggcgatccgcctcgatccggaatggagcgcgtcttctccatggaggagatccccaacccctactgggccccgccgcaccctcaaccggcggccggcggcgctgttgctgcaccaggtggagtaggaggagcgggggacgcggcgggcgcgatgaaccggtgcccatctgagtggtacttccagaagttcctcgaggaggccgtgctcgacagtccgggtcccgtcgccggcgtgggtagaagcagcggacaagctggagttgaggcggcggagagcaagccgctgggcgccgcggcgccggcgtccgtctcgagctcggtcgttgaccccgtcgagtacaacgcgatgctcaagcagaagctggagaaggacctcgctgccatcgctatgtggagggcttctggtgcagcacctccagatctttctgcgactgctgcttccttgccaagtgtcggtgctccgcatgcagctcctcttaaacccgtcggaggtactgaaagtctagttcaaaacatgctagctggtgctccagtaggggggtcaggtccacatgtagtacaaattgctgatatccctgttaagcaaaccactagctcttcctcacgagagcagtcagatgatgatgacatggaaggcgatgctgagacaaatggaaatggaaaccctgttcaacaaagacaacagagaaggaagcaatccaaccgggaatcagccaggcgttcgagaagcagaaaggcggctcacttgaatgaactggaggcacaggtagcacaattaagagtcgaaaactcttcgctgctaaggcggcttgctgatgttaaccagaagttcaatgaagctgctgttgacaatagggtgctaaaggcagacgtcgaaaccttaagagcaaaggtgaagatggcagaggactcggtgaagcgggtaacaggcatgaacgcattgtaccctgccgtgtcggatatgtcttccctcagcatgccattcaatggctccccttctgactccgcctctgatagcaccgtcccggtacaagatgacctgaacagttacttcgccaacccaagcgaaatcggatgcaacaacggctacatgccagatatagcctcctcggttcaacaggacgacaattttgtcaacgggtatcaggctgctggcaagatgggcagaacagactcgctgcagcgggtggcaagcctggagcacctccagaaaagaatgtgcggaggcccggcttcatccggctcgacctcctaggtttcatatgaaaaagtccctggtgcctaacggcaagaatgctaaattaacaatttcaacatgctttgtactggacattgataatcctgcgatgcgcattagtgcgttatggacttgtgggtcaattgctatttggcgtgtgctggctgctcactgtagtgagcagaacaagttccagtttctatcgaagagcaccctctccttttcgctagtgacttatgaatggtcgatggtttattagcaacattgtgtctttcgcaagttcagtaatgaatggtcgacagggatgaaaataaatacttataaagagatct

SEQ ID NO: 125640 - DNA, 1557 bp, Zea Mays
atttctcctaaatttcagatcaaatcctcctcctcctccccctctccctctccgaggattctgcccagcagcgcggcgatccgcctcgatccggaatggagcgcgtcttctccatggaggagatccccaacccctactgggcgcgatgaaccggtgcccatctgagtggtacttccagaagttcctcgaggaggccgtgctcgacagtccgggtcccgtcgccggcgtgggtagaagcagcggacaagctggagttgaggcggcggagagcaagccgctgggcgccgcggcgccggcgtccgtctcgagctcggtcgttgaccccgtcgagtacaacgcgatgctcaagcagaagctggagaaggacctcgctgccatcgctatgtggagggcttctggtgcagcacctccagatctttctgcgactgctgcttccttgccaagtgtcggtgctccgcatgcagctcctcttaaacccgtcggaggtactgaaagtctagttcaaaacatgctagctggtgctccagtaggggggtcaggtccacatgtagtacaaattgctgatatccctgttaagcaaaccactagctcttcctcacgagagcagtcagatgatgatgacatggaaggcgatgctgagacaaatggaaatggaaaccctgttcaacaaagacaacagagaaggaagcaatccaaccgggaatcagccaggcgttcgagaagcagaaaggcggctcacttgaatgaactggaggcacaggtagcacaattaagagtcgaaaactcttcgctgctaaggcggcttgctgatgttaaccagaagttcaatgaagctgctgttgacaatagggtgctaaaggcagacgtcgaaaccttaagagcaaaggtgaagatggcagaggactcggtgaagcgggtaacaggcatgaacgcattgtaccctgccgtgtcggatatgtcttccctcagcatgccattcaatggctccccttctgactccgcctctgatagcaccgtcccggtacaagatgacctgaacagttacttcgccaacccaagcgaaatcggatgcaacaacggctacatgccagatatagcctcctcggttcaacaggacgacaattttgtcaacgggtatcaggctgctggcaagatgggcagaacagactcgctgcagcgggtggcaagcctggagcacctccagaaaagaatgtgcggaggcccggcttcatccggctcgacctcctaggtttcatatgaaaaagtccctggtgcctaacggcaagaatgctaaattaacaatttcaacatgctttgtactggacattgataatcctgcgatgcgcattagtgcgttatggacttgtgggtcaattgctatttggcgtgtgctggctgctcactgtagtgagcagaacaagttccagtttctatcgaagagcaccctctccttttcgctagtgacttatgaatggtcgatggtttattagcaacattgtgtctttcgcaagttcagtaatgaatggtcgacagggatgaaaataaatacttataaag

SEQ ID NO: 125641 - DNA, 1731 bp, Zea Mays
aggtcgatcactcgctgcgcgcctccacccttttccaccccgccgccgaagccaccgtgccgctagccttccccgccgccgcaaaatggccgcctccgcgcgacccctggttaccgtgagggccctggagggcgacatggccacggactccgccggtgttccgctggcggacgtcctccgcgcaccgatccgcccggacatcgttcgcttcgtccacaagctcctgtcctgcaacagccgccaaccctatgcggtgtcgcgtcgcgccggacaccagacctccgcggagtcctggggcacggggcgtgcggtatcccgtatcccccgcgttcctggcggtggtacccaccgcgccggccagggagcgttcggcaacatgtgtcgtggtggacgcatgttcgcgcccaccaagatctggcgccgctggcaccgtcgcgtcaacatacaccttcgccgtgtcgccatcgcctccgcactctccgccaccgccgttccgtcccttgttctcgcacgtggccaccgcgtggagtctgtgcccgagctcccgctggtcgtttcggactccgcggagtccattgagaagacagcccaggccatcaatatcctcaaacagctcggtgcctacgccgatgctgagaaggccaaggattctgttggcatccgccccggcaagggcaagatgcgcaaccgccgctacatcaatcgtaagggacccctcgttgtctacggcactgagggctctaaggtcgtcaaggcctttcgcaacctccctggcgttgatgttgccaatgtcgagcgcctcaacctgctcgatctcgcccctggtggccaccttggccggttcgtcatctggaccgagtgcgcattcaagaagctggatgaggtgtacggtaccttcaacgcaccatcagcgaagaagaagggtttcgtgctcccgaggcccaagatggcaaacgctgacctatccaggcttatcaactctgacgaggtgcaatctgtagtgaagcccatcaataaggatgtgaagcgtagggagcctaggaagaacccactgaagaatatggctgcagtgctcaagctgaacccgtacctcggtactgcacgcaagatggcagccctagccgaggcagcgcgtgtcaaggccaggaagcagaagcttgattccaagaggaccaagctcagcccagaggaggcttctaaggtcaaggctgctggaaaggcgtggtacaagaccatggtttcagacagcgactacacagagtttgagaacttcaccaagtggcttggtgttacacagtgattgtctggtccaacccttattgttttgccaattcagagattatgattttgatcgctgttgtcaaatatcctttgttattggtatattctgacattagttttggctttggtagtttttttttaccgctggatgtttacttccagacacctattacaccttttatggaaacgaagtatatcgattctcaacactcaccgtgcttctgtttttggcagtattggttactcgagtattcatgttcagttgtattagtgtatgcattttctttgtgcccttctgtttgttgggtatataatagtatatatgttcagttgtttgttccgtttctttgaagcatgtttcttcagttcttgccaggtggtaattctgattgcagtatatccactgtcccaaaatacgaggattttttacttttagatatcctgtttgac

SEQ ID NO: 125642 - DNA, 1464 bp, Zea Mays
aagaaaaggaagcaggggccaagaactcaagtaaagaacacccccgcctccacccaaaacacttgcaaggcgggcctgccccctcaatctccagcgtgcgcggcgtcccgatcgcttcgtaaccgcctgattgatccgcctgtcctccgaggctttcaccgcgcggctttaatcccgattgggttggctggaccgcaacccaattgggggttaattgggattgctactccgcggctgcctgtctctcgtgttcctggattggcgaggcgaatcgactggtttgctgcagcctcctgggtagaatcatgaagctgaaaaatagcgcagtggagacttttaaggagaacaatatgattttcacttctgaaggaaatctccactctaaaaaaatgagagaagattatgttgctagtccaaaccaaccgggtgttgtccagacaagatgcaaatggataattggagatgtaactgaggtctttgatcgcagcacatggaagcttggaaagatcttaaagatgctaaagaacaactactttgttatcaggcttgctgattgcatccagctcaaagagttccacatatctagtttgagaatcccacgtggtctggaagctcctcaaagcaagccctttcatgcagcagataaggccaccggacgcggtaatcgtcgacctgctgatggcgccttgcccggcgcaagggctgcggatcaaatgggtcaccgagcctacgagctggggagcagcggcaagaagcggaaagcaaccgcagacgcctctcaccatctgggcagagcagcagcagcagcacattcccggaatgtcgccgcagcctccaacccgaacggcggcagctacccgcacagctcttcacaggccatagaagacgccgaatgctcggttgccagctgcagcgtggacgacctttaccgcctcggcaatggcggcaacgccaagcgtcgccccgccgccgcagggtgcctccctgacgacgccatgtccgcgtgcacgggctggagctggaggcgtacgggtcgactatgcgggcgctgtacgcgtcgggcccgctgacgtgggagcaggaggcgctgctgacgaacctgcgcctgtcgctcaacatctccaacgaggagcatctgctccagctcaggcgcctactgtcctcgtgattattggcacttggcattggcgcattgccagccaccgcccttctggccttctctttcgtacgtctccagcgtcgtcgtcggccaacggccatgcacgtcggcttggctcgccgaacgccgcgttcagcgagcctcttgcttttactcttgttgctaattgctattacatggttctctgtctagtctaggtagaaagaatcctatgttcataccagtgtcgagacatgtcatgccttttgtatcctggatatagtcttgcttgtaaatgcaaacaagttttcctttgagggaccata

SEQ ID NO: 125643 - DNA, 1455 bp, Zea Mays
ccttccttttttttcttcttcatctgacctgaactgctgtcccagccaggctttcaccgcgcggctttaatcccgattgggttggctggaccgcaacccaattgggggttaattgggattgctactccgcggctgcctgtctctcgtgttcctggattggcgaggcgaatcgactggtttgctgcagcctcctgggtagaatcatgaagctgaaaaatagcgcagtggagacttttaaggagaacaatatgattttcacttctgaaggaaatctccactctaaaaaaatgagagaagattatgttgctagtccaaaccaaccgggtgttgtccagacaagatgcaaatggataattggagatgtaactgaggtctttgatcgcagcacatggaagcttggaaagatcttaaagatgctaaagaacaactactttgttatcaggcttgctgattgcatccagctcaaagagttccacatatctagtttgagaatcccacgtggtctggaagctcctcaaagcaagccctttcatgcagcagataaggccaccggacgcggtaatcgtcgacctgctgatggcgccttgcccggcgcaagggctgcggatcaaatgggtcaccgagcctacgagctggggagcagcggcaagaagcggaaagcaaccgcagacgcctctcaccatctgggcagagcagcagcagcagcacattcccggaatgtcgccgcagcctccaacccgaacggcggcagctacccgcacagctcttcacaggccatagaagacgccgaatgctcggttgccagctgcagcgtggacgacctttaccgcctcggcaatggcggcaacgccaagcgtcgccccgccgccgcagggtgcctccctgacgacgccatgtccgcgtgcccgtgcacgcccggggcgagggacggggaggacgaggacgcggcgggcgtgcacgggctggagctggaggcgtacgggtcgactatgcgggcgctgtacgcgtcgggcccgctgacgtgggagcaggaggcgctgctgacgaacctgcgcctgtcgctcaacatctccaacgaggagcatctgctccagctcaggcgcctactgtcctcgtgattattggcacttggcattggcgcattgccagccaccgcccttctggccttctctttcgtacgtctccagcgtcgtcgtcggccaacggccatgcacgtcggcttggctcgccgaacgccgcgttcagcgagcctcttgcttttactcttgttgctaattgctattacatggttctctgtctagtctaggtagaaagaatcctatgttcataccagtgtcgagacatgtcatgccttttgtatcctggatatagtcttgcttgtaaatgcaaacaagttttcctttgagggaccatatttacaagtttttcttcgaaattaaatgaattttctaaatg

SEQ ID NO: 125644 - DNA, 1056 bp, Zea Mays
accacaacggtacaacccgctctataaatcatgcgctttgtcttgcttctcgttgtacacaatctccatctctcctcctcacccatccactccactctcttcctagctaggtctagtaaatcgccatgttctatgtttctatatctgtttccttccacagacatttggttctcatgatgccatttccttgcgtctccctcgagtttgcagatctcagtttggtagcttcttctattccactggccatcacttgctttgatttcttccgtttcttataggttgtacaaccttctgttctttggatctgagattgaataatcacccatctacacctagtcatggtattttatgcaacatgttctagctagcctggaactgcctgcccaagggaacgagtgaagctgccagcatgatctagctcggagtgatcacgcgaggagaacaatagctcgaggtggtcatgccttgctagatcatgctgtggcagcctcacttcttcccgtccttgggcatagcacggtggtggtggccgtgttcgtctggtaaagcaggtagtatatatgtaccaacagttgctgcatcctaccttctaaagtttatttctctacatctcttgggagtagagtggtagtgacattctgatctgggtgcacctgtttgttcttgattctgattgatagattcacagctcgttcggtttattatgctagttaattggttgctgctgcatgctgtttgctctctgaatgatagtttcgtagcttaaatgatcaagattgatgtatgtatgtgcatgtatttcgcttttaatcaaatctgtaagtggccattctattttcttgctggctttgattcctcgtagcaaggacaaccctggcgaatgcaagtttctgctgcttattgcttgttcttggttcaactttgtgatccatagctatccgcgctcgtggtcctcgatgtgatgcttcattcattatagatcacggataaggccaatcatttgcttgtggtcctcggagcagaaaactgatctactatggtgtgtgtgtgtggtat

SEQ ID NO: 125645 - DNA, 502 bp, Zea Mays
gtgtttagaaaaagaaactgccgtggaaactagttttctttttttttttctttgctgcgagtgcgaagaacccacattatgcccctttgcatatctagccatatctgctactcatgtttggagtcctcggcaggaatactcgcaccgaccaccaacagaaagaaatactctcatatctaccgtttgtttatttgatttgatcaactttatgatgtagatattatcatgagaacgcggccttgatgttgttcacatatatatgtggttgccatgatcgcatggtggatatcctagctaatttcttcttcaaagccgtctctaaagtttgtcctttcatggtcgaataatgtttcgcagcaatcttaacacattactgattatttctcaggcgaggtgaactaattaagtggctgagctagagcatgttgtacttgcataatagagtccagatatgttgtgaacaaagtagatattcatgttagcaaaaaaataaaaaaaggtg

SEQ ID NO: 125646 - DNA, 1433 bp, Zea Mays
atcgcgaaggtcgtttggtcccttgcccatccaatccgagcattcccagtgcgcgaaccaactgttcgtttgcttttcagtcttcgtcctctcttttgcggcccagggccagttgtcgcccgcccgcgtcgtcgtctccgccggccggtcggcctcccaaaccctagcgagccgagcgagagagaaactagacgccatgttcgggtacaggaaggcggacccggacctcgaggccggcgggtcctcgctgctgtacccggggatgacggagagtcccgaactgcggtgggcgttcgtccgcaagatctacgtcatcctcacggtccagctcgccatgacggcagccgtctcggccttcgtcgtcaaggtgcccgccgtctccaattttttcgtctcctccaacgccgggatcgcgctctacatcttcctcatcgtcctgcccttcatcgtgctgtgccctctgcactactaccaccagaagcatccgatcaatctgctgctgctcggcctcttcaccgtcgccatcagcttcgccgtcggcatgacatgcgctttcactagcggaaaaatcattttggaggctgccattcttacagcggtggtggtgaacagcttaactgcttacactttctgggctgcgaagaggggccatgacttcaactttctcggccccttcctaattgctgctatcatggtgctcatggtgttttcactaatccagatctttttcccactgggcaagatctctgtgatgatatatggtggattggcatctcttatcttctgtggctatatcatctatgacacagacaatatcatcaagcgccacacatatgatcaatacatatgggcagctgtttcactctacctcgacgtcatcaacttgttcctgtctctgctgcagctgctgagggcagccgatagctgagctcattaatggagtgtttggtttgaggaatgatatagtccatcatcttctcactcacttttttgtttggtttgtggaatgaagtgagttaatccatcaccacctcattctcatagttagttgtttagtattaatatgtggaatagagtcatcccactaaatttgatgaatggacccatgatgcaccccttcattttggataaagtgattcattaaaccaaacacttcataagtttttacttcgatcttattcacacgtacatatctcacagactaatgatcatggatactccaatttatagttaggctccaatttataattagattctgtcagtgcgaccttagtttaaatgtcatgtgtcgcttagccgagaagatcagttttgtgtatggaactgcaagagtccacgactgtttaccagctttcgaccagacgaaatgtacctgtacttctacgcacgatcccagtaaagcactgcgtttaatctgatttgtcctattttat

SEQ ID NO: 125647 - DNA, 1547 bp, Zea Mays
ggtcaacaatgatccaagcacaataaacaaagatagaggctgtacatatataccaaatcgaacacacggcaacggcacacaccggacacgaatcgctagtagacacagcgcacagcggcaagcaagaaaccaaacattccagtgcccttaccgttgcatgcagccatgacgaggatgagcttggcggtgtcggcgacgttctttgtgctcgcggtcgcctcggcggcgcagccggcgccgagcatgcccccgccggcggtggccgtgaacagctcccggctggagaaggcgtacgtggcgctgcaggcgctgaggcgcgccatcacggacgaccccaagaagctgacggagaactggtgcgggcccgacgtgtgcaactacttcggcgtgtactgcgcgccggcgcccgacgacccctgccagcgcaccgtggcctccgtggacctcaaccacggcgacctcgccgggacgctccccgaggagctgggcctgctgtccgacctcgccgtcttccacctcaactccaaccgcttctgcggctccctccccgagtcgctccggtccctgcacctcctccacgagatcgatgtcagcaacaacaggctgtccgggcccttcccgtcgcagctcctctgcctccccagtgtccagtacgtcgacatcaggtttaacaacttctgcggcgaggtgccggcggccatcttcgacaagaagatcgacgcgcttttcatcaacaacaaccacttcgagttcacgctgccggccagcttcaccaactcgacggcgtcggtgatcgtgctggcgaaccttccgcgggtgagcggctgcctgccgagcagcatcggcgacatggccggcacgctcaacgagctcatcctcctcaacagcggcatctcctcctgcatcccgccggagatcggcaagctggacaagctcaccgtgctcgacctcagcttcaacagcatcgccggcgcgctgccggacacgatcggcggcatgcgggcgctggagcagctggacgtcgcgcacaaccggctcaccggcgagatccccgagagcatctgcgagctgccgcacctcaagaacttcacctactcgtacaacttcttctgcggcgagccacgccggtgcctcgaggtgccgcgcgtcgacgaccggcagaactgcatcgctggccgccccgaccagcggccaggcgaggagtgcgtctcattcctacaccaaccgcaagtccactgcgacgcccacgggtgcatcgcgccaccacctccagcggtgcatgctcctccgccgcctgtatactgaattactgatcagtggtaacttgtaaatgtttcctgctcctgcctcgtggtgtgaaaacttggagggtaaacgcatacacatggtatatactgtaatttttattcatcagcagaagagagtaataatggattcatagatttacattacgaaaatgcttcgctattctgaaaaggaaggaaaatttgctgctgcacgactcaactgaaagtttggtgaaagagacgtatcaatgtatttcatta

SEQ ID NO: 125648 - DNA, 1146 bp, Zea Mays
ggttcctgtttcctcctttctctctcgcaattcgcacacagcctcctcttctgctccttgtctccctgtcaagctagtagaccagtagtagtacagctcctcagccctcagtgcaagattcaacctgctacagttctccttgcttccgcagttatcctgcacagaggttcgttgttcctgttgttggcaggccctattgtggttgctttccgtaaacagcacctcgatctgctcctcgggcagtcgccagattcgattgatgcggggcgctcttggagccaggggctgtaattttgtcaacagcttcccgtactcccccattcccgactttgatgaggctctcccattgtgagagccactgcgccggccccttccgcttcatcccctgcctcctcccatccaaagatgccagccgcgacgctgcctccgcgccggcgccgcgcccggccgccgtcgccgaggaggagccgcctccggttcagaagatagaggtgccggaagccggaaaggacggcgacgctgagaagcacgaggatgacgagaaggcgacggcgccggctaagagttgcctgaagagaaccagctgcggcgatgacaggtgtgccgacaaaggcaatgtaaagtggctggatttgctggggaaagatctgacagagattaaggagtacgagccaagcgaatgcggagacctgcttgacgacggagacggcatctcgacatgtgtttgcgttatccaatgagtcaaagaagaatcccgctaattctggtgacggggaaagaagggtggttcgcatcggccatgatgcgttctttccggtcgatggccagggtgtcttgttgctaacctccatgagctccgtcgaagatgcccaattagctgttgtgttgtgtgtaaaccagtctcatcagtacatgccactgtatatgcttcgtagcttagccgtaggtttgtatcagtttatcaggtctatgtgcatcggttactgggtagcatagacaggatgtaacctttttgtaaagcttttatactaggggagaaaaatggcttagttcaatcgcatctcgaggtataaattggatatatgacatcttttgtggagaatgtcactctgtcagtgacacaccgtgtggtaatttccagaactt

SEQ ID NO: 125649 - DNA, 937 bp, Zea Mays
agggtttcactcttcatatataaaccagtccacaactccccccctaaaacttagccgcgtggacgcacaccagcacctgccctcctcgccgtcgccgcctccctccgcgcgaccgatctaccctccgccgccaccatgtcgctgatcgccggggaggacttccagcatatcctgcgtttgctgaacaccaacgtggatgggaagcagaagatcatgttcgccatgacctcaatcaagggtgtcgggcgccgcttctccaacatcgtctgcaagaaggccgacatcgacatgaacaagagggccggcgagctgacgcctgatgagctggagcgcctgatgacggtcgtggccaaccctaggcagttcaaggtgccggactggttcctcaacaggaagaaggattacaaggacggcaggttctcgcaggtcgtctccaacgcccttgatatgaagctcagggacgaccttgagaggctcaagaagatcaggaaccaccgtggtctgcgtcactactggggcctccgcgtccgtggccagcacaccaagactactggtaggcgtggaaagaccgttggtgtctccaagaagcgatgagctctatatcaccctgagaaatcttggccgcactaccgtgttggtttgtgtccaaacagtcctgatgaagggtttctgtttaggcagtttcctgaaatggtgttttgctctaggacaatctcgcggttattgaaccttaatatatcgtgtccctgggttgtgtttttttgacactttataagtaatttcatttggatgagacttaattctggtttgactcgttacattgttaactcgactccgagaggagtgccttcccagtgcagttcattcacattgcctgttgtggaggataaggttcattttcatcgtttcacgtttgcggtattttgcgttaaattac

SEQ ID NO: 125650 - DNA, 1953 bp, Zea Mays
agggtttcactcttcatatataaaccagtccacaactccccccctaaaacttagccgcgtggacgcacaccagcacctgccctcctcgccgtcgccgcctccctccgcgcgaccgatctaccctccgccgccaccatgtcgctgatcgccggggaggacttccagcatatcctgcgtttgctgaacaccaacgtggatgggaagcagaagatcatgttcgccatgacctcaatcaagggtgtcgggcgccgcttctccaacatcgtctgcaagaaggccgacatcgacatgaacaagaggcaagcgtcgcgctttagctccaaggatattatcagatctctctggtgacgatgtggctgatatgttgtgatgtttcggtgagtgtgcagggccggcgagctgacgcctgatgagctggagcgcctgatgacggtcgtggccaaccctaggcagttcaaggtgccggactggttcctcaacaggaagaaggattacaaggacggcaggttctcgcaggtcgtctccaacgcccttgatatgaagctcagggacgaccttgagaggctcaagaagatcaggtttttttcgcgttcctgtattgccagatgctatggataacatcactacattatttgttgagaaattatgcatttagatgatattcgtgcacttgtcattttatatgtagcctctactaactaaagcaacatgtcatacctgtctattgcacctatattagcagtttagcaccgtgttatactagtctgaatctgaattgatgattttgtttgtgttggtgacagctagtcgtattagtttatgaagtctcggaatagacacctagtggcatttaattatgatagcaaatactgtttggcatctttcttgaatgtcagtttgggactttgggtacctctagctggtcatgtttgggcttttggttacctgcaccgatgtgatatgttgcatccatttacatacacaagcaactatgcacgctggtggtgaggtgtattgaactgtccttgattattgaggcctagtgtacgttgtgcagttgtttgtccagcctatggtgggttgtctacatctccatgaaatgagatggagagctgatggataaaggataatgttggttggacatatggtcataattacataagtttgattaggctcacagagtcacagtgatttgaactaccgtgacttgattgacatatcttcgggtatgtgattcccaaagtagccattgtgtagctgacttgcaactgcagataatcttctcagtcctgattcccgagtgtttggtttctctctgtcccattcgaaaatagttatagaatagttatctcaagacatgtgaaaaatcagtgtcagcatacttgttctataattgtccaactggtccattgtgcactgtctacactctacattcttgcatcgagaatacatgatcttattatcgtagtagcccagaccttcagatttttaatttgttctgcaggaaccaccgtggtctgcgtcactactggggcctccgcgtccgtggccagcacaccaagactactggtaggcgtggaaagaccgttggtgtctccaagaagcgatgagctctatatcaccctgagaaatcttggccgcactaccgtgttggtttgtgtccaaacagtcctgatgaagggtttctgtttaggcagtttcctgaaatggtgttttgctctaggacaatctcgcggttattgaaccttaatatatcgtgtccctgggttgtgtttttttgacactttataagtaatttcatttggatgagacttaattctggtttgactcgttacattgttaactcgactccgagaggagtgccttcccagtgcagttcattcacattgcctgttgtggaggataaggttcattttcatcgtttcacgtttgcggtattttgcgttaaattac

SEQ ID NO: 125651 - DNA, 1345 bp, Zea Mays
agatatttttatagtttcctgactccgtgacgtctgtggccgcagtcgctgatcgccggggaggacttccagcatatcctgcgtttgctgaacaccaacgtggatgggaagcagaagatcatgttcgccatgacctcaatcaagggtgtcgggcgccgcttctccaacatcgtctgcaagaaggccgacatcgacatgaacaagagggccggcgagctgacgcctgatgagctggagcgcctgatgacggtcgtggccaaccctaggcagttcaaggtgccggactggttcctcaacaggaagaaggattacaaggacggcaggttctcgcaggtcgtctccaacgcccttgatatgaagctcagggacgaccttgagaggctcaagaagatcaggaaccaccgtggtctgcgtcactactggggcctccgcgtccgtggccagcacaccaagactactggtaggcgtggaaagaccgttggtgtctccaagaagcgatgagctctatatcaccctgagaaatcttggccgcactaccgtgttggtttgtgtccaaacagtcctgatgaagggtttctgtttaggcagtttcctgaaatggtgttttgctctaggacaatctcgcggttattgaaccttaatatatcgtgtccctgggttgtgtttttttgacactttataagtaatttcatttggatgagacttaattctggtttgactcgttacattgttaactcgactccgagaggagtgccttcccagtgcagttcattcacattgcctgttgtggaggataaggttcattttcatcgtttcacgtttgcggtattttgcgttaaattacacctgtgttgtacaagtttggttcagtgaagctgctgatttatttgctttgctcggtgttgtgaaacctcctcgcattaacctatagtattgcaacgccataacctatagtattgattgatttacactatgggcaaagctgtatgaaacatcctcgcgtctgactacaggaaaggcagtatggaacatgcagttgtgcttgcggattttgatcatgaaaacttggacctctctgcacgccagtagctcaagcatgcaggaatgcaattcatcgacaagttttcgattttcacccgtgtctttaaccgaaaccagcgttagacgcgagcatgcctctgatttccactcctcgctgtccatgggctgctttgaaatttgtatgctgtaaattataaatcttctccatgtgagaagctgaaatatgtatgcagtaaattcaaaatcaatcaaacagttgtgtagtcggtgcggatgttggagtccggccgattgcccgttggtg

SEQ ID NO: 125652 - DNA, 855 bp, Zea Mays
aacacagctcaagcacacaaatccaaagaacacaaaccggcggcaattcagcttcctgatccaagacctcatcagggacagagaggcctctcgcgttcgttaccgaggtgaggtgaggagagaaatggcggcgggagcaggagcaggagcgtcggcgcccgtggcgtggctcctggcggctgccgtggcggcggcggcgctggcggcctcggcgtcggcgcagtccgggtgcacgaccacgctcatcagcctgtacccgtgcctcaactacatcagcggcaacgtgtcgacgccgccgccgtcgtgctgctcgcagctcgccagcgtcgtgcagaccagcccgcagtgcctgtgcgccgcgctcagcagcgactcgtcgtccctcggtggcgtcaccatcgacaggacgcgcgcgctgcaggctgcagctgccccaggcgtgcagcgtcaagaccccgccggcgagcaagtgcaactctgttggtggcggcagcgctccgggcgccgcgacgccggccgcgccgtcgtccggcgtgccacttgtttcttacgtgacgggggcactggtgcaggaactggcagtggatcgaaggcgacgccgacggcgccgttcctaacgtccggcggcgcgtcagtccggggcgcggtgagcctggcgctagcattcgcggctgtcaccgtctatgccatatcggccatgtgacagacttggctcgtctatctctgttacccacggcgtttggggattcagacgtgacacgttcaggatttaatttggcgtagaggatttggcgtcgcgtttgtactattgcttgtaattggttgtcagagtaaagaacattgtttgtttgtttc

SEQ ID NO: 125653 - DNA, 1085 bp, Zea Mays
aacacagctcaagcacacaaatccaaagaacacaaaccggcggcaattcagcttcctgatccaagacctcatcagggacagagaggcctctcgcgttcgttaccgaggtgaggtgaggagagaaatggcggcgggagcaggagcaggagcgtcggcgcccgtggcgtggctcctggcggctgccgtggcggcggcggcgctggcggcctcggcgtcggcgcagtccgggtgcacgaccacgctcatcagcctgtacccgtgcctcaactacatcagcggcaacgtgtcgacgccgccgccgtcgtgctgctcgcagctcgccagcgtcgtgcagaccagcccgcagtgcctgtgcgccgcgctcagcagcgactcgtcgtccctcggtggcgtcaccatcgacaggacgcgcgcgctgcaggctgcagctgccccaggcgtgcagcgtcaagaccccgccggcgagcaagtgcaactgtgagtgtgctcctctgctcctgctcctccacccgacccaatccaatccctcccactcccaccggtgcagcgcagagctgctggcgctgccgactgccgagcaacatgattcactgttgaaccgtgctgactagctgaccgcgtccgttgcttcttggcagctgttggtggcggcagcgctccgggcgccgcgacgccggccgcgccgtcgtccggcgtgccagcgaccgcagccgcaggtaaggcgccaaacaaccgttattgctcaccggctcagctgtccacggctagcttgtttcttacgtgacgggggcactggtgcaggaactggcagtggatcgaaggcgacgccgacggcgccgttcctaacgtccggcggcgcgtcagtccggggcgcggtgagcctggcgctagcattcgcggctgtcaccgtctatgccatatcggccatgtgacagacttggctcgtctatctctgttacccacggcgtttggggattcagacgtgacacgttcaggatttaatttggcgtagaggatttggcgtcgcgtttgtactattgcttgtaattggttgtcagagtaaagaacattgtttgtttgtttct

SEQ ID NO: 125654 - DNA, 935 bp, Zea Mays
aacacagctcaagcacacaaatccaaagaacacaaaccggcggcaattcagcttcctgatccaagacctcatcagggacagagaggcctctcgcgttcgttaccgaggtgaggtgaggagagaaatggcggcgggagcaggagcaggagcgtcggcgcccgtggcgtggctcctggcggctgccgtggcggcggcggcgctggcggcctcggcgtcggcgcagtccgggtgcacgaccacgctcatcagcctgtacccgtgcctcaactacatcagcggcaacgtgtcgacgccgccgccgtcgtgctgctcgcagctcgccagcgtcgtgcagaccagcccgcagtgcctgtgcgccgcgctcagcagcgactcgtcgtccctcggtggcgtcaccatcgacaggacgcgcgcgctgcaggctgcagctgccccaggcgtgcagcgtcaagaccccgccggcgagcaagtgcaactctgttggtggcggcagcgctccgggcgccgcgacgccggccgcgccgtcgtccggcgtgccagcgaccgcagccgcaggaactggcagtggatcgaaggcgacgccgacggcgccgttcctaacgtccggcggcgcgtcagtccggggcgcggtgagcctggcgctagcattcgcggctgtcaccgtctatgccatatcggccatgtgacagacttggctcgtctatctctgttacccacggcgtttggggattcagacgtgacacgttcaggatttaatttggcgtagaggatttggcgtcgcgtttgtactattgcttgtaattggttgtcagagtaaagaacattgtttgtttgtttctacaagatgttcgtaaatttgtccgctaatccattgtttgcaaaatgttatgggcattaaacccaaaaatatatccatttttaaacttctttgattc

SEQ ID NO: 125655 - DNA, 329 bp, Zea Mays
ttcaagcatcattccagccttttaccgattcacaatgattttacacctcatgctgatacactccaaaatctcattctaaaaagatttcccaaatgcaaagggagaaacaaagaaagaaaaaatatgtatgtttactaactctcctaaaaaaagagaaccaaattggggacgagaagggttttttttttctgagctgtgtggttaatgacatgtacagatgcgggccgatccttgtttcaacacggctgtccaaaaggcaaacggttagttgcaaaactgcccggctatcctgcaatgcaaaagcaggtcaaccagcaaaggacacgttc

SEQ ID NO: 125656 - DNA, 2083 bp, Zea Mays
aaatccagcaccctgcaccctcttcctccatcgcaccctatcctcctcctccccggtccggcggtccccaccggtccaccacggcaccaccgtctccccgccccccgcgtccgatcaccgcaccggcgaactcggcgagccgctcgtcgctgcacgctaagctgggaatggccgctgcgctcgccagctcaccgcttgttcacctatccacctcccgcctccgcctccccaggccccgggcctcctccagttccgctccaggctgctcgatcggcgtgtgcttgggatggaggctgaaggtcgggtggagggctctgaggcggtgcgaccggcttcgatgcttctccaccgacggcgacggcgtggaggagggggagaagcgtggcgaggaggaggcctcggcgacggcggccccggccccggacccagccccagcggagacacaggtgggcgctgcggaggagctggcgtctgagcggagccgatcagggagcttttcgtcctcatcctcgtccgggaatcctggtgtatcaagcgagccaccactgttgagttttagtgttgataatatcgatacagttaaactattggaacttctaggcccggaaaaggttgacccagttgatgtcatggcaattaaggaaaaactctttggttatacgacattctggttgacaaaagaagagccttttggtgatctcggtgaaggagtccttttcattgggaatctccgtgggaagagggaggaaatctttgcaaaacttcaaaggcaactacgcgaacttgctggtgaaaaatacaatctttttatggtggaggaacccaattcagaaggggatgacccacgtgggggaccacgtgttagttttggtttgcttaggaaggaagtttctgagcctggacctactaccctatggcagtatgtcatttctctgtcacttttccttctcactatgttctcctgtgttgagctaggaattgcatcaaagattagcagtcttccaccagaaattgtttcatatttcactgatccaaattctactggaccccctcctgatatgcaacttctgctcccatttgtggaatcggctttgccagtggcttacggtgtcttggctatccaattatttcatgaaattggacactttttggcagcatttccaaaaaatgtgaaactaggcattcctttctttattccgaacttcacccttggaacttttggtgcaattactcagttcaagtccattcttccggatcgaaagacaatgtttgacatatcaatggctggtcctgtggctggagctgcactttccttttcaatgttctttgtaggcttattactctcttcaaatcctgttggggcaagtgatttagtagaagtacctagccagctgttccagggttcattattgcttggactcattagtagagcaacacttggatacagagctatgcatgctgctacagtttcgatccaccctctagtgattgcaggctggtgtggtttaactactactgcatttaatatgcttcctgttggatgtcttgatggtggaagagcattacagggtgcttttggcaaggatgctttgtttggatttggcctcacaacatactcgttgcttggactaggagtgcttggaggaccactgtctcttccttggggtttgtacgtgctaatttgccagagaacaccggagaaaccatgcttgaacgacgtaagcgatattggaggttggaggaggacggccttgatagcttcagtgtttcttgttgttttgactctcatcccgttgtgggatgaactcgcggaggaactaggtgtagggcttgttacttcgttctgagatacggtccttaccgatagaattaggccgtgatgtagctcaattttgtattgaaatgtagcgtcccatagcgggactgctgtaaaggcatgtgcagtttcctgattaggtgagcaatgatatcacctatgcgagtgtcatgaaattgtgccaagacgctgacgattattatcaattacatacatgtacgcacattttgaccatacgagtacagatacacacaacctacccttcta

SEQ ID NO: 125657 - DNA, 1254 bp, Zea Mays
ccagcaccctgcaccctcttcctccatcgcaccctatcctcctcctccccggtccggcggtccccaccggtccaccacggcaccaccgtctccccgccccccgcgtccgatcaccgcaccggcgaactcggcgagccgctcgtcgctgcacgctaagctgggaatggccgctgcgctcgccagctcaccgcttgttcacctatccacctcccgcctccgcctccccaggccccgggcctcctccagttccgctccaggctgctcgatcggcgtgtgcttgggatggaggctgaaggtcgggtggagggctctgaggcggtgcgaccggcttcgatgcttctccaccgacggcgacggcgtggaggagggggagaagcgtggcgaggaggaggcctcggcgacggcggccccggccccggacccagccccagcggagacacaggtgggcgctgcggaggagctggcgtctgagcggagccgatcagggagcttttcgtcctcatcctcgtccgggaatcctggtgtatcaagcgagccaccactgttgagttttagtgttgataatatcgatacagttaaactattggaacttctaggcccggaaaaggttgacccagttgatgtcatggcaattaaggaaaaactctttggttatacgacattctggttgacaaaagaagagccttttggtgatctcggtgaaggagtccttttcattgggaatctccgtgggaagagggaggaaatctttgcaaaacttcaaaggcaactacgcgaacttgctggtgaaaaatacaatctttttatggtggaggaacccaattcagaaggggatgacccacgtgggggaccacgtgttagttttggtttgcttaggaaggaagtttctgagcctggacctactaccctatggcagtatgtcatttctctgtcacttttccttctcactatgttctcctgtgttgagctaggaattgcatcaaagattagcagtcttccaccagaaattgtttcatatttcactgatccaaattctactggaccccctcctgatatgcaacttctgctcccatttgtggaatcggctttgccagtggcttacggtgtcttggctatccaattatttcatgtaattagtaccgtaattatgttgaacatctctttatccattagtttctgttcgtttcttagttccttttaacatgtaaagaagctatgtgaacagcatacaaccattcaatcagtttcaatgct

SEQ ID NO: 125658 - DNA, 658 bp, Zea Mays
aggaatgctcggtgcttagccgcacatcacgctacgaacgtgttcatccctacgttcatgatgcagctaattcactggtcattgtgtgcgagctaatctcgccacaccctcctacagcatggccatcgcagaactgaaaacagggtgcttttggcaaggatgctttgtttggatttggcctcacaacatactcgttgcttggactaggagtgcttggaggaccactgtctcttccttggggtttgtacgtgctaatttgccagagaacaccggagaaaccatgcttgaacgacgtaagcgatattggaggttggaggaggacggccttgatagcttcagtgtttcttgttgttttgactctcatcccgttgtgggatgaactcgcggaggaactaggtgtagggcttgttacttcgttctgagatacggtccttaccgatagaattaggccgtgatgtagctcaattttgtattgaaatgtagcgtcccatagcgggactgctgtaaaggcatgtgcagtttcctgattaggtgagcaatgatatcacctatgcgagtgtcatgaaattgtgccaagacgctgacgattattatcaattacatacatgtacgcacattttgaccatacgagtacagatacacacaacctacccttcta

SEQ ID NO: 125659 - DNA, 1652 bp, Zea Mays
tcctgtttcagctctcttcccttcactccatcggctcgtctgtacagcatcccgtgtagcgtgtatccacctcgtcgccacctcaatcctcattccccaatcccgtccgcttctctccccgtcccttacctcgcccaggaggggagcctcccgcttacaaaccctagcctctactcctctgagcttccaccgctccgctccccatggaggacgaggacaccggccccggcgatgggggcgaggcctctcctccgcaccacgtcgcggcgtcgagcgaccgggcgcgcgacatggtggcgtccccgaccagctcgcgctctgtgacgcagacggtgaacgggtcccaccacttcgtgatccagggctactcgctcgctaagggcatgggcgtggggaagcacatcgccagcgagacattcaccgtgggcggttaccagtgggcgatctacttctaccccgacgggaagaaccccgaggacaactccacctacgtctccgtcttcatcgcgctcgcgtccgacggcaccgacgtgcgcgcgctcttcgagctcacgctcctcgaccagagcggaaagggcaagcataaggtgcactcgcacttcgaccgctccctagagtccgggccgtacaccctcaagtaccgcggatccatgtggggctacaaaaggttctttcggcgtactgctcttgagcaatcagattttcttaaagatgattgcttgaagataaactgtactgtgggtgttgtagtatcaactatggattattctaggccacattcaatagaggttccagagtctgacataggctttcattttggaacgcttttggacactcaggaaggtgtagatgttatttttagtgtagcaggagagaagtttcatgcccataagttggtattggctgcccgatctcccttttttagatctgaatttttcgatcatgaattgggtgaagagaagaacggaactgatacgggggatgaaatcaaagagatcgttattgatgacatggatcctgtagtgttcaaggctgtgcttcattttatctacagggacaatcttgttaatgatgacgagttgtctgcatcaagctctgactgctctatctttgatcgtttgtccgggaagttaatggctgcagcagacaaatatgagttgccaaggttaagattgttgtgtgaatcttacttgtgcaagcatatttctgtaaattccgtggcaactactctagcattggctgatcggcaccatgctatggagcttaaatccgtttgcctcaaatttgctgccgaaaacctgtcagctgtgatccggactgagggtttcgactatctcaaagacaactgcccatctctgcagtcagagatactgcggacagttgccgggtgtgaggagccatgtagcagcggcttgaaaagccagagcgtgtgggcgcagctctctgacggcggcgacaccagcgggcgcagggtgaggccaagggtctgagacgcaaaccccggaagcactgacctttgtaatcaaaagctgttgtggtgtaaatgggacggcttttcttaattttcacttgagacaacgatttaaataacatgattgacgtgtttgtggtgctcgcagtcattatttggttctgaattctgagtctgccgc

SEQ ID NO: 125660 - DNA, 1359 bp, Zea Mays
atggcgggcggccgcgtcggcgccctggccggcggatgcgctggggatgaactgggggcacgcaggccacgcacccgctgccgcccaaagatcgtggcgcagctcctcagggacaacggcatcaagaaggtgaagctgttcgacgccgaccagggcaacgcctcagcgcgctcgccggcaccggcatcgagcttcgcttaccgctgtgctcgtggcctcgtgcccgccgtcgctcttgatggcgcgacgcaaccgtgcaggtacgtggccgtgggcaacgagccgttccttgcggcctacaacggcacgttcgacaaggtgacgttcccggcgctgcagaacatccagaacgcgctgaacgaggccgggctcggcgacaccgtgaaggccaccgtcccgctgaacgccgacgtgtacatgtccccgaaggacaacccggtgccgtcggcggggcgatggtgcaagtttcctgaagcaaaaacaggcgcgcccttcacggtgaaccatctaccccgttcatcaccctgttctgaaacgacgacttccccggtggacttcgcctttttcgacggggggcgccgcgccgctgggtgggacccgggcagcggcgtgtcgtacaccaacgtgttcgacgccaacttcgacaccctggtggcggcgctcaagtcggtggggcacggcgacatgcccgtcgtggtgggcgaggtcggctggcccaccgacggcgacaagcacgccaccaacgcgtacgcgcagcggttctacaacggcctgctgaggcggctggcggcgaacgccggcacgcccgcgcggccgaaccagtacattgaggtgtacctgttcgggctcctggacgaggacgtgaagagcgtggcgccgggcaacttcgagcggcactggggcatcctccggtacgacgggcagcccaagtacccgatggacctgagcgggcaggggcagaacgcgatgctggtgccggcgcgcggcgtggagtacctgccccggacgtggtgcgtcgtcaacaccaacgccggcaacatggacaagctcgccgacaacatcaactacgcgtgcacgttcgccgactgcaccgcgctgggctacggctccacgtgcggcggcatggacagcaacggcaacgcgtcctacgcattcaacgccttcttccaggtgcagaaccagaaggaggaggcctgcggcttccagggcctcgccgtgcccacgcagacggacccgtccaccgccgcctgcaacttcaccatacagatcgccaccacctcggcgggtcaccggcggccgctcggcgtgggcgtgctcgccttcgccttggcccagctggtgctgctccttctgcattga

SEQ ID NO: 125661 - DNA, 2751 bp, Zea Mays
atggagatggggaaggcggcggcggtggtgctggcggtgaacggcaagcggtacgaggccgccggcgtggacccgtcgacgacgctgcttgagttcctgcgcacccacacgcccgtcagggggcccaagctcggctgcggcgaaggtggctgcggagcatgcgttgtgcttgtctcgaagtacgacccagccaccgacgaggtgaccgagttctcagcgagctcctgcctgacgctgctccatagcgtggaccggtgctcggtgaccaccagcgagggcattggcaacaccaaggatggctaccaccctgtgcagcagcgcctctccggcttccacgcctcccagtgcggtttctgcacgcccggcatgtgcatgtccatcttctctgcgcttgtcaaagccgacaaggcggccaaccggccagccccaccggccggcttctccaagctcacttcctcggaggctgagaaggctgtctctggcaacctgtgccgctgcacagggtacaggcccatcgtcgacgcctgtaagagcttcgcagccgatgttgatcttgaggacctgggcctcaactgcttctggaagaagggtgatgagcctgcagatgtcagcaagctgccaggctacaacagtggtgacgtctgcactttccctgactttctcaaatctgagatcaagtcctcaattcagcaggctaacagcgctccagttcctgtttctgacgatggctggtaccgtcctaggagcattgacgagcttcacaggttgtttcaatctagctccttcgatgaaaattccgtgaagatagtggcttcaaacactgggtctggagtgtacaaggatcaggacctttatgacaagtacattgacatcaaaggaatcccagagctttcagtcatcaacagaagcagcaaaggaattgagcttggatcagttgtgtccatctctaaagctattgaggtgctgtcagatggaaatctcgtcttcagaaagattgctggtcacctgaacaaagtggcttcaccgtttgttcggaacactgcaaccataggtggaaacatagtcatggcacaaagattgccattcgcatcggacattgcaaccatactactagctgcaggttcaacagtcacaatccaggtggcttccaaaaggctgtgcttcactctggaggagttcttgcagcagcctccatgcgattctaggaccctgctgctgagcatatttatcccggaatggggctcaaatgatgtcacctttgagactttccgagcagcacctcgtccacttggcaatgctgtctcatatgtcaattcagctttcttggcaaggacttcattggatgcagcatcaaaggaccatctcatcgaggatatatgtctggcgttcggtgcttatggagctgatcatgctattagaactagaaaggttgaggattacctgaagggcaaaacagtgagctcgtctgtcatacttgaagctgttcggttgcttaaagggtctattaaaccatcagaaggctcaacacatcctgagtatagaattagcttggctgtcagtttcttgtttaccttcctatcctcccttgccaatagcttgaatgaatctgcaaaggttaatggtaccaacgagcactcaccagagaagcaactcaagttggacatcaatgatttgccaatacgatcaagacaagaaatatttttcactgatgcatataagccagttggcaaagcaattaagaaagctggggtagagatccaagcttcaggggaagctgtgtacgttgatgatatccctgctcccaaagattgcctctatggggcatttatttatagcacacaccctcatgcacatgtaaagtcaatcaactttaaaccatctttggcttcacagaagatcatcacagttatcactgcaaaggatattcccagcggtggacaaaatgttggttatagcttcccgatgattggagaagaagcactttttgcagatccagttgctgaatttgctggtcaaaatattggtgttgtgattgctcaaacacagaagtatgcctacatggcggcaaagcaagccgtcattgagtatagcacagaaaatctgcagccaccaattctgacaatagaagatgcaatcgaacgaagcagcttcttccaaaccctcccatttgtagctcctaagccagttggtgattacgacaaagggatgtctgaagctgatcacaagattttatcggcagaggtaaaaattgaatcccaatactttttctacatggagccacaagtggcgctagctattcctgatgaagataactgcataaccatctattcttcaacacaattacctgagtccacacaaaatgtggttgcaaagtgcgttggcattccatttcacaatgtccgcgtaatcaccagaagggtcggaggaggctttggtggaaaagcattgaaatcaatgcatgttgcatgtgcatgtgcagttgctgcattgaagctacaacgtccagttcggatgtacctcgatcgcaagacagacatgataatggcaggcgggcggcatcctatgaaggtgaagtactctgttgggttcaagtcaaacggcaagatcacagccttacatcttgatcttgggatcaatggtggaatatctccagatatgagtccaatgattgcagcacctgtcataggttctctcaaaaagtacaactggggcaatcttgcatttgacaccaagccgacactaataccataa

SEQ ID NO: 125662 - DNA, 1817 bp, Zea Mays
aagcttctacatacagccttgtcaccatgttcgataaattggcctcctctccagaataccagcaccgagctgcaatggtggaacaattcaacagaagcaacaagtggaagaagcgtggcatttcttgtgtgcctgtaacatatgaggtgcagcttcggccaactccaggaaaggtgtctatcatgaatgatggttccattgctgttgaggctggaggggttgagctaggccaagggttgtggacaaaagtgaagcagatgacggcattcggactgggacagctgtgtcctgacggcggtgaaagccttctagacaaggtgcgggtcatccaggccgacacattgagcatgatccaaggaggggtcactggtgggagcaccacttctgaaactagctgtgaagcagttcgtaagtcgtgtgttgcactcgtcgagaggctgaagccaatcaaggagaatctggaggctaaaactggcacagttgaatggagtgccttgattgcacaggcaagtatggcgagcgttaacttatcggcacatgcatactggacccctgatccaactttcacaagctatttgaactacggagccggcactagcgaggtggaaattgatgtcctgacaggagcaacaacaattctaaggagtgaccttgtctacgattgcgggcaaagcttgaaccctgctgtcgatttgggccaggtggaaggtgcattcgtccaaggagtaggcttcttcacaaacgaggagtacgcaaccaactctgacgggttggtcatccacgatggcacatggacgtacaagatccccacggtcgacaccatcccaaagcagttcaacgttgagctgatcaacagcgcccgtgaccagaagcgcgtcctctcttccaaagcatcgggcgagcctccgcttctcctagcttcctctgtgcactgcgcaatgagggaggccatcagggccgccaggaaggaattctcggtctgcactggtccagcgaactccgccatcacgttccagatggacgtgcccgcaacgatgcctgtcgtcaaggagctctgcggcctggatgtcgtggagaggtacctggagagcgtgtcggctgccagcccaacaaacaccgctaaagcatagatccagtaggcgctctacccatggtgtgagggcttaatcaatctgtaaaacactaagcggcgtgacatgccgagctttcagtgttagctatgatgtacagaagaagaggtaccaatggcgagttgtggccatgcgaatcaggattcaggaatcatgaacaatagagggggggaaataaagtaaataagtgttgcgcaggcgaatgtggggacgaaatcatgtgatttcaactagaatttgaagaaatttgctaggttcgtactacttaccttctggatatatggggtcagattggatggaccagccacctaggttaagcctcgtcgcgactttcgctggcagcttctcccccgcgcgctgggtggatggaggataacttctctcccggctatgttttgcctcacactccccgcgcgctgtaacctgtaggctggcgagcaagtgatggcgacatcgcgcctattcgaactatggggtcagtggcggggttgagaacttgagatcagactctacttgatttcgcgggatgtgtagctgtgtgctcttgcccatgacgcacgagagagctgatgctgtgtgggtgttgccggatcgccgctgccgttgggttaggcccaatgtttggcatggccgtggcggaggatttcggccgccaacgcctgaaccctgcaactgcaaccaagcctc

SEQ ID NO: 125663 - DNA, 1454 bp, Zea Mays
cgctgagatctggtaacgcctcgcctcgtcagcatctctataaacgtagaattcagttgctggccccgttgctcctccacctgggcttctctcaccaacacccgcgatgtcatcctcctcgccgccgccgccgcacgtcgtcgaggacatgccccatgtcctccagcttctcagcgacggcacggtggtccgcttcgccgactacgacacgctccctcccccgtccgtgcctcccgcgccgctgcccgtccggtggaaggacgtcgtgtacgacgccacccacggcctcaagctccgcgtgtacagtcccagtccgccggcctcctgcggcaagctgcccgtgctggtctacttccacggcggcgggtacgtcctcggcaccttcgcgctgcccagcttccacgcctgctgcctccgcctggccggcgagctcccggccgtcgtgctttccgccgactaccgcctcgcgccggagcaccgcctccccgcagccctcgacgacgcggcggccgtcatgcgctgggtgcgcgcccaggccgtcgcggcggggggaggggacccctggctcgccgactcggctgacccgggccgggtgttcgtcgccggcgactcagcgggcgggaacatcgtccaccacgtcgccgtccgccgcctcggctcggcggcctcgggcgagctcgacccggtacgcgtcgccgggcacgtcatgctctgcccgttcttcggcggggccgagaggacggcgtccgagtcggagttcccgcccggcccgttcctgacgctgccgtggtacgaccaggcttggcggctggcgctgccgccgggcgccacgagggaccacccgttcgcgaacccgttcgggccggagagccccgcgctgctgggcctgcgcgacgtcgcgctcccgccgacgctcgtcgtggccgcggggcaggacctgctgcgcgaccgccaggcggactacgtcgcgcggctcaaggcgatgggacagcacgtggagcatgtcgagttcgagggtcagcaccacgggttcttcaccgtggagccggccagcgacgccagcagcgagttggtccggctcgtcaagcgcttcgtgtatggcgacggcgacggcaactccatctaaactggactcatgagccatcatgatcatgacctttgttgttagcttagcacgagtactcgcgtgacacgaacagagctgaagttggcctaacctgccacgcgcaccaagctggatgttcgatcagcgacaagccatgttaggtacggcgccaccatcagtccaccagcactgttcgaatctgacatcagttggcttaggcctatgtttcctccagctttttatcagttcagatatgaacagctaggaaagttttatttcacagtgtcatcgtcgatctcgccgattagtaaatgaataaatttgtgcatgctagtaattgctaaagaca

SEQ ID NO: 125664 - DNA, 1917 bp, Zea Mays
gagtactctctgtttttcctcccagcgattttgttcgtcttcttcctcagttgttcgacgccagcgacagcgggtgttcgggaggcgatcgggacctgacactccgctcccctccggaatcgatgtcctcgtctcctgctcggtttggtactttggttggcgtacggcgacgtggaaagctcacccgtatagtagtagaataatgcaatgagatggaatggccctcctgtcatctcccccagtcacatctcgactgaattattcaattctcaatgctgctgagcagctgctgtgccgccgccgccgccttctcctaatccagctgctccaacctagctcacgtcgcttccaacagacgccaccagtcgtcgcccgccctcgccctcgtctcagtgtcaaagcaggaggcggcggtgccgcgcgccccgccaaccgttagctcccgagtcccgacggcgcggcggaatcggggcttgggactggggaggcgcgagtccccgggcgcttacttcatgcctccatggatccggtcgcggacccgtcgccgtcgcggcgatccctgaagcggcggccgccagcgcggtcgccggagctgtcgcccaaggcgggtccgggggcaagggaggcggcggcggcggaggagctgatccgtagggtggaggagctggaggcagcggcggcgcggctgcgcggggagaaggaggccgcggaggacgccgcgcgggggctgcggcaggagctcgacgccgagcgggcctccgcggagacggcggccagcgaggccatgctcatgatcgagcgcctgcagcgggagaaggccgccgcgcagatggaggcccgccagttcaagcgctacgccgagggccgcgaagacagggagcgcgaggtccaggacgagctcgcgtcgctctccgacctcgccgcctcctaccactcccgcctccagtcccacggcatcgacccggactccttcaccgacgaggacgatgaggaatcatacgaggaggtgggcgccgaagacgtggagcagatccacatggctgcgctggaggtgaagccgaacgcccgcgagtcgaccaatggcatggtgaaaaccatggtcgttggcaacgatggcgaggaagaagtggaggacgccgaggaggagccgtcgtccccagtggagaaggaattcgagtacacggtggacgttacctgcgcgagcacaacgaaaccagctacatctgtggttgcagagtatgtgggggacgggaactcggggggattgtatgcaagggtcgaggcgctggaggcggacagggtagcgctgcggagggagatttccgtgctgcgggccgagagggcacagctggtgatggccagggagatggcgcggcggctctgctgggagatggttgctgagcagagagccatcgtgaagaaagcagtagtccctgcgagcagtttctcagtactcgggatttgcaagtgggtgctatcaacactgttctggagaaacggaaggtctacagccaagtatacctttggtctgtcgactacgttccttggcctcctgctgcttctcgacagatccacgttgttgagtccctggcggcgtctgccaaggccacaaagatgactaaggccttctccataccagcaggcagcagccaaatgctcgtaaatccatagatttaaacagttgagctttattgtgcatgtgtattggttctttggtgtttcttttttccttttgccacgtacagtaattggagctgtacgtttcggttgtgaagctttgaggtgctgtatagtgtgttattcagactactaggcttgaatagcctgtaatttggggctaactggcatgctctgtatagtgtgtatatcatcgtaagttgtggaactccatgttgttttgagtggtggtggtttgac

SEQ ID NO: 125665 - DNA, 1626 bp, Zea Mays
gcttcagtgtaggcgtgcacactttgtgttctgcctccgacaccctctcgcccgccctccgtcaatcacgcaaggtctgccacccgaccaccccatccgcagcgccaacacctccgtcggccgccagatccggatcccgtccccatcatcaacgcctccgcccccgtcaagctccctctacgcgtctgcctcctcctcggcctggatccgcggcggccctagagcgcgggcgcgcaggcacggccggcgcggctacacggcggcgcggacgccgcgtccccggccccggtcatggcgcgggtgcaggagacctgccatggcggcaccggtcccaagccctagccctggtggcggcgcggcatcaagccccggccccaccggcgggcgtggtcccgacggcgggcgcgatccctgcgcaggccttctcctggtacgcggtctgcagctggtcctcgagccttgcgcccctgcgcatctcctcctcatggctggccttctctgcggctaggaggccctagagacgctcgacctcggcgcggagcatggcggcctcgctctcgttggtggcgacgacttgctcggcggcggcgacctcctcgcgggcctggacacaactagccgtcgccttttttgatgtgacgctctctgcaagacatgctgatatacgacaccggcgacattcgccagccgccctgcgccccgttcgtgaagaatgcgtcagccatgttcagtttctcgcagggctgcctttgttggaggcaagaagtgcccgcagatatctgggtatctggatcagcttcggtacaacacaaagagctactgcagacagaccttggttggaggcaactatggcctgctcaacacaagtacatttgaaccaaaccctgactattatagtgctttgttgtggcaccgcctcatgcatgggcaccaaggtcctctcgacgctcgacggcattcaacggcacaaacaagatccgtgcctacgcacactgcgcgaaaaactcggaagagatcgctctgctcctgatcaacctggacggcatcagcacgaaccgcatctacgtgacgagccaaggcgcgcacgcccggagcggaaggaagaaggagagcaggacgtccgacgtccacatcatccctgcagggctcggcgaagcagcagccgcgctcacgagacaggagtaccatctaactcccaaggacgggaacctgcagagccagcagctgctgctgaacggcaacgtcctggcaaccgacgccgacggggagatcccggagctggagcccgtgcaggtggaggggacgcagcccataaccgtgggcccttactctatcgtgtttgctcacgtccccagcttctacgctcctgcgtgcctgtagctagagttttcgactggattttttttcagcctttctcggtgtgcatctcgtaggttaggtaagtctgtccgggtgaacggcgaagcttgttcatctctgcccatagtccgtgaagtgtaagctgctaggctggaaggtttgtggtttatgattgtttgggaaaggagtggtcagatatataatgtgtgagcaaaagaaggaaggaagctggaaatgagataataaaagaaagggttttgagtttta

SEQ ID NO: 125666 - DNA, 1519 bp, Zea Mays
ctctcgcccgccctccgtcaatcacgcaaggtctgccacccgaccaccccatccgcagcgccaacacctccgtcggccgccagatccggatcccgtccccatcatcaacgcctccgcccccgtcaagctccctctacgcgtctgcctcctcctcggcctggatccgcggcggccctagagcgcgggcgcgcaggcacggccggcgcggctacacggcggcgcggacgccgcgtccccggccccggtcatggcgcgggtgcaggagacctgccatggcggcaccggtcccaagccctagccctggtggcggcgcggcatcaagccccggccccaccggcgggcgtggtcccgacggcgggcgcgatccctgcgcaggccttctcctggaggccctagagacgctcgacctcggcgcggagcatggcggcctcgctctcgttggtggcgacgacttgctcggcggcggcgacctcctcgcgggcctggacacaactagccgtcgccttttttgatgtgacgctctctgcaagacatgctgatatacgacaccggcgacattcgccagccgccctgcgccccgttcgtgaagaatgcgtcagccatgttcagtttctcgcagggctgcctttgttggaggcaagaagtgcccgcagatatctgggtatctggatcagcttcggtacaacacaaagagctactgcagacagaccttggttggaggcaactatggcctgctcaacacaagtacatttgaaccaaaccctgactattatagtgctttgttgtggcaccgcctcatgcatgggcaccaaggtcctctcgacgctcgacggcattcaacggcacaaacaagatccgtgcctacgcacactgcgcgaaaaactcggaagagatcgctctgctcctgatcaacctggacggcatcagcacgaaccgcatctacgtgacgagccaaggcgcgcacgcccggagcggaaggaagaaggagagcaggacgtccgacgtccacatcatccctgcagggctcggcgaagcagcagccgcgctcacgagacaggagtaccatctaactcccaaggacgggaacctgcagagccagcagctgctgctgaacggcaacgtcctggcaaccgacgccgacggggagatcccggagctggagcccgtgcaggtggaggggacgcagcccataaccgtgggcccttactctatcgtgtttgctcacgtccccagcttctacgctcctgcgtgcctgtagctagagttttcgactggattttttttcagcctttctcggtgtgcatctcgtaggttaggtaagtctgtccgggtgaacggcgaagcttgttcatctctgcccatagtccgtgaagtgtaagctgctaggctggaaggtttgtggtttatgattgtttgggaaaggagtggtcagatatataatgtgtgagcaaaagaaggaaggaagctggaaatgagataataaaagaaagggttttgagttttagtctcattttgtttg

SEQ ID NO: 125667 - DNA, 639 bp, Zea Mays
atggcggaggacggcagcagcagcgtagtcgttggtggcgccggcgctgcggcctgctggcgctgcccgagcgtgagcaggagagggtcgccgccgccctcctcggccgtcgcggccggcgagacggtgccgctcggcaaggacgacgtcggcgcggcgcgggggcgcttgccggtgagccgctgcacgacggtcatgaactcctgcgggctggcgtggatgaccctgggcgtgtgctcgtacacgatcaccggcggcttcttggcggtggtggaggccggcggcttgttggacgccggcgaggagctccgggacgacgacgacgacgacggcgacgacgacgtcaccttcagcggcagcggccgtggccctaggaggccgccgccagtggcagtgggtcgcttgggagggggcgacgacgacgcatcggaggacggcatggttgccacggtcatggtcatggcagctgcgctcctgcacaaagtaaagcttctcgcttctgggtatctgtacgattatacgtggccacccgatctgcagcaggccagtcgtcgttggtctgttcgactggcgacgtgtgcagtgctccacggagtacgcagcgatgtagggcaacacgcgcgggggctttatagatga

SEQ ID NO: 125668 - DNA, 2427 bp, Zea Mays
tcactcactcgcatccgaacgccggaacgcgaagctggctgacagacggccccatacgagtcggacccacacgaatccgctacccgggacggcgggacgcacttcggctccgttccattcgtcggttcctcctcctcggttcctccccttccgccccgcttgtacggttgatccaacctgaaccacccaaccggtaaacgcctcctcgccgcccccgcgtccaatgccaccgccaccgccgccgccgccgccgctgccgtccgtgtagcgtccccgcggcgatgggcaacacctgcgtcggccccagtgccgctggccgcaacggcttcctggccaacgtcaccctgtggcggccccgcggcgacgatcccacgccagccccagccctaccgccgccctcctcgcccgcctccgacaaggcgcccgatcccgtcaccatcccggaatccaagccttcctcccaccactcatcccgatccaccgacctgccaccggcccccgcctcccagccacaggcgcaggcgcaggacaacactccggcgaagcagcccgcgcccaaggtcaaacgcgtccagagcgcgggcctcctcgcggattctgtactcaagcgcgacgttaacacggcccggctcaaggacctctacaccattggcaagaagttagggcagggtcaattcggcaccacctatctgtgcgtcgagaaggctaccggccgggagttcgcctgcaagtccattgccaaacggaagctgatcacggaggaggatgtcgaagacgtgcgccgcgagatacagatcatgcaccacctcgcgggtcatgccaacgtcgtctccatcgttggcgcatacgaggacgccgtcgccgtgcagctcgtcatggagctctgcgccggtggggaactcttcgacaggatcatcaagagggggcactattccgagaaggcggccgcgcagctggccagggtgatcgtcggcgtcgtcgagtcgtgccactcgctcggcgtcatgcacagggatcttaagccggagaatttcttgtttgtcaatcaaaaggaggactcgcccctgatgaccatcgattttggactgtccatcttcttcaagccaggcgagatgtttacagatgtcgttggaagcccatattatgttgcacctgaggttctgctaaaatactatggccgtgaggttgatgtctggagcgctggtgtcataatatatatcctgttgagtggagtccctcctttctgggatgaaagtgaacaaggaatatttgaacaagttttgagaggtgacctggacttttcgtcggagccctggcctagcatctcagagagtgcaaaggatttggtcaggaaaatgcttattcgtgacccaaagaagagattaactgcccatgaagccttatgtcacccttgggtttgtgttgatggtgttgctcctgacaagcctcttgattctgctgttctaagccggttgaaacaattttctgcaatgaataaactgaagaaaatggccctgagggttattgctgagagtttatctgaggaagaaattgcaggattaaaagaaatgttcaaaatgattgacactgacaacagtggccatatcacattggaggaactaaaaactggcttgcagagagttggcgctaatttgatggactcagaaatcaatgctctgatggaagcagcggatatcgacaatagtggcacaattgattatggggagttcattgctgcaactttgcatataaacaaagttgagaaggaggataagctctttgctgctttctcatactttgacaaagacggcagcggttacataactcaagatgagctccaaaaggcatgtgaggagtttggtataggggatacccgacttgaggatattatcggggacatcgatcaggacaatgatggacggatcgactacaatgagtttgttgcaatgatgcagaagggagataatcctctggggagaaagggataccaaagtaatggtaatttcggtcttggagatgcacttaagcttcggtaaaataggagcagatgtttcccgttatagcaaacgtagcattcagcaactaagaaatttggaccaaacaacagctccaaaagcttgtaccatgccagtacactggtcaccaagattcaatgacgccctatcaaaatccggggtcgctgaagcaatctaggaagtgtgaacttttgccggaacgcatcaacctcacagaatgaacaatagggtcctcatgctcaacatgtcatattctgatatccctcctttctagtttacatgtagtggcagtgaaaccagccgactgtgtatctgcgctgtaatttaagcaagcatgagagtaggtgagattgcttttatctgccccctttattcttccattgggaatcaatgacaggaagagagtgaacca

SEQ ID NO: 125669 - DNA, 1090 bp, Zea Mays
gttcaaggggaggcgggggagccacggcggcggagggaattgtttaatcccccgtcaccgtctcctatcgccatcaccccacccgtcccccttggtccaggcgcaggcgcgagcgcgacgtccggcgtccggcttcggcggcggagtggagcgatcccgatccccacaaggaattccatcgctgtcgtggcgtttggtggcgctcctcccggccggcaagcaggatcaggaaatcgcacggaggtgaggatacacgggtgcggaacgagagctaggcgaacctgtctggtacctcgcggcggagatggacgagaaggcgacgatggagagcaagctgtcctcggcggcggccttcgtggaggggggcgtgcaggacgcctgcgacgacgcctgcagcatctgcctcgacgccttctgcgacagcaacccctccacgatgaccaagtgcaagcatgactaccatcttcagtgcattcttgaatggtgtatattataattcatgtaataatttaggtgccagagaagctcccagtgccccatgtgttggcagcatatcagcatgaaagatcctatgagccaagagctactagaggctgttgaacaagagaggaacatccgagctaatccttcacgtaatactgctgttttccaccatcaaatgctgggtgattttgagatccctgtaggtgcagatgatgcagaacttgaagaacgcattattcagcacttggctgccgcagctgcagtgcgtaggtcacaccgtcatcataatagaagagatgggcaccagagcagatcagaagcaagtagccacccacagtttctggtgctctcagcagacgagcgcacaatctcaggtcaagaaggggactacgaacaagcatctgctgtagcttctggccgccctttacgtacacttgttgaacaagaacgcactcgagggttagcggatgcttccagtccatctctccgttgttctactcctgctgatagtactggtagatcaaacaataggtatttccgacatcgtatgtatgatgctatccttgtgcacttctcttcactatcatcgaatgcccgtgcttagcgt

SEQ ID NO: 125670 - DNA, 1334 bp, Zea Mays
gttcaaggggaggcgggggagccacggcggcggagggaattgtttaatcccccgtcaccgtctcctatcgccatcaccccacccgtcccccttggtccaggcgcaggcgcgagcgcgacgtccggcgtccggcttcggcggcggagtggagcgatcccgatccccacaaggaattccatcgctgtcgtggcgtttggtggcgctcctcccggccggcaagcaggatcaggaaatcgcacggaggtgaggatacacgggtgcggaacgagagctaggcgaacctgtctggtacctcgcggcggagatggacgagaaggcgacgatggagagcaagctgtcctcggcggcggccttcgtggaggggggcgtgcaggacgcctgcgacgacgcctgcagcatctgcctcgacgccttctgcgacagcaacccctccacgatgaccaagtgcaagcatgactaccatcttcagtgcattcttgaatggtgccagagaagctcccagtgccccatgtgttggcagcatatcagcatgaaagatcctatgagccaagagctactagaggctgttgaacaagagaggaacatccgagctaatccttcacgtaatactgctgttttccaccatcaaatgctgggtgattttgagatccctgtaggtgcagatgatgcagaacttgaagaacgcattattcagcacttggctgccgcagctgcagtgcgtaggtcacaccgtcatcataatagaagagatgggcaccagagcagatcagaagcaagtagccacccacagtttctggtgctctcagcagacgagcgcacaatctcaggtcaagaaggggactacgaacaagcatctgctgtagcttctggccgccctttacgtacacttgttgaacaagaacgcactcgagggttagcggatgcttccagtccatctctccgttgttctactcctgctgatagtactggtagatcaaacaataggatttctgggatcgaatctacacctgtggatcaagacggaactggaccatccgctttacaatcaatggagggaggtcaacgcggggattgctgcggtgtctcgcatgatggaatggcacgatgcaagggacgggacgggagcggggccttctcctacctctgcatcaagatctggttctcagtgaaacactctgcacttgaaaggaccgatgcaaatgtaaagattaaggaactttagttttcttcaagtccaaagggtcagagttgagagcacctgagatccggcgatgcttcatggccacggtcccccagaggctattcgcaatagttgactctaaatttctctctat

SEQ ID NO: 125671 - DNA, 1557 bp, Zea Mays
gttcaaggggaggcgggggagccacggcggcggagggaattgtttaatcccccgtcaccgtctcctatcgccatcaccccacccgtcccccttggtccaggcgcaggcgcgagcgcgacgtccggcgtccggcttcggcggcggagtggagcgatcccgatccccacaaggaattccatcgctgtcgtggcgtttggtggcgctcctcccggccggcaagcaggatcaggaaatcgcacggaggtgaggatacacgggtgcggaacgagagctaggcgaacctgtctggtacctcgcggcggagatggacgagaaggcgacgatggagagcaagctgtcctcggcggcggccttcgtggaggggggcgtgcaggacgcctgcgacgacgcctgcagcatctgcctcgacgccttctgcgacagcaacccctccacgatgaccaagtgcaagcatgactaccatcttcagtgcattcttgaatggtgccagagaagctcccagtgccccatgtgttggcagcatatcagcatgaaagatcctatgagccaagagctactagaggctgttgaacaagagaggaacatccgagctaatccttcacgtaatactgctgttttccaccatcaaatgctgggtgattttgagatccctgtaggtgcagatgatgcagaacttgaagaacgcattattcagcacttggctgccgcagctgcagtgcgtaggtcacaccgtcatcataatagaagagatgggcaccagagcagatcagaagcaagtagccacccacagtttctggtgctctcagcagacgagcgcacaatctcaggtcaagaaggggactacgaacaagcatctgctgtagcttctggccgccctttacgtacacttgttgaacaagaacgcactcgagggttagcggatgcttccagtccatctctccgttgttctactcctgctgatagtactggtagatcaaacaataggatttctgggatcgaatctacacctgtggatcaagacggaactggaccatccgctttacaatcaatggtacagggatttcataatcaaagtgcaagtggatggagggagaggtggttttctcggagcaactctttactggatcttggttctgaggtgaggagggaggtcaacgcggggattgctgcggtgtctcgcatgatggaatggcacgatgcaagggacgggacgggagcggggccttctcctacctctgcatcaagatctggttctcagtgaaacactctgcacttgaaaggaccgatgcaaatgtaaagattaaggaactttagttttcttcaagtccaaagggtcagagttgagagcacctgagatccggcgatgcttcatggccacggtcccccagaggctattcgcaatagttgactctaaatttctctctatatatcagttttttgtgtcacattatcaacatttcataccttactttttttaggagcagctattgtttgaggagcactttaggaagacaatcaccttgcaacttctctagcatatatgaatttttgaaaacc

SEQ ID NO: 125672 - DNA, 1771 bp, Zea Mays
gggaggcgggggagccacggcggcggagggaattgtttaatcccccgtcaccgtctcctatcgccatcaccccacccgtcccccttggtccaggcgcaggcgcgagcgcgacgtccggcgtccggcttcggcggcggagtggagcgatcccgatccccacaaggaattccatcgctgtcgtggcgtttggtggcgctcctcccggccggcaagcaggatcagtcgacgccctcttggcttgcctttggctgtaggaaatcgcacggaggtgaggatacacgggtgcggaacgagagctaggcgaacctgtctggtacctcgcggcggagatggacgagaaggcgacgatggagagcaagctgtcctcggcggcggccttcgtggaggggggcgtgcaggacgcctgcgacgacgcctgcagcatctgcctcgacgccttctgcgacagcaacccctccacgatgaccaagtgcaagcatgactaccatcttcagtgcattcttgaatggtgccagagaagctcccagtgccccatgtgttggcagcatatcagcatgaaagatcctatgagccaagagctactagaggctgttgaacaagagaggaacatccgagctaatccttcacgtaatactgctgttttccaccatcaaatgctgggtgattttgagatccctgtaggtgcagatgatgcagaacttgaagaacgcattattcagcacttggctgccgcagctgcagtgcgtaggtcacaccgtcatcataatagaagagatgggcaccagagcagatcagaagcaagtagccacccacagtttctggtgctctcagcagacgagcgcacaatctcaggtcaagaaggggactacgaacaagcatctgctgtagcttctggccgccctttacgtacacttgttgaacaagaacgcactcgagggttagcggatgcttccagtccatctctccgttgttctactcctgctgatagtactggtagatcaaacaataggatttctgggatcgaatctacacctgtggatcaagacggaactggaccatccgctttacaatcaatggcagtacagggatttcataatcaaagtgcaagtggatggagggagaggtggttttctcggagcaactctttactggatcttggttctgaggtgaggagggaggtcaacgcggggattgctgcggtgtctcgcatgatggaatggcacgatgcaagggacgggacgggagcggggccttctcctacctctgcatcaagatctggttctcagtgaaacactctgcacttgaaaggaccgatgcaaatgtaaagattaaggtatgtgctcatgctgtgctaatgaaagccttaaattcagtgttttgttttttttctggtggcgtactgtcactgttgactggcctacggatctgagtttttgtgtaattgtttggaagcaattccattgtcgccgaaatggcgcggtagtttctctgactgctgctgctaaatactaggaactttagttttcttcaagtccaaagggtcagagttgagagcacctgagatccggcgatgcttcatggccacggtcccccagaggctattcgcaatagttgactctaaatttctctctatatatcagttttttgtgtcacattatcaacatttcataccttactttttttaggagcagctattgtttgaggagcactttaggaagacaatcaccttgcaacttctctagcatatatgaatttttgaaaaccaccttag

SEQ ID NO: 125673 - DNA, 1626 bp, Zea Mays
gtctcctatcgccatcaccccacccgtcccccttggtccaggcgcaggcgcgagcgcgacgtccggcgtccggcttcggcggcggagtggagcgatcccgatccccacaaggaattccatcgctgtcgtggcgtttggtggcgctcctcccggccggcaagcaggatcaggtaccctcccgtcccggatcctcccaaccgttccgtttcccgcggccgggctggcttagttctgcggcgctggttgccatttcgggccaaatttgttgcgtgaagcggaaggatttggattgaatggcacgcgttgtttccagtcgacgccctcttggcttgcctttggctgtaggaaatcgcacggaggtgaggatacacgggtgcggaacgagagctaggcgaacctgtctggtacctcgcggcggagatggacgagaaggcgacgatggagagcaagctgtcctcggcggcggccttcgtggaggggggcgtgcaggacgcctgcgacgacgcctgcagcatctgcctcgacgccttctgcgacagcaacccctccacgatgaccaagtgcaagcatgactaccatcttcagtgcattcttgaatggtgccagagaagctcccagtgccccatgtgttggcagcatatcagcatgaaagatcctatgagccaagagctactagaggctgttgaacaagagaggaacatccgagctaatccttcacgtaatactgctgttttccaccatcaaatgctgggtgattttgagatccctgtaggtgcagatgatgcagaacttgaagaacgcattattcagcacttggctgccgcagctgcagtgcgtaggtcacaccgtcatcataatagaagagatgggcaccagagcagatcagaagcaagtagccacccacagtttctggtgctctcagcagacgagcgcacaatctcaggtcaagaaggggactacgaacaagcatctgctgtagcttctggccgccctttacgtacacttgttgaacaagaacgcactcgagggttagcggatgcttccagtccatctctccgttgttctactcctgctgatagtactggtagatcaaacaataggatttctgggatcgaatctacacctgtggatcaagacggaactggaccatccgctttacaatcaatggtacagggatttcataatcaaagtgcaagtggatggagggagaggtggttttctcggagcaactctttactggatcttggttctgaggtgaggagggaggtcaacgcggggattgctgcggtgtctcgcatgatggaatggcacgatgcaagggacgggacgggagcggggccttctcctacctctgcatcaagatctggttctcagtgaaacactctgcacttgaaaggaccgatgcaaatgtaaagattaaggtatgtgctcatgctgtgctaatgaaagccttaaattcagtgttttgttttttttctggtggcgtactgtcactgttgactggcctacggatctgagtttttgtgtaattgtttggaagcaattccattgtcgccgaaatggcgcggtagtttctctgactgctgctgctaaatactaggaactttagttttcttcaagtccaaa

SEQ ID NO: 125674 - DNA, 1495 bp, Zea Mays
cccttggtccaggcgcaggcgcgagcgcgacgtccggcgtccggcttcggcggcggagtggagcgatcccgatccccacaaggaattccatcgctgtcgtggcgtttggtggcgctcctcccggccggcaagcaggatcaggtaccctcccgtcccggatcctcccaaccgttccgtttcccgcggccgggctggcttagttctgcggcgctggttgccatttcgggccaaatttgttgcgtgaagcggaaggatttggattgaatggcacgcgttgtttccagtcgacgccctcttggcttgcctttggctgtaggaaatcgcacggaggtgaggatacacgggtgcggaacgagagctaggcgaacctgtctggtacctcgcggcggagatggacgagaaggcgacgatggagagcaagctgtcctcggcggcggccttcgtggaggggggcgtgcaggacgcctgcgacgacgcctgcagcatctgcctcgacgccttctgcgacagcaacccctccacgatgaccaagtgcaagcatgactaccatcttcagtgcattcttgaatggtgtatattataattcatgtaataatttaggtgccagagaagctcccagtgccccatgtgttggcagcatatcagcatgaaagatcctatgagccaagagctactagaggctgttgaacaagagaggaacatccgagctaatccttcacgtaatactgctgttttccaccatcaaatgctgggtgattttgagatccctgtaggtgcagatgatgcagaacttgaagaacgcattattcagcacttggctgccgcagctgcagtgcgtaggtcacaccgtcatcataatagaagagatgggcaccagagcagatcagaagcaagtagccacccacagtttctggtgctctcagcagacgagcgcacaatctcaggtcaagaaggggactacgaacaagcatctgctgtagcttctggccgccctttacgtacacttgttgaacaagaacgcactcgagggttagcggatgcttccagtccatctctccgttgttctactcctgctgatagtactggtagatcaaacaataggatttctgggatcgaatctacacctgtggatcaagacggaactggaccatccgctttacaatcaatggtacagggatttcataatcaaagtgcaagtggatggagggagaggtggttttctcggagcaactctttactggatcttggttctgaggtgaggagggaggtcaacgcggggattgctgcggtgtctcgcatgatggaatggcacgatgcaagggacgggacgggagcggggccttctcctacctctgcatcaagatctggttctcagtgaaacactctgcacttgaaaggaccgatgcaaatgtaaagattaagctattgtttgaggagcactttaggaagacaatcaccttgcaacttctctagcatatatgaatttttgaaaacc

SEQ ID NO: 125675 - DNA, 1406 bp, Zea Mays
ccttggtccaggcgcaggcgcgagcgcgacgtccggcgtccggcttcggcggcggagtggagcgatcccgatccccacaaggaattccatcgctgtcgtggcgtttggtggcgctcctcccggccggcaagcaggatcagtcgacgccctcttggcttgcctttggctgtaggaaatcgcacggaggtgaggatacacgggtgcggaacgagagctaggcgaacctgtctggtacctcgcggcggagatggacgagaaggcgacgatggagagcaagctgtcctcggcggcggccttcgtggaggggggcgtgcaggacgcctgcgacgacgcctgcagcatctgcctcgacgccttctgcgacagcaacccctccacgatgaccaagtgcaagcatgactaccatcttcagtgcattcttgaatggtgccagagaagctcccagtgccccatgtgttggcagcatatcagcatgaaagatcctatgagccaagagctactagaggctgttgaacaagagaggaacatccgagctaatccttcacgtaatactgctgttttccaccatcaaatgctgggtgattttgagatccctgtaggtgcagatgatgcagaacttgaagaacgcattattcagcacttggctgccgcagctgcagtgcgtaggtcacaccgtcatcataatagaagagatgggcaccagagcagatcagaagcaagtagccacccacagtttctggtgctctcagcagacgagcgcacaatctcaggtcaagaaggggactacgaacaagcatctgctgtagcttctggccgccctttacgtacacttgttgaacaagaacgcactcgagggttagcggatgcttccagtccatctctccgttgttctactcctgctgatagtactggtagatcaaacaataggatttctgggatcgaatctacacctgtggatcaagacggaactggaccatccgctttacaatcaatggtacagggatttcataatcaaagtgcaagtggatggagggagaggtggttttctcggagcaactctttactggatcttggttctgaggtgaggagggaggtcaacgcggggattgctgcggtgtctcgcatgatggaatggcacgatgcaagggacgggacgggagcggggccttctcctacctctgcatcaagatctggttctcagtgaaacactctgcacttgaaaggaccgatgcaaatgtaaagattaaggtatgtgctcatgctgtgctaatgaaagccttaaattcagtgttttgttttttttctggtggcgtactgtcactgttgactggcctacggatctgagtttttgtgtaattgtttggaagcaattccattgtcgccgaaatggcgcggtagtttctctg

SEQ ID NO: 125676 - DNA, 1735 bp, Zea Mays
ccaggcgcaggcgcgagcgcgacgtccggcgtccggcttcggcggcggagtggagcgatcccgatccccacaaggaattccatcgctgtcgtggcgtttggtggcgctcctcccggccggcaagcaggatcaggtaccctcccgtcccggatcctcccaaccgttccgtttcccgcggccgggctggcttagttctgcggcgctggttgccatttcgggccaaatttgttgcgtgaagcggaaggatttggattgaatggcacgcgttgtttccagtcgacgccctcttggcttgcctttggctgtaggaaatcgcacggaggtgaggatacacgggtgcggaacgagagctaggcgaacctgtctggtacctcgcggcggagatggacgagaaggcgacgatggagagcaagctgtcctcggcggcggccttcgtggaggggggcgtgcaggacgcctgcgacgacgcctgcagcatctgcctcgacgccttctgcgacagcaacccctccacgatgaccaagtgcaagcatgactaccatcttcagtgcattcttgaatggtgtatattataattcatgtaataatttaggtgccagagaagctcccagtgccccatgtgttggcagcatatcagcatgaaagatcctatgagccaagagctactagaggctgttgaacaagagaggaacatccgagctaatccttcacgtaatactgctgttttccaccatcaaatgctgggtgattttgagatccctgtaggtgcagatgatgcagaacttgaagaacgcattattcagcacttggctgccgcagctgcagtgcgtaggtcacaccgtcatcataatagaagagatgggcaccagagcagatcagaagcaagtagccacccacagtttctggtgctctcagcagacgagcgcacaatctcaggtcaagaaggggactacgaacaagcatctgctgtagcttctggccgccctttacgtacacttgttgaacaagaacgcactcgagggttagcggatgcttccagtccatctctccgttgttctactcctgctgatagtactggtagatcaaacaataggatttctgggatcgaatctacacctgtggatcaagacggaactggaccatccgctttacaatcaatggtacagggatttcataatcaaagtgcaagtggatggagggagaggtggttttctcggagcaactctttactggatcttggttctgaggtgaggagggaggtcaacgcggggattgctgcggtgtctcgcatgatggaatggcacgatgcaagggacgggacgggagcggggccttctcctacctctgcatcaagatctggttctcagtgaaacactctgcacttgaaaggaccgatgcaaatgtaaagattaaggtatgtgctcatgctgtgctaatgaaagccttaaattcagtgttttgttttttttctggtggcgtactgtcactgttgactggcctacggatctgagtttttgtgtaattgtttggaagcaattccattgtcgccgaaatggcgcggtagtttctctgactgctgctgctaaatactaggaactttagttttcttcaagtccaaagggtcagagttgagagcacctgagatccggcgatgcttcatggccacggtcccccagaggctattcgcaatagttgactctaaatttctctctatatatcagttttttgtgtcaca

SEQ ID NO: 125677 - DNA, 489 bp, Zea Mays
catgtggattgggtgagaataaatttctctctatatatcagttttttgtgtcacattatcaacatttcataccttacttttttttaggagcagctattgtttgaggagcactttaggaagacaatcaccttgcaacttctctagcatatatgaatttttgaaaaccaccttggtcacttttagtaggtctttcttgttaacttgatgctcttcatcctaaaaggtacaatagtcttgattaaattcctaagggcttgttcggttagctctcaatccatgtggattgagtgggatttggtgggtttaaatcccaagcaagtcaaagttgttctaaattttttccaatcccattcaatccatgtattgtaggaataaccgaaaaaggcctaacttggaaaaatttgctttccaccaccttgttataaggtccaccaactctagctttatccttctcactatacttcaaagtttgtattgtcttgtcagtca

SEQ ID NO: 125678 - DNA, 2147 bp, Zea Mays
ctctgctttctctctctctctctctctctctctctctctctctctctacatacaaagtggaaaaaacgcacccaaaagaaaggctcacaccacccacctccatagcagcctactatcctctccttcctccattctctcgctatcttccccactccccagccaacaaatcgaccttgctgggaacgagagggctatagagcctggggagggcagcgcaacacgcgccacggagcagcggcggcggcggcggcggcagagcagtccgccgggagcagaggccgcgcgcgcagcgcaggcagccatgggcgcgccggtgaacggcgccgtcgtcttgttcctcctgctgctggctggaacgggggcggtgaccgaggagacggctccgcaggaacccacattgcccgccgccggctccggctccggctccggcgccggcgccggcgcggcggtcggggtcaactccaactccgtgctggtcgcgctgctcgactcgcactacaccgagcttgcggagctggtggagaaggcgctgctcctgcagacgctggaggacgccgtcgggaagcacaacgtcaccatcttcgcgccgcggaacgaggcgctggagcgggacctggacccggagttcaagcgcttcctgctggagccgcgcaacctcaggtcgctgcaggcgctgctgctctaccacgtcctgccctcgcgcctgccctccggctcgtggcccgcggccccgcaccccacgctctccggcgaggacgtcgagctcgcctcggccggcgccggcggcatgcgcgtcggccacgccgccgtcacgcgcccggacgccgtgctccggcccgacggcgtcatccacggcatcgagcgcctcctggtcccgcgctccgtgcaggaggacttcaaccggcgccgcagcctcgcggcgatctcggccgtgctgcccacgggcgcgcccgaggtcgaccccaggacgcaccgcctcaagaagcccgcgccgccggttccccccggcgcgccgcccgtgctccccgtctgggacgccatggcgcccgggccctccatcgcccccgcgccggcgcccggcccgggctccgggaagcaccacttcgacgggcacagccaggtgaaggacttcatccagacgctgctcctctacggcggctacaacgagctggccgacatcctcgtcaacctcacctccctcgccaccgagatgggccgcctcgtctccgagggctacgtgctcaccgtgctcgcccccaacgacgaggccatggcgcgcctcaccacggaccagctcagcgagcccgggtcgcccgagaacatcctctactaccacatgatccccgagtaccagaccgaggagtccatgtacaacgccgtgcgccgcttcggcaaggtgcgctacgacaccctgcgcctgccgcacaaggtcgtcgcgcgggaggccgacggctccgtcaagttcggccagggcgagggctccgcctacctcttcgacccggacatctacaccgacggcaggatctccgtgcagggcatcgacgccgtgctcttcgcgccggacgacgccaaggccacgcagaccgccgaccccaacaggaagcctcccgccatcgtcacccacaagaagaagatcaagctccggcgaggcaagctgctggaagcgacgtgccaagtggctgggctcttcggtcagcggtcgcgattcgcaagctgccagtagacggagaaggggctgtgataccgaaagacgaacgaactgaactggtgggctggggctgccctggagaggcagagggagccgtccacattattacttggtttctttcttttttttgtttattattgagaataatgatgaatcaggtcaggtgggtgggggatgtggctgtaaactcggtgggctgtcggtgtgtccagggggaaaaaaagagagaaaaggcagcgaaagaaattgtccatacatgaagaagcccagggtcgtcgtctgtgtataggaagggattaaaaaagatgttttgttttcttctgtctttctttgctttgcttgtgttcccgttttgacaatgagaaatatcgggtaaacacacaaccttccctattatacatttcccttcattttattatacatatatactctctctctc

SEQ ID NO: 125679 - DNA, 365 bp, Zea Mays
agcaactcattcacccgcaactcctgagagtaatccgtttggagccaagctctccaacaagtggcggtaacattttggtggcgtatgtccctattttattggggcttattgcctgttctggcatcagcacgacgtaactagcttttgccacaagcttggtgttagtttgtgagggtgataggccagtgaaattgttctgctgcttagcatagttggccctatggataccaattgatctatagacagccggaaacttggctaatttattatgactatggatgagacttttgtgatgtaattgatgagactattgatttaaatattgttatatgattgtgtgatagatgttttatatgaaaatatgt

SEQ ID NO: 125680 - DNA, 1909 bp, Zea Mays
gcgcacgcagaggagcacagcggcgtcactgctgcggcagtaatggccgcctggttctcccacggcgtctactagcgatacaccgagaccacttttctcttgcttccttcgaccccgccccctccggcctccggatcgcgcaccgcgcctgccctccacccaaaaccgctccggagcctttgcgaagcggcgccgcttactggccggcaaggcgaccccgtctctcggcggcctgcgttgatctggttgctgctgttgaggtgggcagagcggcggccgcgatgggcatctcggcgaggtggctcaagtcattagttgggctgaggaaggtggagcagcagccgcgtaaggagagtgcagatgttggacgaatgaaaagtgatgtcgccgatcagtttcattttcagaatcagcgctctcaagatgacagcagcattgctgcacaagaagaaattccagaggttccttatggaaatgatccacctgaagatgattctaatgcaccttcatgcttggaacccacttatagttcagctgatgtgccactgtttcaaactgaagaggaactgaaagagatctgggctgctacaattattcagacaacattcagagctttcctggctaggagagcccatcgagctttaaaagggttggttaggcttcaagcccttgtaagaggtcacatagtaagaaagcaagctgatacgacactccgttgtatgcaagctttggtcagggttcaggcccgtgttagagcaaggcgagttcgcatggctttggaaaaccagactgatcagcaaaatacttcaccagagcacacgaccgtggcacgtgtcagagaaattgaggatggctggtgtgatagtattggttctgtggaagatatccaagcaaaacttttaaagaggcaggaagcagcagctaaacgtgagcgagccatggcctatgctctagctcatcagtggcaagcaagttcaagacaaattacagcatttgagcctgacaagaacagctggggctggaattggctggagagatggatggctgttcggccatgggagagtcggttccttggcacttacactgcagatgggattttcgtagtcaatgaaaccaagcaacctgacagaagtgcaaccaagaccccctacagaaaacctgttaaaaagcatgattcaacccttcaatcaaacatgttgaaccagaagggcttcccatcaaactcagagggtgttggctcctcggcaaaccgacccagtggtttggtatctactaaatctagactcaaggttttacccagagaaggtcctgaggaagccccatctcgtccttcgccacttgtgcggtccgctagtaatccgaaggagaggacttccggtattaattctgagagaactggggacttggattgtcaagttcataaaaggttctccttgctagggctgggttcagaagctggtagacacctgacaaagaaaggcacagttaaccgatccctgaaggccacaaaagattcccacatgctggggtcaagacatcatcttgccagttgcattgatccagttcccactagagttgagctggagacttagaaggcatgtgatgcttgaacatcgccatggattgcacttagcatagcaagtagcaacttggatgccattcatgtctgcatggctgcatcgtttgtactggcggcagcggcttctttcaacaccgaatatgcacgtcagcatgtccatacatgctgaggttaccccattgggcctttgagatgtaaattatgtcgttcagtcgagtggtatgcttatcatgtgtttatcggtgtatgatgttggtatagttgtaacttggaaggctaagcgaagttgtactgttgtatttggtattgccgtattgatatatagattgc

SEQ ID NO: 125681 - DNA, 1833 bp, Zea Mays
gcgcacgcagaggagcacagcggcgtcactgctgcggcagtaatggccgcctggttctcccacggcgtctactagcgatacaccgagaccacttttctcttgcttccttcgaccccgccccctccggcctccggatcgcgcaccgcgcctgccctccacccaaaaccgctccggagcctttgcgaagcggcgccgcttactggccggcaaggcgaccccgtctctcggcggcctgcgttgatctggttgctgctgttgaggtgggcagagcggcggccgcgatgggcatctcggcgaggtggctcaagtcattagttgggctgaggaaggtggagcagcagccgcgtaaggagagtgcagatgttggacgaatgaatcagcgctctcaagatgacagcagcattgctgcacaagaagaaattccagaggttccttatggaaatgatccacctgaagatgattctaatgcaccttcatgcttggaacccacttatagttcagctgatgtgccactgtttcaaactgaagaggaactgaaagagatctgggctgctacaattattcagacaacattcagagctttcctggctaggagagcccatcgagctttaaaagggttggttaggcttcaagcccttgtaagaggtcacatagtaagaaagcaagctgatacgacactccgttgtatgcaagctttggtcagggttcaggcccgtgttagagcaaggcgagttcgcatggctttggaaaaccagactgatcagcaaaatacttcaccagagcacacgaccgtggcacgtgtcagagaaattgaggatggctggtgtgatagtattggttctgtggaagatatccaagcaaaacttttaaagaggcaggaagcagcagctaaacgtgagcgagccatggcctatgctctagctcatcagtggcaagcaagttcaagacaaattacagcatttgagcctgacaagaacagctggggctggaattggctggagagatggatggctgttcggccatgggagagtcggttccttggcacttacactgcagatgggattttcgtagtcaatgaaaccaagcaacctgacagaagtgcaaccaagaccccctacagaaaacctgttaaaaagcatgattcaacccttcaatcaaacatgttgaaccagaagggcttcccatcaaactcagagggtgttggctcctcggcaaaccgacccagtggtttggtatctactaaatctagactcaaggttttacccagagaaggtcctgaggaagccccatctcgtccttcgccacttgtgcggtccgctagtaatccgaaggagaggacttccggttcagaagctggtagacacctgacaaagaaaggcacagttaaccgatccctgaaggccacaaaagattcccacatgctggggtcaagacatcatcttgccagttgcattgatccagttcccactagagttgagctggagacttagaaggcatgtgatgcttgaacatcgccatggattgcacttagcatagcaagtagcaacttggatgccattcatgtctgcatggctgcatcgtttgtactggcggcagcggcttctttcaacaccgaatatgcacgtcagcatgtccatacatgctgaggttaccccattgggcctttgagatgtaaattatgtcgttcagtcgagtggtatgcttatcatgtgtttatcggtgtatgatgttggtatagttgtaacttggaaggctaagcgaagttgtactgttgtatttggtattgccgtattgatatatagattgcacatgcgtcttgcagttgaatttcta

SEQ ID NO: 125682 - DNA, 1715 bp, Zea Mays
ctgcagttctgtgccgatgctgacggaaaccgggggggaaaatgcgttttcaggttgctgctgttgaggtgggcagagcggcggccgcgatgggcatctcggcgaggtggctcaagtcattagttgggctgaggaaggtggagcagcagccgcgtaaggagagtgcagatgttggacgaatgtttcattttcagaatcagcgctctcaagatgacagcagcattgctgcacaagaagaaattccagaggttccttatggaaatgatccacctgaagatgattctaatgcaccttcatgcttggaacccacttatagttcagctgatgtgccactgtttcaaactgaagaggaactgaaagagatctgggctgctacaattattcagacaacattcagagctttcctggctaggagagcccatcgagctttaaaagggttggttaggcttcaagcccttgtaagaggtcacatagtaagaaagcaagctgatacgacactccgttgtatgcaagctttggtcagggttcaggcccgtgttagagcaaggcgagttcgcatggctttggaaaaccagactgatcagcaaaatacttcaccagagcacacgaccgtggcacgtgtcagagaaattgaggatggctggtgtgatagtattggttctgtggaagatatccaagcaaaacttttaaagaggcaggaagcagcagctaaacgtgagcgagccatggcctatgctctagctcatcagtggcaagcaagttcaagacaaattacagcatttgagcctgacaagaacagctggggctggaattggctggagagatggatggctgttcggccatgggagagtcggttccttggcacttacactgcagatgggattttcgtagtcaatgaaaccaagcaacctgacagaagtgcaaccaagaccccctacagaaaacctgttaaaaagcatgattcaacccttcaatcaaacatgttgaaccagaagggcttcccatcaaactcagagggtgttggctcctcggcaaaccgacccagtggtttggtatctactaaatctagactcaaggttttacccagagaaggtcctgaggaagccccatctcgtccttcgccacttgtgcggtccgctagtaatccgaaggagaggacttccggtattaattctgagagaactggggacttggattgtcaagttcataaaaggttctccttgctagggctgggttcagaagctggtagacacctgacaaagaaaggcacagttaaccgatccctgaaggccacaaaagattcccacatgctggggtcaagacatcatcttgccagttgcattgatccagttcccactagagttgagctggagacttagaaggcatgtgatgcttgaacatcgccatggattgcacttagcatagcaagtagcaacttggatgccattcatgtctgcatggctgcatcgtttgtactggcggcagcggcttctttcaacaccgaatatgcacgtcagcatgtccatacatgctgaggttaccccattgggcctttgagatgtaaattatgtcgttcagtcgagtggtatgcttatcatgtgtttatcggtgtatgatgttggtatagttgtaacttggaaggctaagcgaagttgtactgttgtatttggtattgccgtattgatatatagattgcacatgcgtcttgcagttga

SEQ ID NO: 125683 - DNA, 1088 bp, Zea Mays
acgacgcgtcttgtaaagttgtaacgaaccgaaccggaacgtaacctctgtctcgtcaacgacctcgtccgtcgcgcccgaggcgaggaagcaacccgccccagtttcgcgctatggcgacggcgacgtcatcgaggcgcgtgtcggtgccggccctggcggccgccgccgtgctcctgctcgcgtccgtagccgcggccgacgaccacaacggcgtctacgacccctgcgcggacgcgtcggtgcagcgcggcgacgggttcaccttcggggtggtcttctccgggcgcgactccttctcctccggcggcgtgcagctctccccctgcgacagccgcctcgggctcgccaaccgcgcgcaggtcgcgctgttccgcccccaggtcgacgagatttcgctcctcaccgtcaactcctcctccttcgacccgtcttcttctggtgtgtacatggtggctttcgccgggaagaaatacgcagcgaggtcaccccctgtgttcgtcggcaacatctcgtacacggtgaccggcttcaccctggtcctggagttccagaagggcacgctccagaacctgttctggaaggccggcgggtgctcgtcgtgctccgggcgctccgacttcgcgtgcgtggacggcagctgcgcggtcaggacggcgagctgcaggggcaagggcgggcaggtggagtgcagccccgggatccagctcgcgttctccggcacggacaggcacgaggccgtgctcaactcgtggtacgaggtgtccaagctccggcagtactccctgttcgggctcttctccaacctcaaggactcgctgaccaaccagttcagcagcttcttctagagctgcagtgctagctgccacgtctctctgtcctcctctgtcccgttgtatggttatcatgtagagtatgcttagcgaagagcacttctcctgtagttctgtttctggtgacagaagaaatatgtatgtgctcaacggctatcagattagtcctatatatatgtgcagtttataattcatatgagacggtgtaagttaccgtgattccactcgcaaagctgatcagggtcgttctggccg

SEQ ID NO: 125684 - DNA, 1657 bp, Zea Mays
cccagcgccaccactgtttgcaaaaatatatgttaaaaaggcactagcagcagtagtacctgaagctccaaaaaaaatgatgcgctgttgtgctgtgctgttggcctccgcctggcctagtccgcgtttccatatatagaaaacccacagctctagctagagtgaccaccaccagaccagactagaccgcacttcccctcacctctcatcagctcaccctcaccagctctcccgtgtcggcgtgcaacagaacagcctcctcccagcctcggtcaaggagtttcatttcctcctcccaggctcccacagatatccggacatggacgacgactccaggtctcaggcggcggcggcggctgacctgtcgctgtccctggcgccgacgccagcgcctcccgcgccgcctccgccgggacccgggggcggaggcggcgtggcgacggcgtgcgtggacggcaaggacgtgcgcctgttcccctgcctcttctgcaacaagaagttcctcaagtcgcaggcgctggggggccaccagaacgcgcacaagaaggagcggagcatcggctggaacccctacttctacatgaccccgcacccgcagcagcccaatgcggcgccgccgagccccacagccccgcccgcctacgccgccgccgccgactacggcgtcgcgggcgcgggcgcgtccgcgggggtcttgggcggcctcctccccgcgtcgtcgtacgcgggacacgtgtacgcccccgccgtgccggtgccggcgccgttccccatcgcctcgcacggctccagcggcctgcactacaactactacgcgccccacgaggcagcggcggtgtcggcgggaacggggacagggacagggacagggacaggcacgggggcggggacggccgaggccggcggcgtggccgtgctggccccccgcgcgcgctacgccacgcaccagccggccgagcagcccggcggcgccggccgcgatgacatgctcaactggaggaggggctcccacggcaccaccgcctcggccgccgtcacagccgcgtccccggccagcaccaccaccacgctcaccacctcctgcgccggcgccgccgacggcggaagcagcaacgacgacgacgacgacgccggggagctcgacctcaacctcagtctctagcactccgatacgtcgtctacctacgccacgccaaggttgttaatcatgtgccggcctatccgtacgatacgcgtgtcgcttaattagctctcaggtctcagtaggcacgttgatcactctctccctctgtctattctcaccgtatggtatgccatgttattagtacgtctcgtctcgtcgtctcccgtcccttctgccatggcccgatgaattgttgttcatctctgtcctgtttttttcttcttcttgaggctttgtttgtcctcgctgcgtttgttggggttcgccattgcctcgcgtgtattgggagttgggacagctgctggtccggcgcgcggcagcaatcgggcaaccagtgaggcagtgacaggcacacaatgcccgcgccacggcgtcgctgttgagctcctgctctcgccatgggcatgtcaagtcaatgttactccacgttttttgtgctggtgcagaccgttccgttgcatctaccgctgtact

SEQ ID NO: 125685 - DNA, 243 bp, Zea Mays
atggcggatggtgtggtgcttctgctgtgggctgtggctcggccaccgtactccatccgaggctcgccatccgagttggcgtggtacgggcggggacggggacaggtggccgggggacggggacagggaacggacagacggccatgtgaccgtggcgggctcgccgtcagcgagcgagggacagggagaggccgcccgacccaggggccagggccaccatcggcagagctcgtgagttcgtga

SEQ ID NO: 125686 - DNA, 579 bp, Zea Mays
atgacggattttgaagagtttgggcctcaaaactcggcggcggcggttccgaagggattttgggttgaactgggatttggggttgaactttgggatcaaagtcacatactcgtaggacgagaatttttagtggctctcattcatcctcctctggtcacctcactagtcctacaggatgaatcttctacctatttaattccagaaaaatgcaataaaccatgtgattccagcatacataaatacataattacatacagtcctgtaagactagaaagctaaggtctcagatggggaaacttgataacaaacaaaagtaacttctggtagttaggaagtataacaaacaacaacaaacgcccaggattgtgctatgaagtctacgtctgaaaccaggaagtaatgttacagcatctgatggaaagctacgttcaatcaataaggctggaagtgtctagcccacttaggagtttggaactctggatagctcagtgcaagcaaagcaccagaaatggtagcatatatcaaaaaataaagaccgaatcttgacaacaactacttaacaacagtacaatttaacag

SEQ ID NO: 125687 - DNA, 1309 bp, Zea Mays
aaataactcgtcggagtcagtacggtgctctctccgtctcagccgtcgccaactaatctatccccgatcacgcggcgaaccgccgcaacaccactatcaccaatcgcaatggagaaccctccaccgtcctccgccggtccgtactcggcgcccgcgccggcagcgcagcatcaggacgcggcgaaggaggatcaggacgtggcgcagctcgtgctcaacctctgcatcccggagctccgcgagaaggccatcatcatcctttccaagaagcgagaaaaatgtgaagatcttgctctactactatggcactcttttggtacaatggctgcactactccaggaaattgtgtcaatttatcgattactttcacccccacaattatcttttgaccaatcaactcgagtctgcaatgtgcttgtactccttaagtgtgtggcatcacaccctgatactaggatgccatttttaaatgcacagtttccactgtacctgtaccctttcttgaacactacctacaaaacaagagaatatgagttcttgaggattagtagcctgagcgtgatcggtgctcttgtgaagtccgatgatcatgaagtcattgtgaatttgctgtgttctgaaatagttcctttgtgtctgcgtgctattgagatgggcagtgaactttcaaaaaaggtggccacttttattctccaaaagattatgcttgacgacacagggcttgcgtacgtatgcgcttcttctgaacgtttctgcgctgttgccaatgtgctagctcagatggtcgaagcacttgctgaacagccttccccgaggacgcttaagaacacaatccgctgctacctcaggctgacagatgatcgaagggcctgccaagcgttacgtgactacctccccatcgcgttgagggacgggacattcaacggcttaatcgaggtcgatctcacagcaaggctatggctccaccagctgctgcataacgtcatgatgtcagacagtggaggcggccctcgccctgccccgggtcctgtgatggggatgtgaatgaagccggtcgccacgcctcatcatctgtgaagatccaagagcgtgcgttgtagctgtaggtagcgaagtagtaacccacagggaagggaaagcaatcgtggtggtgttcacacccttttggagggaacaaacacaaacagctgagctttgtgccgtttggatggcgaagaagcaacgataacacgcgtcttcttgatacaagtctggctggccattggtcgttgggattttgaaatgatatacaggtaaaatttgcactgtg

SEQ ID NO: 125688 - DNA, 779 bp, Zea Mays
aattcgctggcatggcgcggcggttacctgccgctgactcgctctagtggtgaggacctgctgcagtggacgtctgccgtggacgtggtggcggagaggggtgctggcggcgagcgacggcggagcagccatggaagcggtgcagacggtactgagcgagagaacgaacccgctgctcaacaagtcgcccagtccatccgtcgtcgctgggctccaacctgacgccggcaacggctcggggttctacgtcggggtctattctttcctcgacacagccaagccatgcaccaaccggttcagcagcgggtcgttgacatccgaggactcgccagtgctgacgcccaggctgctgtccttccagttcagctctagccccgacaactgctcctcctccgccgaatggcctgaccgtgcggtggcgccgcgctccaaccggtacctcttcgccgcgaacgcgtaggcccggtgcaccgagtagagagcaagtgataagctattttaagtctgagatcagcaaactgaaaaggatgcacggatcagcattgcaagagaagacagaagaactgttcaggttcaaacgggagaaagggtcacattctctcaagaatggcatccaattcgaaccctctgagaaagaaaattccagagattgtattaagaatggaccaaatcatttccaagaatataaaggtacctgcaatctgcatgacccatgatgaacttgacgaaagatgcagactgatgagcagaatcaacgctttattttatgaaaaccaaca

SEQ ID NO: 125689 - DNA, 706 bp, Zea Mays
aattcgctggcatggcgcggcggttacctgccgctgactcgctctagtggtgaggacctgctgcagtggacgtctgccgtggacgtggtggcggagaggggtgctggcggcgagcgacggcggagcagccatggaagcggtgcagacgatgattgaagcgaggcgttctgagctctaaaaggctgaagccaaggttgtgatattgggcgacaagatcgctgcgcacttaagcctccttcaaaagatatatttggctcttgatgcttactctcctacattgcagcagcatcctggtctgctagacgttttcttaaagacatgcaagcttgttgcagatttgagaattagacagaacggaggcgatatgacatgaatgaggtggcggtatggtgagatctccgttggtagctaatgctgctcatgtgcttaaccatgttccacgcctgcagatgcagaccaagtgaaggattctatttaagtgaggtttcagtttcaggtcctgatgcgaaagggcctctagctgagttggttaggtggtctaagtagcactcctcaggtcctgggttcgacttcccgtgggagcgaatttcaggctgtggttaaaaaaatcccctcgtctgtctcatgccaaagcacaggtctaaggctcagccccggtcgcggtcgttctcatatgggcttcgatgccgctgtgtatgggtggggc

SEQ ID NO: 125690 - DNA, 145 bp, Zea Mays
atgtattttgcaacgaccggtataatattcagaacgtcgcaagcgttgacatggtttcctttgtatgtagctgctagacgttttcttaaagacatgcaagcttgttgcagatttgagaattagacagaacggaggcgatatgaca

SEQ ID NO: 125691 - DNA, 2260 bp, Zea Mays
ctccaatcacgaattcacgattcacgccgcacgccccgacgccccgacgcccgcagccccgcatccgcacttccgcaggccgcagcgcacaggagtcccgatctcgactcccgactcgaactcgacgactcccagtcccagttcctctcgtccgcaaccgcaaaatccaagaccctggccgccggagccgaactggcccgcgcctcgggccctgcccgatttgtgtgctttgcggcctgtgggcatgctagccagccggcggcggcaccggagtccatagcagcaaccacgcggctacgagctacgacgggctggctaaggcgcaggttgagcgctgaaggctacccagctgtggtctcacgcgggtggccggtgagagcagccaagcggcaggtacatctcccctctgccgctccaccctccgaggcggccctccctctcaatccctccagcatctggtatctctctattatctgtagaatcataaatctaaaaattatagattattcacaattaaaagtagaagtgtactatgtaatgttattaacaattttatgtgaaacatgcggcttaatcgtcgtatcaattagtttttttttaaaaaaaaattgtagctactttccgtcgctggctagagtcctactctttgtcaaattctaggtgcgctggacgctggacgaaccctaccacgcgcaccgtcacgttgtgaattgaatcactctctgttgatgggcagcctgagcgctccgccagtgctgtcgccgctcgtttctgggctcatcttttcatctgacagagtcctcaaatctagagggttaactaccagtagcgtgatgaagtcatgtaggctatccgagctcagcaatgctgaggttagcagcctcaaggctcgtcctcgcatcgattcctcgtccatgtccatatttggcacggtgaatccaattgttgagggtgtctgtgtcagaggtgatgcagcagataagcagtaccaggtgaaaaactgcagatggaggccaacttttgccttggagactgatgggccatctaacactgatggccaagactttgatgaggacagtggttttcttggtaggactagactgggaagactcatccaagctgctgcaagggagctacttgacaagctgaactctgcgagaaccaattcgccaacaaagatattccttgtcctccttggtttttacacagccaatgccttggcaacaatactagggcagaccggtgactgggatgttcttgttgctggtgttgtagtggctgccattgagggaattggcatgctcatgtacagaaaaccaattgccaggcctcctggtaggttccaatctttgatttcaatggtgaactactggaaagccggtgtatgcctgggcctttttgtggatgccttcaagctgggtagctgagtttatacaatcatctgctgctatctgcctatggtaattttttgggtatattgggatcacaataacgccatgatatggttccatgatggccattgctcgttgctcgaattctaatagctgcatttggctctaattctgggagcattggctgctgaggtatcagatttcttcaaagttaatgaagatgtttggagcagatattattctgaggtgactattcatttttccataatcgaaggccatgtttgtcaaccattgtttggcccgtaaactgtagatatgctgtagtttttccacctccatgtcatttagccctaatatgcatttatgcgtactgagagaagtaaaaaaaaaaaaagatgtgctgctttaagggcatgtttgggagcaaggggatattgaatagcaatgggattttagccccttcaatccccttgctccttagataggatgtatttcttctacggatatatggtacttgtacgtgcgtgtcagcatgtgatgagttgaatacttctttcatccaggattattctatatcttgcactatatgtcattgttaccaaaaatgttttctctctgtatactccttttaattgtgcaagtgccagtggtattttcggtggattaactgttactaaaaatgttttcactctgtatactctttttagccgtgtaagtgttgaagtcattggattgtgtgaagttgttttacttctcttaaacataccactcgtttgtatctagatgtatcgaataaagtggatcttgtttctatctttgatgatgtagattttctttgcaaggcttaacgaaaccatggaccagttgag

SEQ ID NO: 125692 - DNA, 1993 bp, Zea Mays
ctccaatcacgaattcacgattcacgccgcacgccccgacgccccgacgcccgcagccccgcatccgcacttccgcaggccgcagcgcacaggagtcccgatctcgactcccgactcgaactcgacgactcccagtcccagttcctctcgtccgcaaccgcaaaatccaagaccctggccgccggagccgaactggcccgcgcctcgggccctgcccgatttgtgtgctttgcggcctgtgggcatgctagccagccggcggcggcaccggagtccatagcagcaaccacgcggctacgagctacgacgggctggctaaggcgcaggttgagcgctgaaggctacccagctgtggtctcacgcgggtggccggtgagagcagccaagcggcaggtgcgctggacgctggacgaaccctaccacgcgcaccgtcacgttgtgaattgaatcactctctgttgatgggcagcctgagcgctccgccagtgctgtcgccgctcgtttctgggctcatcttttcatctgacagagtcctcaaatctagagggttaactaccagtagcgtgatgaagtcatgtaggctatccgagctcagcaatgctgaggttagcagcctcaaggctcgtcctcgcatcgattcctcgtccatgtccatatttggcacggtgaatccaattgttgagggtgtctgtgtcagaggtgatgcagcagataagcagtaccaggtgaaaaactgcagatggaggccaacttttgccttggagactgatgggccatctaacactgatggccaagactttgatgaggacagtggttttcttggtaggactagactgggaagactcatccaagctgctgcaagggagctacttgacaagctgaactctgcgagaaccaattcgccaacaaagatattccttgtcctccttggtttttacacagccaatgccttggcaacaatactagggcagaccggtgactgggatgttcttgttgctggtgttgtagtggctgccattgagggaattggcatgctcatgtacagaaaaccaattgccaggcctcctggtaggttccaatctttgatttcaatggtgaactactggaaagccggtgtatgcctgggcctttttgtggatgccttcaagctgggtagctgagtttatacaatcatctgctgctatctgcctatggtaattttttgggtatattgggatcacaataacgccatgatatggttccatgatggccattgctcgttgctcgaattctaatagctgcatttggctctaattctgggagcattggctgctgaggtatcagatttcttcaaagttaatgaagatgtttggagcagatattattctgaggtgactattcatttttccataatcgaaggccatgtttgtcaaccattgtttggcccgtaaactgtagatatgctgtagtttttccacctccatgtcatttagccctaatatgcatttatgcgtactgagagaagtaaaaaaaaaaaaagatgtgctgctttaagggcatgtttgggagcaaggggatattgaatagcaatgggattttagccccttcaatccccttgctccttagataggatgtatttcttctacggatatatggtacttgtacgtgcgtgtcagcatgtgatgagttgaatacttctttcatccaggattattctatatcttgcactatatgtcattgttaccaaaaatgttttctctctgtatactccttttaattgtgcaagtgccagtggtattttcggtggattaactgttactaaaaatgttttcactctgtatactctttttagccgtgtaagtgttgaagtcattggattgtgtgaagttgttttacttctcttaaacataccactcgtttgtatctagatgtatcgaataaagtggatcttgtttctatctttgatgatgtagattttctttgcaaggcttaacgaaaccatggaccagttgag

SEQ ID NO: 125693 - DNA, 3147 bp, Zea Mays
ctgctaccccaaatacgttttttcccttcaaaatttaccctttccagttttcttaagtacttttgctgttttctttttttccctctgacctcaaattaccaaattacccttcatgacctgaacgaagtctcagcattatttttccgtcttctcttaagttctcgtgttctgtctctatccatttgtttactcccgatccccatcagccatggcgataaagtgagggttccaggcggccgccgcttcagggagggctcgcggcggagacaggctcggcgctcgcgcggtcggcaggagctcgcagcgggcaagggctggctctcgggcaggaggtgctcgcagcacggtgctggcaggggtggctcgtggcgcaggcaaggagaagctcacgacaggggcggctaagacttcggtgcgggcacagttgcaggttgcagcagccactcgttgaagatgtttccctctgacgtcgacgatgctcactagcaagcttgcaaaaggactttgctgccagggtgaactggggcagcaaccaagaggtgtgttgataggaggttgtacttgtttgctgatgtggtagataaatcggctcaggtgattagtaattctggtctcacagttgttagtcacagtggtgtggaaagtgcagcatatgcatccaggaaatggccacacccaaaaggcaacaagttgtgacaaatcaatcaactaatattagtcctgtccctgtcacaaggaggcaattggcattatcaatgctcgatgaaagcacaagtcaggaattggccacaccttcgagggcaaccaaatccccttccaagcctacatcaaggattgcaaggaagatcactccaagaaaattcaaaaagtgaatgtttttgtgtctacaaaactatgatattggatgcttttgtaatcttaattaattagaacggaggcatttggatgatattttggcatatgtatggattgttgacattaaacttgttattgtgcttgctgttatgcttctgtatgggattattgacatttggatgacatttgggcttaatatttaaatcaaacttgctattatgcttgaacgtggtgcacatgtgtgcacgttgctacaattttttaatgcatgagtttgtattttctaccatacctattcttctttttttacattttttattcgtaatgtcttttatactttgggcaaactctgattatactttgggcaaactctgatgtggatgaggaggaccaaacggcgcagctctaatgtgcacaagcagaagggtactttggtcatttgaggtcagagggaaaaaagaaaacagcaaaagtacttaagaaagctgaaaagggtaaattttgaagggaaaaacgtatttggggtagcagccgaatggctaacgtactaagggataaagtctgaaaggctaacgtattgaggggcagcagctgaaaattctctatattaggccccgattctgatgaggcccatatgtcccggcacgtaattacgagcacctcccagtccgacctgttcggatacggagcccacgaggccacgaacgaagccctaatcatccgctccaaactccccgcaccggcagagatcagccgtccacgagagcatcacggctagggtttccgatttcaactaggacccctggatctatgattctatgaaccagaggcgagacgagtggccgcagcatcaggaccgtctccaactcgccagtactcagccgccgcaatcagggacagggagctcgagcgcgcgccccacctgcgccgacgcgatgcgggccaaggttcctcttccctcgcctccgctgcgttcttctttccatgatgatgcgatgaaaccgtgtcctaggtagctttgcggagctagtcattttctaggttttcgccgtgggctgtgggtggccagaggcgacaatcccagcgaggtggtggcgttgggcgccgcatccgccttggccgtcttgctggccgccgctgcccctgccgcagggggaaggacgacacggaggagtccaggtacaaggccccgactgcaggtccctggttcaagcccaaacgaaacaaaatactcaaaccaactctcgccgccgccgccgatgacatcggaggagcatccctcgtctacgtcctcggacggcagcacgaccatcggctccgacgaacatcttgattccccgccatcaccttcgacgttcttcgactctcctcctgaatccgatgactccgccgcctcctcgctgctctcggacggctcttcagagtccgagcccatcattttcaagaaaccccgcccacccgtgcgctcgtggccggcctccgacgagatcgcgatcctcgagaccgtcgcgtcgcaccggcagaagcacgggcgacttcccctggcagacgacctcgccgccgcggtgcggggccgcctcagcgcgggggaccgcctcagcgccgcgcagatcaccaggcggctgtgcgcgctccgcaaccggtacgacaacactgttatccgcctcaaacgcggcacgatcccggcgaaggacagcgacgtcaccatctacaggctctccaagctcatctgggagggaacgcgcagggggaggatagagaagaagacccgtgtgcccgacgcgcgcaatgacccaagagggttcgacgatctggccgagctgtacccttgcctctccgcggaggtggaggcgattggtgcgaggtgcggctacggggcgctgaagagggcattcgggcgcatcggtgacgacacggcggcgcggctggaggcgaagctgaagaggcagcggatggcggagaccagggcgagcggaaagcttgaccggctgaggtcgagagtcgccaaggcgcttcagggatttaacaagtgaaatggtgatttcttcatcttctttctgttgctacatgggttggcgtagaaagacacaataggattggttccttcgcattgtttcatggttgaaatgttatcagattctctggcaagtttgagggcactatcaactgcaaagaatttgaaatgtcaatggctggcattgagtttgttttgcactaccattgtctgtgctaagaacaggatttcagaagcaaaataaattttcccgctgtgataaaattcaaagtacagaa

SEQ ID NO: 125694 - DNA, 4664 bp, Zea Mays
atggcgataaaaagcacccagagaacaaatgagatagggattaactctgatgtcacatatacagtatgtgttcagtttggtcaattcattgctaaatttgatgacggtagttgtgttcttgtgccacacaaatacgatgaatgggttgtggattatcagcgatgctcactagcaagcttgcaaaaggactttgctgccagggtgaactggggcagcaaccaagaggtagaggtgtcagtatttgacaagagcatcaatctagaaacaaggctggagaatgattccgtattgcgtgcatttttcgacaggtgtgttgataggaggttgtacttgtttgctgatgtggtagataaatcggctcaggtgattagtaattctggtctcacagttgttagtcacagtggtgtggaaagtgcagcatatgcatgttcaaatagtcaactagaaagcgcatctaatgtgatatctccaaatgttgatgtaccttttgttgattgggatgctcttgagattgttcctattacagaagagctggttggttctatagttcccgttgttgatgaagacaatttttatgaacacattggtcttcgagccgaggatgagagagtagagaaaggcaaagatagactaccagatgaagttgcatgtgaaggtgcacttgatgttgaaggtgcagccataccttgtactgatacaataccgggtgaggatgctatcttttatgataaggaggaccctccaatgactgttggcagcacatatgcaagcatgaatgagttcagatcagcagtaagacaacatgctataaagggtcagtttgaggtgtggacaaggaaatctgatacatgtaggtttaggggttattgcatagcaacataccgttggatagcagagaagtcaatcccatttttgaagaaggatccaaatatgggcgcaaaaaagttacaagaggagctagaggataaatataatgtgaagctaggatactcaacagtgtgggctggtagacagaaggcggtggaacaaatatttggaacatgggaagaaagttttgcagatttgtataggttcaaggcagagattgacgcaaaaatgcctggaagtgttgtcgatttagaggtgcaggaggaagaggatggtgtgtattttcgcagattcttttgttgtttcaaaccaagcattgatggttttctgaacggttgcagaccgtttttgagcgtagactccacagcgctcaatggcagatggaatgggcagttttctgaaaaggaagagtcacgccaaacaagggcgaccattaggatcagcaagtacttgcacgcccaaaaggcaaaaagttgtgcaaaacgagtcaactaatattagtccggggcctgttacaagaagccaatcggcgttatcaacgattggtgaaggctcaagccaggaaatggccacacccaaaaggcaacaagttgtgacaaatcaatcaactaatattagtcctgtccctgtcacaaggaggcaattggcattatcaatgctcgatgaaagcacaagtcaggaattggccacaccttcgagggcaaccaaatccccttccaagcctacatcaaggattgcaaggaagatcactccaagaaaattcaaaaagtgaatgtttttgtgtctacaaaactatgatattggatgcttttgtaatcttaattaattagaacggaggcatttggatgatattttggcatatgtatggattgttgacattaaacttgttattgtgcttgctgttatgcttctgtatgggattattgacatttggatgacatttgggcttaatatttaaatcaaacttgctattatgcttgaacgtggtgcacatgtgtgcacgttgctacaattttttaatgcatgagtttgtattttctaccatacctattcttctttttttacattttttattcgtaatgtcttttatactttgggcaaactctgattatactttgggcaaactctgatgtggatgaggaggaccaaacggcgcagctctaatgtgcacaagcagaagggtactttggtcatttgaggtcagagggaaaaaagaaaacagcaaaagtacttaagaaagctgaaaagggtaaattttgaagggaaaaacgtatttggggtagcagccgaatggctaacgtactaagggataaagtctgaaaggctaacgtattgaggggcagcagctgaaaattctctatattaggccccgattctgatgaggcccatatgtcccggcacgtaattacgagcacctcccagtccgacctgttcggatacggagcccacgaggccacgaacgaagccctaatcatccgctccaaactccccgcaccggcagagatcagccgtccacgagagcatcacggctagggtttccgatttcaactaggacccctggatctatgattctatgaaccagaggcgagacgagtggccgcagcatcaggaccgtctccaactcgccagtactcagccgccgcaatcagggacagggagctcgagcgcgcgccccacctgcgccgacgcgatgcgggccaaggttcctcttccctcgcctccgctgcgttcttctttccatgatgatgcgatgaaaccgtgtcctaggtagctttgcggagctagtcattttctaggttttcgccgtgggctgtgggtggccagaggcgacaatcccagcgaggtggtggcgttgggcgccgcatccgccttggccgtcttgctggccgccgctgcccctgccgcagggggaaggacgacacggaggagtccaggtacaaggccccgactgcaggtccctggttcaagcccaaacgaaacaaaatactcaaaccaactctcgccgccgccgccgatgacatcggaggagcatccctcgtctacgtcctcggacggcagcacgaccatcggctccgacgaacatcttgattccccgccatcaccttcgacgttcttcgactctcctcctgaatccgatgactccgccgcctcctcgctgctctcggacggctcttcagagtccgagcccatcattttcaagaaaccccgcccacccgtgcgctcgtggccggcctccgacgagatcgcgatcctcgagaccgtcgcgtcgcaccggcagaagcacgggcgacttcccctggcagacgacctcgccgccgcggtgcggggccgcctcagcgcgggggaccgcctcagcgccgcgcagatcaccaggcggctgtgcgcgctccgcaaccggtacgacaacactgttatccgcctcaaacgcggcacgatcccggcgaaggacagcgacgtcaccatctacaggctctccaagctcatctgggagggaacgcgcagggggaggatagagaagaagacccgtgtgcccgacgcgcgcaatgacccaagagggttcgacgatctggccgagctgtacccttgcctctccgcggaggtggaggcgattggtgcgaggtgcggctacggggcgctgaagagggcattcgggcgcatcggtgacgacacggcggcgcggctggaggcgaagctgaagaggcagcggatggcggagaccagggcgagcggaaagcttgaccggctgaggtcgagagtcgccaaggcgcttcagggatttaacaagtgaaatggtatagggacattctgttggctgtcatcgtttcatgctacttcaagttgtttcttttcacaatgatggtataaaggttttttatgtattaataagcatacatgccattttacctttctgaattgagtatgaatatttgcaggtttgggagtttccatcatctgttatattcatcgttgaaatgtttgttttctagtcagtgggatgcatatatacattagtaacagtcttggtaagtacggcacgcttcttgcataacataaattgagacatttatttgagtattcttagaccttttctaggtgtaaggatgcttacacataaaaaacattcatggagcgagcataggccgtggatagcataagataaaactatgttagggttctgtgtagcgtcaactgacatatggtcgtagttttttctattagttctgccattttttcctacgaacatatatgccatggttagatggaaagggccagatgtcttcagttcagttctgacgtcaaatgatcaagtccggaatattggcatgcactttgtatcctatataattatttgatcgatcttggtctcactcagcgtctacaatctacatcgacgtcttctagagttttctgaaatggtagtgtactagtgtgaagacatgccccatgttaaccgtgttgccttaattttttcttcaattttttctagatgtattgatggcttccttctgtactgattttgtgacaattctatttctttatttaggtgtaagttctgttcaatgttgtgagacctgagtataccgtttctttgcagttgttccgcagtttccaaaagcccattgtttcgtggtctgcttactagcgcatgcagcaaaatacttgacccagcgatggatccttggaacgacatgagcctactcgtccacatcatcctcgagcttcaagcacggccctaatcttcggatggactgttctggtgcttctagagacgtttaggtatattgtgccctgattga

SEQ ID NO: 125695 - DNA, 4256 bp, Zea Mays
atggcgataaaaagcacccagagaacaaatgagatagggattaactctgatgtcacatatacagtatgtgttcagtttggtcaattcattgctaaatttgatgacggtagttgtgttcttgtgccacacaaatacgatgaatgggttgtggattatcagcgatgctcactagcaagcttgcaaaaggactttgctgccagggtgaactggggcagcaaccaagaggtagaggtgtcagtatttgacaagagcatcaatctagaaacaaggctggagaatgattccgtattgcgtgcatttttcgacaggtgtgttgataggaggttgtacttgtttgctgatgtggtagataaatcggctcaggtgattagtaattctggtctcacagttgttagtcacagtggtgtggaaagtgcagcatatgcatgttcaaatagtcaactagaaagcgcatctaatgtgatatctccaaatgttgatgtaccttttgttgattgggatgctcttgagattgttcctattacagaagagctggttggttctatagttcccgttgttgatgaagacaatttttatgaacacattggtcttcgagccgaggatgagagagtagagaaaggcaaagatagactaccagatgaagttgcatgtgaaggtgcacttgatgttgaaggtgcagccataccttgtactgatacaataccgggtgaggatgctatcttttatgataaggaggaccctccaatgactgttggcagcacatatgcaagcatgaatgagttcagatcagcagtaagacaacatgctataaagggtcagtttgaggtgtggacaaggaaatctgatacatgtaggtttaggggttattgcatagcaacataccgttggatagcagagaagtcaatcccatttttgaagaaggatccaaatatgggcgcaaaaaagttacaagaggagctagaggataaatataatgtgaagctaggatactcaacagtgtgggctggtagacagaaggcggtggaacaaatatttggaacatgggaagaaagttttgcagatttgtataggttcaaggcagagattgacgcaaaaatgcctggaagtgttgtcgatttagaggtgcaggaggaagaggatggtgtgtattttcgcagattcttttgttgtttcaaaccaagcattgatggttttctgaacggttgcagaccgtttttgagcgtagactccacagcgctcaatggcagatggaatgggcagttttctgaaaaggaagagtcacgccaaacaagggcgaccattaggatcagcaagtacttgcacgcccaaaaggcaaaaagttgtgcaaaacgagtcaactaatattagtccggggcctgttacaagaagccaatcggcgttatcaacgattggtgaaggctcaagccaggaaatggccacacccaaaaggcaacaagttgtgacaaatcaatcaactaatattagtcctgtccctgtcacaaggaggcaattggcattatcaatgctcgatgaaagcacaagtcaggaattggccacaccttcgagggcaaccaaatccccttccaagcctacatcaaggattgcaaggaagatcactccaagaaaattcaaaaagtgaatgtttttgtgtctacaaaactatgatattggatgcttttgtaatcttaattaattagaacggaggcatttggatgatattttggcatatgtatggattgttgacattaaacttgttattgtgcttgctgttatgcttctgtatgggattattgacatttggatgacatttgggcttaatatttaaatcaaacttgctattatgcttgaacgtggtgcacatgtgtgcacgttgctacaattttttaatgcatgagtttgtattttctaccatacctattcttctttttttacattttttattcgtaatgtcttttatactttgggcaaactctgattatactttgggcaaactctgatgtggatgaggaggaccaaacggcgcagctctaatgtgcacaagcagaagggtactttggtcatttgaggtcagagggaaaaaagaaaacagcaaaagtacttaagaaagctgaaaagggtaaattttgaagggaaaaacgtatttggggtagcagccgaatggctaacgtactaagggataaagtctgaaaggctaacgtattgaggggcagcagctgaaaattctctatattaggccccgattctgatgaggcccatatgtcccggcacgtaattacgagcacctcccagtccgacctgttcggatacggagcccacgaggccacgaacgaagccctaatcatccgctccaaactccccgcaccggcagagatcagccgtccacgagagcatcacggctagggtttccgatttcaactaggacccctggatctatgattctatgaaccagaggcgagacgagtggccgcagcatcaggaccgtctccaactcgccagtactcagccgccgcaatcagggacagggagctcgagcgcgcgccccacctgcgccgacgcgatgcgggccaaggttcctcttccctcgcctccgctgcgttcttctttccatgatgatgcgatgaaaccgtgtcctaggtagctttgcggagctagtcattttctaggttttcgccgtgggctgtgggtggccagaggcgacaatcccagcgaggtggtggcgttgggcgccgcatccgccttggccgtcttgctggccgccgctgcccctgccgcagggggaaggacgacacggaggagtccaggtacaaggccccgactgcaggtccctggttcaagcccaaacgaaacaaaatactcaaaccaactctcgccgccgccgccgatgacatcggaggagcatccctcgtctacgtcctcggacggcagcacgaccatcggctccgacgaacatcttgattccccgccatcaccttcgacgttcttcgactctcctcctgaatccgatgactccgccgcctcctcgctgctctcggacggctcttcagagtccgagcccatcattttcaagaaaccccgcccacccgtgcgctcgtggccggcctccgacgagatcgcgatcctcgagaccgtcgcgtcgcaccggcagaagcacgggcgacttcccctggcagacgacctcgccgccgcggtgcggggccgcctcagcgcgggggaccgcctcagcgccgcgcagatcaccaggcggctgtgcgcgctccgcaaccgggggaggatagagaagaagacccgtgtgcccgacgcgcgcaatgacccaagagggttcgacgatctggccgagctgtacccttgcctctccgcggaggtggaggcgattggtgcgaggtgcggctacggggcgctgaagagggcattcgggcgcatcggtgacgacacggcggcgcggctggaggcgaagctgaagaggcagcggatggcggagaccagggcgagcggaaagcttgaccggctgaggtcgagagtcgccaaggcgcttcagggatttaacaagtgaaatggtatagggacattctgttggctgtcatcgtttcatgctacttcaagttgtttcttttcacaatgatggtttgggagtttccatcatctgttatattcatcgttgaaatgtttgttttctagtcagtgggatgcatatatacattagtaacagtcttgttgttccgcagtttccaaaagcccattgtttcgtggtctgcttactagcgcatgcagcaaaatacttgacccagcgatggatccttggaacgacatgagcctactcgtccacatcatcctcgagcttcaagcacggccctaatcttcggatggactgttctggtgcttctagagacgtttaggtatattgtgccctgattgatgagccttgccatttcctacccagaaaaaaaaccaaattagagttgcttaatgattcaaacaaagctgcttaatcacgcaactgatttaatagtagggctttatataacgagaggggagaccatatgtctctaccaagatacttttcgtgtactcatgttacagtggtttggacttcatgctctaacaatattataaagtaagaccactgcttcacctgttttacatctcccctctcgggacaaaagaaattggattcttgtgtttttgcagataggaattaatttaggctccctttggaacaaaggaaagaatatagaaaacctactgcccctttggaaagt

SEQ ID NO: 125696 - DNA, 4361 bp, Zea Mays
atggcgataaaaagcacccagagaacaaatgagatagggattaactctgatgtcacatatacagtatgtgttcagtttggtcaattcattgctaaatttgatgacggtagttgtgttcttgtgccacacaaatacgatgaatgggttgtggattatcagcgatgctcactagcaagcttgcaaaaggactttgctgccagggtgaactggggcagcaaccaagaggtagaggtgtcagtatttgacaagagcatcaatctagaaacaaggctggagaatgattccgtattgcgtgcatttttcgacaggtgtgttgataggaggttgtacttgtttgctgatgtggtagataaatcggctcaggtgattagtaattctggtctcacagttgttagtcacagtggtgtggaaagtgcagcatatgcatgttcaaatagtcaactagaaagcgcatctaatgtgatatctccaaatgttgatgtaccttttgttgattgggatgctcttgagattgttcctattacagaagagctggttggttctatagttcccgttgttgatgaagacaatttttatgaacacattggtcttcgagccgaggatgagagagtagagaaaggcaaagatagactaccagatgaagttgcatgtgaaggtgcacttgatgttgaaggtgcagccataccttgtactgatacaataccgggtgaggatgctatcttttatgataaggaggaccctccaatgactgttggcagcacatatgcaagcatgaatgagttcagatcagcagtaagacaacatgctataaagggtcagtttgaggtgtggacaaggaaatctgatacatgtaggtttaggggttattgcatagcaacataccgttggatagcagagaagtcaatcccatttttgaagaaggatccaaatatgggcgcaaaaaagttacaagaggagctagaggataaatataatgtgaagctaggatactcaacagtgtgggctggtagacagaaggcggtggaacaaatatttggaacatgggaagaaagttttgcagatttgtataggttcaaggcagagattgacgcaaaaatgcctggaagtgttgtcgatttagaggtgcaggaggaagaggatggtgtgtattttcgcagattcttttgttgtttcaaaccaagcattgatggttttctgaacggttgcagaccgtttttgagcgtagactccacagcgctcaatggcagatggaatgggcagttttctgaaaaggaagagtcacgccaaacaagggcgaccattaggatcagcaagtacttgcacgcccaaaaggcaaaaagttgtgcaaaacgagtcaactaatattagtccggggcctgttacaagaagccaatcggcgttatcaacgattggtgaaggctcaagccaggaaatggccacacccaaaaggcaacaagttgtgacaaatcaatcaactaatattagtcctgtccctgtcacaaggaggcaattggcattatcaatgctcgatgaaagcacaagtcaggaattggccacaccttcgagggcaaccaaatccccttccaagcctacatcaaggattgcaaggaagatcactccaagaaaattcaaaaagtgaatgtttttgtgtctacaaaactatgatattggatgcttttgtaatcttaattaattagaacggaggcatttggatgatattttggcatatgtatggattgttgacattaaacttgttattgtgcttgctgttatgcttctgtatgggattattgacatttggatgacatttgggcttaatatttaaatcaaacttgctattatgcttgaacgtggtgcacatgtgtgcacgttgctacaattttttaatgcatgagtttgtattttctaccatacctattcttctttttttacattttttattcgtaatgtcttttatactttgggcaaactctgattatactttgggcaaactctgatgtggatgaggaggaccaaacggcgcagctctaatgtgcacaagcagaagggtactttggtcatttgaggtcagagggaaaaaagaaaacagcaaaagtacttaagaaagctgaaaagggtaaattttgaagggaaaaacgtatttggggtagcagccgaatggctaacgtactaagggataaagtctgaaaggctaacgtattgaggggcagcagctgaaaattctctatattaggccccgattctgatgaggcccatatgtcccggcacgtaattacgagcacctcccagtccgacctgttcggatacggagcccacgaggccacgaacgaagccctaatcatccgctccaaactccccgcaccggcagagatcagccgtccacgagagcatcacggctagggtttccgatttcaactaggacccctggatctatgattctatgaaccagaggcgagacgagtggccgcagcatcaggaccgtctccaactcgccagtactcagccgccgcaatcagggacagggagctcgagcgcgcgccccacctgcgccgacgcgatgcgggccaaggttcctcttccctcgcctccgctgcgttcttctttccatgatgatgcgatgaaaccgtgtcctaggtagctttgcggagctagtcattttctaggttttcgccgtgggctgtgggtggccagaggcgacaatcccagcgaggtggtggcgttgggcgccgcatccgccttggccgtcttgctggccgccgctgcccctgccgcagggggaaggacgacacggaggagtccaggtacaaggccccgactgcaggtccctggttcaagcccaaacgaaacaaaatactcaaaccaactctcgccgccgccgccgatgacatcggaggagcatccctcgtctacgtcctcggacggcagcacgaccatcggctccgacgaacatcttgattccccgccatcaccttcgacgttcttcgactctcctcctgaatccgatgactccgccgcctcctcgctgctctcggacggctcttcagagtccgagcccatcattttcaagaaaccccgcccacccgtgcgctcgtggccggcctccgacgagatcgcgatcctcgagaccgtcgcgtcgcaccggcagaagcacgggcgacttcccctggcagacgacctcgccgccgcggtgcggggccgcctcagcgcgggggaccgcctcagcgccgcgcagatcaccaggcggctgtgcgcgctccgcaaccggtacgacaacactgttatccgcctcaaacgcggcacgatcccggcgaaggacagcgacgtcaccatctacaggctctccaagctcatctgggagggaacgcgcagggggaggatagagaagaagacccgtgtgcccgacgcgcgcaatgacccaagagggttcgacgatctggccgagctgtacccttgcctctccgcggaggtggaggcgattggtgcgaggtgcggctacggggcgctgaagagggcattcgggcgcatcggtgacgacacggcggcgcggctggaggcgaagctgaagaggcagcggatggcggagaccagggcgagcggaaagcttgaccggctgaggtcgagagtcgccaaggcgcttcagggatttaacaagtgaaatggtatagggacattctgttggctgtcatcgtttcatgctacttcaagttgtttcttttcacaatgatggtttgggagtttccatcatctgttatattcatcgttgaaatgtttgttttctagtcagtgggatgcatatatacattagtaacagtcttgttgttccgcagtttccaaaagcccattgtttcgtggtctgcttactagcgcatgcagcaaaatacttgacccagcgatggatccttggaacgacatgagcctactcgtccacatcatcctcgagcttcaagcacggccctaatcttcggatggactgttctggtgcttctagagacgtttaggtatattgtgccctgattgatgagccttgccatttcctacccagaaaaaaaaccaaattagagttgcttaatgattcaaacaaagctgcttaatcacgcaactgatttaatagtagggctttatataacgagaggggagaccatatgtctctaccaagatacttttcgtgtactcatgttacagtggtttggacttcatgctctaacaatattataaagtaagaccactgcttcacctgttttacatctcccctctcgggacaaaagaaattggattcttgtgtttttgcagataggaattaatttaggctccctttggaacaaaggaaagaatatagaaaacctactgcccctttggaaagt

SEQ ID NO: 125697 - DNA, 1365 bp, Zea Mays
agaggcgagacgagtggccgcagcatcaggaccgtctccaactcgccagtactcagccgccgcaatcagggacagggagctcgagcgcgcgccccacctgcgccgacgcgatgcgggccaaggttttcgccgtgggctgtgggtggccagaggcgacaatcccagcgaggtggtggcgttgggcgccgcatccgccttggccgtcttgctggccgccgctgcccctgccgcagggggaaggacgacacggaggagtccaggtacaaggccccgactgcaggtccctggttcaagcccaaacgaaacaaaatactcaaaccaactctcgccgccgccgccgatgacatcggaggagcatccctcgtctacgtcctcggacggcagcacgaccatcggctccgacgaacatcttgattccccgccatcaccttcgacgttcttcgactctcctcctgaatccgatgactccgccgcctcctcgctgctctcggacggctcttcagagtccgagcccatcattttcaagaaaccccgcccacccgtgcgctcgtggccggcctccgacgagatcgcgatcctcgagaccgtcgcgtcgcaccggcagaagcacgggcgacttcccctggcagacgacctcgccgccgcggtgcggggccgcctcagcgcgggggaccgcctcagcgccgcgcagatcaccaggcggctgtgcgcgctccgcaaccggtacgacaacactgttatccgcctcaaacgcggcacgatcccggcgaaggacagcgacgtcaccatctacaggctctccaagctcatctgggagggaacgcgcagggggaggatagagaagaagacccgtgtgcccgacgcgcgcaatgacccaagagggttcgacgatctggccgagctgtacccttgcctctccgcggaggtggaggcgattggtgcgaggtgcggctacggggcgctgaagagggcattcgggcgcatcggtgacgacacggcggcgcggctggaggcgaagctgaagaggcagcggatggcggagaccagggcgagcggaaagcttgaccggctgaggtcgagagtcgccaaggcgcttcagggatttaacaagtgaaatggtgatttcttcatcttctttctgttgctacatgggttggcgtagaaagacacaataggattggttccttcgcattgtttcatggttgaaatgttatcagattctctggcaagtttgagggcactatcaactgcaaagaatttgaaatgtcaatggctggcattgagtttgttttgcactaccattgtctgtgctaagaacaggatttcagaagcaaaataaattttcccgctgtgataaaattcaaa

SEQ ID NO: 125698 - DNA, 824 bp, Zea Mays
agaggcgagacgagtggccgcagcatcaggaccgtctccaactcgccagtactcagccgccgcaatcagggacagggagctcgagcgcgcgccccacctgcgccgacgcgatgcgggccaaggtatagggacattctgttggctgtcatcgtttcatgctacttcaagttgtttcttttcacaatgatggtttgggagtttccatcatctgttatattcatcgttgaaatgtttgttttctagtcagtgggatgcatatatacattagtaacagtcttgttgttccgcagtttccaaaagcccattgtttcgtggtctgcttactagcgcatgcagcaaaatacttgacccagcgatggatccttggaacgacatgagcctactcgtccacatcatcctcgagcttcaagcacggccctaatcttcggatggactgttctggtgcttctagagacgtttaggtatattgtgccctgattgatgagccttgccatttcctacccagaaaaaaaaccaaattagagttgcttaatgattcaaacaaagctgcttaatcacgcaactgatttaatagtagggctttatataacgagaggggagaccatatgtctctaccaagatacttttcgtgtactcatgttacagtggtttggacttcatgctctaacaatattataaagtaagaccactgcttcacctgttttacatctcccctctcgggacaaaagaaattggattcttgtgtttttgcagataggaattaatttaggctccctttggaacaaaggaaagaatatagaaaacctactgcccctttggaaagt

SEQ ID NO: 125699 - DNA, 556 bp, Zea Mays
gcatggcggccaagggcccctcgcccacgcgtcgcctcctgccgcagccgcacttgcccgtctcctcgcaggcggcctccgtggctcagatccactgcttcctcaacacccggagacggctgccgtcgccttcgctgtctcctcgccagtggcgggcggaatttctctaattagcttgctctatggcatattttataggttctgtaattgctgatcggcgtgatgaattttaggccaatagttcttatcttcctcctgctcgtgctcattgtcacatcacagtttgagtggaagcagcatattggtgaggctgaggcgaatccaacagctacacgaaggaggcaacaggcgcttggaagggaggatgctgttaaagagaaagtgagcacctgcattgttatttagtttttcttcacttttagttgggtgggaatcagtggccatctttctggtagaagctcattaatttattcatttcatttgttgcattgatgttattttgtttctcaatttatcatgttgtgatgccttctgaataaattgatttagtcggata

SEQ ID NO: 125700 - DNA, 861 bp, Zea Mays
atggatccgaaagttggcgttgctctgaccctctccctcgtcggcgggctaagcacctcccttggtgcactgttggctatcctcaaccatgcgccaaacaacagaacactcgggattctacagggctttgctactgggctcatgctcagcatgtctttctttgacttggcttacgatgctgtcaacgccatcggctttctgagagggaacctctggtttttcgctggagcgctgctgttctcaacaatcgcggacgttttccctgagccagactgcagtgcggcagatgaaaatgggaagcagcaggtgtattttattaatgtcaaaactaacatacatagggtttcccgctttatgtcctcgtttaaaaaaaataagggtggaaaggaactcatgatgagacatcgccgaagagttatatttagcgtcattgtcacagcaattgttgctggtgtgagtttacaaaacttccctgtgggcactgctgcatttcttggaacaacaaagggcttccgtgttggtttgaacttggctcttgctatagcactacactacattccagaggtaatttactctgcattggcttttgtgaagggtatttcagtagctctcccagcatactttgccactagcagcaaatggcaagccttcaaattagcaactctatctggttttgcagagccactgggtgtgattattgtggcatacctattcccaagcaatttgaaccctgaaatactggaaggtctacttggattaggacgcaaggatgctgttaaagcagtatttgttggtatggcctttatgtctatgagcttgtattttctagatgctagcctcccaaaggagatgagcgcttaa

SEQ ID NO: 125701 - DNA, 893 bp, Zea Mays
accgagccagatctccacgactcactttcctgaccccgaccccgacccgtttgccttcctgaatcctgtcgccgtctcgcgtgccttcattcccggcggcgacctcttcgtggggcctttcgccggcaacgagcacccacgcaccagatcgtgctacggcggctcctgtccatccaccatgattaatttcgtgcctgatcagccgccagggcaaggtgaggctcaccaagtggtattctccgtacacccagaaggagaggaccaaggtcattcgcgagctcagtggactcgttcttacacgagggcccaaactctgcaactttgtcgagtggaggggttacaaggttgtataccggaggtatgctagcctgtatttctgcatgcgcattgatgctgatgacaatgagcttgaagtccttgagatcatccatcatttcgtcgagatactggaccgatattttggcagtgtatgtgagctggatttgatattcaatttccataaggcctactacatactggatgagattctcattgccggtgaacttcaagaatctagcaagaagaatgttgcaagacttattgccacacaggattcgttagtggaggctgctaaagaggaagccagctccataagtaacatcattgctcaagccacaaaataaagttcttcaccagtctaatgcccgacatcttgtcgttgttgttcaagcaactgtaatgcactggactgctagtccatttgctctgctcatgttttctgtggaatacgggtttcaagacttagaaagagcgtgatgtgtaaattccttgatgttgtaggtgtgtgcagagccttatgttggagcacaagcatgggattgattcgttctattctttttcttcccttgagcttt

SEQ ID NO: 125702 - DNA, 1373 bp, Zea Mays
accgagccagatctccacgactcactttcctgaccccgaccccgacccgtttgccttcctgaatcctgtcgccgtctcgcgtgccttcattcccggcggcgacctcttcgtggggcctttcgccggcaacgagcacccacgcaccaggattcagatcgtgctacggcggctcctgtccatccaccatgattaatttcgtgcctgatcagccgccagggcaaggtgaggctcaccaagtggtattctccgtacacccagaaggagaggaccaaggtcattcgcgagctcagtggactcgttcttacacgagggcccaaactctgcaactttgtcgagtggaggggttacaaggttgtataccggaggtatgctagcctgtatttctgcatgcgcattgatgctgatgacaatgagcttgaagtccttgagatcatccatcatttcgtcgagatactggaccgatattttggcagtgtatgtgagctggatttgatattcaatttccataaggcctactacatactggatgagattctcattgccggtgaacttcaagaatctagcaagaagaatgttgcaagacttattgccacacaggattcgttagtggaggctgctaaagaggaagccagctccataagtaacatcattgctcaagccacaaaataaagttcttcaccagtctaatgcccgacatcttgtcgttgttgttcaagcaactgtaatgcactggactgctagtccatttgctctgctcatgttttctgtggaatacgggtttcaagacttagaaagagcgtgatgtgtaaattccttgatgttgtaggtgtgtgcagagccttatgttggagcacaagcatgggattgattcgttctattctttttcttcccttgagctttaccttgcactgctgctagtctttacaccttacactatcgagagatcggttctggaagtttgcttacactgctaggctctacaccatggaaaagattggtacgtcttgccgggcttagcaatgagctgctcctgttaacaatggctgttatataggttgaggatggaggaggacattgggagaacaaaccctgtagcactccgtgcaggtagagtcgccgtctaaagcactagatgccagctgttcagccgcacggacacggaggagggacatggaggagacaaggttggtgcacgcgaattctggaagcaatggcggacaaggaatcctgttttccgctccaattgcaacgaatcttgttttctatccatagattagatatccgtaccctgcttcgctatttctctccaccccttagggcatgtacaaccttaagactctgatttgattttcaaaatacaagagacaactaag

SEQ ID NO: 125703 - DNA, 1329 bp, Zea Mays
accgagccagatctccacgactcactttcctgaccccgaccccgacccgtttgccttcctgaatcctgtcgccgtctcgcgtgccttcattcccggcggcgacctcttcgtggggcctttcgccggcaacgagcacccacgcaccaggattcagatcgtgctacggcggctcctgtccatccaccatgattaatttcgtgcctgatcagccgccagggcaaggtgaggctcaccaagtggtattctccgtacacccagaaggagaggaccaaggtcattcgcgagctcagtggactcgttcttacacgagggcccaaactctgcaactttgtcgagtggaggggttacaaggttgtataccggaggtatgctagcctgtatttctgcatgcgcattgatgctgatgacaatgagcttgaagtccttgagatcatccatcatttcgtcgagatactggaccgatattttggcagtgtatgtgagctggatttgatattcaatttccataaggcctactacatactggatgagattctcattgccggtgaacttcaagaatctagcaagaagaatgttgcaagacttattgccacacaggattcgttagtggaggctgctaaagaggaagccagctccataagtaacatcattgctcaagccacaaaataaagttcttcaccagtctaatgcccgacatcttgtcgttgttgttcaagcaactgtgtgtgcagagccttatgttggagcacaagcatgggattgattcgttctattctttttcttcccttgagctttaccttgcactgctgctagtctttacaccttacactatcgagagatcggttctggaagtttgcttacactgctaggctctacaccatggaaaagattggtacgtcttgccgggcttagcaatgagctgctcctgttaacaatggctgttatataggttgaggatggaggaggacattgggagaacaaaccctgtagcactccgtgcaggtagagtcgccgtctaaagcactagatgccagctgttcagccgcacggacacggaggagggacatggaggagacaaggttggtgcacgcgaattctggaagcaatggcggacaaggaatcctgttttccgctccaattgcaacgaatcttgttttctatccatagattagatatccgtaccctgcttcgctatttctctccaccccttagggcatgtacaaccttaagactctgatttgattttcaaaatacaagagacaactaagaaaatgtatggtccaacctgagactctagataatacataataaatgcagctaagagaatat

SEQ ID NO: 125704 - DNA, 1524 bp, Zea Mays
aattccttcatcatccatggaggccatgcccaggccaagtgtagctccctcgttgcagttgcaggcccgtccgtgcccgaggtggccgcgccggaagcactgcccaccgtcctccgtggcaagccggagggttgcttgctcggcctcggcggccgacgccgacgtggtcgacctcttcgacgccgctaagctaactgtggacaagttcgtgacgagcggcatggtggtggggctcggctccggccctgcgtccgccctggccatccagtacctcggcacgcgcctccggcggggctctctcgcgggcatcaccgcagtgacctcgtccgtgctcagtgcgagcgaggcagacaaggcagggatacgggctaacagctaccaggaaggcacccagcgatcgaggagggcacgctggccgcagtcatcgggcggcggaagaccgagagcggagagccctctttcatggcggagaaggcgatggctaaatcagctcacaagcttgccttcatcactggaaacgacaagtacgtgacgacgggcgtcgagggttctattccggtcctgattaaaagtgtaagcagccatgcgttgcttcagcgcgtatacgtatcgtttcctttccatgcaaataaatattcagaggagcaggccattttcaggggaactggatagacactgctgaagagatcgacgatttgtttctaggagacgcagaggtgcgtgtgtgtgcctgttggaatttcagtcacaacttgagaagctgctgggctgtgctgatcacatcacgattttcttaatggtgatatgatgaatgaaggtttggaggaggccgtcgtttggaactgctggtccacttgggggtgaccacccactggttaccaaggagggccatcacgtgctcgatgttatcttcacaacaccaatccaagatcttggtacgccgtatgtggatggatggttggaagatcttccatcccttcctcaacaactggggatcttcaatccagcgtagcaaccatgacgacatcttcgactccagtcaccttgatcgctgtcttgtctttttcttttacaggtcaggttgcagagaagttggacaaagttgatggcgttgtggatcacgggattatttgcagcaaccagtaaatctctaaccgcacacacacacaacctctagaaaattttcggttgtcttcacactgcaatctgctgcccctgcagaccatacgctgtcattgcatccaagggggaagtgcaggtcctggacgagaaatcttcggtgatacagtagcggtgaaacctttttggctgctctgcagattgttgcgcttttcggaacaggagtctactaccagctagctggaaaaaaaatgccatgagttaatcatgtacaaccagagctcttgttcaccactggacaattcagccggcatcagttgaagtctgtgtttcgcataaacttttttgaactggtactcagttaaccagattcgatgaatgtgaggcagagctacagcttcaact

SEQ ID NO: 125705 - DNA, 1251 bp, Zea Mays
aattccttcatcatccatggaggccatgcccaggccaagtgtagctccctcgttgcagttgcaggcccgtccgtgcccgaggtggccgcgccggaagcactgcccaccgtcctccgtggcaagccggagggttgcttgctcggcctcggcggccgacgccgacgtggtcgacctcttcgacgccgctaagctaactgtggacaagttcgtgacgagcggcatggtggtggggctcggctccggccctgcgtccgccctggccatccagtacctcggcacgcgcctccggcggggctctctcgcgggcatcaccgcagtgacctcgtccgtgctcagtgcgagcgaggcagacaaggcagggatacgggctaacagctaccaggaaggcacccagattgattttgctttcactgatgctgaagcgatcgaggagggcacgctggccgcagtcatcgggcggcggaagaccgagagcggagagccctctttcatggcggagaaggcgatggctaaatcagctcacaagcttgccttcatcactggaaacgacaagtacgtgacgacgggcgtcgagggttctattccggtcctgattaaaagtgggaactggatagacactgctgaagagatcgacgatttgtttctaggagacgcagaggtttggaggaggccgtcgtttggaactgctggtccacttgggggtgaccacccactggttaccaaggagggccatcacgtgctcgatgttatcttcacaacaccaatccaagatcttggtcaggttgcagagaagttggacaaagttgatggcgttgtggatcacgggattatttgcagcaaccaaccatacgctgtcattgcatccaagggggaagtgcaggtcctggacgagaaatcttcggtgatacagtagcggtgaaacctttttggctgctctgcagattgttgcgcttttcggaacaggagtctactaccagctagctggaaaaaaaatgccatgagttaatcatgtacaaccagagctcttgttcaccactggacaattcagccggcatcagttgaagtctgtgtttcgcataaacttttttgaactggtactcagttaaccagattcgatgaatgtgaggcagagctacagcttcaactactcttctagtgtttcaggagttcgtctcttttcatatgattggttgcccgcggcatctcatctcctatatgtttggttgcttgtgtttggcgggtgattaaatt

SEQ ID NO: 125706 - DNA, 1251 bp, Zea Mays
aattccttcatcatccatggaggccatgcccaggccaagtgtagctccctcgttgcagttgcaggcccgtccgtgcccgaggtggccgcgccggaagcactgcccaccgtcctccgtggcaagccggagggttgcttgctcggcctcggcggccgacgccgacgtggtcgacctcttcgacgccgctaagctaactgtggacaagttcgtgacgagcggcatggtggtggggctcggctccggccctgcgtccgccctggccatccagtacctcggcacgcgcctccggcggggctctctcgcgggcatcaccgcagtgacctcgtccgtgctcagtgcgagcgaggcagacaaggcagggatacgggctaacagctaccaggaaggcacccagcgatcgaggagggcacgctggccgcagtcatcgggcggcggaagaccgagagcggagagccctctttcatggcggagaagccagcaaccatggcgtctgtctgtacaggcgatggctaaatcagctcacaagcttgccttcatcactggaaacgacaagtacgtgacgacgggcgtcgagggttctattccggtcctgattaaaagtgggaactggatagacactgctgaagagatcgacgatttgtttctaggagacgcagaggtttggaggaggccgtcgtttggaactgctggtccacttgggggtgaccacccactggttaccaaggagggccatcacgtgctcgatgttatcttcacaacaccaatccaagatcttggtcaggttgcagagaagttggacaaagttgatggcgttgtggatcacgggattatttgcagcaaccaaccatacgctgtcattgcatccaagggggaagtgcaggtcctggacgagaaatcttcggtgatacagtagcggtgaaacctttttggctgctctgcagattgttgcgcttttcggaacaggagtctactaccagctagctggaaaaaaaatgccatgagttaatcatgtacaaccagagctcttgttcaccactggacaattcagccggcatcagttgaagtctgtgtttcgcataaacttttttgaactggtactcagttaaccagattcgatgaatgtgaggcagagctacagcttcaactactcttctagtgtttcaggagttcgtctcttttcatatgattggttgcccgcggcatctcatctcctatatgtttggttgcttgtgtttggcgggtgattaaatt

SEQ ID NO: 125707 - DNA, 569 bp, Zea Mays
cccaccacaccaaaacccgcatccataaacaagaaaaagaaaagaaaacccccgctgccagcgacagaagaagaaggggtcccttctccttggttgcgttgcgcctccctcctgtctgcgtgcgtgcaatcgacgcagaggcgcgggcgctcgcaccaccacgaccacgacccgatggctttcatgcgctcccgcgtgagtactgagtaccccgctccttcctctcgtcgatccgctcacgctctttggctgttcgcggggcgctgtggtgtagatccgtgtggcgtgtgggaactgggtcggttccgcgcgatccgggggcgctagttcgtggacggctgccccgcgttagatctccttgggagcgtttgatctgaccctaccgaaggtggtgttcatttgttctcactaaaattatgtgtgcaggcgtgcagctgtagcttcgtcgcctgtatggacatgtttatttgtgaaatcaagtggatatgtaagtcgctagtagatattcaggatatgagtttgagaatccgtgctggaaaatggctctagctgtgaaattgagggatggg

SEQ ID NO: 125708 - DNA, 508 bp, Zea Mays
cccaccacaccaaaacccgcatccataaacaagaaaaagaaaagaaaacccccgctgccagcgacagaagaagaaggggtcccttctccttggttgcgttgcgcctccctcctgtctgcgtgcgtgcaatcgacgcagaggcgcgggcgctcgcaccaccacgaccacgacccgatggctttcatgcgctcccgctcaaatgcatcttctggcatgggagttgctcctaacattagggagacattcgtcgagcttcaaatgaagaaggcattccgatatgttatcttcaaaatcgaagagaagcaaaagcaggtggttgtggagaagacaggggctactactgaaagctatgatgactttttggcctctctcccagagaatgactgccgatatgcgctgtatgattttgattttgttactggggagaatgtgcagaaaagcaagattttcttcattgcctggtgagattcaaaatcatttatgcatgcatctctattttgtttcattc

SEQ ID NO: 125709 - DNA, 1054 bp, Zea Mays
cccaccacaccaaaacccgcatccataaacaagaaaaagaaaagaaaacccccgctgccagcgacagaagaagaaggggtcccttctccttggttgcgttgcgcctccctcctgtctgcgtgcgtgcaatcgacgcagaggcgcgggcgctcgcaccaccacgaccacgacccgatggctttcatgcgctcccgctcaaatgcatcttctggcatgggagttgctcctaacattagggagacattcgtcgagcttcaaatgaagaaggcattccgatatgttatcttcaaaatcgaagagaagcaaaagcaggtggttgtggagaagacaggggctactactgaaagctatgatgactttttggcctctctcccagagaatgactgccgatatgcgctgtatgattttgattttgttactggggagaatgtgcagaaaagcaagattttcttcattgcctggtccccatcgacatcccgcatacgtgctaagatgctgtactccacgtcgaaggaccgcatcaagtacgagcttgacgggttccactacgaaatccaggcgaccgacccatcggaggtggacatcgaggttctccgggagcgggctcactgaagctggttctccttttgaagggacctgtggagggccgtgaaccttcagccagatgcaaattcaattatcaacgatgaagctcccgccgtggtgtttgttaataagttcctgtaagcatatcatttagtcgctatgcatgacactagctgaagcgctatctaagctctattggtatgaggtttggttgccgtgttgccgagcctgtaaacgaagcaagatttgcaaacttgttatattgtggtattgatgatactggattactggctgtgggttgttcgggaatgtctctgcctctctggtctggtgtctggacgtggttgtggcttgctcgggatcgccctggttggtctggtgtctgctgggtctggcccccggacggtcggattgtctgcatctgttagatgtacttgttctaatcaaagcatgttccaagttcctgacc

SEQ ID NO: 125710 - DNA, 222 bp, Zea Mays
atggggttcgtgctggtggtctctttgcacttcattttcctctccatccttctcggcttcggctgcttcttcctcggcaagcacaggggccgggaggagatgcgaaccggcgtcggcgcgcaggtctacggcacgccgctgccgccgcccggtgtcgtcggagtcccatcgccgccgactgagccgattcacgccaagaaaccagggcccgaagccgtctga

SEQ ID NO: 125711 - DNA, 1478 bp, Zea Mays
gcatgcatagcagcagatggcaaacacacgacctaaccaatccctgccgcagctggctcgccgcagccacaagccgaaaaggaggcggcgaccccacaaaatctgagcacgcgcgcccgacgcggccacggcggatgcctcggcgccaatccgcggcgcccacctcactcctcttatccccgcctcacccacttggccactgcgcgtccccccttatcccgagcgcgtttctttccgatcccaaagctcccgcacaccctgcctgatccctcccaataagctccccagctccacgccggacgcagcagcagcagcagtagagatggccgccctcgccgcctcctccacggccgccttcgccgccaagccgcgcctcccacgcgcgcgcctcaccgtggcctgctccgccaccggcggcgacggcaacggcagcagcagcagtgtgtcgctcgcatcctccgtgaagacgttctcggccgcgctggctctgtcgtcggtgcttctctcctcggccgccacctcccctccccccgcggccgctgacatcgcggggctgaccccgtgcaaggagtccaaggcgttcgccaagcgcgagaagaactcgatcaagaagctcaccgcgtcgctcaagaagtacgcgcccgacagcgccccggccctcgccatcaacgccaccatcgagaagaccaagcggcggttcgagaactacggcaagttcggcctgctctgcggcgccgacggcctgccgcacctcatcgtcagcggcgaccagcggcactggggcgagttcgtcaccccgggcctgctcttcctctacatcgccgggtggatcgggtgggtcggcaggagctacctcatcgccatcagcggcgagaagaagcccgccatgagggagatcatcatcgacgtcgagctcgccacccgcctcctccccagggggttcatctggcccgtcgcggcctaccgcgagctcatcaacggagacctcgtcgtcgacgacaaggacatcggctactactagctgctgcacctgtgcttgcacatcgctgctggcgaggcaaggcccgatccatggctagcggctgttgaacaactctctcttgtttattgataacgaacagtgaaaagattaacgtgccttgtgttcctgtttcttctgcagttgggcagtcgtcgtacgtgggaaacatggcttttggtgtaggaggaaggaatggaagtggtctgttgtacttaaagaaactagatgaagaagtcttgtataactgaaacttcacccctctcttgtgtatgatgtattcaccttcgtcttgaaaattcttgagaacggtttcatcttgcatacattttgctagtgaagggtcgaatcagctgaccagatgagataaataagagacaataataattctttgctttcagtcagtattggcttgcttcttaatgtacacctagacatccaaagctacaaaagacataaa

SEQ ID NO: 125712 - DNA, 1473 bp, Zea Mays
  misc_feature (1473)..(1473): n is a, c, g, or t
aacaccactccactgactccgccctggctctctctccttccatcggcctccgcggctccgccccctcccccttccattttaaatttcaaacccctcccacctgcttcctcctcctctcccctgctgccacgaggcgcggctcagctcctcctcgaagcgggcggggaatccaggccgcgcggcggcggggcggaggaggaggaggagcgggggatgatggggtgcctcttcggctgcttccgcgcgtccggcgacggcggcgatgcgaagggcgccggagaccgcaacacgtccctggcccccgcgacgacgacgacgatccaacaggatggtacgggcaggaggatcaggccaccgtcgaggaacgcgctctccgccgtgttccagcgagaagatgagggatcgagggcggcgcaggcggcgagctcgtgggcggaacagactggtgagagcaagaggatggatcaggagcttgagccccagaccattatccaaaaaaactgtggtgcattgctgcaaactacaaacaacatccaaagtgtgctcagagatgcagattcagttcatcagaaggaaacacattcaggatgtcttcctgttatgtctgatgatgtacatttcatggaagcgccaaaggttgagaactgtgaaactcctccaaggtctcatcagagctccactgtaccagatgcaacgagttcttcaaaaacaaatgatgagttgcgtacttccgctacttccttaaaaaataacgtggaagagtcaacaaatgagaacgatactgaggcctgtgtgcagggtgaagaacaacaacaagctctggatcttgctgaggattttgaagaatgtggggtttcaaaagaagatttcttcccccctgaaaaattagaggatccaaagtgtgcaaagaatgaccatgtggtctccatggaaatttcaatatccgatgaatgttcccttttccagagctctgagggttctgtatcaccttctaacaagataagagggagcatgaatacaacatctacggagaagtcaccgaaaactgaggcaactattcatgccaccagaaagaagttactgaagagcaatacttcagaactggagctcccaagcttagctcaatggttgaagcctccaaatcctaagaaagcattcagagatgaggctgtgacaggagacagatctcattcagctaagagttcagatgaggataggcctattattggaatggttgcagcacactggaaagataaagagccagcaaatttcacctctaaatggtgggatggaaatggcattcccaattcaacaaataagtacaaagaagaccaaaaggtgagctggcatgcaacaccatttgaggagaggcttgagaaggctttatctgaagagaagtcgctctctgaaaggaactgctcgagtggaaaaacatctcagtttttaggagtggaaggcgaggagagtgatacn

SEQ ID NO: 125713 - DNA, 96 bp, Zea Mays
tggcgagttgtgacaaaggatgtatacaaggaattttgaactgtcatatgtcaaactttcctacgtctgacagaacttatagaaatcaaaactaaa

SEQ ID NO: 125714 - DNA, 1633 bp, Zea Mays
atgtccgcgtgcgtccactactcgtcgactggctgcactggacgagcagtgatcgccccccgaacttccaagacggttgctgcagcagtgcagcgcaacatccatccgcgaccaaacttccgtatcaccgatccatcaccggccatgtcaggcgccggcgcggacacagcgccgtcgagcgacgacaagcgccagcaccatcagcgcacgttccgggacgcggcgcggcggcggctgcagcgggacgcgatcgagcgcgccatcagggcgccgctgggcaccgtgctccgcgaccacgcgctcgtgcacctcccgccggccgccgcggcgcgcctccgcctcgtgcacccgtcgtgggcgctggcgctcgcgtcgccgctcttcgccgtcgcgcacgccgctaccccgcgcagagcctcgggcttcttctccgcgtccgcgtccgcgcccgcgggctttctcccgcttgacgccgccgataccgtgccgtccccggcgctggccttcctcccggcctcgtcgccgcccgccgtgctgtcgtcctcgcgcggcctcgcgtgctgcttctctccggctgacgacgcctacttcgtgtgcaacccggcgacgggggcctggcacggcgtcccgtgcccgccgcgccggatcacctggccgcgccccgcggtcgtcgtgctcttcgacgccggtgtctacaacttctgcggcgactacacgctcgtctgcgccttcgagtcggcgccggggtccggcatctactgcttcgcggtgttcgcgtcggggaccggcgcgtggcggatcgccggcgcggtcgcgcccgccgaggggctcgtccctgcctcgggcgtcgcggctggcgggacggcctggtggcggacggacatcggcaccgccgtcgggtacaaccctgccacgggccgcgttgacctcgcgctgtgccccggggacagcgcccggtgggagatcggctccgccgcgggcaggctgcactgcgccgtgcgcgacggcggcgacgtcctggtgttccggctcgacgacaggcgcggtggctgggagctggccaccgtggtctccgtctgcgagatactgcagcggccttggcaaccggagaccacttttgagctgtccgactccgaggacgacgacgacgacgaggcggcggcgggtcaggcagagttggagcgcgtgggtgctgtcattgccgtggccaacaggtacagcaggagcagggtacgggtgccgagagacgacgtgaggctgctgccgtttcagggcgccgatgtggaggtggtgctgctgtccggctggagggtggtggcgttcgagacggtgacgcggcgccggcgtgaggccgtcctgccggtgccgggtcagccgaccaccaaggattggggcgttgtggagtacatcgcgcacaccaacacgctcgcgctggtcggccccgtggtgttcatggagcctccggatgatcaggaagaggtgtcatcgtaatctcttggaaaaattttcagtgcctcatacgccacgcttagatctacgtacagaaataatcaagcttgtgattgcgcatgatttcgtgtggagaaacaacttaatttttgagctgcttctgtacataataattaatcctaac

SEQ ID NO: 125715 - DNA, 672 bp, Zea Mays
atggcgtcgctcctagcccggcaggcagcgcaggcgctccgcgcgaggcaaacggcgcagctcgggccggccgcgtcggcgatgcaagggcacctccgtacctacatgaacgcggggattcccaagcggttcaaagaggatgaggagaaagaacagcttgcaaaagatctcgcaaaagattggaatgctgtgtttgaaaggagcatcaatacattgtttttgactgaaatggtccgtggcttgatgctaactctcaagtacttctttgatagaaatgtcacaattaactatccgtttgagaagggtcctctgagcccccgcttccgtggtgagcacgctctcagacgttatgaatctggggaagagcgctgcattgcttgtaaactatgcgaagctatatgcccagcgcaggcaattacaattgaggctgaagaacgtgaagatggcagtcgccgaaccacaagatatgatattgacatgaccaaatgcatttactgtgggttctgtcaagaggcttgcccagtcgatgctattgttgaggggcctaactttgagtttgccactgagacacacgaggaactactgtacgacaaggagaaattgcttgagaatggtgatcgctgggagactgagattgctgagaacttgagatctgagagcctctatcgctga

SEQ ID NO: 125716 - DNA, 881 bp, Zea Mays
agagcagccgccttttttccatgccaatgccaataatacgcctctcccttttcggggcataaacacaccgcccgcccagcagaccgtcatcgtcgtgactaaccaagtctagctaggccctaatcagcacttgttcgatccaccgctcgctcacaagtgaagagagagccgccgccccagccccagagcagctcagagacctcaagagtcaagaggggagaaataaaggaagacgacgacgacgtacgtacgccatcgccatggggagagctccgtgctgcgacaaggctactgtgaagaagggcccgtggtcaccggaggaggacgccaagctcaagtcctacatcgagcagaacggcaccggcggtaactggatagccctgccgcagaagataggtttgaagaggtgcggcaagagctgccgcctccggtggctcaactacctccggccaaacatcaagcacggcgggttctcggatgaggaggacatgataatccttagcctctacatcagcataggcagcaggtggtcgataatagcggcgcagctgccgggaaggacggacaacgacataaagaactactggaacacgaggctcaagaagaagctcttcggcaagccgtttaaaaaagagagtaatccatgcttatgggttattgcatcatctatttccaagatgcatgcaatttatgcggtgtgttcattccgtgtggaattagtgcgttgcctctttcttagctgcgcctttttctgcatgcaccatatatcacatatctcgctttattgttctgttcttcctttgctttgcggcatcctgcgtgtgttatcggttaatataccggcaagcattcaggaggaccgcgtgtttgaggggaaatga

SEQ ID NO: 125717 - DNA, 1628 bp, Zea Mays
agagcagccgccttttttccatgccaatgccaataatacgcctctcccttttcggggcataaacacaccgcccgcccagcagaccgtcatcgtcgtgactaaccaagtctagctaggccctaatcagcacttgttcgatccaccgctcgctcacaagtgaagagagagccgccgccccagccccagagcagctcagagacctcaagagtcaagaggggagaaataaaggaagacgacgacgacgtacgtacgccatcgccatggggagagctccgtgctgcgacaaggctactgtgaagaagggcccgtggtcaccggaggaggacgccaagctcaagtcctacatcgagcagaacggcaccggcggtaactggatagccctgccgcagaagataggtttgaagaggtgcggcaagagctgccgcctccggtggctcaactacctccggccaaacatcaagcacggcgggttctcggatgaggaggacatgataatccttagcctctacatcagcataggcagcaggtggtcgataatagcggcgcagctgccgggaaggacggacaacgacataaagaactactggaacacgaggctcaagaagaagctcttcggcaagcagtcgcgcaacaaggaccagcggcagcagcatcagttcatgcgccagctggcgggatcagcggcaagcgatgggatggtgaagcaagaagcagcagcaggtggggatgcagatgcagcagcggccggaagcagcagcgtggcagtggcggccacctacaactggcaccaccatgccatggccatggccatgccggtgcaaccagtgccaggtagtacaacgataatggaaggccatcgcgcagaggcggacgaggtagatgagtcgattcggaagcttctgtacaagctgggaggagctgcaggcccttccacagcactgtcgtcggttcctcagtgtgttcgtccaatgtacgaggagcgaagtgcagcaagcctcatgccgccgccgccgccgccgccgtcatgcccggcggtggtggacgccagcagcagcgcctcgcttgacgaaggcggcggcgtgcttccagcgctggagctggaccagagcttccacttcggccaggttaagctggatggcctagaaagcttctttggcatgggtggtcagagcggcatgaggtggtggagtgaggcgagcccattggtttgccctagtagcacggtggccgcggcgtcttcgagctcccatgggatgcaaatgcaacagtactgcgttgttgttgatgagccgggaaagcttgggatgaattagtagccactgctggcccctttatgtttccatcttcatgcatgattgcggtgtaaatttgtgctagcattgattgggaatggtgaaacatgagagtttctttgaattaaaatcaataaggtttctcaccattttcatagatgagagactatgaggagatgcatggtttcgaggtagttctctttctacgagtttctttaaatgaaaatttcatctactcagcctactgctatagaaaatactactctatttgcaattttggcttgtacgaactgtattgttcgatctgttactttatctgatgtgaatatagtattt

SEQ ID NO: 125718 - DNA, 546 bp, Zea Mays
atgctacagaattcagtatgcttggaacataatctttggagctgtccaagattgtcggtctggagcgagcaaaatggcgcccaacgactcgttgctctgaatcaggctgatccccaacaattaaagagagagaaagagaccagagagggagggagattgacgagaggcgagacaagcgcgacggtcggctcgagtcctcctcgagcgtccacgattccagcaagggcgctggtgtgtcttatcttgaggccacgccgagggcgatttgcaggaactaagccctgcgatttgggagagaacaaggaaggcgacccgaataataatgatcttgattgggaccgcgatgtggagatgcaggtggcggccaaaaacctccacaccgcgggggcgagcactgtctggatctcttccatcgacagacgcgtgcgcgggacaaagaggtgcgaaatccgggtatggataggcgcggcgcgcagtcctctccccatcgaaggcatgcactttccatcgacggcggcgggggcgggccttccattgacatcgtag

SEQ ID NO: 125719 - DNA, 336 bp, Zea Mays
atgtggggcgatgaggagggcgcggacgcgagatctgtgggcgtggctggcgggtggattcaggctggggcgcgacgcgtggtctgggatggctggcggaacctgagattggcgggcatggcaagagggggcggggcaaggtgtagccctgtagacgtggaaaccatggaggaggaagaagccaccgccgcggatcccatggatgatggggaggcagcaggagactcggcagccgcggagcccatggaggacgacgcgcccacgtcctccccgactccctccgcgccgtcggccaccgcggccgttgaagactccaccatcgctaggcggtcgtaa

SEQ ID NO: 125720 - DNA, 2261 bp, Zea Mays
ctgttggcaacgtctctggagccgtggagcttccatgtacccacacccatcgttttatttgataaaaaataaataaaaatccccaccaatcccacgcaacgccgccgctccaacggctagtttgtccatcctgccgagtgccggccctccacccgcgatctcaaattcatcaatcgcccgcgccaccacccaccaggcatcatctcagcccaagcatcggcacctcgccgcctcccgccgccgcggcagcgagctcagctgccagctcgatcgccagccagcggaaccctccagaaaactccatggggatcccgtcgaggctcccggaccacgaggaggaggaggaatacgacgatgccttgttctacgaggacatccaggcgccgaagttcgtggacctcaccgcgcccgacgccggcctccccgacgacgaccccgcctggttctgcctccgagtcggttgcgaccagagccatgagcaggttgacccggaggccttggacaggagcttcttcgtgcgggtcatggcggcgagaagccccaacgtgcggctacagaaggttatcagcaggaaaaaacagagctcgatgctgaaatgcccgcactctgcgccaccgaagcctccgagggctcggttcgcgaggctgagcgcgaccacggaggccgcggagaaggcaccggcgaaacccaagccaagggtccagcggatctgcgccctgcgagcatccccgatccgtatcaaggctgagagggtcgaatgtcccagcgagaggaagaaggcactgacgacgccgcggagcaaggccgtccggccgagccaggaactgtttcacagcgtgaagcaccagaaggaaccgttcaccgctgcagccaggaaggggaaggtcgtcaaggccctgttcatgagcacgccaaaaaaggcgcctgcccagacgccggcggcagacaggagcaaggaggcggggtccgaggcatgttccaagctgaggaagctgaacttggcgtgccgggaggtgccgagcaggtacatgtctcagctgaagaatccgaagactgtcaagaaaggggaagagaccacggtggccaagagcgagaagcgggggcaagaatccaagacgaatgccaagaagaaaatcttaggacgctcactgaagtgtacccatgccgaacctgatggggagaatcgaaacggttgcagcagcactgatgcagacgagaactcatttgcagaaattgctgcctccgatcaggagaggaaggtggtgctgcaggaattgagaatcgaggtggatacatcgcgagctgacaattccaatgacaacaaggagaatctgtcgagtgctcccagtgaagaagcattgaacaattcacattctgaaaatggaaacagacagttggagaacaatgagaatgttcctctaaacgagaatgttgctttgaaggtggctaaattgcagagcaaagtgcatcaagagcaagcaggaaagctcaagaaaactaccaaccctaggccattcaggctaaggactgatgaaagaggagtgcttaaagaagcaaaaccagagaaaaggcagccgttcactgagaataattccacggcagtactcaaggatgcaaacagaggagtgacgccaatggacaaacacacccatggcaagggacgagacaagccggcttgcggcaagaaacagaagaaacgaagcacccagattgtaacggctcagcagctcgatgagtccagctccaggccggccgtcaacagcatccaatgcagagctgtgaaaccggagagggtttctaggcttgcatcatcaacacgtacagccaaaacagcaagtggccttatggcaccttcttcccggactgggaagaagaggaaggcggctacggtgaagctgtcgaggatccaaacaccagctgcttgagctcgggcacgggcagatcaaggaggaaatgagaaactgccgacaacggtttttgttgtctgctccagcgacgagttctgtatttattactgcgtcgaattcgttttccggattttgtggatttatgtacactgatcatttctttctgcgagtcgtgtggtggaagtggaacccctctgctttgttgtaccgccaccgaccagatttcttcttctttctgtagaatgattcagaatttgattatttttctgtaacttaattgaactggggaaaggaggcccggcccaacccatgaaacatttcaattttagccgtggactaggatccatttcatct

SEQ ID NO: 125721 - DNA, 2232 bp, Zea Mays
cgcaacgccgccgctccaacggctagtttgtccatcctgccgagtgccggccctccacccgcgatctcaaattcatcaatcgcccgcgccaccacccaccaggcatcatctcagcccaagcatcggcacctcgccgcctcccgccgccgcggcagcgagctcagctgccagctcgatcgccagccagcggaaccctccagaaaactccatggggatcccgtcgaggctcccggaccacgaggaggaggaggaatacgacgatgccttgttctacgaggacatccaggcgccgaagttcgtggacctcaccgcgcccgacgccggcctccccgacgacgaccccgcctggttctgcctccgagtcggttgcgaccagagccatgagcaggttgacccggaggccttggacaggagcttcttcgtgcgggtcatggcggcgagaagccccaacgtgcggctacagaaggttatcagcaggaaaaaacagagctcgatgctgaaatgcccgcactctgcgccaccgaagcctccgagggctcggttcgcgaggctgagcgcgaccacggaggccgcggagaaggcaccggcgaaacccaagccaagggtccagcggatctgcgccctgcgagcatccccgatccgtatcaaggctgagagggtcgaatgtcccagcgagaggaagaaggcactgacgacgccgcggagcaaggccgtccggccgagccaggaactgtttcacagcgtgaagcaccagaaggaaccgttcaccgctgcagccaggaaggggaaggtcgtcaaggccctgttcatgagcacgccaaaaaaggcgcctgcccagacgccggcggcagacaggagcaaggaggcggggtccgaggcatgttccaagctgaggaagctgaacttggcgtgccgggaggtgccgagcaggtacatgtctcagctgaagaatccgaagactgtcaagaaaggggaagagaccacggtggccaagagcgagaagcgggggcaagaatccaagacgaatgccaagaagaaaatcttaggacgctcactgaagtgtacccatgccgaacctgatggggagaatcgaaacggttgcagcagcactgatgcagacgagaactcatttgcagaaattgctgcctccgatcaggagaggaaggtggtgctgcaggaattgagaatcgaggtggatacatcgcgagctgacaattccaatgacaacaaggagaatctgtcgagtgctcccagtgaagaagcattgaacaattcacattctgaaaatggaaacagacagttggagaacaatgagaatgttcctctaaacgagaatgttgctttgaaggtggctaaattgcagagcaaagtgcatcaagagcaagcaggaaagctcaagaaaactaccaaccctaggccattcaggctaaggactgatgtgagtttctgcaccctccaactctcattgtgctgcaggattagttattagtaaaaaaaaagctttgcctctcactggttcgttctttataggaaagaggagtgcttaaagaagcaaaaccagagaaaaggcagccgttcactgagaataattccacggcagtactcaaggatgcaaacagaggagtgacgccaatggacaaacacacccatggcaagggacgagacaagccggcttgcggcaagaaacagaagaaacgaagcacccagattgtaacggctcagcagctcgatgagtccagctccaggccggccgtcaacagcatccaatgcagagctgtgaaaccggagagggtttctaggcttgcatcatcaacacgtacagccaaaacagcaagtggccttatggcaccttcttcccggactgggaagaagaggaaggcggctacggtgaagctgtcgaggatccaaacaccagctgcttgagctcgggcacgggcagatcaaggaggaaatgagaaactgccgacaacggtttttgttgtctgctccagcgacgagttctgtatttattactgcgtcgaattcgttttccggattttgtggatttatgtacactgatcatttctttctgcgagtcgtgtggtggaagtggaacccctctgctttgttgtaccgccaccgaccagatttcttcttctttctgtagaatgattcagaatttgattatttttctgtaacttaattgaactggggaaaggaggcccggcccaacccatgaaacatttcaatttt

SEQ ID NO: 125722 - DNA, 1736 bp, Zea Mays
atggcgccgattgtgttccggtttaacccgcgcaacgcagatgatatctttgtcgagttcttcggtggctccagccgcgcggcatgggcgggcccggacgggcacagcctgcacaccggcgggcaggtcgtgaagccgaccaccatcgagcggaacctgtcgtgcaacctagaggagttgtacaagggcatcaccaagaagttgaagatttctagggaaattgttgacgcaagtggatggaccagtccctgtcagatttatgcttggttaatttctgctattggattcaagttgaacttgcatcaatgtgtagatcactcagttgaattgattgatttgtatttggccatttgggtgtgcaactgggcctcggcttctccagatgtggtgggtcaacgacagaggcaccctcttgctcccatcggcgatggcacctccttccatctgcaacaacccatggaggccgacgacggtgcatctggtgtttggaacgacggtcgcgtggatgccccttcccctcacggctgtgcagtccaccctggctcactccctggatgtagttggcgctcgttgcgggtgctggtggacaagcggtcgctcgagatggcggtggaggtggatgcgaggtgggagcccatgggggctcaggagtactacgactactggcgggccatgtacagcgcccgcaacaacagattgctcccactgtatttccctctggacaaacaggaggaagatattgtgatagtaaagctccctattgttggggatgagaatgagggagaatttattatatcctttttgttcatattaattagcttgaattttatttttatgttcctatttgtgcagggttatttcaaattggattcatacttggatccttcgtttatgtcaataattaaagatcctgatctatggtgcaaggagatgggaaaatttgctcatgctcaaaagggatttaattatgctagggctcctccattgcctagatctactagagtgagtgagcctacagagctgacctcatccaggctccagttccaccccacagtcatcgtcctctgttgctctacgtttcatgcttctcacctcctctcctcaatctcatcaactgtgctgaaggagacagctgaaagtatttccgtctcatcaactgtgctaaaggaggaggaaaacacctcacttgttgaaggaagcagtggagacctggaggaagatcgtttggagtctgcagctactaatcttcagcctggcagtgacacttgcattgcaagggaagagttgctggatcagaaggatctggtgaaactgcaagctgttatccgtggacatctagaggcggcccatgcctcacggccaaagcaaatcagatgagatttttttggtcttgcgtggttctttttaatctgctcacatgatacttcttattcattgccatccaatttggttaattgccctcagttgaattggttcctttgccattttacttaggaggataaaagaagacactaccttggcacatgcctattgccacaatggacaaaagaagattagtgttgtgtgagatttttttcattcctttgatctattgcatgctatttgtaccccaatcgacaaaatagattagactcaattcaggagcaaatcacaagtcctgttcacaatccaattcactatggctaaaatatcaaacttatgctccttgaggtttgttttttcctgatcttccttta

SEQ ID NO: 125723 - DNA, 2061 bp, Zea Mays
atggcgccgtgcagcggcttgtggggcggcaaggccggcggcgacgcctaccggggcacgccggtggtggtcaagatggagaaccccaactggtcgatctccgagatctcgtctccggaggacgacgacgacgacgaggacatcttggccgccgccggcggccgccgccgcaagggggcccgcaccaagaacgccaagcagatcaggtgggtgctgctcctcaaggcgcaccgcgccgccgggtgcctcgcctcgctggcctccgccgccgtcgcgctgggcgccgcggccaggcgcagggtggccgcggggaggaccgacgccgacgccgacgccgacgccggcgtgctggccgtcgccggcgagagccccgtggtgcgctccgggttctacgccttcatcagggccttcctcgtcgtctccctgctcctgctggccgtcgaggtcgcggcgtacatcaacggctgggacctcgccgcctccgcgctcgccctccccgccctcggcctcgagtcgctgtacgcctcctggctgcgcttccgcgccgcctacgttgcgccggggatacagttcctcaccgacgcctgcgtcgtgctcttcctcgtccagagcgccgaccgcctcatcctgtgccttggctgcttctacatccgcgtcaagcgcatcaagcccgagccgaagtccccggcattacctgatgcggaggaccccgatgccgggtactaccccatggtacttgtccagataccaatgtgcaacgagaaggaggtgtatcaacaatcaattgcggccgtgtgcaaccttgactggccgaaatccagcttcttggtccaggtgctggatgactccgatgacctactgacacaggctctgatcagagaagaggtggccaaatggcagcagcaaggtgcccggattgtgtacaggcaccgtgtgttgagggatggttacaaggctggaaacctcaagtcggccatgagctgcagctacgtgaaggattacgagtttgttgccatctttgacgcagacttccaaccccagcctgactttctgaagcgcactgtgctacatttcaaggacaatgatgaacttgggctagtgcaagcaaggtggtcatttgtgaataaggatgagaacctgctgacccggttgcagtatattaacctttgcttccactttgaggtggaacagcaggtgaatggagtgttcttgaacttcttcgggttcaatggcaccgccggggtgtggaggatcaaggcactggaggactcaggtggatggatggagcggacaacggtggaggatatggacattgctgtcagggcacatctccatggctggaagtttatattcctgaacgatgttgagtgccagtgcgaactgcccgagtcctatgaggcttacaggaagcagcagcatcggtggcattccggtccaatgcagctattcaggctgtgtttaccggacatcatcaaatgcaagatggcgttctggaagaaaggcaacctgatcctcctcttcttcctgctccggaagctcatactgcccttgtactccttcacgctcttctgcatcatcctcccgacggcgatgttcgtgccggaggcggagctcccggactgggtggtgtgctacgtcccggccctcatgtccctgctgaacgtgctgccgtcgccgaggtccttccccttcgtcatcccgtacctgctgttcgagaacaccatgtcggtgaccaagttcaacgcgatggtctcggggctgttccagctggggagcgcgtacgagtgggtagtgaccaagaagtcgggctcgggcccccgctcgtccgaggtcgccggcgacctcgtctcgctggccgccgccgccccgacggcgaagaagaagaagaagaagaagcacaaccggatatacaagaaggagctcgcgctgtcgatgctgctcctgaccgcggccgcccgcagcttgctgtcgaagcagggtatccacttctacttcctcctgttccagggcgtgtcgttcttgttggtcgggcttgacctcataggggagcaggtcgagtga

SEQ ID NO: 125724 - DNA, 544 bp, Zea Mays
cggaacacgccacaggcttccacgcaggccgccgtcgacgctgctacgccgcgagcaggccgggctcacgggcaccgacgccgccgcacccgagcaagcaggcgcgagcacgtgggcacagccccgccgccacttcaggccgcgccgccgcaagtcgaagaaaccacaggtcgtcgttaagagccataagaatgcagaagaaagagaaggagatagtggttcggacgggcaggccgagcagggctaccaccgtcagcaggtcatgtcgccatcacatctcgcaagcgctgccaccacgccgccccgcaagcaggtgtgcgggcgcgccgcctcacagcctggcagcacgagtctcgccgccacgccacctaggcgtgcgcgcgagcgagcgcatagccgccgcttcctcaccgtgcaggcacgcgggtgcacgggacccaagctgctgccgccaccaccctggaggaaggcaggcacggccgccgccgccgccgccccctgtccctttcgcgggaataagattagaggaaagagaaagaaaagt

SEQ ID NO: 125725 - DNA, 781 bp, Zea Mays
gtcctagaaacttacatctttcttgttcttctcctagcttttctgtttctcctccaacagagctcagaatggtactttctctacagaaagagttagagagcaaaccaaagcaccaaatttgtagtaagaggtgtatgcaacatggttgaacactcaaaccttacatacttaacctttttcaccattttacccaatttggcatgtttgaggtcgatgttggactttaaaccattaagtcaacttgacttgatctagattgacatatctgagttccaactcccttgttcatttctcgagattgatcttgagccttatgacttacaccacataactgtagctgttgcctcattggttgtaagtcacgtccttatgtagtgatccttgatgtgccgtagctgttctcaactcgatcacccttgactttgcaagccttcttcttcacccttggctttgggttcctcagccttcttgaccttctcccatgcacttgctacctcgaagctcttcttgccttcgtccttggcttgatcagttgtctccgagctacgcacccgagtatcacttttgcaatgtccatcttacttgttcacttgttgaaccttgttagctttaccttaagcacctgttcaacacttagtacacttgttagtcctttaattgagttgtcatccaaacaccaaaactcacaagagagctttcaatctccccctttttggtgattgatggcaacacaattaaagcttacataagaataagatttgaagcacaaattttgaattct

SEQ ID NO: 125726 - DNA, 738 bp, Zea Mays
atggacacgccgggcctggcagccgacgacggcgagacccaggaccccagcggcagtgggcaggccagcctgggcgccaccgcgggcttggcgaagagcatggcgaggctggcgctgacgccgccccggtccgggctctgctcgcgggagctgctgctcacgctcggggccagcgacgacgcgttcgacacgtgcgcgctggcgctgcccccggtcccggcagtgtccacggacacggtgtcgtgcagcagagatcgacaacaggtcctggtgctgctgccgctgccgtccgccccgctcgacagcggcaggcagcgccgcctggatcttgcagcaggtgtccgccatgcagccgccggcctgcaccagcgccacggcggcgccaccgccttccttcctgcgccgtacctggtcgccagggagcagcgtgccgctgtccatgatcttgtccacgtcgtagcgcgtggtgtcgaagttggtgaccgcgttcaggccccggaacttgatggccgccacgtcgtacgcctccgccgcctcctcctgcgtgcctgcacaggaacggctccgcctcagggcccgcgccaggacaggacagccacatcggaaatgcgcttttttgtggggcggcagcggtcaaacgggcaagcaaagcgcgaaagcgacgccagccatcgagcgtgcgctgcgaacgcaaagcgccaaagccgagagcggccagcagcccggagccagccttag

SEQ ID NO: 125727 - DNA, 99 bp, Zea Mays
gcatatgggaagaagcgacgatcgataatgaaggaatactacgtacaaagcgcgcgtcgctcttacaaaagatgcaaattatatatgagattatttgag

SEQ ID NO: 125728 - DNA, 890 bp, Zea Mays
gattggaaccatcggcagcaaaagcaaagatttcagcgcggatctcgtgaggcttttccccccttttaggttctctcgtttgctttgtttacgctcgatctgccacctccttttcccggcccccagctgcccagcagcgaccgatggaccggtcggtcggtcatcaggccgctgtcgccgtgcaagataaggaagcaaaagagctagctagccgcgggagcggcgccaaagacgacgacggcctgcgggtgcgcgacgaggctgccggctgtggcggatgagcatgtgatatatggcggaccggcattgggctccggttgcggcgccgggagccttcctgtgctcgttgcggggtgaggtgagcaaagcaagctaaggccgccgcggccaaccggctcacggcaggtgtagttctagctagctgggaccccggccggcgtcaccgcaccgggtgtggtggtggtgctggtgtgacagcggaagctgcgcggatattgatagatatgatagttgattgatagggtgctcgaggagcgcggcgtgctttgttggtcccgggccttaggcggcgacgtgtgtctgccctgcacccgtgtcagcgggctcgccgctcgttgggacgaaggtcctcctcgcctctcagagaagcggaaccgaggttggatgagcgggcgagcgacctgtgggccagacaacacctgtcataggcgatgattttgcatggataaaactaaggatatcacggcctatatatatggtaatttaaaatagggtttgcatcatagctgctcgtaaaagaaagttttgatgtgattttgttgtttatacaagtggtagtctggtagacctcaagtattcatcaattttaaatgttggctaatttcttcaca

SEQ ID NO: 125729 - DNA, 104 bp, Zea Mays
atttctttctttttctattttattttgcatttacaaactcaaattcaagtccaagctcaaattttaaaatgaaatgcagaggcgaaaattccagcatgagatgc

SEQ ID NO: 125730 - DNA, 1860 bp, Zea Mays
caccagtgaagagcaacagtccctccccccctgaccccacgccctccgtgccgtgcccactcctctccccgcagcttcgggcccctgccatgccgtcctcgtcgtcgctgatccatggcatctccatctccgtctccgacgacgacgaggccaccggcaaggtgcgcgtccgcgtccgccgcaagcgctcccgcggccccgcatccgcttcggcgcgccgccgccgcatcctcttccgcgccgcgcggctgggcgtgccgctcctcctcgccgccctcgccgtgtgcctcctcctctacgagtcctaccgcctcacgccttcccgctcctccacactgcctccgccgtccttcgcggacatcagccgcctctcccgcaacgcccgcgccgccgatggcgccaggaagtcatgcctgaagtttcttgatcctgagaagcttcaaaatttggaacttccagaaattcctgaaacaaatttgtcgatgaaggaagttctgtacagatcaagtctgccccatatcgtcaatgatacaccaccacatacagagaattcccggttcaacttgttcacaggataccagacactcactgaacgagaagaaagcttcaaggttaactttttgagcatttacatttcaatgaagaaaagtgtgacagtgcactgtggcttttataatgaaaatggagggttcagagtttctgatgttgacagagaatatatgagatcctgtgaagtagttgttgcaacttgtgcatttggtggaggtgacgaccttcatcagcctatagggatgaccgaaaattccatcagaaaggtttgctatgtagctttctgggatgaagtcacccgtgcagctcaagaggaggaaggacacacgatcagtgaagacctcgtgattggcctatggcggatcattcttgttagcgatcttcctttctcagatcaacggttgaatgggaaaattcctaagctgataagccatcgcctcttcccaatggcgcggtactcaatttgggtggattcaaaatctcagttccggagagacccattgggagtccttgaagcccttttgtggcgctcaaactcttctctagcgttatcggaacacggagctcggagtagcctgtacgatgaggcgaaagcaattgttaagaaacacaaagcaactccagaggaagttgaagtgcagttggatcagtaccgacgagatggcatccctgatgagaaaagattcaatggaaagaaagctctcgcagaagcttcagtgatcgtgaggaaccacgcgccgctgaccaacctcttcatgtgcgcctggttcaacgaggtggtcaggttcacgtcccgggatcagctgagctttccctacgtcctgaggcgcctgaggccgcccggcgttcacctgttcccggtttgcgcgcgcaaggacctggtgaacagcttcgggcacaagcgcaaggtgaagccgctcgtcaaggacacgacgtgagccccttgtggaattgggccttcgtctgggctagagaaggtcaacctgcctgattagtaatttagtggtagtagtcttcttccttccatccagtagtagttcataagtaagaatcaaaccgtcgtgtaggggagggtcttgagtcttgacgtagtgaaattacagtcggagacgcagagtagtagtcaccgaaggggtgcaacgtaggggtaggaatgatttatcccggtaacgaaggatgtacttactagctgacgacaatggcgctgtcgacgttgctgcaggcgaagatggcctgtgcagctgtggttacccttccccgttcctcatgaaaatgaaagatatcttctcccagttttttttttttttgttt

SEQ ID NO: 125731 - DNA, 1833 bp, Zea Mays
caccagtgaagagcaacagtccctccccccctgaccccacgccctccgtgccgtgcccactcctctccccgcagcttcgggcccctgccatgccgtcctcgtcgtcgctgatccatggcatctccatctccgtctccgacgacgacgaggccaccggcaaggtgcgcgtccgcgtccgccgcaagcgctcccgcggccccgcatccgcttcggcgcgccgccgccgcatcctcttccgcgccgcgcggctgggcgtgccgctcctcctcgccgccctcgccgtgtgcctcctcctctacgagtcctaccgcctcacgccttcccgctcctccacactgcctccgccgtccttcgcggacatcagccgcctctcccgcaacgcccgcgccgccgatggcgccaggaagtcatgcctgaagtttcttgatcctgagaagcttcaaaatttggaacttccagaaattcctgaaacaaatttgtcgatgaaggaagttctgtacagatcaagtctgccccatatcgtcaatgatacaccaccacatacagagaattcccggttcaacttgttcacaggataccagacactcactgaacgagaagaaagcttcaagatgaagaaaagtgtgacagtgcactgtggcttttataatgaaaatggagggttcagagtttctgatgttgacagagaatatatgagatcctgtgaagtagttgttgcaacttgtgcatttggtggaggtgacgaccttcatcagcctatagggatgaccgaaaattccatcagaaaggtttgctatgtagctttctgggatgaagtcacccgtgcagctcaagaggaggaaggacacacgatcagtgaagacctcgtgattggcctatggcggatcattcttgttagcgatcttcctttctcagatcaacggttgaatgggaaaattcctaagctgataagccatcgcctcttcccaatggcgcggtactcaatttgggtggattcaaaatctcagttccggagagacccattgggagtccttgaagcccttttgtggcgctcaaactcttctctagcgttatcggaacacggagctcggagtagcctgtacgatgaggcgaaagcaattgttaagaaacacaaagcaactccagaggaagttgaagtgcagttggatcagtaccgacgagatggcatccctgatgagaaaagattcaatggaaagaaagctctcgcagaagcttcagtgatcgtgaggaaccacgcgccgctgaccaacctcttcatgtgcgcctggttcaacgaggtggtcaggttcacgtcccgggatcagctgagctttccctacgtcctgaggcgcctgaggccgcccggcgttcacctgttcccggtttgcgcgcgcaaggacctggtgaacagcttcgggcacaagcgcaaggtgaagccgctcgtcaaggacacgacgtgagccccttgtggaattgggccttcgtctgggctagagaaggtcaacctgcctgattagtaatttagtggtagtagtcttcttccttccatccagtagtagttcataagtaagaatcaaaccgtcgtgtaggggagggtcttgagtcttgacgtagtgaaattacagtcggagacgcagagtagtagtcaccgaaggggtgcaacgtaggggtaggaatgatttatcccggtaacgaaggatgtacttactagctgacgacaatggcgctgtcgacgttgctgcaggcgaagatggcctgtgcagctgtggttacccttccccgttcctcatgaaaatgaaagatatcttctcccagttttttttttttttgttt

SEQ ID NO: 125732 - DNA, 1800 bp, Zea Mays
caccagtgaagagcaacagtccctccccccctgaccccacgccctccgtgccgtgcccactcctctccccgcagcttcgggcccctgccatgccgtcctcgtcgtcgctgatccatggcatctccatctccgtctccgacgacgacgaggccaccggcaaggtgcgcgtccgcgtccgccgcaagcgctcccgcggccccgcatccgcttcggcgcgccgccgccgcatcctcttccgcgccgcgcggctgggcgtgccgctcctcctcgccgccctcgccgtgtgcctcctcctctacgagtcctaccgcctcacgccttcccgctcctccacactgcctccgccgtccttcgcggacatcagccgcctctcccgcaacgcccgcgccgccgatggcgccaggaagtcatgcctgaagtttcttgatcctgagaagcttcaaaatttggaacttccagaaattcctgaaacaaatttgtcgatgaaggaagttctgtacagatcaagtctgccccatatcgtcaatgatacaccaccacatacagagaattcccggttcaacttgttcacaggataccagacactcactgaacgagaagaaagcttcaagatgaagaaaagtgtgacagtgcactgtggcttttataatgaaaatggagggttcagagtttctgatgttgacagagaatatatgagatcctgtgaagtagttgttgcaacttgtgcatttggtggaggtgacgaccttcatcagcctatagggatgaccgaaaattccatcagaaaggtttgctatgtagctttctgggatgaagtcacccgtgcagctcaagaggaggaaggacacacgatcagtgaagacctcgtgattggcctatggcggatcattcttgttagcgatcttcctttctcagatcaacggttgaatgggaaaattcctaagctgataagccatcgcctcttcccaatggcgcggtactcaatttgggtggattcaaaatctcagttccggagagacccattgggagtccttgaagcccttttgtggcgctcaaactcttctctagcgttatcggaacacggagctcggagtagcctgtacgatgaggcgaaagcaattgttaagaaacacaaagcaactccagaggaagttgaagtgcagttggatcagtaccgacgagatggcatccctgatgagaaaagattcaatggaaagaaagctctcgcagaagcttcagtgatcgtgaggaaccacgcgccgctgaccaacctcttcatgtgcgcctggttcaacgaggtggtcaggttcacgtcccgggatcagctgagctttccctacgtcctgaggcgcctgaggccgcccggcgttcacctgttcccggtttgcgcgcgcaaggtgaagccgctcgtcaaggacacgacgtgagccccttgtggaattgggccttcgtctgggctagagaaggtcaacctgcctgattagtaatttagtggtagtagtcttcttccttccatccagtagtagttcataagtaagaatcaaaccgtcgtgtaggggagggtcttgagtcttgacgtagtgaaattacagtcggagacgcagagtagtagtcaccgaaggggtgcaacgtaggggtaggaatgatttatcccggtaacgaaggatgtacttactagctgacgacaatggcgctgtcgacgttgctgcaggcgaagatggcctgtgcagctgtggttacccttccccgttcctcatgaaaatgaaagatatcttctcccagttttttttttttttgttt

SEQ ID NO: 125733 - DNA, 273 bp, Zea Mays
aacaagagttccggctttagcatgataatgcgtacagccaatacaagtcgattattacaattaagcactgttgcatgaatagtgatactagctcaaaggaactaaattataagactatgactaacactagccatactcaattcttgtatttgagcgtcatccatggtttgcgaagacttccatcgccaccacttccaaaacgtgcgaagcaacgaggatttgttgttgcgattcctccttttgtagcagtctccagaatcttaaccagtgagt

SEQ ID NO: 125734 - DNA, 2344 bp, Zea Mays
gcatagagagcagttggattggatcaaagagaggagggctttgctttccgttttccttctccaaatggctcattagctcgtgcttcttccttccttgctaccgagttcggggcgctaaccaatgcgcagcgacaagctgatctctttcctgattgactcttattagtcttagctctgccacgggatggaggtggaggctctagagaaggggtacacagcttttgccaaggcggtgaagtcttttacttcttcagaacggtacaagcgatcagagagctattttgaggacatgtatggtacagatgctttgcgttcttcagacaagacaattgttctacctatgccagaagctgtaaaagctaaggtgaaaggtgatatcagcaaggaagctcaacctggaaggggagcacaaagcaccttgagaaaggagatccttgagcttgagaagcacttcagggaacaacaggttgtgagtggtgcactggaaaacgctttaggacctaacgccggttcagtcaacttttcaccagagaatccaatgccaaaggcagctaatgaactgatacgggagattgccacattggagctcgaggtgaagaacatggagcagtatctcctgacactctaccgcaaagcattcgagcagcaagcgccggcactctctccccctgattgccgggaagcttcgaagccgtcagtgagctcacgctttgggcagctccgagaaacacccgtggcggcgaagtcttgcaagagtggaggaggggatgcggcactccggaccagttacccgccgccggcgcataagaaactgaacgatccgttggcagactgctgcacatctgctcgctcccatagagcggttgattcagatgtcctccgctgccagtcagccctgtcgtaccgcggagtttgctcgtccagggtactgccttcagaagaggatgatgatagcctcgcgagggctcttcgctcgtgccactcacagccattctcattcgcagaggaaggagagggggccggtgcatctggaggagcgataagcttagcagagtatctaggaaccaacgtagccgaccacatcccggaaacccccaacaacctgtcggaggagatggtgagatgcatggcggggatatactgcaggcttgcagaccctcccttggtccaccacggctcgtcgtcctcgccgacattgtccttctcctcgaccaccagcgcagtctctccacagtacgtcggagacgacatgtggagtcccagctaccgcaggagagaagcgacgaccctggactcccgcctgatcaacccgttccacgtcgagggtctgaaggagttcagtgggccttacaacacgatggtcgaggttcctacgatcagccgtgacggtcggaggatgaaagaagccgaggacctgctccagacttacaggctggttttgtaccggctggaagccgttgatctgaggacgatgacgaacgaagaaaagatagcgttctgggtgaacgtacacaatgccttgctgatgcatgcttatctggagaacggcgtcccacagaacaaaacatccctgcttgctaaggccgcctgcaaaatagctggacgcagcatcaacgcggccgttatccagagcgttgttcttggatgtaccacgcactgccccggacagtggctacgacggacgctgctctaccccaggaccaaaagcaaagtgagcaaagcggggcatgagtggcgagcctttgccgtcgcacaaccggagcctcttttgcgctttgcgctttgctccggcagccattctgatcccgcggtgagggtgtacactccgaagcggctgttccaccagctggaggcggccaaggaggagttcatccgggcgacggccggcgtgtggaaggagcagaagctgcttctccccaagctggtggaggcgtacgccaaggacgtgaggctgtcgccgcagggcctcgtggacatggtccagcgccacctcccggagaccatgagggtggccgtgcagcggtgccagcagggcggcagggcgtcgtcgggcaaggtcgtcgtcgactgggtgccccacaacccggccttccggtacctgctcgcaagggacctcgcgttccctcacctcagctgacgctgacactgagcatatatcgatgggcatgggctcaagtagtatatgcatgtgtcaaagggttaggacttaggagtaaagaagggatcgtgtgcagtttttgtgtgggtggttatcaatggcgtggcgtgtaaagatgcttctgtagtctgtagatgatgaacaggaaaggaaacagttgacgaaatgatagaaagcacgtttgac

SEQ ID NO: 125735 - DNA, 2323 bp, Zea Mays
gcatagagagcagttggattggatcaaagagaggagggctttgctttccgttttccttctccaaatggctcattagctcgtgcttcttccttccttgctaccgagttcggggcgctaaccaatgcgcagcgacaagctgatctcttcttagctctgccacgggatggaggtggaggctctagagaaggggtacacagcttttgccaaggcggtgaagtcttttacttcttcagaacggtacaagcgatcagagagctattttgaggacatgtatggtacagatgctttgcgttcttcagacaagacaattgttctacctatgccagaagctgtaaaagctaaggtgaaaggtgatatcagcaaggaagctcaacctggaaggggagcacaaagcaccttgagaaaggagatccttgagcttgagaagcacttcagggaacaacaggttgtgagtggtgcactggaaaacgctttaggacctaacgccggttcagtcaacttttcaccagagaatccaatgccaaaggcagctaatgaactgatacgggagattgccacattggagctcgaggtgaagaacatggagcagtatctcctgacactctaccgcaaagcattcgagcagcaagcgccggcactctctccccctgattgccgggaagcttcgaagccgtcagtgagctcacgctttgggcagctccgagaaacacccgtggcggcgaagtcttgcaagagtggaggaggggatgcggcactccggaccagttacccgccgccggcgcataagaaactgaacgatccgttggcagactgctgcacatctgctcgctcccatagagcggttgattcagatgtcctccgctgccagtcagccctgtcgtaccgcggagtttgctcgtccagggtactgccttcagaagaggatgatgatagcctcgcgagggctcttcgctcgtgccactcacagccattctcattcgcagaggaaggagagggggccggtgcatctggaggagcgataagcttagcagagtatctaggaaccaacgtagccgaccacatcccggaaacccccaacaacctgtcggaggagatggtgagatgcatggcggggatatactgcaggcttgcagaccctcccttggtccaccacggctcgtcgtcctcgccgacattgtccttctcctcgaccaccagcgcagtctctccacagtacgtcggagacgacatgtggagtcccagctaccgcaggagagaagcgacgaccctggactcccgcctgatcaacccgttccacgtcgagggtctgaaggagttcagtgggccttacaacacgatggtcgaggttcctacgatcagccgtgacggtcggaggatgaaagaagccgaggacctgctccagacttacaggctggttttgtaccggctggaagccgttgatctgaggacgatgacgaacgaagaaaagatagcgttctgggtgaacgtacacaatgccttgctgatgcatgcttatctggagaacggcgtcccacagaacaaaacatccctgcttgctaaggccgcctgcaaaatagctggacgcagcatcaacgcggccgttatccagagcgttgttcttggatgtaccacgcactgccccggacagtggctacgacggacgctgctctaccccaggaccaaaagcaaagtgagcaaagcggggcatgagtggcgagcctttgccgtcgcacaaccggagcctcttttgcgctttgcgctttgctccggcagccattctgatcccgcggtgagggtgtacactccgaagcggctgttccaccagctggaggcggccaaggaggagttcatccgggcgacggccggcgtgtggaaggagcagaagctgcttctccccaagctggtggaggcgtacgccaaggacgtgaggctgtcgccgcagggcctcgtggacatggtccagcgccacctcccggagaccatgagggtggccgtgcagcggtgccagcagggcggcagggcgtcgtcgggcaaggtcgtcgtcgactgggtgccccacaacccggccttccggtacctgctcgcaagggacctcgcgttccctcacctcagctgacgctgacactgagcatatatcgatgggcatgggctcaagtagtatatgcatgtgtcaaagggttaggacttaggagtaaagaagggatcgtgtgcagtttttgtgtgggtggttatcaatggcgtggcgtgtaaagatgcttctgtagtctgtagatgatgaacaggaaaggaaacagttgacgaaatgatagaaagcacgtttgac

SEQ ID NO: 125736 - DNA, 2329 bp, Zea Mays
gcatagagagcagttggattggatcaaagagaggagggctttgctttccgttttccttctccaaatggctcattagctcgtgcttcttccttccttgctaccgagttcggggcgctaaccaatgcgcagcgacaagctgatctctctctgccacgggatggaggtggaggctctagagaaggggtacacagcttttgccaaggcggtgaagtcttttacttcttcagaacggtacaagcgatcagagagtcgcagctattttgaggacatgtatggtacagatgctttgcgttcttcagacaagacaattgttctacctatgccagaagctgtaaaagctaaggtgaaaggtgatatcagcaaggaagctcaacctggaaggggagcacaaagcaccttgagaaaggagatccttgagcttgagaagcacttcagggaacaacaggttgtgagtggtgcactggaaaacgctttaggacctaacgccggttcagtcaacttttcaccagagaatccaatgccaaaggcagctaatgaactgatacgggagattgccacattggagctcgaggtgaagaacatggagcagtatctcctgacactctaccgcaaagcattcgagcagcaagcgccggcactctctccccctgattgccgggaagcttcgaagccgtcagtgagctcacgctttgggcagctccgagaaacacccgtggcggcgaagtcttgcaagagtggaggaggggatgcggcactccggaccagttacccgccgccggcgcataagaaactgaacgatccgttggcagactgctgcacatctgctcgctcccatagagcggttgattcagatgtcctccgctgccagtcagccctgtcgtaccgcggagtttgctcgtccagggtactgccttcagaagaggatgatgatagcctcgcgagggctcttcgctcgtgccactcacagccattctcattcgcagaggaaggagagggggccggtgcatctggaggagcgataagcttagcagagtatctaggaaccaacgtagccgaccacatcccggaaacccccaacaacctgtcggaggagatggtgagatgcatggcggggatatactgcaggcttgcagaccctcccttggtccaccacggctcgtcgtcctcgccgacattgtccttctcctcgaccaccagcgcagtctctccacagtacgtcggagacgacatgtggagtcccagctaccgcaggagagaagcgacgaccctggactcccgcctgatcaacccgttccacgtcgagggtctgaaggagttcagtgggccttacaacacgatggtcgaggttcctacgatcagccgtgacggtcggaggatgaaagaagccgaggacctgctccagacttacaggctggttttgtaccggctggaagccgttgatctgaggacgatgacgaacgaagaaaagatagcgttctgggtgaacgtacacaatgccttgctgatgcatgcttatctggagaacggcgtcccacagaacaaaacatccctgcttgctaaggccgcctgcaaaatagctggacgcagcatcaacgcggccgttatccagagcgttgttcttggatgtaccacgcactgccccggacagtggctacgacggacgctgctctaccccaggaccaaaagcaaagtgagcaaagcggggcatgagtggcgagcctttgccgtcgcacaaccggagcctcttttgcgctttgcgctttgctccggcagccattctgatcccgcggtgagggtgtacactccgaagcggctgttccaccagctggaggcggccaaggaggagttcatccgggcgacggccggcgtgtggaaggagcagaagctgcttctccccaagctggtggaggcgtacgccaaggacgtgaggctgtcgccgcagggcctcgtggacatggtccagcgccacctcccggagaccatgagggtggccgtgcagcggtgccagcagggcggcagggcgtcgtcgggcaaggtcgtcgtcgactgggtgccccacaacccggccttccggtacctgctcgcaagggacctcgcgttccctcacctcagctgacgctgacactgagcatatatcgatgggcatgggctcaagtagtatatgcatgtgtcaaagggttaggacttaggagtaaagaagggatcgtgtgcagtttttgtgtgggtggttatcaatggcgtggcgtgtaaagatgcttctgtagtctgtagatgatgaacaggaaaggaaacagttgacgaaatgatagaaagcacgtttgacggttga

SEQ ID NO: 125737 - DNA, 1960 bp, Zea Mays
tccatactgtggagcgtggactcatgaaatcaccttgctgacgcagatccttgagcttgagaagcacttcagggaacaacaggttgtgagtggtgcactggaaaacgctttaggacctaacgccggttcagtcaacttttcaccagagaatccaatgccaaaggcagctaatgaactgatacgggagattgccacattggagctcgaggtgaagaacatggagcagtatctcctgacactctaccgcaaagcattcgagcagcaagcgccggcactctctccccctgattgccgggaagcttcgaagccgtcagtgagctcacgctttgggcagctccgagaaacacccgtggcggcgaagtcttgcaagagtggaggaggggatgcggcactccggaccagttacccgccgccggcgcataagaaactgaacgatccgttggcagactgctgcacatctgctcgctcccatagagcggttgattcagatgtcctccgctgccagtcagccctgtcgtaccgcggagtttgctcgtccagggtactgccttcagaagaggatgatgatagcctcgcgagggctcttcgctcgtgccactcacagccattctcattcgcagaggaaggagagggggccggtgcatctggaggagcgataagcttagcagagtatctaggaaccaacgtagccgaccacatcccggaaacccccaacaacctgtcggaggagatggtgagatgcatggcggggatatactgcaggcttgcagaccctcccttggtccaccacggctcgtcgtcctcgccgacattgtccttctcctcgaccaccagcgcagtctctccacagtacgtcggagacgacatgtggagtcccagctaccgcaggagagaagcgacgaccctggactcccgcctgatcaacccgttccacgtcgagggtctgaaggagttcagtgggccttacaacacgatggtcgaggttcctacgatcagccgtgacggtcggaggatgaaagaagccgaggacctgctccagacttacaggctggttttgtaccggctggaagccgttgatctgaggacgatgacgaacgaagaaaagatagcgttctgggtgaacgtacacaatgccttgctgatgcatgcttatctggagaacggcgtcccacagaacaaaacatccctgcttgctaaggccgcctgcaaaatagctggacgcagcatcaacgcggccgttatccagagcgttgttcttggatgtaccacgcactgccccggacagtggctacgacggacgctgctctaccccaggaccaaaagcaaagtgagcaaagcggggcatgagtggcgagcctttgccgtcgcacaaccggagcctcttttgcgctttgcgctttgctccggcagccattctgatcccgcggtgagggtgtacactccgaagcggctgttccaccagctggaggcggccaaggaggagttcatccgggcgacggccggcgtgtggaaggagcagaagctgcttctccccaagctggtggaggcgtacgccaaggacgtgaggctgtcgccgcagggcctcgtggacatggtccagcgccacctcccggagaccatgagggtggccgtgcagcggtgccagcagggcggcagggcgtcgtcgggcaaggtcgtcgtcgactgggtgccccacaacccggccttccggtacctgctcgcaagggacctcgcgttccctcacctcagctgacgctgacactgagcatatatcgatgggcatgggctcaagtagtatatgcatgtgtcaaagggttaggacttaggagtaaagaagggatcgtgtgcagtttttgtgtgggtggttatcaatggcgtggcgtgtaaagatgcttctgtagtctgtagatgatgaacaggaaaggaaacagttgacgaaatgatagaaagcacgtttgac

SEQ ID NO: 125738 - DNA, 272 bp, Zea Mays
tcaaaaaaaaaaaaaaactcgacctagcgtgcgtggccgtataggccgtgttggtaggtgtatgtgcgtagatgcgcgcgcggcttcgcgtttctgttcaagacgggtttggctgacgaatgacgatgaaggctcgctacaatttaccggatgtccggatggcaactccaccatgctttgtgtcggatctaatttttagcatctaggaaattattccatgtcatactgacccgaaaaaagttagcctgactttgagctctattcagtccacc

SEQ ID NO: 125739 - DNA, 2097 bp, Zea Mays
cgtatttctgtcgcgtactaccgtactcgcgtcctcattaaaaaaatcttcaggaaaaaaagagaaaatcttcaatatctgcctgctcctcgtctccacctggaccgctggacctcacgccaccggcaaacatgctgatttctccaagacttgcagcaccggccgcctcccggacctccccctctctccccaccaccacgcccacacgtccaggtatccgcggtcggaggcgaagcggtttcgacgcaccggtcgacgcggcatcccttcaccacggcgaccgtacccgcccggcgctccgcttcacataccccgcaccctccgcctctgtcacgactaccagctcaccggagcccatcgattgccgattggacagcgatgagctcggaaggctgtaccgagaacacaaccctgaggccgccgttagcttgctcgacgaaatgctccaacgaggcagcgccgaacaactcgagccggaggaacaggccgcactcctccaggcctgcgccgacacgcggtcgctgccctcgctcaggcgcgcccaccgcctgctcacttccacgtcggggtccgcgattcccgcgcccgtcctgcacaggatcgccacgctgtacctcaagctcggcgcccgcggcgacgcgcggcgggtcctcgaggagcgtacaaggcggcgtccggcgagggaggacgacgcggcggtccaggccaagcggcgagaggcgtacactaaggtgcgggagctccacgcgcagatccgcgcggcagggtacgtgccggacacgcgctacgtgctccacgacatcgacgaggacgccaaggcccgcgcgctcatgtaccacagcgagcgcctggccatcgccttcgggctggtgagcacgccgcccgggacgccgctccgcgtcatgaagaacctccgcatctgcggcgactgccacaacgccgtcaagctcattgccaaggtcaccggccgcgagatcgtcgtcagggacaacaagcgcttccaccatttcaaggacggcgcctgctcctgcggagactactggtgaggaagccttcacagctagcacgcacaaaggttacattctccataaaatgtttgtaaattcgtaacacttgttagtggcgagagaaggatcaaagaattggttgagccaacttgtagaagcattggccagcaacatcaccgacttccaagtacgatttgtgcgctgcaactgcaaactgcaaatatgcaattgaatgatcgaacatggaaaaggacacaataactgcgcaggccgcaggggaaactcagggaatttttcacaaatccaaggaaagaatcaagagaacagaacaatgaactcgaagctaggatgtgcaatggctaagaactcaggggctctgctcaatgcgtggccggcgagtccgtgccaccaccgtccgctgctgcgactggcagacctgcgccgggaacttgcacccgaaccgcttcgtcactatcgcgccccacctcccatccgccggcggcacagacggcgctcccctatccaccggtgccccgcctcgccggtccatcttgtcgatggctttcctcatgctcgtgcactcgcgctcgagctcctgcacgcggttccgcatgctgtccatgtcgagccgcagcatctggttgccccgtgccgccacgcgccatgtaccgccgccgtcgctctcaccgccttcctcccctgacccggctgcgccgccttcgttcgccatgatcgtctgagcgatggcccggcgcagctggagctgctcgaagaagagcacctgcacgaccgtccgcagcggcagccgttcgttctgcgccgcgtgcgtgcaggcctccagcgtgagcttccgcccgtccaccacgccgctcaccttctccttctcttcttcactcagacccggatgagcctgcagagagacgagccaaaacaaaacaagcattcatcactcgtcagcaccggcattgtttcacaagctagcgagccagaagataacaagaacgcgctgctccctcgccttgaggtagatgtcgacagctcggtaaaggccatcatcgtacacgcgggcgccgtccggcaacgcccaggc

SEQ ID NO: 125740 - DNA, 1816 bp, Zea Mays
atgctgatttctccaagacttgcagcaccggccgcctcccggacctccccctctctccccaccaccacgcccacacgtccaggtatccgcggtcggaggcgaagcggtttcgacgcaccggtcgacgcggcatcccttcaccacggcgaccgtacccgcccggcgctccgcttcacataccccgcaccctccgcctctgtcacgactaccagctcaccggagcccatcgattgccgattggacagcgatgagctcggaaggctgtaccgagaacacaaccctgaggccgccgttagcttgctcgacgaaatgctccaacgaggcagcgccgaacaactcgagccggaggaacaggccgcactcctccaggcctgcgccgacacgcggtcgctgccctcgctcaggcgcgcccaccgcctgctcacttccacgtcggggtccgcgattcccgcgcccgtcctgcacaggatcgccacgctgtacctcaagctcggcgcccgcggcgacgcgcggcgggtcctcgaggagcgtacaaggcggcgtccggcgagggaggacgacgcggcggtccaggccaagcggcgagaggcgtacactaaggtgcgggagctccacgcgcagatccgcgcggcagggtacgtgccggacacgcgctacgtgctccacgacatcgacgaggacgccaaggcccgcgcgctcatgtaccacagcgagcgcctggccatcgccttcgggctggtgagcacgccgcccgggacgccgctccgcgtcatgaagaacctccgcatctgcggcgactgccacaacgccgtcaagctcattgccaaggtcaccggccgcgagatcgtcgtcagggacaacaagcgcttccaccatttcaaggacggcgcctgctcctgcggagactactggtgaggaagccttcacagctagcacgcacaaaggttacattctccataaaatgtttgtaaattcgtaacacttgttagtggcgagagaaggatcaaagaattggttgagccaacttgtagaagcattggccagcaacatcaccgacttccaagtacgatttgtgcgctgcaactgcaaactgcaaatatgcaattgaatgatcgaacatggaaaaggacacaataactgcgcaggccgcaggggaaactcagggaatttttcacaaatccaaggaaagaatcaagagaacagaacaatgaactcgaagctaggatgtgcaatggctaagaactcaggggctctgctcaatgcgtggccggcgagtccgtgccaccaccgtccgctgctgcgactggcagacctgcgccgggaacttgcacccgaaccgcttcgtcactatcgcgccccacctcccatccgccggcggcacagacggcgctcccctatccaccggtgccccgcctcgccggtccatcttgtcgatggctttcctcatgctcgtgcactcgcgctcgagctcctgcacgcggttccgcatgctgtccatgtcgagccgcagcatctggttgccccgtgccgccacgcgccatgtaccgccgccgtcgctctcaccgccttcctcccctgacccggctgcgccgccttcgttcgccatgatcgtctgagcgatggcccggcgcagctggagctgctcgaagaagagcacctgcacgaccgtccgcagcggcagccgttcgttctgcgccgcgtgcgtgcaggcctccagcgtgagcttccgcccgtccaccacgccgctcaccttctccttctcttcttcactcagacccggatgagcctgcagagagacgagccaaaacaaaacaag

SEQ ID NO: 125741 - DNA, 1234 bp, Zea Mays
gggtttgactctgctgcgagcccgaacccgaagcagcagagctgcaaaatctagtctagagcgaaagaaatggcgagcgtggcctccgcgaggtgttacggccttctcctcccgccaagcttcgccggagcacggtgctgctcccgtccgtcctcttcgctccgtctgcggccgcggtggggcctgcgccggccgaggacccccctcgcctgcgtcgcgccgcccgactccgcggagccacagacggatgagcaggctgtgaaagctgaatctatccaagaagatgctccgactagtacacccgaggatgctgggcttccagctctcccgaataaggatctcaacagaagggtagcactactgtccactcttggagcggtggctctgtttgcatcccagaggctcaatcttagcgaggcatctcttaaagatcttgcagccaattcggttccatatgaagaggctctttcaaatggcaggcccactgtggttgagttttatgcagactggtgcgaggtctgcagagaattagctccggatatctacaaagtggaacagcaatacaaggaccgtgtcaattttgtgatgctgaatgttgacaacacgaagtgggagcaagagcttgacgagttcggggtggaaggcattcctcacttcgcctttctggataaggaaggaaacgaggaaggcaatgttgtcgggagacttccaaagcagtatttccttgacaacgtggttgcgcttgcttctggtgatcccgagataccgcacgcacgagtggtcggtcagttctcgagcgctgaatctaggaaagttcatcaagtcgctgatcccagaagtcatggctagcagtagttgttttctatgtggacagctgtaatcatagttctaatgccaagaccgtttgacaagaggagatcctaggctatatactatagttcattcagccctccctgtatcgaacatgcgggcgctgcaaagagctggtagattccacaaaacccggaagaaaaggctggcgcggattccttcagtgatactgaaacggttgcatgttattattatacgagatactgttacgttttttaaaagcagtatagagggtgtgtggctcatgaaagaatctcgcctttgtttattcgctgctcgtgtaacacatgtttacgctgcctttttttctcaagaattcaggtcgaaaaggagagagccagcctcggcccaccatattcgcatc

SEQ ID NO: 125742 - DNA, 216 bp, Zea Mays
atgcaacacggacgtgaagcgagcacgttcggagcagatcaaagggtacctctcctggccggtggtgtcccaaatctaggccttgatgaccttgccatcgacctggagactgcgggtggcaaactcgatgccgatggtggacttggactcgaggctaaactcattcttggtgaagcgggagaggaggttggactggcattggagaagaagggatga

SEQ ID NO: 125743 - DNA, 2066 bp, Zea Mays
actattttaaacggacccgaggctcagtacagagcactgacacgctcgcctaattataaccacaccgcctagcgccactccccacgtcactcgctgtctgttgtagcaccgcaccagtcttcgccgccggtccgcgggcagatcaagagatggccacggcgatttacctctcctccccggcggcgccgtcgtcgtgtgcccgccagcggcggcagactaccagggcgaccgcgtcggcgacggaccgtccgcgcgaggtcgtgtccccgaagcgtcggctcccgctgcggaaggtgccgggcgactacgggccgccggtgctgggcgcgatccgcgaccggttcgagtacttctacgggcccggcggccgcgacgggttcttcacctcccgcgtgcgcgcgcacggctccaccgtggtgcggctcaacatgccgccgggccccttcgtggcgcgcgacccgcgcgtggtggcgctcctcgacgccgcctcgttcccggtgctcttcgacacctcgctcgtcgacaagacggacctcttcacgggaaccttcatgccgtccaccgagctcaccggcggctaccgcgtgctctcgtacctcgaccccgccgagcccaaccacgggccgctcaagacgctcctcttctacctcctgtcgcaccggcggcagcacgtgatccccaagttccgcgaggtgtacggcgacctcttcggcctcatggagaacgagctcgccagggtcggcaaggccgacttcggccactacaacgacgccgccgccttctccttcctctgccaggcgctgctggggcgcgaccccgccgagtccgcgctccagggcgacgggcccaagctgatcaccaagtgggtgctgttccagctcagcccgctgctcagcctcggcctgcccaagcacgtggaggactccctgctccactcgttccgcctcccgccggcgctggtcaagaaggactacgaccggctggccgacttcttccgcgacgcggccaggagggtggtcgacgagggagagcgcctcggggtcgcgcgggaggaggcggtgcacaacatcctcttcgccatgtgcttcaactccttcggcggcatgaagatcctgttcccgtcgctcgtcaagtggctgggccgcgccggcgggcgcgcgcacggccggctggcgacggaggtacgcgacgccgtgcgcgcgcacggcggcgaggtgactatgaaggcgctggcggagatgccgctggtgaagtcggccgtgtacgaggcgctgcgcatcgagccccccgtggcgatgcagtacggccgcgccaagcaggacatggtggtggagagccacgactatggcttcgaggtgcgcgagggggagatgctcttcggctaccagcccatggccaccaaggacccgcgcgtcttcgcgcgcgccgaggagtacgtgcccgacaggttcctcggcgaggacggcgcgcagctgctccgccacgtcgtctggtccaacggccccgagacggcgtcgcccacgctgcaagacaagcagtgcgctggcaaggacttcgtcgtgctcatcgctcgcctcctcgtcgccgagctcttcctccgctacgactcctttgacgtccaggtcggcgcctccgcgctggggtcgtcggtgaccatcacctcgctcaagaaagccaccttctgagctctgatggaccgcccgtcaaagtcgccggaggctggcacgtgcacttttttttcaccgtagaatatactgcatcgtacttgtctgcccccatccctctcaatatttttctagcgctttgatgtgatcatcaggtataacaaaatgcctattcttagtaaaacgagagaccgtttttttttcaggcaaatttgatagcgaactgagggagacatgcacatactgttcatgttgcttaggtactgttcggttattcctgtaggagatgggattgagaaaatttgtaaaaggttttcaacggatttaaacctatcgatctcctttaatctatatagaatgtatgaattgggatgaaaatgatcagaacctaaaatgacctca

SEQ ID NO: 125744 - DNA, 104 bp, Zea Mays
tttttttttctatcatgataacagagttcacaaatcaacttcttcaaacttgtctgctgggaatgctaagttcactcagtctcctttcccagagttgctagctc

SEQ ID NO: 125745 - DNA, 2551 bp, Zea Mays
tctcttgctgtatgctctcatttttttcttcttcccagaactttgcattgcaatgccaaccaatacgacggtgtccacctaccgcccaccgctctcgttccaacctagttggaccaccccgtaaaaaatctgaggggagccggcctccacgaactcctccgctgcaacgacataaaagagccgcgtcgtcccttccctcccggcttcctggcctgcacctagcatctctccgcttcctccccatccgcgccgcctctgacgttgacctcggcggccgccaccggcgaggtcgcacctcgccggtcaccaccacccccgctgctcgatcttatatccctactccgaggatccctgtagcctcctccggccgcgcacccgcggaaccctagatctccgataccccgcgctccttcccgccgacggctacccgatcggaatgggccgccatcttcagtaaggtccaaggacccaggggtacccccctccgccttcgcgcgtgcgcggagcgccgccgcgatggccatccgcatcaccgtatcctattcgggctacctggcgcagaacctggccgcgtccttcggcctgcgctgcaccgccgccgcggctgcgggcgctggcgccgcgcccggtccagggtgccgcttcctccaggacgcgctatcccgccctttctgcctcttcgcctcctcccgccacgtcgacccccaccatgacgccgaggatcagaaccacccgaagcccgggcccaaggctctgtcccctgccgttgcagcaagaggagatggctactcactgttgctgccgcgatcgtgttccgcgaaggcgccgccgccggtggatgaccccccagcgtcgctggccgtggggctgctgtcggtgttcgcgtctgggatgggatcgactggcggcattgctggtgcatcctcccttgttgcgtcgccgtcaatatcaaccgggctcaaccctgcgtcgctcctcccgttcctgcaggcgagcaagtggctcccctgtagcgacatagtcgctgctgcaacgacgtcgcgcagctcaggacgcccagcaggtgcaacggctgcacctacaccgcgtacagctgcaccatcgcctcgtcctgcaccacgcgcagccgctccatcgccccgtcctgcaccatgcgcagccgttccatcgccccgtcatgtaccagtgccgtcacctgctgttgctgctccttccaaggtcggcatacaagcattggttgatagtgctagcatcgcctcaggttcagctgggattggaagaggggtcattgcctctggtgcagctggaatggtgaagaagagtggtgctagtcttcctgttggtgcaggggtgggaaggaagaccggttggctctcaaggtgggtgagctcatgctcagatgatgcgaagaccgtctttgccgctgtgaccgtgccactgctctataaatcatccctagctgagccgaggtccatcccatccaggtcaatgttcccaacatttgatgttggtgatcggatccttgctgagaagatttcgtacattttccgggaaccggaaattctggacattgtgatctttcgggcacctccagtccttcaggcattgggctacagcgcaggtgatgtgtttatcaagagagttgtggctaagggtggggatatcgttgaagtacgtgatggtaacttgattgttaatggagtagttcaggaggaagaatttgtgttggaaccagccgactacgaaatggatccgctgactgtgcctgaaggctatgtctttgtactgggggataacagaaacaacagctttgattcacataactggggtccacttccagttaagaacatcctcgggagatctgtgctccgatactggccaccatctaggataacagatacaatatatcagcatgacatggtgcagcacacagctgttgcatcctgataatacattgtggcaataccacgtggtgcacgccaatttctcctttccctgcatagctttattgacaattgatatgcttagccgtggggttctttatttatttgttgtagccttgcctcaaatgtcgattgggcagcttggctgacagattagtttttttttccctccctacgggcagatgcttgtttaaagacagcaattcttgtactccgtagctaagaatgaatgccatataaatgttgcagtagataagcatcaaggagtgtaggatgaggatggcagttcttttgttttatgagatgagatggtgctctaaacttacgtaaaggaaatacgaagcatagaagagtgcccaagttgtgttatgtatttttttcattccttgatcttggatcaaagattcaaggcaaagtcagcctggtgcaaaggttttggttgaatccttgtatcctgccagataaggttttttgatggtgcaattttggattagcatttgccctagtatttagtgttttttagttctgtattcatttatgatgtaatacaactttgtgagcatagttctgtttggcctgctttgttcaatcgcagtgcgggttcaata

SEQ ID NO: 125746 - DNA, 2795 bp, Zea Mays
tctcttgctgtatgctctcatttttttcttcttcccagaactttgcattgcaatgccaaccaatacgacggtgtccacctaccgcccaccgctctcgttccaacctagttggaccaccccgtaaaaaatctgaggggagccggcctccacgaactcctccgctgcaacgacataaaagagccgcgtcgtcccttccctcccggcttcctggcctgcacctagcatctctccgcttcctccccatccgcgccgcctctgacgttgacctcggcggccgccaccggcgaggtcgcacctcgccggtcaccaccacccccgctgctcgatcttatatccctactccgaggatccctgtagcctcctccggccgcgcacccgcggaaccctagatctccgataccccgcgctccttcccgccgacggctacccgatcggaatgggccgccatcttcagtaaggtccaaggacccaggggtacccccctccgccttcgcgcgtgcgcggagcgccgccgcgatggccatccgcatcaccgtatcctattcgggctacctggcgcagaacctggccgcgtccttcggcctgcgctgcaccgccgccgcggctgcgggcgctggcgccgcgcccggtccagggtgccgcttcctccaggacgcgctatcccgccctttctgcctcttcgcctcctcccgccacgtcgacccccaccatgacgccgaggatcagaaccacccgaagcccgggcccaaggctctgtcccctgccgttgcagcaagaggagatggctactcactgttgctgccgcgatcgtgttccgcgaaggcgccgccgccggtggatgaccccccagcgtcgctggccgtggggctgctgtcggtgttcgcgtctgggatgggatcgactggcggcattgctggtgcatcctcccttgttgcgtcgccgtcaatatcaaccgggctcaaccctgcgtcgctcctcccgttcctgcaggcgagcaagtggctcccctgtagcgacatagtcgctgctgcaacgacgtcgcgcagctcaggacgcccagcaggtgcaacggctgcacctacaccgcgtacagctgcaccatcgcctcgtcctgcaccacgcgcagccgctccatcgccccgtcctgcaccatgcgcagccgttccatcgccccgtcatgtaccagtgccgtcacctgctgttgctgctccttccaaggtcggcatacaagcattggttgatagtgctagcatcgcctcaggttcagctgggattggaagaggggtcattgcctctggtgcagctggaatggtgaagaagagtggtgctagtcttcctgttggtgcaggggtgggaaggaagaccggttggctctcaaggtgggtgagctcatgctcagatgatgcgaagaccgtctttgccgctgtgaccgtgccactgctctataaatcatccctagctgagccgaggtccatcccatccaggtcaatgttcccaacatttgatgttggtgatcggatccttgctgagaagatttcgtacattttccgggaaccggaaattctggacattgtgatctttcgggcacctccagtccttcaggcattgggctacagcgcaggtgatgtgtttatcaagagagttgtggctaagggtggggatatcgttgaagtacgtgatggtaacttgattgttaatggagtagttcaggaggaagaatttgtgttggaaccagccgactacgaaatggatccgctggtataataactaatcttcttaccacatgctactaaagagccactattttgtagtcctgtaagtaagtcgcctccatcatagttatgtggcatcaattcttgacttttgaattgttacaaattggttgtgacctcaaaagtattcctgtgttctatgttcatatattaagtttactactttcatccactgaatctatatacacgtgctgattaatcgttgttgcttggccagactgtgcctgaaggctatgtctttgtactgggggataacagaaacaacagctttgattcacataactggggtccacttccagttaagaacatcctcgggagatctgtgctccgatactggccaccatctaggataacagatacaatatatcagcatgacatggtgcagcacacagctgttgcatcctgataatacattgtggcaataccacgtggtgcacgccaatttctcctttccctgcatagctttattgacaattgatatgcttagccgtggggttctttatttatttgttgtagccttgcctcaaatgtcgattgggcagcttggctgacagattagtttttttttccctccctacgggcagatgcttgtttaaagacagcaattcttgtactccgtagctaagaatgaatgccatataaatgttgcagtagataagcatcaaggagtgtaggatgaggatggcagttcttttgttttatgagatgagatggtgctctaaacttacgtaaaggaaatacgaagcatagaagagtgcccaagttgtgttatgtatttttttcattccttgatcttggatcaaagattcaaggcaaagtcagcctggtgcaaaggttttggttgaatccttgtatcctgccagataaggttttttgatggtgcaattttggattagcatttgccctagtatttagtgttttttagttctgtattcatttatgatgtaatacaactttgtgagcatagttctgtttggcctgctttgttcaatcgcagtgcgggttcaatactacgttgcctga

SEQ ID NO: 125747 - DNA, 744 bp, Zea Mays
cggctataaaatttaacaagaaggcatatgtactcagaagatgcaaggtgctaaagatagtcattgcatgattgcaagaaggcagtatgaacaatgtaagattgtacccctgcattgctagatgcaatacaaaatttgaacattatgttacaacccatttcacgttcaggcacacttccagcctaagtatacatgaaatcgatgtatatgtgtaatttcctatcagccctacgagaagtagatgacagcagaatctattaccactttacatccagcgacagcggttctggtggcaaaatgaatgacagaaactttgtgaaggaaatatttgaagtcaggctgccccaagtagtggtgtccactactggaaattgcctcctaaccttcttcaccgaaatagccttcagcctatcgtcatcttccactctagctataatgtcaactggaactcgctggaccatgggtctcgttttccactctggaacatcttcccagatgggatcatcctcagtgacatccctttcaaactccaaacggaatttcaccagaggtatcgatgtcactttagcttcaatgaagtgcactgaactattctcctggtttcttttgctaaaccaagtcttcaagatcttttcaagctttatcagtcttgggctaattgaggagaacaaaaattctgagatcaaccgatttgatatatggactttatacttgtctgacaataactctatagtgtcatgtgac

SEQ ID NO: 125748 - DNA, 636 bp, Zea Mays
cctgcattgctagatgcaatacaaaatttgaacattatgttacaacccatttcacgttcaggcacacttccagcctaagtatacatgaaatcgatgtatatgtgtaatttcctatcagccctacgagaagtagatgacagcagaatctattaccactttacatccagcgacagcggttctggtggcaaaatgaatgacagaaactttgtgaaggaaatatttgaagtcaggctgccccaagtagtggtgtccactactggaaattgcctcctaaccttcttcaccgaaatagccttcagcctatcgtcatcttccactctagctataatgtcaactggaactcgctggaccatgggtctcgttttccactctggaacatcttcccagatgggatcatcctcagtgacatccctttcaaactccaaacggaatttcaccagaggtatcgatgtcactttagcttcaatgaagtgcactgaactattctcctggtttcttttgctaaaccaagtcttcaagatcttttcaagctttatcagtcttgggctaattgaggagaacaaaaattctgagatcaaccgatttgatatatggactttatacttgtctgacaataactctatagtgtcatgtgac

SEQ ID NO: 125749 - DNA, 1161 bp, Zea Mays
atgttgtacaaagtagaaggaagtgctggtgatgtgttggaagataaccctgttgggaggctcaaggtttacgtgcatgatctccccagtaaatacaacaagaagctggtgaagaaggatcctaggtgcctgaaccacatgtttgctgctgagatcttcatgcaccggttactgttgtcaagtgctgtccgaacatttaatcctgaagaagcagattggttctacactcccgtatacgccacatgtgatctgactccttcgggtcttccccttcccttcaaatctccacgcatgatgctcagcgcaattgagctgattgccacgaactggccttactggaacagatcagagggtgcagatcatttctttgtcacgccacatgactttggtgcttgcttccattatcaggatgagaaagcaatcgggcggggaatccttcccttgcttcagcatgctacactggttcagacctttggacagaagaaccatgtctgcctgaagggtgggtccatcacaatcccaccatttgcacctccccagaaaatgcaggctcaccttatccccgcggacacccctcggtctatcttcgtgtacttccgtggtctgttctacgacaccagcaacgatcctgagggtggttactatgcgagaggtgctcgtgcatcagtctgggagaacttcaagaacaacccgctcttcgacatctcgactgatcacccatcgacttactacgaagacatggagcgttcagtgttctgcctgtgccccttgggctgggctccatggagccccaggctggtggaagctgtggttttcggctgcatcccgttgatcatcgccgacattgtcctgccctttgcggacgccatcccatgggaggagatcggtgtgtttgtcgccgaggaggatgtcccgaagctggacagcatcctgacgtccatcccaacagatgttatactgaggaagcaacgtctccttgcaaatccatcgatgaaacaggccatgctgttcccccagcctgctcaggcgggagatgcattccaccagatcctaaatgggctcgcgcgcaagctcccacatggtgacagcgtcttcttgaagcccggggagagggtcctgaactggaccgccggaccgccaggcgacctgaaaccttggtag

SEQ ID NO: 125750 - DNA, 1147 bp, Zea Mays
caccaccatgatccaagaactgctcgtcggggccgccatggaccagctcaagagagtgaacgacgtgaacccggcgtctctgcccctgctgctgcaccccgtcgtctccaacccgtcgcccacgtcgtcgcgctcgtccgcgcagcagcggtcgacggcggccgcaacgtcgtcgccgcaggggcaaagagcggagcagacgcctctgcggtgcccccggtgcgactcctccaacaccaagttctgctactacaacaattacaacctcacccagccgcgccacttctgcaagacgtgccgccggtactggaccaagggcggcgcgctccgcaacgtccccatcggcggcggctgccgcagaccgcgccccatgcctacgcccgtcgcgacgaagcccgcggtctcctgcaaggccgtgggcggcgcgccgtccctgggcctcggcgtcggcttgggcatgggcatgggcacgggcgccggcctcgacgggccctgggcgtcctcgcagcaggcggccgccgcgcaggcgcagctcatggcgctgcttaacagcgccaggggcgtgcagggcggcggaagcatgcacagggtcctcggcctcgacgccattgcacacctgcccctccacgtcctgccggacgccggcggcagtaatgccagtggcacggtgccgtcgctgtggccgccgcgcatggactcgcagctcggcatggggccgctgggccagcacgacgtgctgtcaagcctcgggcggctaaagctgcccccaccatcgtcggcggcggcggcaagctgctacagcgaccagctgcacgcggtggtgagcagcgccgcgggacgcggacacgagtacgaagctgcagcccccggcgtcacgcccctgccctgcaccacagcgctggcctccctccctccagccgcgtcgagcgtgtcggctgcgttggccagcgccacggtcgggctagacctcccgccggtctccctccccgcgtccgagatgcagtactgggccggaccggcggcgatgtccgtggcgtggccggacttgcccactcccaacggcgtgctccctcgagagacaaacccgaacctgatgtggtcatgtacggacgacgcggctgtttacccacgagacaacactagctag

SEQ ID NO: 125751 - DNA, 1678 bp, Zea Mays
gaactcacggacagtattcaggagaactcacgtttctcttggtcagccagtgacatcaccaacttgttgacggtagggagagcaagttcttcggcgatttgagaagaaacgaggagcgagagagcgtgggtgcgtggggggtgggggctgcgcccggggcccccggatcacggaatcctacccttaccaaccctagcctccattggtcgccgtctcgggccatggcagggccggcgccggatcgggccgccctgactgtgggtccgggcatggacatgccgatcatgcacgacagcgaccggtacgagctcgtgcgcgacatcggctccggcaacttcggcgttgcccgcctcatgcgcgaccgccgcaccaccgaactcgtcgccgtcaagtacatcgagcgtggcgagaagatagatgagaatgtccagcgcgaaataattaaccatagatcattgaaacaccctaacattattaggtttaaagaggttattttaacaccgacccatcttgctattgtcatggaatatgcctctggcggtgagctttttgagagaatatgtaagaacgtgcgattcagtgaagatgaggctcgctacttcttccaacaactcatttcaggagtaagctactgccattcaatgcaagtatgccaccgtgatttgaagctggagaacacacttctagatgggagtgatgctcctcgcttgaagatatgtgacttcggttattccaagtcatctgttcttcattcccaaccgaagtcaactgttggaacacctgcttatattgcacctgaagttctgttgaaaaaagaatatgatggcaagattgctgatgtttggtcatgtggtgtaaccctctatgtaatggctgttggtgcatatccttttgaagacccagaagagcctaagaacttccgcaagacaattcagcgcatcttgaacgttcagtacgccattccagactacgtgaacatatctccagagtgcaggcatctaatttcgaggatttttgttggtgatcctgctatgcgaataacaatcactgaaatccggaatcatagttggttcctgaagaaccttcctgctgatcttatggatgatgatagcatgagcaaccaatatgaggagcctgatcagccaatgcagaccatggatcagatcatgcagattttaacagaggccaccataccacctgcctgttctcgcagtataaatgttctagctgatggactggacatggacgacgacatggatgatcttgactccgattcggatcttgatgttgacagcagcggtgagattgtatacgcaatgtgagtaacatctcagtaaccatctcagtatctcaccagtcaaccaaagaaccaatcaggcatgggacaccctgatgttgtacactctgccaaagacctagcatccttttgtaaaatatctccctgtagttttctcaaagaagcgcaagcccaacctgttctggggaacacggatgctgtagtcaaactggggttattcagattgtaaaactggcctcttgcttcctgcttactctcaggcttcgacttgtgtgttgctgttgaatatgtacttacaagaaacttctacggagtactcatgttgatctgttcgaagctaacatcggaaagagcatttaaaaattctgttggtggctttca

SEQ ID NO: 125752 - DNA, 1439 bp, Zea Mays
acggacagtattcaggagaactcacgtttctcttggtcagccagtgacatcaccaacttgttgacggtagggagagcaagttcttcggcgatttgagaagaaacgaggagcgagagagcgtgggtgcgtggggggtgggggctgcgcccggggcccccggatcacggaatcctacccttaccaaccctagcctccattggtcgccgtctcgggccatggcagggccggcgccggatcgggccgccctgactgtgggtccgggcatggacatgccgatcatgcacgacagcgaccggtacgagctcgtgcgcgacatcggctccggcaacttcggcgttgcccgcctcatgcgcgaccgccgcaccaccgaactcgtcgccgtcaagtacatcgagcgtggcgagaagatagatgagaatgtccagcgcgaaataattaaccatagatcattgaaacaccctaacattattaggtttaaagaggttattttaacaccgacccatcttgctattgtcatggaatatgcctctggcggtgagctttttgagagaatatgtaagaacgtgcgattcagtgaagatgaggctcgctacttcttccaacaactcatttcaggagtaagctactgccattcaatgcaagtatgccaccgtgatttgaagctggagaacacacttctagatgggagtgatgctcctcgcttgaagatatgtgacttcggttattccaagtcatctgttcttcattcccaaccgaagtcaactgttggaacacctgcttatattgcacctgaagttctgttgaaaaaagaatatgatggcaagattgctgatgtttggtcatgtggtgtaaccctctatgtaatggctgttggtgcatatccttttgaagacccagaagagcctaagaacttccgcaagacaattcagcgcatcttgaacgttcagtacgccattccagactacgtgaacatatctccagagtgcaggcatctaatttcgaggatttttgttggtgatcctgctatggcaagtccttgtagttataatcgtgctttgatcctgatacagtaggttcagaagatacgttgtttcaggtttggtcatatttatccgattttgttgtatttatgtgttatataaaatatgcagcgaataacaatcactgaaatccggaatcatagttggttcctgaagaaccttcctgctgatcttatggatgatgatagcatgagcaaccaatatgaggagcctgatcagccaatgcagaccatggatcagatcatgcagattttaacagaggccaccataccacctgcctgttctcgcagtataaatgttctagctgatggactggacatggacgacgacatggatgatcttgactccgattcggatcttgatgttgacagcagcggtgagattgtatacgcaatgtga

SEQ ID NO: 125753 - DNA, 1784 bp, Zea Mays
ccaccgatgcatgctcaagccgcgacaacgctatctctctacactctcatccgatcttccgcaaacgcagcctgcctcagcctcacacgcatttcaggctgtagccatcctccgacttgtcgtcgtcttcgtcgtcgtcgctgctgctgctgtcgtcgccgccaccgacggccatacctgccctggagaactggagcgggccctgccgagacccggactgcgagccgctgctttgctcctgagcagcccagacgccatccaccagcatgatcgactggctcaccggagccgccgccgcgccgggggaggatcttctgttgtgcaaccggtacttctgaacacgaacgatccaataagtttccaaacaagataccatatcaccccgaaggatgatggaaaaggaacaggcactagttctactaagatatacagggacgaagaaatagagccctagacaaaattaaagcgcgcgcgcacctggagatggcttttcacttcatcgttttcgagtggggaacttttttttatttggacaaattaatggcggtaaagctaggcgatcggtctcacactctgaccttgagggccacccagttcgtgcaaagcggcaacgaaccgccggtgaagctccggtgaccagcaccgccttgccttcctgcttgcttgctgttgctgctgagcctgcgagtgcatgttgttgacctcggagccacatggtggcatggtggtgccacaaaatctggcgctggcggtaccggtaccgctggcagccaccaccggaggagaaatcggcaccgccgccttggttgccggcgacaacgataccaacgacaggccagagctggcggagctgtcttctcttctgaacaacggcggcggtaggggttgtggcaccgccaccgccgaaacggccgcccttatcggcgtgggtgcgccaccacccaacaacttgggctccggcggcgacgtgatttcactctgttgctctttgtcagactgtacggaaataaaccggtggtattcaatcactctgaatttttttaaaaaaatctcacggcacggcacatagtaaaacttgaaatacgtggatggagagcaatattatgatgagaaacagcaagcatagcgaagcagagtagcctgcctgtgttgtactacctcgtccgatttggcgtcgctgtccacccacaactgagctgtgctcatccatttccgtttgtcgccgtcgtccaccgtcgccgccccgtcgtcgtactctcctctcttggcagcctcctccttcaactcgtcgatcactgcagggcaatccatggccgcacaggcacaaaccagcgcgtcagcgaagcggggcagagaggaaacggagcaagacagacggcgacgcgtatactataggagagaaccgagaacgagaggcctctagtcctcaccgtcggcgaggaggcgaaggcagagcgggagctcgcgcctgaacacctcgatcttcctgcgctccacctcgaggctcctgatgcaggactggatccccgccggcgcagcgcccttggccatccctccggcgctccgcgcggcgaacagcctgaggtccagccccagatccaggcccatcccgatctccccgacgtccagccccatgcacgcgagaaacgagacgagagacgagaggcagccaggaatctttcgcgtagaagaatcggcgaccggaaggaaggaaccggagagaagctgagaaagaggcggaggcctgagggtgagggtgccggtggggtggggtgggggtgggt

SEQ ID NO: 125754 - DNA, 828 bp, Zea Mays
aagagagcagcgagttggtggcgcagacgaccacccgcgacgggcgcacacccccaccggcgacggcgcgcgcggtcaccggcaaccgacgcggacgaccacatctgagatggtaatgagcaagcccaggatttgtttgggcaagaccagtgggctaatggttttactgctgcacttcaagactttgatgatgctcaacctacccagtacaacatggccagcttcgaccaatctagccagatgtacgaacatgactcggacagtaatatagatatggagaatgtggatgccccatcaaagaaatctcagaagggcacaaagaaatctcagaagggcggaaaacaaaaggttgtgtcgaggagaggaggttcttttaccaaagaggaggatattgtgatttgctcggcattcctcaatgttagcaaagaccctattacaggtgtcaatcaaaattcgggtgggtattacaaacgcatgcatgaatacttcaacaagcgcaaaccagaaggttccaaccgtagccagatctcaattcaacataggtggggagccatacagaaggcagtgaataagttttgtgccctcaaatcatcagtagataggcgcaatgagagcggtaaaagcgagcaggatcgaattgatgatgctgttttcatgtatgagaagggtgaaccctttgtcttcatgcattgctggaagctacttcgcaacgaggcgaaatggaacaataggttcctagagaccatcagtaagccaccatcttctcaagtgccacccgaggcaggttccacatgtgctccatcagatccttctggagttgatgattag

SEQ ID NO: 125755 - DNA, 530 bp, Zea Mays
atgggccatcgtgatgttcaagaacctattgaggcacatgttcggcaacctgtagagcaagctgttcctagccgacttcacgcttgcaggagatttggcatccaagaaactattctcctggcaatttgtataacgaactatgcttttgtcatcattctatgtctcaagctccactttgaaatgtgtaggagaaataaacaagcaagtgaagatgacccaaagattctatattcggatgaggagcccgaggaggtggagtcgcaggcagaggatcctcgcgaggaggagaacacggaggcggtgcccgtagttgtaggggaaccggtcgagagcacttgcaaggggaagaagcaaaagaagcactatgcttccttcgagtaccacgacaacagcttcgagctggagaacccgtgcttctcatgcctgaggacagcaatcagaagccctatgtcgccatcctcaaggccatactattgattcacatgccagctaaatttaggaccaccccgattgaaggctcttcccactta

SEQ ID NO: 125756 - DNA, 792 bp, Zea Mays
atgggccatcgtgatgttcaagaacctattgaggcacatgttcggcaacctgtagagcaagctgttcctagccgacttcacgcttgcaggagatttggcatccaagaaactattctcctggcaatttgtataacgaactatgcttttgtcatcattctatgtctcaagctccactttgaaatgtgtaggagaaataaacaagcaagtgaagatgacccaaagattctatattcggatgaggagcccgaggaggtggagtcgcaggcagaggatcctcgcgaggaggagaacacggaggcggtgcccgtagttgtaggggaaccggtcgagagcacttgcaaggggaagaagcaaaagaagcactatgcttccttcgagtaccacgacaacagcttcgagctggagaacccgtgcttctcatgcctgaggacagcaatcagaagccctatgtcgccatcctcaagtgttatcatcatagatgaagctcacaacttagttgattccttgaataagatatacaagtcaaagatcacatcttctcagaccttggcagttttaacaaggtcttccacacatgttctgatcaacaatcaagatggtagcaccatgtcttctatgaccacaaaccaattctttttttctcttgacatcgataacataaacatatttgaattttgccactttgtgaaagaaagcaatataatccacaaggttctagagcgaaacccttatcatattgcaacatccagagagatggcaatttacagggcgaacaaccttattttgagatag

SEQ ID NO: 125757 - DNA, 1564 bp, Zea Mays
cgtgcccacgccgcgaccacctcacatcccccacctacgacgcaacttcccacgcccatcacaaccgccaccgctttaaaacctcctcctcacactcccctcactcacacagcgccacgccaagcaaccagtaaccacagccagccaccaccgcgagaacaagtcgcagccaagagaagtcgtcctcgcgcgcgtctcgatctcccagcgaagctagagcttgccgtgtgccgtgacttccatggagctactccacgccgtcatccatggagctgcgacgacgacgacgaccaccaccaccaccaccacgagcagcagcgccaccgtcaccagcggcgacgagggcgcccacctgccccaggggtgggccaagaagaagcgctcgcggcgccagcgctcagaggaggagaacctcgcgctgtgcctgctcatgctctcccgcggcgaccgccaccgcgtccaggcgccgccgccgccggtcccgtccgcggagttcaggtgctccgtctgcgggaagtccttcggctcctaccaggcgctggggggccacaagaccagccaccgggtcaagctgccgacccctcctgccgctcatgtccagctcccggcaccaccggcagtggccctcttggtggaggcccccgcaccaccaccagtcactgccaccccgcccccgctgccgctagtcgcggtcgccgtcgccgtccgtgagccggccacgtcgtccacctccgacggggcggccgcgggcagagtgcacaggtgcaccatctgccacaaggagttcccgaccggccaggcgctcggcggccacaagaggaagcactatgacggaggcgccgcggcggccgagacgtccgaggtggggagctccgggaacgaaggctccgccgcccgcgcgttcgacctcaacctcccggccgtgccggagttcgccttccggtgcggcgccaagcccggcaagatgtgggacgaggaccaggaggtgcagagccccctcgccttcaagaagccccgcctcctcatgaccgcgtgagcctgagcctgagccgaggcgcggatctgatgttgatccgcacgagacttttttggatgttcggtggaacactattcgttcgttcattcgtgtggcgcccgccagtgctattgtttgatttgttgatgctcttcttgtacagtacagagagagctggtgtgagagatgcgtagtcaccacactcacgcatagtataccatacaatacatatagccatataggtcttcctgttcctgggatctgtatccttagctgtcagtatagtgtagtccatacatacttcgttctcattgcaagagatgattgatggattagttagtgctctgtaacataagcttatttataaatggattaagattactgtggaatcagataccatcttctcgcagcactctgtgttcatgtatcggttgctcaaaccatccgtttgcttgcttgctttcatgtgaagaaaaggagcagtctgcatcgcctctctctctgaagcagctagcgtcctcttgctttttctatccacgagcttccatc

SEQ ID NO: 125758 - DNA, 88 bp, Zea Mays
ctctagaaacaagccaggaatagctgacaggccagactcattccgatgcgctgtatatggccgtgcttgccattttggcatattgcac

SEQ ID NO: 125759 - DNA, 1741 bp, Zea Mays
ctctcggcccaaacagccaccaaccagacacggcccagcctcatacacccgcgcccgctgacactgctccctgccaactacccttcggccttcgcggcttcgcgtcgcccacccacgactcgtcgtacacccggtccgccctccgtcgctgagttcgttccccttcaccctcccccaccccctaccccgatcgcgcagctacggcgaaaccctagcgacgaattccccaccgaatcgaggattccaaggttcctaccggggcgagcgcgggggcagcattccgggagcggttgatggcgacctgccgcaagacggcgcgcgtcgatgtcaccgagctgaagcagcgcctggtgaagcgcctgggtcgggagcgggcggtcaagtacttcgcgcacctcgccaggctgctgaacctgaagctcaccaaggtggagttcgacaggctctgcttggccaccatcggcaaggagaacatcgcgctgcacaacgcgctcattagggggatcataggcaatgctctgtcgggggtgcctccgctcagccggcaggcggtgacggggcagtcgggcaccaccaccgcccccagcgggcagtgcgtgggcgttgcgctgccggtggtggagaatgtgggggcagtggttgattcgggtgatggcgagctggcgagggagcggggggcgccggtggggaagctggtgtccgtggaagatggggaggaggtggagcaggttaggtatgctccgtgtgtccagagccggagcccgataacagcgccattggggatttcagtcgctgggggcagtggtatgagggtaaggaggaagttggatgattcagtggtgtcatgctatgattctggacaattgctggatacgggttctctgtgcgagggtttgcagcggtggctgtacagtaacggcactggagtgacggtgcaagccgtcgatgctttgaatcatgggttagatgagctgttgcgaagattgattaaaccgaccgtagatttgtcgagggtaagagccagcagtagaagaattagcaaagtcaatcaaaagtttgctggtagaatgaattctttgcaacatccaaatcagggtcagtgtacaacgttgcaagattttgcagttgctgtgcaatctgatccacgtttgcttggtccaaattgccccacgcaaatcgagaagatacaggcaatgacatttggaggggaatgatacatagtagcccgttatagctgatgaatttctcaaaaggagatgctgttagctggcattgaagtaaatgaagcggcagatccaacagcgctacaaaatctgagtattgcagcactcacggagtcacgggcaagaaataccaaggcccaacaagtgaacaaagggtgatgcaatggacagtgtagcataaattcttttttgggaatatatagcccgtcgataataaatcgaagaatcaatatggttggctgatgtccaggtcaagctgagtaactccttgacaaacatactctcaactcttggcacagactatgttccggtagtacttttagagatttgttgcgatgttgtaatagagcattttcctcttattacagacttaaatgtaatcatttttctcagtgatcaatgatcataaatgatgcctttaatggctcattgctcctgtacattgtattcagattatggcaatgaccgattgcaattaagataaaagtttaaccctgttgaataaatatatgtttttt

SEQ ID NO: 125760 - DNA, 231 bp, Zea Mays
atgcccaattcgagagagcctaacagccgagcttgcaagctggcactcttgactcctgttgttaatggttttgttccagtgttgattgctgacaagaaggatggtgttacagaggcttcatctgcaacctacaatgatgtttatcaacctcgtagggccagctctgctcaaactgcaagcaaggtttgtggcaaggctctgcctcagtcagctacacccaagggtcgttaa

SEQ ID NO: 125761 - DNA, 498 bp, Zea Mays
atgccttcccatctacagacaccatcgcagactcgacacctccatcgacagtgcaggcgcctccaccttagatttgggctgcatgattctcgtcgatttggggcgaggatagcagggagggcaggtaggaccaccatcccgaacaacccagccatcaccatctcggccgccgcgcgcgaggcagggggagaagtggtgcggctcagccatggcctcgacgtccgagtcccttcggcggaccttccatatcaggcgcgggcgcgggcgcgggaatgggaggaggtgaggtggcggatctcccacgccatttttgtcgtgggccgaggaggaggtggcggatctcccatgccctccggcctccgcgcatcctctgagttgctggtggcggagcctccctgcgcggcggtgggttgcagccgcgacatccaggcgtccgttccgacgagcctcgaggcggggagcagcgtttgcgggtgggatcggacgacggcggcataa

SEQ ID NO: 125762 - DNA, 2137 bp, Zea Mays
atggccactccatacgctaagtggacaaccatcttaaatatttgttctgcagtgggtgctatcggtactgtttttggagaaatgggagctctccagccaactcatggggttgagtatgcatttggagcacataactattcgattagtggagttttggaggtggaacccggcagtgacctggatcctctccaagtcagagagttcatggagattcgctcattaaattacaatggtgataccttctgtttggtattcgcaaggtatggactccaaaagttgtttggcctagactgcttggcactcacctcagaccaatctccactttaccctgatcttccatctaatatggtagatacaaagcgatcgacaactattcttagtggaatacaactcgacttccttggttgcttgagcacaatgtctacttttgatgctgaagtgtatacaatgagaagaagtgggcagattgctaggaccttaatttatgctgcatccaccttcatgcttccttttctgctagcacaactctcttcatgcattttgcagatcaatacacaatctgttcaagatatgcatatagatgctgatccttcacatgttcctgttgttcttatagaaaaacatggcatggttgttccacaacatagttccaacaaggatttggcttcgaatgcttctgaacaaaaagatactgttgtgctacctaaactacaaggagagtctctggtacccaaaagtagtgctggtaaaaaagtgggcgcatcttgcgagctgtcatttttgtgcatggtttttagggccaccatttggatttacgtcttgttagaaaccaatggcttctattggaccctggagctgattgcctaatgtctgaggctaatgaagataaaacatctagagacttcaaagaaatgggtagcaggttggccggggaggtaattgccttcctgaagaagaaaatggataaactttctagatatggaggttgcaaagagctgaagttaagttttgtcggccattccatcgggaacatcatcattagaagtgccctagcagaacctgcattgcagccatacttgaagaacctctacacttacatgtcaatatcagggcctcacttgggtcactggtacagttcaaattctttgttcaattctggactctggctgctgaaaaagctcaagaatgctcaatgcatccatcaactcactttcagtgatgatcaagacccccacaatacatacttctataagctttgcaagttgaaaacattggagaacttcaaaaatatcatattgttatcatcaccacaggatggctatgtaccatatcactcagcaagaatggagctctgcccagctgcatcatcggacacctcaaaaaagggtcaagtcttcacagaaatgctcaacaattgcttggatcagatccgtgcgccctcatctgacacccggacgttcatgcgctgcgatgtgaattttgaccagtccaaccacggacagagcctgaacaccatgattggcagggcagcccacatcgagttccttgagaccgacatctacgccaagttcatcatgtggtccttccctgacctgttccgatgaccaacaatgtcgctcgtctctgtaatactgctgcataccaaaccaaccaaatcgatagcgcacactactgagtactgactaggcaaggaaaagtaatcttgcataaaggctcccccagaatccaacaccgcgacaggcaaccaacaccgcgacaggcagggtagcactgtaaagatcctagaagcagcggtttttccagcttgctagatctgattctgtataaatagttgattctttcgtcattccattcatagtgctatagatgtgcacctttgctgtgaatttataatcctttgtcggctggtgtatctaacgcttcggtttaggatgtgctgacattcagtgagcttatgtccaaataagccccctttcttaatgtttggttttagtcaccttggtctttgtgctgctgtaaatccagggtgttgtttctgtttggtgaaatgactgctacatgaatatctggttctggcatcctgccatagccgatcttgcttctgctaaggttattcctatcagggaggatattggat

SEQ ID NO: 125763 - DNA, 1630 bp, Zea Mays
cctgctgctctttttcttcagagtctagagagaagcggttcagacagacagagagaggcaggagctgccctgcactgcatgcttgctctgcttgtggattggattggagtggagtcggagatggtcagatggatgtgtatataagggaaagcttgtggcctttggagccatacaatgatcaggaactgggagtggcaagcgccaaggagtagttagagctcagtagggatacagcagtttctgagtcacttcgtctctgacatccacgagtaccagctataccagttttgattccactctgatttgctcatcaagcgtcaatgctccctccaatcattcttaatctcaggaagttagcagtgagatgctttcagtcacacttgttttagtcttctcctttcagaaggctgatagtcttagccttataccgttggtcttctctatttctctccttcctctgcatgcaatgttgcatttctcgattccagttcagagacttccattcctagagttgcgtggtactcacctcttgtttaaatccacttcattgcatgcaggttgaaagagataggagtgagaggcagttcccttccctactctcacaatgcccatggagcaagcatccaggcactgcgataaagacacgctgaagatggccatgctgaaacacgaagagactttcagacagcaagtaataaagctcaagaactcagagagatttccagaatttgttgaagctactacaagcctccagaagaaaagcgcagtactctgatcgacgtcttcttgtctgatgccacaggttcacgagctccatcgcttatacaggatccagaagctcctgatgcgagacctcacacgggagctcaagctcaagagccagaggagcctgcccaccacctcgccgaacggcagctgcgccgagtacagcagaggggctctcggcatgtgcgcctacgagcgcctctacgccgctctcggccgcggcggacacgtagcagcagcagcgacgccgacgccgacgccgcgcaccgctctcggcctcgacgtcgtggcgccagtcgtcgagtacgtgcggagcgcggaggaggaggacgacgacgacagggcggaggaaaccgacgaagacgcggagctggagctcacgctcgcggtgggcggaggcggggccaagaagcggtacgacgagtacccgtccggtggggagagtctgtcttcgtcgtccacggagtccgacgtgctcaccgtctccggccgtgagtggcgtcgggcgcgcggcacgccgtatcacaagatgaggccggcgaccgggctggacgtggtgcaggtggaggacgacgtcggggtgccgccgccgctgctgttccactggctcagcctcaagatggcatgacgcgatgcgaggaagcaagagcacattgcatgtgtgttcgttgctgcttgctgtgtcagggtgttgacttgctactgttcttcagttgaatgcttttgtgtgttaggttttagtggtggatcaagtctagaaatcaataattggctggctgttcatgataacatgtaggagagtcttccctaacataagccgggtgtgggggcctttcagatgaagctgtgtgactgactttctgcc

SEQ ID NO: 125764 - DNA, 1682 bp, Zea Mays
cctgctgctctttttcttcagagtctagagagaagcggttcagacagacagagagaggcaggagctgccctgcactgcatgcttgctctgcttgtggattggattggagtggagtcggagatggtcagatggatgtgtatataagggaaagcttgtggcctttggagccatacaatgatcaggaactgggagtggcaagcgccaaggagtagttagagctcagtagggatacagcagtttctgagtcacttcgtctctgacatccacgagtaccagctataccagttttgattccactctgatttgctcatcaagcgtcaatgctccctccaatcattcttaatctcaggaagttagcagtgagatgctttcagtcacacttgttttagtcttctcctttcagaaggctgatagtcttagccttataccgttggtcttctctatttctctccttcctctgcatgcaatgttgcatttctcgattccagttcagagacttccattcctagagttgcgtggtactcacctcttgtttaaatccacttcattgcatgcaggttgaaagagataggagtgagaggcagttcccttccctactctcacaatgcccatggagcaagcatccaggcactgcgataaagacacgctgaagatggccatgctgaaacacgaagagactttcagacagcaagttcacgagctccatcgcttatacaggatccagaagctcctgatgcgagacctcacacgggagctcaagctcaagagccagaggagcctgcccaccacctcgccgaacggcagctgcgccgagtacagcagaggggctctcggcatgtgcgcctacgagcgcctctacgccgctctcggccgcggcggacacgtagcagcagcagcgacgccgacgccgacgccgcgcaccgctctcggcctcgacgtcgtggcgccagtcgtcgagtacgtgcggagcgcggaggaggaggacgacgacgacagggcggaggaaaccgacgaagacgcggagctggagctcacgctcgcggtgggcggaggcggggccaagaagcggtacgacgagtacccgtccggtggggagagtctgtcttcgtcgtccacggagtccgacgtgctcaccgtctccggccgtgagtggcgtcgggcgcgcggcacgccgtatcacaagatgaggccggcgaccgggctggacgtggtgcaggtggaggacgacgtcggggtgccgccgccgctgctgttccactggctcagcctcaagatggcatgacgcgatgcgaggaagcaagagcacattgcatgtgtgttcgttgctgcttgctgtgtcagggtgttgacttgctactgttcttcagttgaatgcttttgtgtgttaggttttagtggtggatcaagtctagaaatcaataattggctggctgttcatgataacatgtaggagagtcttccctaacataagccgggtgtgggggcctttcagatgaagctgtgtgactgactttctgccaactacaatctgcaagtgttaccttctgccctgatcgacggacgtaatactgcaagacttcagtctaaaaatacgagtaaaaatgaacttctgacagtttttgcagatcaagtaaacaaataagtgcttctttggaacatagcaaagaaaaacatgggaaata

SEQ ID NO: 125765 - DNA, 1362 bp, Zea Mays
atacaatgatcaggaactgggagtggcaagcgccaaggagtagttagagctcagtagggatacagcagtttctgagtcacttcgtctctgacatccacgagtaccagctataccagttttgattccactctgatttgctcatcaagcgtcaatgctccctccaatcattcttaatctcaggaagttagcagtgagatgctttcagtcacacttgttttagtcttctcctttcagaaggttgaaagagataggagtgagaggcagttcccttccctactctcacaatgcccatggagcaagcatccaggcactgcgataaagacacgctgaagatggccatgctgaaacacgaagagactttcagacagcaagttcacgagctccatcgcttatacaggatccagaagctcctgatgcgagacctcacacgggagctcaagctcaagagccagaggagcctgcccaccacctcgccgaacggcagctgcgccgagtacagcagaggggctctcggcatgtgcgcctacgagcgcctctacgccgctctcggccgcggcggacacgtagcagcagcagcgacgccgacgccgacgccgcgcaccgctctcggcctcgacgtcgtggcgccagtcgtcgagtacgtgcggagcgcggaggaggaggacgacgacgacagggcggaggaaaccgacgaagacgcggagctggagctcacgctcgcggtgggcggaggcggggccaagaagcggtacgacgagtacccgtccggtggggagagtctgtcttcgtcgtccacggagtccgacgtgctcaccgtctccggccgtgagtggcgtcgggcgcgcggcacgccgtatcacaagatgaggccggcgaccgggctggacgtggtgcaggtggaggacgacgtcggggtgccgccgccgctgctgttccactggctcagcctcaagatggcatgacgcgatgcgaggaagcaagagcacattgcatgtgtgttcgttgctgcttgctgtgtcagggtgttgacttgctactgttcttcagttgaatgcttttgtgtgttaggttttagtggtggatcaagtctagaaatcaataattggctggctgttcatgataacatgtaggagagtcttccctaacataagccgggtgtgggggcctttcagatgaagctgtgtgactgactttctgccaactacaatctgcaagtgttaccttctgccctgatcgacggacgtaatactgcaagacttcagtctaaaaatacgagtaaaaatgaacttctgacagtttttgcagatcaagtaaacaaataagtgcttctttggaacatagcaaagaaaaacatgggaaata

SEQ ID NO: 125766 - DNA, 1315 bp, Zea Mays
atacaatgatcaggaactgggagtggcaagcgccaaggagtagttagagctcagtagggatacagcagtttctgagtcacttcgtctctgacatccacgagtaccagctataccagttttgattccactctgatttgctcatcaagcgtcaatgctccctccaatcattcttaatctcaggaagttagcagttgaaagagataggagtgagaggcagttcccttccctactctcacaatgcccatggagcaagcatccaggcactgcgataaagacacgctgaagatggccatgctgaaacacgaagagactttcagacagcaagttcacgagctccatcgcttatacaggatccagaagctcctgatgcgagacctcacacgggagctcaagctcaagagccagaggagcctgcccaccacctcgccgaacggcagctgcgccgagtacagcagaggggctctcggcatgtgcgcctacgagcgcctctacgccgctctcggccgcggcggacacgtagcagcagcagcgacgccgacgccgacgccgcgcaccgctctcggcctcgacgtcgtggcgccagtcgtcgagtacgtgcggagcgcggaggaggaggacgacgacgacagggcggaggaaaccgacgaagacgcggagctggagctcacgctcgcggtgggcggaggcggggccaagaagcggtacgacgagtacccgtccggtggggagagtctgtcttcgtcgtccacggagtccgacgtgctcaccgtctccggccgtgagtggcgtcgggcgcgcggcacgccgtatcacaagatgaggccggcgaccgggctggacgtggtgcaggtggaggacgacgtcggggtgccgccgccgctgctgttccactggctcagcctcaagatggcatgacgcgatgcgaggaagcaagagcacattgcatgtgtgttcgttgctgcttgctgtgtcagggtgttgacttgctactgttcttcagttgaatgcttttgtgtgttaggttttagtggtggatcaagtctagaaatcaataattggctggctgttcatgataacatgtaggagagtcttccctaacataagccgggtgtgggggcctttcagatgaagctgtgtgactgactttctgccaactacaatctgcaagtgttaccttctgccctgatcgacggacgtaatactgcaagacttcagtctaaaaatacgagtaaaaatgaacttctgacagtttttgcagatcaagtaaacaaataagtgcttctttggaacatagcaaagaaaaacatgggaaata

SEQ ID NO: 125767 - DNA, 1223 bp, Zea Mays
acaatgatcaggaactgggagtggcaagcgccaaggagtagttagagctcagtagggatacagcagtttctgagtcacttcgtctctgacatccacgagttgaaagagataggagtgagaggcagttcccttccctactctcacaatgcccatggagcaagcatccaggcactgcgataaagacacgctgaagatggccatgctgaaacacgaagagactttcagacagcaagttcacgagctccatcgcttatacaggatccagaagctcctgatgcgagacctcacacgggagctcaagctcaagagccagaggagcctgcccaccacctcgccgaacggcagctgcgccgagtacagcagaggggctctcggcatgtgcgcctacgagcgcctctacgccgctctcggccgcggcggacacgtagcagcagcagcgacgccgacgccgacgccgcgcaccgctctcggcctcgacgtcgtggcgccagtcgtcgagtacgtgcggagcgcggaggaggaggacgacgacgacagggcggaggaaaccgacgaagacgcggagctggagctcacgctcgcggtgggcggaggcggggccaagaagcggtacgacgagtacccgtccggtggggagagtctgtcttcgtcgtccacggagtccgacgtgctcaccgtctccggccgtgagtggcgtcgggcgcgcggcacgccgtatcacaagatgaggccggcgaccgggctggacgtggtgcaggtggaggacgacgtcggggtgccgccgccgctgctgttccactggctcagcctcaagatggcatgacgcgatgcgaggaagcaagagcacattgcatgtgtgttcgttgctgcttgctgtgtcagggtgttgacttgctactgttcttcagttgaatgcttttgtgtgttaggttttagtggtggatcaagtctagaaatcaataattggctggctgttcatgataacatgtaggagagtcttccctaacataagccgggtgtgggggcctttcagatgaagctgtgtgactgactttctgccaactacaatctgcaagtgttaccttctgccctgatcgacggacgtaatactgcaagacttcagtctaaaaatacgagtaaaaatgaacttctgacagtttttgcagatcaagtaaacaaataagtgcttctttggaacatagcaaagaaaaacatgggaaata

SEQ ID NO: 125768 - DNA, 1788 bp, Zea Mays
tacaagtacaatccacctatagcgacgaaaagccagcagattccagcgtcagccggtcgcagtccgccggtattcacacgcagccacgctaaacaaagcccgacgagagattcgtctccatctcccctcgtcttcctccctccttcagcccgaggaaaccctagcacgtcccgtctcgcctcgccgccggcgatggccgctgcatgatcggtttccccccttggaactgcctgcctaccggcatcgccaagatcgccgccgcggctgccgtcgtcgtagcggcgctcgcgtcctccgggatcgccctcccgcgtccacgcgccgcgccgcccccatcgggattcggcctcctcatgtcgaaggcgaaggtctacaccgacgtcaacgtcctgcgtcccaaggagtactgggactacgaggcgctcaccgtccaatggggtgagcaggatgactatgaagttgtcaggaaagttggaagaggtaaatatagtgaggtctttgaaggcatcaatgttaacaacaatgagaaatgcatcattaagatccttaagcctgtcaagaaaaagaagatcaaaagggagatcaaaatacttcagaatctctgtggaggtccaaacattgtgaaattgcttgatattgtcagggatcagcattcaaagactcccagtttgatatttgaattcgtcaacaacacagacttcaaagttttgtaccccacattgacggattatgacatccgctactacatatatgagctactcaaggcccttgattactgtcattctcaaggcatcatgcatcgagatgtcaagccccataatgtaatgatagatcatgagcttcgaaaacttcggttgatagactggggcttagctgagttctaccatccaggcaaggaatacaatgtccgtgttgcatcgaggtatttcaagggacctgaactccttgttgatttacaagactatgattattctttagacatgtggagtcttggttgcatgtttgctggaatgatatttcgcaaggaaccattcttttatggccatgacaaccatgaccaacttgtgaagattgcaaaggtccttggaacagatgggctgaattcttatttgaacaagtaccacattgagctggaccctcaacttgaagctcttgttggaaggcatagtagaaaaccctggttgaagttcatgaatggtgataaccaacatctagtatcacctgaggccatagattttctcgataagctcctgcgctatgatcaccaagacaggcttactgcacgggaagctatggcacatccctacttccttcaagtcagagctgtggagaacagtaggacgagagcacaataatcatggtctgcactcttgaaatggagttgttgctagttcgtgaaaatcataggcttaaatccatgttcagtattcacatcgctccaggaatctgggccatgactccatggcaatgaatcaaaatagtacgagccgcatcatgtggacaaccttggcagatctttttattcttgtctttattgctgggagcactgtagctttaaacctacaagtagtgcttgaatgagatgagattcatatcatctcctgtggtggaatgtgaaattgtatgtgacctttagactaattaaaaagtacaatacagcgctaagcatactgcttgtattatgttgtgctattatgtatctacgattcttatttattttgggcgatagtcaccgtgatgaattactttttttggatctcacggatgaaattatgagttgtctctgat

SEQ ID NO: 125769 - DNA, 1756 bp, Zea Mays
tcgcagtccgccggtattcacacgcagccacgctaaacaaagcccgacgagagattcgtctccatctcccctcgtcttcctccctccttcagcccgaggaaaccctagcacgtcccgtctcgcctcgccgccggcgatggccgctgcatgatcggtttccccccttggaactgcctgcctaccggcatcgccaagatcgccgccgcggctgccgtcgtcgtagcggcgctcgcgtcctccgggatcgccctcccgcgtccacgcgccgcgccgcccccatcgggattcggcctcctcatgtcgaaggcgaaggtctacaccgacgtcaacgtcctgcgtcccaaggagtactgggactacgaggcgctcaccgtccaatggggtgagcaggatgactatgaagttgtcaggaaagttggaagaggtaaatatagtgaggtctttgaaggcatcaatgttaacaacaatgagaaatgcatcattaagatccttaagcctgtcaagaaaaagaagatcaaaagggagatcaaaatacttcagaatctctgtggaggtccaaacattgtgaaattgcttgatattgtcagggatcagcattcaaagactcccagtttgatatttgaattcgtcaacaacacagacttcaaagttttgtaccccacattgacggattatgacatccgctactacatatatgagctactcaaggcccttgattactgtcattctcaaggcatcatgcatcgagatgtcaagccccataatgtaatgatagatcatgagcttcgaaaacttcggttgatagactggggcttagctgagttctaccatccaggcaaggaatacaatgtccgtgttgcatcgaggtatttcaagggacctgaactccttgttgatttacaagactatgattattctttagacatgtggagtcttggttgcatgtttgctggaatgatatttcgcaaggaaccattcttttatggccatgacaaccatgaccaacttgtgaagattgcaaaggtccttggaacagatgggctgaattcttatttgaacaagtaccacattgagctggaccctcaacttgaagctcttgttggaaggtaactttccatgttttgagatgatccttgtatttaggtggattataacccttctatgtacttcatatgcaggcatagtagaaaaccctggttgaagttcatgaatggtgataaccaacatctagtatcacctgaggccatagattttctcgataagctcctgcgctatgatcaccaagacaggcttactgcacgggaagctatggcacatccctacttccttcaagtcagagctgtggagaacagtaggacgagagcacaataatcatggtctgcactcttgaaatggagttgttgctagttcgtgaaaatcataggcttaaatccatgttcagtattcacatcgctccaggaatctgggccatgactccatggcaatgaatcaaaatagtacgagccgcatcatgtggacaaccttggcagatctttttattcttgtctttattgctgggagcactgtagctttaaacctacaagtagtgcttgaatgagatgagattcatatcatctcctgtggtggaatgtgaaattgtatgtgacctttagactaattaaaaagtacaatacagcgctaagcatactgcttgtattatgttgtgctattatgtatctacgattcttatttattttgggcgatagtcaccgtgatg

SEQ ID NO: 125770 - DNA, 1649 bp, Zea Mays
aaatttaattagacatctagaggctatcaacaaacaccttgcgtgccttcaaccaggtgtggtggaagtggaagtcaccaatttctcatccggcaccaattagctcacgagcgttgctaagctgatcggcggcgactgagcgacgttacgcagctaccgccaaatcaaagagaggaacatgtgcgattgtgcgagtgcgatccggtccctttcgtggagtgacctcgacgaactgggccataactagtcaaggcaggggcataagggctttaaccctggtgcactgactgggccgacataggttcaatggagaaatcataaggcccaacgctcgcgagctaaaacctcagagaaaaaaaagggtgactcactgactccactgctccacccaaaaaaatggcggcggcgccggaggagctgctctgcgcggcggcgaagtccggtgaagagggcgaagtcgctaaactccttgcttcaggagctgacgcgacccacttcgatgccgacggcttgacgccgctgatgcacgcgtccgcgggggggcacgccgccgttgcgcgcctcctcctcgactgcggtgcgccctggaacgcgctctccccctcgggcctctcggcaggggacctagcctccgaccccgacacctacgacctcctcctcgaccacgccatccgctccgagctcgtcctgggcaccgtcgcgcggcggcaagcggcccccgcgaacggtcccccggccgagagctacctcgaatccagggtctcgttcagcgaggagagggtgatggacgcggagagcaaggcggtgatgatggcgtgggagcggccgctgatggaggcgcacgcgcgggcggtgtgccaaggcggcggcaaggtgctcaacgtggggttcggcatggggctcgtggacgaagcgatacagaggtacgggcccgaggagcacaccattgtcgaggcccacccggaggtgtacgagcggatgctcaagctcggatggggcgacaagaagaacgtcaggatcgtgttcgggcgatggcaggacgtgatgccgcagctcggatcttatgacggcatattcttcgacacgtacggggaatactacgaggacatgagagagttccaccagcaccttcctaagctactgaagcccggaggcatctactcgtacttcaacggcctctgcggcgacaacgcgttcttccacgccgtgtattgccagctcgtcgcgctggagctcgcgaaccttgggtactcgacgcagttcatccctctgccggtcaaagattgcctggcggaggaggtctggaagggcgtgaagcggaagtactggcaactggacacctactacctccctgcttgccagtcagaatcagaatctactatcaagtagtgatgagttatttctagtctgcgttctgaagttggttgtctgttttgagctacgtacatttttgttctgtgttacgaatgttaaccctttcactttcgggagctgaattttctttgggcgtgtggtgatttgccctctctcgtatgctcctgacgcgtgcgtgcattcgtggttcgaaaaatagaattgtcatggaaaaatttggttccctgacgatcattttccttgccatgttggaccgcgtggctctattcagaata

SEQ ID NO: 125771 - DNA, 1769 bp, Zea Mays
ttccaaccagcccatcccccttcgaccatacacacagagcggaggcgaaggcaagagcaaacagagtagccgccgccgccgccgtcgtcgtcgtgtgttgagcagggttttgtttttacggcttagctttgagcagcagagatgttgcgagcgctggcggcgaggtgctgcggccactggccgccgggcgccgcggcggcggacgggatgctgtggcaggcggagctgcggccgcacgcggcgggggagttctcgatggccgcggcgcaggccaacctggccatggaggaccaggcgcaggtgctggcgtccccggccgccacgctcgtcggcgtctacgacggccacggcggggccgacgcatcccggttccttcgctcccggctcttcctgcatgtccaacgcgtcgtgcaggagcaggggggcatgagcgccgaggcgattcggagcgcgttcggcgcggccgaggaggagttccataggcaggtgaggcaggagtggaggagccggccgcggctcgctgccgtgggctcctgctgcctgctcggggccatctccggggacacgctgtacgtggccaacgccggcgattcccgcgccgtgctcggccgtcgagtgcccggcggcggggcggccgtcgccgagcggctctccgccgagcacaacgcggcgtgcgaggaggtgcggcgcgagctcgccgcgctcaaccccgacgacgcgcagatcgttgtgcacgccaggggagcctggagggtcaaggggataattcaggtgtcgagatccattggcgatttttatctcaagaaaccggagtatagcctggaccccttgttccggcaagttggggcccctattgcgctgaagaggccagctctcagcgctgaaccatcagttcaagtacgcaagctgaaaccaaacgacctgttcctgatatttgcttcagatggcctttgggagcacctcagcgacgatgctgcggtgcagattgtcttcaagaatccgagaactgggatagccagcagactggtgaaggctgccttgaaggaagcgaccaggaagagggaggtcaggtaccgtgatctgaggacgatcgagagaggggtgaggcggcatttccacgacgacatcagcgtcgtcgtggtctacctcgatggccaccgcgagcgccgccacaccagggtcgttgactcgagcagcaactgcaccagtgcgcccgtcgacatccactcctccaactcccgctagtttccggagccccttgcaacgcgagctgaactctgggtgggaggtgaggtgggtgcagccgtagccatcggaatcggaacaagtcgatatgtacataggtaggagtgggtgcgtggcatcttgatgccggagaagatcatttggtctcgaaactacttagcacaagtggttaatgactgcatttttcttgtttctttttgtctgaaaccagcagcaagcccgtccattggatcggacttatttttaaggtaagaaatagttgatgacgaactggaggttggttaatggagaccaaagaatatatgctctgctcagtgctcaggatcatagaatttaggttccggcctgagaatatatactctttgcaacggatgagatgctcttatttcatttagcatcgtttttttttgtcggaaacttctttatgtatgcagtgccaagattaccactacctggaatcgttgaaactctgcatggttcgtgctgtggaacggattgctcaaatatcttttcgtactgtttag

SEQ ID NO: 125772 - DNA, 902 bp, Zea Mays
cattggtcatctccaaaaccccaaaccctcgttcaacatagccattatccgaagttccgaacccacgccaagccccagggtccgaccgcagaaccgacccaaaatgtcgcccgcctcttccatgctcaccgccgtgtcgctctcctccccgctcccagccccgcgcctccgcgccgccgccgccgcctcctccttcgctccgccgcgccgcgcggcagtcgcactcgtcgtgcgcgcggcgtccgcatcttccaagtcccctgccacggcggaggcggccccgaagaagaagagggcgaccggcatcacccagccgaagtccgtgtcgccggcgctgcaggcaatcgtgggcgacccggttattccccgcaccgaggtcctcaagcgcctctgggcctatatcaaggagcataacctccaggatccctctgataaaaaggtggtggtttgtgatgagaagctgaaggtcctgttcgcggggcgggagcgagtgggattccttgagatcgccaagcttctcaaccctcacttcgtgaagtgatgaggaggagccaggccacttccaggaatcgagttagcttatatggttggttggttacttgtggctggcctagagggtgcgcgtgcgttgggttttggtagcctgagttggctcgctcgactttgtagaatgctgttgttagcttttattagtagccttcagctcgtagcctggtatgcagttagcgtgtgtggtgttctgctatggtttaagtttaaccactgtccatagtcagtcaatgttagcttccttgtccttgcaatggatgttgctgtgtgaattatggtccaacatggattggttgctctgctatggtttagtcactgcccagtcagtctatatatattttttgatggtaaca

SEQ ID NO: 125773 - DNA, 540 bp, Zea Mays
cctggtaccttccttgtctaaccactttggccccccctgctttcaggatccctctgataaaaaggtggtggtttgtgatgagaagctgaaggtcctgttcgcggggcgggagcgagtgggattccttgagatcgccaagcttctcaaccctcacttcgtgaagtgatgaggaggagccaggccacttccaggaatcgagttagcttatatggttggttggttacttgtggctggcctagagggtgcgcgtgcgttgggttttggtagcctgagttggctcgctcgactttgtagaatgctgttgttagcttttattagtagccttcagctcgtagcctggtatgcagttagcgtgtgtggtgttctgctatggtttaagtttaaccactgtccatagtcagtcaatgttagcttccttgtccttgcaatggatgttgctgtgtgaattatggtccaacatggattggttgctctgctatggtttagtcactgcccagtcagtctatatatattttttgatggtaacagtcagtctatata

SEQ ID NO: 125774 - DNA, 896 bp, Zea Mays
aaggcaaggcagcatgtacacccagaggccagagctagtgatgactgatgactgacgagcctctatagcatacagcaccgcgcgcggcggagccaaagccaaggacggtccggtcgtatgaataagtatcacccccaccagaaccccaagccacacaccaggcacgccagcctcactcactccccagaccacctcacacgcacgaagcagcagagcagtggactggactagcaaggtgggcaacatgaagcctgcggccaccgccagagttgctggcctcctcttcttcctcgtcctcctcctggcgctgccttccctccgcgtctccatggctggatcagggttctgcgacggcaagtgcgcggtgaggtgctccaaggcgagccggcacgacgactgcctcaagtactgcgggatctgctgcgccacctgcaactgcgtgccgtccgggaccgcgggcaacaaggacgagtgcccatgctaccgcgacatgaccaccggacacggcaaccgcaccaggcccaagtgcccctgatgatattccttccttcgctccggggagccagctgccagctggggctgtcttgcatgcgtatgtaatgtataggctgtgcaatgcatgcatacatgatacatgccgtgactctggatcggtggatgcctatgcatgcttttcagttttcactagctgctactactactactcttcctgtcttcctagttcctactatgtgcaccagagagtgagagggacgacatgcatggagatgagatgtcgtgttatgtgcactggcggccgcttggccaggtcataattcatgctctgtgtattgtaatacgtacacacccttggctttggaactgctactagatgcatgacatcgtgcttcttggta

SEQ ID NO: 125775 - DNA, 1658 bp, Zea Mays
cctcctccccgctaatcaccacgccgcgcacgcgccgcgcgaggcccgtcttcgttcccccaccgctaatctcgccgcggcatccatggcgctgccctcgccctcccccacctatccacgccggcgccccctccctcgcgccccacctcaatctcctccattgcgcgcccaagaacgcacagatcccccattcccgcgcccctccctcgtgcctcgatggaatcgccgcagcatccatggtatggtcctcaggatccacctccaccgcgtcgccacagttcgcaggggccgagggtgccccgacggtggggatttgtactgtggtcaggagcatgcgtgttcaagcaagcactcttgctcttcgtccacaacaagctctccatgtgccctaggcacgcgacaaatgtttggggtggtgggcattaccgtcacctccctcgtgtcccgtgccgccgtggccggggtctgcttcctcgccttccgcaatgagcaatccgcggggtacgccacctctgcctacgacttcctaacaagctccccgggcgccctcatcaccgtctccggcccaggatgcgtccacaggctcgcgggcctctcccacgccaccaccaacgcctggtcgctcctcatgatctccagatcctgcgaccaggctgacgctggcaggggcgacttccaggagctcgactagatcgccgcggtgtctggtttgctcacgcggtccctcacgctccaccaaactctggcgcaattcgagcaacttcagccctcacactccgtcaatccgagcaactccaacgcaattcgagcaacccgcccttcacgcaccgtgctgcacgcagtctcgccccaatcctcattggtgtcgacttcatctgcatggaagcacatttcagagatggccagattggcgtagagacacagaacaattgcaacatgtactggttgttggtacttcacctgtgttagacggaacaccacaattgcaacctggaaaggagaatgacaaatgtttgaacagcagtggccagataggcgtagagacacagaacacaatattgttctctctacttgagatggaagaattacaagacaaggaattggaggatgcttaggaggatagacaaaaatgtgaagctaaagaaagagaagctcttagagcttatcgcaaagcacatagagctttacttgaggcaaatgaaagatgtgcaattctttgtagaaaaagggagattttctcttcacaagtccatggtttaattgcagagaattcttctttggtgcagtctttgagtattcggaatcctgaagatggccttgcaatgccatcactgctcaattctcaaattcatgcagttagtcagattcctgaaaatcagggtggtagacacaggttgtgtcctgaagaaccttctaagcagcaaattgataagcatgaagatgaagcacgtccacactattgtgataagcttgctgccagcacagctgatcccagctctatgagtgctgtcaatgctgacaacatcctttcagattatatggaagatgttcttctgttcccgactagatagacaagatcagaatgtgctctggatgttgagaatcaaatggaagaaactatacatgtatatgcataggaaaacatacaagttcctggt

SEQ ID NO: 125776 - DNA, 789 bp, Zea Mays
agtagtagtacaacggggcagcactgcactgcactgcaactgcgaatttccgtcagcttggagcggtccaagcgccctgcgaagcaaactacgccgatggcttcggcggcggcgtgggagggtccgacggccgcggagctgaagacagcgggggcggaggtgattcccggcggcgtgcgagtgaaggggtgggtcatccagtcccacaaaggccctatcctcaacgccgcctctctgcaacgctttgaagatgaacttcaaacaacacatttacctgagatggtttttggagagagtttcttgtcacttcaacatacacaaactggcatcaaatttcattttaatgcgcttgatgcactcaaggcatggaagaaagaggcactgccacctgttgaggttcctgctgcagcaaaatggaagttcagaaggtcatctataactgtaattcattttagtactcaattcagtactaccgagcatttgtagtgaaagatgttaggttagtttggcatcacccaccctgtttgaaagcagtccactttgtcttaaagttttcaaggttatgttcacaatacagatttgtggatggaaataattaaataaatttatttactttgtatcttgcattgtttcaagaaaagtacaatagcacacagtttgaggtgtttatattggtcttagctgaaaaaagaagttcagataattaaaacatcatgcgttaatttgtgagttcattaaaaagcctaagcacgggttgttttaacttgttttcttgcagtaagccttctg

SEQ ID NO: 125777 - DNA, 2417 bp, Zea Mays
agtagtagtacaacggggcagcactgcactgcactgcaactgcgaatttccgtcagcttggagcggtccaagcgccctgcgaagcaaactacgccgatggcttcggcggcggcgtgggagggtccgacggccgcggagctgaagacagcgggggcggaggtgattcccggcggcgtgcgagtgaaggggtgggtcatccagtcccacaaaggccctatcctcaacgccgcctctctgcaacgctttgaagatgaacttcaaacaacacatttacctgagatggtttttggagagagtttcttgtcacttcaacatacacaaactggcatcaaatttcattttaatgcgcttgatgcactcaaggcatggaagaaagaggcactgccacctgttgaggttcctgctgcagcaaaatggaagttcagaagtaagccttctgaccaggttatacttgactacgactatacatttacgacaccatattgtgggagtgatgctgtggttgtgaactctggcactccacaaacaagtttagatggatgcggcactttgtgttgggaggatactaatgatcggattgacattgttgccctttcagcaaaagaacccattcttttctacgacgaggttatcttgtatgaagatgagttagctgacaatggtatctcatttcttactgtgcgagtgagggtaatgccaactggttggtttctgcttttgcgtttttgggtatgttctaataccttgcttttttttggatttgatgcctcattaacatgaagacaatttctgagggtgatgtattgctaataagatggaacctgttagatttgtagtgagtttgtgacaattcagactcagatggttgcccagtgttctgttcctcttaagccgatatttttttcaggaaaacttgtgaagagctgttcattaaataacttcactactcttgtgactgactttatgctgatcccttcgaaataaaatgacaaagccttcaagttccaagcaagttaaggtaggctaaagtaatcctatggatcaagaaaagatacaacttttgaaggggcaaatattaattattgaggcctaagtttgaactgaagatcctccaaacagacgtagtcatatgttggagtaatatataaccgtgtaacagtattcccccacgtttaagatgcaagtttttgacatatgtaggattttgaagatacttatcttcatatatgaaccagcttgtccatactgatgattgcctgtcgacctaacagcttagagttgatggtgtactgatgaggttgagagacactcggttacattgcctgtttggaaacggcgacggagccaagccagtggtacttcgtgagtgctgctggagggaagcaacatttgctactttgtctgcgaaaggatatccttcggactctgcagcgtacgcggacccgaaccttattgcccataagcttcctattgtgacgcagaagacccaaaagctgaaaaatcttacctgactgacacaaaggcgccctaccgcgtgtacatcatgactgtcctgtcctatcgttgccttttgtgtttgccacatgttgtggatgtacgtttctatgacgaaacaccatagtccatttcgcctgggccgaacagagatagctgcttgtcatgtcacgtttgaattagaccattccttagcccttttttttttcctcctcttattctctgtctgccagtctataaaacgtcttacatttgttgacctgaacatgctcacgagtgcgcactccgtgaatgtcctatcagatcttctgaagaacgtcatacatagcctcacgagttgtacacaaagcctccagcggaacagccttgggcatcgtcagtccgctgccctcgctcatgtcaacctccacgccatcgactctgttccagtggaagcactggatgagggaccccagcgccaccccgaccgtctgcagcgcgagcctctctccggggcacttgcgccgccccatcccaaacggcgccacgaacagcccctcggctttcccgccctcgaaccgctccggcacgaacctgcccggctcctcccacacagccgggtccctgtggatcgcgtacacgttcaccagcagcgccgtgccgcgcgggacgtcgtagccgccgaccttgcagtctgccgacgactcgtgcgggagcagcagcggcgcggcggggtacaggcgcagcgtctcggcgatgatgcacctgaggtagccgagacgcggcaggtcgcccgcgttgagcaagcgggagtgccccacagcggcgtcgatctctgctcgtgccttctcgagtgtccctggattgttgagcagcagcgacatggcccattcgactgtggtcgaggtcgtctctgttccagctccaaataggttcttctcaaa

SEQ ID NO: 125778 - DNA, 1875 bp, Zea Mays
agtagtagtacaacggggcagcactgcactgcactgcaactgcgaatttccgtcagcttggagcggtccaagcgccctgcgaagcaaactacgccgatggcttcggcggcggcgtgggagggtccgacggccgcggagctgaagacagcgggggcggaggtgattcccggcggcgtgcgagtgaaggggtgggtcatccagtcccacaaaggccctatcctcaacgccgcctctctgcaacgctttgaagatgaacttcaaacaacacatttacctgagatggtttttggagagagtttcttgtcacttcaacatacacaaactggcatcaaatttcattttaatgcgcttgatgcactcaaggcatggaagaaagaggcactgccacctgttgaggttcctgctgcagcaaaatggaagttcagaagtaagccttctgaccaggttatacttgactacgactatacatttacgacaccatattgtgggagtgatgctgtggttgtgaactctggcactccacaaacaagtttagatggatgcggcactttgtgttgggaggatactaatgatcggattgacattgttgccctttcagcaaaagaacccattcttttctacgacgaggttatcttgtatgaagatgagttagctgacaatggtatctcatttcttactgtgcgagtgagggtaatgccaactggttggtttctgcttttgcgtttttggcttagagttgatggtgtactgatgaggttgagagacactcggttacattgcctgtttggaaacggcgacggagccaagccagtggtacttcgtgagtgctgctggagggaagcaacatttgctactttgtctgcgaaaggatatccttcggactctgcagcgtacgcggacccgaaccttattgcccataagcttcctattgtgacgcagaagacccaaaagctgaaaaatcttacctgactgacacaaaggcgccctaccgcgtgtacatcatgactgtcctgtcctatcgttgccttttgtgtttgccacatgttgtggatgtacgtttctatgacgaaacaccatagtccatttcgcctgggccgaacagagatagctgcttgtcatgtcacgtttgaattagaccattccttagcccttttttttttcctcctcttattctctgtctgccagtctataaaacgtcttacatttgttgacctgaacatgctcacgagtgcgcactccgtgaatgtcctatcagatcttctgaagaacgtcatacatagcctcacgagttgtacacaaagcctccagcggaacagccttgggcatcgtcagtccgctgccctcgctcatgtcaacctccacgccatcgactctgttccagtggaagcactggatgagggaccccagcgccaccccgaccgtctgcagcgcgagcctctctccggggcacttgcgccgccccatcccaaacggcgccacgaacagcccctcggctttcccgccctcgaaccgctccggcacgaacctgcccggctcctcccacacagccgggtccctgtggatcgcgtacacgttcaccagcagcgccgtgccgcgcgggacgtcgtagccgccgaccttgcagtctgccgacgactcgtgcgggagcagcagcggcgcggcggggtacaggcgcagcgtctcggcgatgatgcacctgaggtagccgagacgcggcaggtcgcccgcgttgagcaagcgggagtgccccacagcggcgtcgatctctgctcgtgccttctcgagtgtccctggattgttgagcagcagcgacatggcccattcgactgtggtcgaggtcgtctctgttccagctccaaataggttcttctcaaa

SEQ ID NO: 125779 - DNA, 448 bp, Zea Mays
ttttattctattttaagaagctaggttgattcacttcttgtaacgtcgagaaaaacaaaattcacatccattgcaagaaaaaaaaagaaaatccattccatacactcggcgaaaatcaactagtacaaggcaagtgaatatatatgctcggaactcggaagctacgtcatacacccttcagacgatgccagcaattcgatccatgaggttttcagagcctcttaagaacaccacgcatagctgtacgcggcctgcacatggcctccaacgggacggcccggggcatggtcagcccgccgctagccttcatgtcaacctgagctccatcaaccgtgtcccagtcgaagcactggagcagcgtggcgagcaccagcccgacggtccgcagcgcgagcgtctccccggggcacttgcgccgccccatcccgaacggcatcagcaggcgccc

SEQ ID NO: 125780 - DNA, 3078 bp, Zea Mays
atgggcgcgctgttgccgttcgtgcgtcgggtaaccagggccgtcaggctcagtccgctgcagcgcagcgccgaggatcgttttgcaacaagaatgggggcaaaagtagaacgggaaagttatatgcctggatattatgccacgggggatctcaatttggaaccaaatggtagatggtctccatactatgaggagatgacatcaaatgatcagttatgcaatggcttcacaacaaaaccaacaaatgactattcagaatttgacaaagaaatactcaagcatcaaatacttgaacatgaagctgtgtttagacaacagcctcacaacccactcgctatccaggtgtatgaactgcaccgagtttacaaaatacagaaggatatgatgaaacaacatcaaagcaaagaggtatattcatacccaactttggcagttgcatcacatacaaattcaccatcacaagtgccacaaaacggtgcaaagatgatgtggcagatgccagttcctccaatgtccacaacatacaggaaagctattggagagcataatgatacaaaccagtcctccatgaagttccttagagaaggcagtgtgcagtcctcaccaaatggatttatatcaagtgatgttggtccaagaagcagacaaggcacttttgaccttcaacttccagctgatcattatatagatgacgatggcacatcagataacaagcccatagatttccttggtttggcatcagatacaaaaccccggaatgatgctgagcttacattagttagtgcagaaggcttgggcaagttcagtgataatagttcatcctcgggtttgcagactacaaataatcttggaccccggcaggttaccgacctgaatgaatcaaatactggcttccatatgggtagagcaaatggatcagtttccagaggccttccgcgtacccttgagaactcatggaaccaaccaatattgagagcaaacacaactaatttcagtttcagtaaaaaacactccaaagaaaagcacacagatgaaggtacaagctcaaatttctttgacacaagtgtgaaaacaatacatgacgacaaaccatcaatcaataaaggtaaacaagtcagcagtgtaacttttttagcacccagatataatgatgctgaccccccaaaatacttcaaagctgttgatgggaggcctgccactgccagttataaccactttgtttaccaaggtcagaatagttcagttggatggattgcacaaagtcctctggaaccttctgttatcaataattttgctagagttgaccgtccacatcatttgaatatgggtacatttactgcccccgtctctattcctcaaatagacaatccttcaattgtctccccgatgggttcttgcacagcagacccaaggagcagcgttatcaataatcctgctttaattccaagattcaatgggttctcaactgtgaattcgtacaccagtcttagtgctgtgacgcagagcattggaacttcaatcccaaagctgataaatgtggataatgtagataaacgctatcgtggttttccacttgattcgttttccgtgtctcactcacgacatcaggtagcagtttcaagtaacctggagcaaaagaattcccagaagttggaagattcagatcaacagtcccatggcaagggtatgaagaacttcaatttgaatgagacactgtcagattgtcaggaagatggtcttgtagaacaagatgggagatgtgcttccagttttcagcatgataaagatggggggtcagtacttgggatctcttggctcaaaaaaaaacttatgtctgctgacccaacagctgtggagaagccagggaagatttttggacattcattgggaactgcaatagagctgaaaaatactaaagaccagaatgaaccagctgtgactattcggaatttgtcagattctgcttctacatctgttggctgtgcaattaagaaggataggccttcggataacattgttaccggaactctgcctgtctgtaataaagcccaagagggtgctacatgtttacctctttcgtgccagaagcatgtgcctaaagatggacaagccgctgaaggagccaccaagaaaagtggcgcccccatcaggaacttcatcgatctcaatgatgatgtaccaaatgatgacaattctgaggaatcagtagtgtcacacgaatgccacgtggaaccttcacggaacaaccatcctaaacgagcatttgtgattgatttagaggtgccggcctgtgaagaggacgcttcgtgggatattgatcaagaatgcgcgcagccgaaacctgatgcgtaccaggaagttgacgacggatctgatacatccgctctagctgcagccgagaacatcgtagcgttgtcaaggaatacgccaacagccgcagaggcatcggacgatacgttgcagtggtttgcagatctcgctgtattaaacatcaacgaccttgctgagcaagctgaactccaagcttgtacgaatgattccagtaactacgagtcggattcattcgagtccttgacactgaagctggaagagaccaagatcgacgatctctggagcaggccactggaacctgaaaccgcaaccgatgaacagacagtttcagctgctcaccttctcaccaagcccagaaggggccagcaaaggagacggcggcagaagcgagatttccagagagatgtcttgcctggcctttcgtcgctttcccggcctgagatcacagaggacgtccagttgctcgaggggttagtccaggcttccgggggatcctgggagtcgagcttgactaggcgaggacgttgtggtgggcgtgctagaggcaggaaacctcggaaaactgtagtaaccgtaattgtagaggaggaggaagaggaggaggtagaggttagcccaccgccaaaacctgctggcactggggaattggaagccgatggcaggggtatgatcgggtggggcagaacaacaaggcggtgtcgcagagcgagatgtccgtcaggtaacagcatggctactgcgtcttga

SEQ ID NO: 125781 - DNA, 645 bp, Zea Mays
atgtcaaagccgactactggtcattttttctctgaagatctgacctgcctcacctggcttgatacgcaagcccctggctccgtcatatacgtggcatttgggagctctactgtctttgacgcgacaaggtttcatgaactcgccaatggacttgtgcaatccggctgtccgttcatatgggtggttcggccaaacttcgccgaagaaatcgacgaggattggttcaacaaccgattcaagcgaagtgtcattaatgggaagggactgatcgttacttgggctccccagcaaagggtactgtcgcacccttcagtcgcttgcttcgtgacacactgtgggtggaactccacgatggaagctgtgctgcacggtgtcccattcttgtgctgcccctacttcgctgaccagttctgcaaccagagctacgtgtgtaatgtgtggaagacaggcctgaagctttgttccaatgagcaaggggtcgtcacaggggaggagatcaaggaaaaggtcgtgcagctgctgagggatgaggatatcaaggcgagggtagctatgtggaagaacatagcatgtgcaagcatcagagagggaggatcctctcatgcgaacttgctcagacttgtggatttgctacaggaaggatga

SEQ ID NO: 125782 - DNA, 102 bp, Zea Mays
gtagtgttgaagatacttttttgccagatatcttctttaactgcacgcaacaaaaaggaaatgacgctctaaaaaatgcaagcgatacgatagtatgtatgg

SEQ ID NO: 125783 - DNA, 1669 bp, Zea Mays
gcacacacacacacaagacacaacacaactcgtaggcagcgagcgtctctcctcttcctctcccacgcaccgcgccaaggaaggcagagagagatcgccgctcctcttctctccgtcggtggtgcggttgaccgccctcctcgagcgagatctcgctgcagtccctcgagatctggtcacagatctatccgacaagatggtgaagatctgctgcatcggtgctggctatgtcggtggcccaaccatggctgtcattgccctaaagtgcccagacattgaggttgtcgttgttgacatctccaagccccgcattgaggcatggaacagcgacaccctcccgatctacgagcccggcctcgatgatgttgtgaagcagtgcaggggcaggaacctcttcttcagcactgatgttgagaagcacgtcgctgaggctgacatcatcttcgtctcggtgaacacccccaccaagacccgtgggcttggagctggcaaggctgccgacctcacctactgggagagcgctgctcgtatgatcgccgatgtctccaagtctgacaagatcgttgtcgagaagtccaccgtccctgtcaagaccgctgaggctattgagaagatcttgacccacaacagcaagggcatcaactaccagatcctttccaacccggagttccttgcagagggcactgctattgaggacctgttcaagcctgacagagtgctcatcggtggccgggagacccccgagggcaggaaagccgtccaggttctcaaggatgtgtatgctcactgggttcccgaggacaggatcctcaccaccaacctgtggtccgctgagctctccaagctcgccgccaatgcgttcttggcacagaggatctcctctgtcaatgccatctccgctctctgcgaggcaaccggagccaatgtctctgaggtggcttacgccgtgggcaaggacacgagaattggccccaagttcctgaacgccagtgttgggttcggtggctcatgcttccagaaggacatcctgaacctggtgtacatctgcgagtgcaacggcctgcccgaggtggccaactactggaagcaggtgatcaggatcaacgactaccagaagagccggttcgtgaaccgcgtcgtggcctccatgttcaacaccgtcgccggcaagaagatcgccgtcctcggcttcgccttcaagaaagacaccggtgacaccagggagaccccggccattgacgtctgcaagggcctgctgggcgacaaggcccagatcagcatctacgacccccaggtgacggaggaccagatccagcgggacctggccatgaacaagttcgactgggaccacccgatgcacctgcaaccgacgagccccacggccattaagcaggtgagctgcgtgtgggacgcgtacgaggccaccaagggcgcccacggggtgtgcatcctgaccgagtgggacgagttcaagaccctggactaccagaagatcttcgacaacatgcagaagcccgccttcgtcttcgacggccgcaacatcgtcgacccggagaagctgagggagatcggcttcatcgtctactccatcggcaagccgctcgacgcctggcttaaggacatgcccgcggtcgcttaattcgtctgaggattcttaaaagttggacgg

SEQ ID NO: 125784 - DNA, 1975 bp, Zea Mays
gcacacacacacacaagacacaacacaactcgtaggcagcgagcgtctctcctcttcctctcccacgcaccgcgccaaggaaggcagagagagatcgccgctcctcttctctccgtcggtggtgcggttgaccgccctcctcgagcgagatctcgctgcagtccctcgagatctggtcacagatctatccgacaagatggtgaagatctgctgcatcggtgctggctatgtcggtggcccaaccatggctgtcattgccctaaagtgcccagacattgaggttgtcgttgttgacatctccaagccccgcattgaggcatggaacagcgacaccctcccgatctacgagcccggcctcgatgatgttgtgaagcagtgcaggggcaggaacctcttcttcagcactgatgttgagaagcacgtcgctgaggctgacatcatcttcgtctcggtgaacacccccaccaagacccgtgggcttggagctggcaaggctgccgacctcacctactgggagagcgctgctcgtatgatcgccgatgtctccaagtctgacaagatcgttgtcgagaagtccaccgtccctgtcaagaccgctgaggctattgagaagatcttgacccacaacagcaagggcatcaactaccagatcctttccaacccggagttccttgcagagggcactgctattgaggacctgttcaagcctgacagagtgctcatcggtggccgggagacccccgagggcaggaaagccgtccaggttctcaaggatgtgtatgctcactgggttcccgaggacaggatcctcaccaccaacctgtggtccgctgagctctccaagctcgccgccaatgcgttcttggcacagaggatctcctctgtcaatgccatctccgctctctgcgaggcaaccggagccaatgtctctgaggtggcttacgccgtgggcaaggacacgagaattggccccaagttcctgaacgccagtgttgggttcggtggctcatgcttccagaaggacatcctgaacctggtgtacatctgcgagtgcaacggcctgcccgaggtggccaactactggaagcaggtgatcaggatcaacgactaccagaagagccggttcgtgaaccgcgtcgtggcctccatgttcaacaccgtcgccggcaagaagatcgccgtcctcggcttcgccttcaagaaagacaccggtgacaccagggagaccccggccattgacgtctgcaagggcctgctgggcgacaaggcccagatcagcatctacgacccccaggtgacggaggaccagatccagcgggacctggccatgaacaagttcgactgggaccacccgatgcacctgcaaccgacgagccccacggccattaagcaggtgagctgcgtgtgggacgcgtacgaggccaccaagggcgcccacggggtgtgcatcctgaccgagtgggacgagttcaagaccctggactaccagaagatcttcgacaacatgcagaagcccgccttcgtcttcgacggccgcaacatcgtcgacccggagaagctgagggagatcggcttcatcgtctactccatcggcaagccgctcgacgcctggcttaaggacatgcccgcggtcgcttaattcgtctgaggtgctccattggattggatccggggaaggaagaggaactggttgaccattcttcattacagtttgttttttgcaggattcttaaaagttggacggcgctgctagtattccatgtttcgtgttttcatattggaggacgtctgtagatgtaaaaaatcctcgggcgcttgtgctcggcttgaggaaatatgcttgtacggttgtaccctggacccgctatagctggttggttcttcaagttgtgttcctatagaagccaaagttactacacgatcgatatgttctttttgcataataacaatacttgtctcacgtttcatcctttca

SEQ ID NO: 125785 - DNA, 3375 bp, Zea Mays
ctcactggtgctcgccttggctgctccactcccagctccaaaaccctaaccccgcgagacatccagcagctaggagcgggtccaggagctcaccgtcgagcgaccgctacactcgacctcaccggtttctaatgctgatcaaagcatgagcttcactcctgttccaaggttcaggggggcagcctattcgcagttgtgtcctcagtctagcagttgtgctgaacatttggtaaatgtggatggggcgagtgcaaaagacttgtcagttgacccaagcacattttgtattccgcaagatgctaatcagggattttgtagccgagctttacagtacactagttctgtttcaaagcagggatttgcagctcaaggtcttcctgtaaatgctgcagagtttggtctgaataatgattcttctttggtgggaggatatcaacaatttgactaccttctggggcctcctcaaactgaagtgtgtgaaggaatgtggatgaaaaatatcaacacaagtatcatccaccggcgtagaccttctaatgcatcctgccttgatcatacagaagaactaacttcctatgaaaatgatgagggagctatctcatttggaagtagttgtagcacaggaattgcgagttatccatatagtactcctttgcaaagaaatagccacatttcggatacgcgggatggaacttgggatgctctcgtgcaaatgcaagaggctttggaagcatccaacagtgacaatggactcaatgaagagtgcagtgatttgactttcaatcatgcagaactttcaggtgggaatgccgtaaagcataaagttgtttgggacaatggctctttaaacagtccatctttcacctcaaatttattgtctttccctggtgatactgagaccaccctcacaagtgcctccactgtttattgtacctttcagaactttgctgatctccaacataagatgaacaacaatgagcaaaacaaattatctagtgaggttgaactgcctcgtcagaaagtgcccatgacaaaccatgttaatggaagtggaggtgaaatgcattctgctgaatggggaacgaaccctggtctcatagaatcttctggctttatgccaagcaatgaagacagacaaaacgatatatcacatcaaccgtcaagttcatttgtatacagtgcagatggaactgtggatcattgctcaaaaaagtcacccctcatgtatgaatgtgaagagcagatggaaattgattcacttttaaattcattcggtgtatcaactgattcattttcacaaacatatggaatgtttgagcgaagcaacaatttggttgagtttgatatgaagaccgaattagatgaaagtggttctgctgcatgctttaataataatgccccatatatgcaaactggaccacctgagtcagctatatctgatggatcttcttatcctgaacagtatcagtctacttctcaaacatgtggcttagtttatgcttcagcatctcagtggcaaaatatgtcaagttctggattgcctttactggattgtcgcaaaagtattggtgagcccacttcaataattagcctggggggaaatggtaaaggacacttgctgcccacaagtgaagatactttattacagaaaccacagagtgttgctcctgatgctagattggaaatgaccgacaatgttgctgattgctatctggagtctgctgctagcttggatggccattcttgtccactaggagcttccgcatgtcatgatgaagcaatggcagccaaagatttgcagacagcacaacatggcgtagtcacagattgcacctttggaatacatacttcaaaccacgctggacattcagacatgctgctacccattacacagactacttctgttcaagagcctggcttgagtttgtccaaggatctgaactcatcatgtattcgaggaacagaggttaagaaagtagatttaacagcaacatacaattctgaacgccatggcatcctccgcctcaagtcttttgaacaaaaaactcctgagagtatgggtatgaaaacatacatatatcattgtggtgatcatagccagattgttgatcctcagcagagtatcatactcgctgcaagcaaaccttcacactcaagtgttttgccagttgacaaatctgatggcaaggtcgtttcacagcaaaaaaagcggaaaagggctgcagaaaaccttttagcgtggcatgatcacatcatgcccgggcatgggagcatgcatcgtagaagaacacctgaattggattgggctcgtgctaccaaaagattggttgagaaggtagatggtgagaatgcaacaatgggaagtagcacctttaatactccagctcggaagagacttattttgactactagcctgattcagtatattcttcctgttgtaccagctagacttcttgccgcaaatgttactaattccattgaggccattgtataccacatttctaaatccgcactcagtgacgcatgtgacactgctctatctgttgtgaatgacacgctaccgaaccagagcagcacttctggtaaggaaggctcaagaatcctatcagaagttctggaaacatatgagtcgaggcttggcaagctggaaatttccttgttaagctctgaaaaggcgacgacattgcatgatctggcatcagagctacaggacttggggcggtggtatattctctatcatcttgcaaagtggcatgggtacactaacaattctgagctcgaccctggcgcagctactgtcaagaaacatgaaggagctgctgcagcaccagtaaactcgctgagtgatatcaagtgtcgcttactgaactagggcagctcagcgactactaacaagtcaacccaacccgtgttatgctgaactgcgtataggaatatagaaccatagaacatactgctgctgtggataggcctggcgcggtggtgagaagccttctactgagccaaaggtcttgggtttaacacaacctttctgcaaaaatgtagagataaaggctgactctgttatttcttctctagaacctcactcatgtggaagtcgtcatcactgggtccgtctttagaacgtactgccgccccgttgccttgttggctttttttttgtttgtaaatgagaggcaacctctccgtttagacttaggaatatggtgatgtgacttaccatgtgctatgtgatcattagatgtaggagcacgggaagatcattttgcaagtatagctaacgctagctgtctggaacttccagatgttactgttcttttggccagtttgctagatggttatgatccggtggttgcagtttttgattgtctttta

SEQ ID NO: 125786 - DNA, 1898 bp, Zea Mays
tgcgcaggtggcgagctgggagcataattgctgtcatgcaacatccttgcaatgtccttcatcccgcgagactcccacaaggcgtaggttcagtttgcactagagcgtggcgatgattggggtccttgcctctaatcggttcgcttatccggcacattcctttgacatggcgcactgatctcattgcctcatcctatggcagctttatgatgggttgtacttgatagaggttgatcgtatcctgcgtcctagaggttattggattttgtctggacccctaatcaactggaagaaacactggaaggggtggcacaggactaaagaggacctagatgcagagcagaaagccattgaggcagttgccaggagcctctgctggaagaagatcaaggaggaggatgacattgctatcgtgttattatacggttccgttgcaacgcacgggcactgatctagtgagtgtatatgttgcaatctctacttttgacctaacatccggcctccacggctccacccacgagccagtggaatcttaccgattcggcaaccgtgctaatcgatatccgtgcaattccacctcccgaaccgaatccctccaccgacccaaaccctagcgcgcacccttctccgtcgtcctttcctggcgcgcgggccggtgtcggagatgcgggcgctgctcgcggacggcgggatggcactggcggtgtcgccggaggccaacgagtcgtcgggtggcgctgcggtgtcgctagggccgttatcgtgggcgtcggagtgccacggggtactgtacaacctggccttgatgctgccatcgctggcctttgtggggttcctggcgtggcaggcgcggcggagcttccgtaggctcagctacggccgctctcacgtcgttgtcgtcgcgtactacgcgctcctctgggccgtcgccgtactcaacctcctctggtgcttcctgcaggcatggcaatgtatgcctgacagggcattctcttggaatatactgtcactgtttacaaaatcaggaatgttattcttggaagtgagtctcatagcctttctacttcaaggaaatgatgccagcggttttgaatctttggcacgaacctttgttatatctggagctgtagttgctgctgatgtattgctcaagactatatatgtttttggcttcggtgttcctttgttcattgatactgatcaaggaactagtgggaaatggggcctgtggattctccacaaacttgtgcttactggagtctatgggctgattgttttcatgcatcattcaagatggagagacaggctgcctgcaaaaccagcatactacaactatgtatgtgtgatgttgctactgaatggcatatcactgtttggatgtttccttattgcaagtggagctggatttggtttatggttatataatctcacaaccgtatgctatcattctctttaccttcccctcctatatgtgactttcttagcagacttcttccaggaggaagacatgctcctagagaacgtctactattctgaaatgaaggatgctgggttcttcgatgctgactgggattaatccgtggctactgtgctgtatgacccatcccatatgaagtacgctgtatttgtttttattttatctgtgtactctcaacgtagaacaggaaatgtatgtagctagccgtggtagtgaatggaaatatgtaatcttactgctgcatacttcagaaaatcagaattcaagtgatttcacggctgagattgccatctcaacgatgtgtgataaatttacgtcgatggtacaaaactacgaagtcggtcgtcaaaactgcgtttttgcaggctcgttttataaatgtaagcgtatcacccaggattctaccaagagtatccttgct

SEQ ID NO: 125787 - DNA, 847 bp, Zea Mays
ggctgcttaatgaaagacaaggccggaaggccccatgacttgagtacttgacttaacatgacacacctttcctcgtttcaatcattcaatgagttaactcatgttgcaagtgcaaagctgattaatactctagttcacttgttgcagccttttacgccatcgtacttatgaaactgactttgtccttattcagactatatatgtttttggcttcggtgttcctttgttcattgatactgatcaaggaactagtgggaaatggggcctgtggattctccacaaacttgtgcttactggagtctatgggctgattgttttcatgcatcattcaagatggagagacaggctgcctgcaaaaccagcatactacaactatgtatgtgtgatgttgctactgaatggcatatcactgtttggatgtttccttattgcaagtggagctggatttggtttatggttatataatctcacaaccgtatgctatcattctctttaccttcccctcctatatgtgactttcttagcagacttcttccaggaggaagacatgctcctagagaacgtctactattctgaaatgaaggatgctgggttcttcgatgctgactgggattaatccgtggctactgtgctgtatgacccatcccatatgaagtacgctgtatttgtttttattttatctgtgtactctcaacgtagaacaggaaatgtatgtagctagccgtggtagtgaatggaaatatgtaatcttactgctgcatacttcagaaaatcagaattcaagtgatttcacggctgagattgccatctcaacgatgtgtgataaatttacgtcgatggtacaaaa

SEQ ID NO: 125788 - DNA, 222 bp, Zea Mays
aacagatttttggacatagttatatagaagttgcaatcacaccagaccagcagttgcaattacaccagacagcagttgcaatcattgtttgtttaacagatttttagacatagttatatagaagttgcaatcgcaccagactagcagttgcaattacaccagaccagcagttgcaatcattgtttgtttaacagatttttggacatagttatatagaagttg

SEQ ID NO: 125789 - DNA, 771 bp, Zea Mays
tcggctggaccgggcgggcggtggctgcggctggagccttggaggcttctaccggagtggagtgcttcacaaaactgggcgctgcccaactccctgcccaagctgctggattaaaccccccttgtcgtcgcttcggttcaagcgaggaagagagagagagcgagagttgtacaaggggcgccggcggccgcattgtagagtacgtcgagcttgttcactgccgtcgcggcctcaaagcaagccacatcatcgatggcggacgcagctcacgtcttcctgctggtagcggtggccgccgcgctcgccggccgctcagacggcgcgtggtgcgtgtgccgcccggagctggcggacagcgcgctgcagaaggcgctggactacgcgtgcggcgccggcgccgactgcaagcccatcctgcagagcggcgcctgcttcgccccggacaccgtcaaggcccactgctcctacgccgtcaacagcttctaccagcgcaacagccagaacccgcaggcctgcgtcttctccggcaccgccacgctcagcaacagcgacccgagcggcaatggctgcacgtaccctgcgaccccaagagaagcgagagggcaggtgcctccgaagccggtgccgttcgagaccttgcacgggggatcggcaattaggtttttggtgagcgtctacgcgactgcccaaaacatctacgacatgacaaaggaagttggacaaggatctggatcagagcgcatgggagggtatgatcagtttatttcctta

SEQ ID NO: 125790 - DNA, 162 bp, Zea Mays
aaaagcacgacccttgggagttcaagcgcaacatgtcaagggtgcacgccctctatcagcaatctgagcatagaagttccaatgcggatcgctctcagtaatgaaaggttgaccaaacggattatcacgaacaaaatgctgaacattatctgcagcggctag

SEQ ID NO: 125791 - DNA, 432 bp, Zea Mays
atggcgcggcgcggaacgcgaagcaaagtcagtagcggcatacctggaacgggaacgggggacgcagccggtggttcgtccgacaccccagccgcgcccgcgttccggccacgccgtctacgaggcctccgccgtttcctgcccctcgacgccggcgtggcagcaggaccgatcgaagccaccggggttgtgactgctgcgctctgcggctccacggccagcacggccgcaccgaccttcgttttcgtggctgcagctgcgcgctgccgctgccgcaggcgccgtcggcggtcccgccgcctggacgccgcgcgcgtcgccggcggcgggtccatccgatctaggtcaccgaggagatcccgaaaaggaaagggccggcatctgggcacaagtgagaagcgagaactcagaaatatgacgctgagtcgctga

SEQ ID NO: 125792 - DNA, 107 bp, Zea Mays
tcttttttttcttttgctttctcagatatttcataaaacagactctctatagatccccactagtgatcagatctcgcatgaatagctaacgatccggtaagtccaac

SEQ ID NO: 125793 - DNA, 606 bp, Zea Mays
atggtttcgcgtgattcgcagtggcatacgtcaacatcagggttacatacacttgtgtggattcaaatcaactgtggtcttcctaataatcggggccgctattgcccattactgctgggttccgcttcaatttcggaggcctcgctgatgctgctggtggcctcaaacttcggcccctgcagctgcctcttcaccaaggccgtgtatatgccgtcgcggtccaggagttcgtcgtgcgtgccgctctccacgattaggccgtcggagatgacggcgacggtgtcggcgctcttgacggtcgagagccggtgggctatcacaaggacagtcctccctttcatcaaggagtccattgcatcctgtacaagatattcgctttcagcatccagggcactggtggcttcgtccaggagaagcactcgtgggttcataagcaaagctctcgcaatggcgatcctctgcttctgcccgccggataacctgatcccccgctcgccgacgacagtcttatattggtcgggaaagccgcatatgaagttgtgtgcattcgccattttagctgcactctcaacgtcagcaaagttcgttgtgccctctagtccataa

SEQ ID NO: 125794 - DNA, 1378 bp, Zea Mays
catggctgtctcgatgggtcagctgcgaggctagccgcgttcgattgatcctctcttcaaccgccaccctcgatcctctctctagacgtcgccctctccttctctcttcatccgatgtcgtcgccaccatggccggctggcccgttccctccctcctcctccgccgccggcgactcctttcccttctccctctctcctaccgggctgcactcgccgcacccctagcggtcgcgcccggcgcatcaccggggcgcgtcctcgtcgccgctgccgcgccgccctctccacctgacccccttctcgggcggtggcctttgcgatgaccggaggtggtgctcgcggtcgtggtcaagacggaggccgctacgtctgcagaggcaccggctttggggtctaccgtccagatccgatggtctcagggcagaggacagcgcccgagatggtggggcacatgtcctgtggctgctggcgaatgatggcggcggcatcggcaggtgccggggccgacgacgttggtcatttgtggcctcggcgtgcgactgtgtgaagctgcggactgcgttggtggtggcgcgacgctctggcgtcaacgtggcggtgctagaggtcacacgtttgtgagggtgacgccgaccagtggcctaggatggcgcaaggtggtggtggcggtggcagggtgcccgcgcgacagctggattcggtggccgtgtgtgctagtgccatcagttgccgggtgcggctctggcaggcgtctgtgtgacacacatggtatggaggacgacgatgatggtagctcttggcctgacgttagtgctggaggcttcttgggcgagagcctcagcgacggcaaggctcgtgggcgtcgcttcccctgttggggcgtcgtattcaccttcgatggttgctttagattatcggcgtctggtatacatgtgaagatggcgctttacaacgtgaagtcgaagctactgcatcaggggttgtggctaagcaacgatgacagctaacgagccccattctttgtggactggattgtttcgatgggtcgagcatttgccgggggtaggatggaggttcaagctcgttggtgaagaatcggagctgtctcacgtggggtgtgttgaggcttggcacgacgaggcatcgcgatctttctcattatgtgctggtgtttggttgtgggcgtcatcgtgttttgtttgatcatgtgtggcccgttttgcaaagtcggagctgcttgtccagagctcggcaacgataactctagatgtgttgtgtatgaggggctcccattgatggagatgtttgtgcattttataggcggtaagtgttgtgccgcgttgatgtcccaatctaaccgatgagtttaacgtgttga

SEQ ID NO: 125795 - DNA, 1133 bp, Zea Mays
aacaaattaagttcatgaaacaattatagtatacgagctttggataggaaacattttgatgcatcttatgagcactcaattttaaagcaacttgcaaatattataaagaaggttaaacaaaaaaccaacacacatgtaccgatgtacatcctgcatctctgatgtcggtgcagggtgctcacagagctctccctcgacgacaactatttcaccgggatcccgacgacctgtacacgttgcccaacctgaggagagtgagcttacatgaaaatctgttcactggcaacctcggcagtgaccttggtaacctctctcagatcatgcaacttgacttgtcctataacaagttcacaggctccatccctgatgtctttggagagatgaggaggctagagtccgtaaacctggccaccaataggctggacggtgagttgcccgcttccctgtaaagttgtccactgctgagggtaatcagcttgaggaactactcgctctctggtgagattgctatcgactccagcttgctgccgaagcttaatacttttgatgttggaaccaactatctgagtggcgctatagctcctggcatcagtgtgtgcaccaagttgaggacactgaatcttacaaggaacaagctcgtggggggggataccggagagcttcaaggagttgagatccctgtcgtacctctcgctgaccaggaatagtttcacaacctggcatagacattgcaggtcttgcaacacctgcccaacctgacaagcttggtgctgaccaagaatttccgcggcggtgagacaatgcaggtgctcatcctgacaaactgtctactcatcggcgtaattcccccgtggctgcagagcttgggaagcctcaatgtgctggaaatttcatgtaacaagttagatgggaatatcccgccatggctggggaagctagacaactgcttcaacattgacctctcaaacaattctttcagcggtaagctacctgtcagcttcacacagatgaggagcttgaattcaaataatggctcgagcaagcagtcacccacagagggttcccattgttcagcaataaaagcaaatccgccatcgtcgcccttggactaggaactgtggtcagggttctcc

SEQ ID NO: 125796 - DNA, 1034 bp, Zea Mays
tgaaacaattatagtatacgagctttggataggaaacattttgatgcatcttatgagcactcaattttaaagcaacttgcaaatattataaagaaggttaaacaaaaaaccaacacacatgtaccgatgtacatcctgcatctctgatgtcggtgcagggtgctcacagagctctccctcgacgacaactatttcaccgggatcccgacgacctgtacacgttgcccaacctgaggagagtgagcttacatgaaaatctgttcactggcaacctcggcagtgaccttggtaacctctctcagatcatgcaacttgacttgtcctataacaagttcacaggctccatccctgatgtctttggagagatgaggaggctagagtccgtaaacctggccaccaataggctggacggtgagttgcccgcttccctgtaaagttgtccactgctgagggtaatcagcttgaggaactactcgctctctggtgagattgctatcgactccagcttgctgccgaagcttaatacttttgatgttggaaccaactatctgagtggcgctatagctcctggcatcagtgtgtgcaccaagttgaggacactgaatcttacaaggaacaagctcgtggggggggataccggagagcttcaaggagttgagatccctgtcgtacctctcgctgaccaggaatagtttcacaacctggcatagacattgcaggtcttgcaacacctgcccaacctgacaagcttggtgctgaccaagaatttccgcggcggtgagacaatgcaggtgctcatcctgacaaactgtctactcatcggcgtaattcccccgtggctgcagagcttgggaagcctcaatgtgctggaaatttcatgtaacaagttagatgggaatatcccgccatggctggggaagctagacaactgcttcaacattgacctctcaaacaattctttcagcggtaagctacctgtcagcttcacacagatgaggagcttgaattcaaataatggctcgagcaagcagtca

SEQ ID NO: 125797 - DNA, 4554 bp, Zea Mays
gttttgcccctggtgcctgggactcgctaggcgctggctgcagctgactccatgctcatctggaggtttttaaaagtaataatataatctagactaatttaaacattcgaatgcgtccatctccatgctcaagatatatatacggcgctccttttgttttggagtgaccaacgatggcaactcttccgaccgagcctctcttgttcctgatgttttgctagatttaaggattcatacatatattcagaccaaggatttgaaccctatcaaacatcaaacgtgcaccctcgcactatgttctgagcccacccctgctatgcaaaatcagtcacgtgtgattttcagtttccacttgccgttaggttaatcacctgtccctgcccagagtagctgcaaaactaggcctaaattttcggttttcagtttctcactaccgttaatcacgtatccttgtcccgagcgaacatcaccaacaggcaacagctgtgtgtcaccactcacgaggggcattaccgtaaatgcaagctggatgttgaggtgtcacatcacatctactcccctcgcggcaagaaaccggccccgatatatcccacattcccccaccacccacaccgagccaccgaggcgcggcaggaaggaaagcagcgctgcggagcagagtgtgtcgcttcgctgtaaaaacaggggagagggagacgcgcccgctgccagtgcctgccgcacacgcgtttagcgtttaagttccactcctcgccgccccagatctccgccctcctcaccactgcccctcattccccggcgcccagcacccggcggccgcaaccgccgcagtccggagcaagatcggcgggtagacggacggacggacgggcgacaggcgggcgggcgcggctctgtctgtatctatctgttggtgggagaccggttgtgtcggttaggcggcggcgggtgggaaggaagaatggcggcgggcggcagatccatcgcgtgctttgccgccgtgctgctcgcggccgcgctgctcctctccgcaccgaccaccacagaggcctacgattcgctggatccaaacggcaacatcactataaaatgggatatcatgcagtggactcctgacggatatgtcgctgttgtcacaatgttcaattatcaacaatttcggcacatcggggcacctggatggcagcttgggtggacatgggcaaaaaaggaggttatatggtcaatggttggggctcagaccactgaacagggtgactgctcaaagttcaagggcaacaccccccattgctgcaagaaagatccaacaattgttgatttacttccaggcactccatacaacatgcaaattgccaattgctgcaaggcaggagttataaatacctttaaccaggacccagcaaatgctgcttcctccttccagatcagtgttggtcttgctggaactaccaataaaactgttaaggtgccgaagaatttcactcttaagactccaggccctgggtacacatgtgggcgtgctattgttggcaggccaacgaagtttttctctgcagatgggcgcagggtaacccaagctctaatgacatggaatgtgacctgcacatattcccaatttcttgctcagaagactccatcctgctgtgtatctctctcatcattttataatgacacaattgtgaactgcccgacatgctcatgtggctgccagaacccaagtgggtcaaactgtgtgaacgaggattcacctaatctacaagccgcaattgatggtcctggtaaatggactggccagcctcttgtacaatgcacttctcacatgtgcccaataagaatccactggcatgtgaagctcaactacaaggaatactggagagtgaaaatcactatcacgaacttcaacttccgcatgaattacacacagtggaacttagttgctcagcatccaaactttgataatatcactcagttgttcagcttcaactacaaaccacttactccatatgggggtggcataaatgatacggcaatgttctggggtgtaaagttctacaatgatttgctgatgcaagccggcaaacttgggaatgtgcaatcagaactgcttctccgcaaggactcacggactttcacattcgaaaagggatgggccttcccacgccgagtgtacttcaatggtgataattgtgtcatgccatctcctgaaaattatccatggctgccgaatgcaagccctctaacaaaacaagcattgacactcccactcttgatattctgggttgccttggctgttctgttggcttatgcatgatgagtgggatcaagatgtttagcaagcttcaagttgatgtcggattccatgaggtgcactgcaacgggatatttattcattcaattccatagcggcacaggagagatgaggcgaagccaagaaaaagtggatgtgtgtgtgtgtgtgtttgtaagttaaagggccaaaatgtatttcttgtctggtagtatatagcagctctacaacactttggtgaacttagttactgcaaattaggcaattacagttgcaccttttgtattttatagcaaacccagacttctattggattctatgactgcccctcttgtagtaaacgcaaggcttcactggtactcctgtttaaagattggtcaaatagaagagacgacggtgattgtctgattgagataactaagttctggtgtcttgatccatttgaccattctgctgcaaagattattgagctaaattgctaataacaagtgttaactgttgactgaaccaaaattacgtgtgcaaaagaaacaacgaaccacaataagactgtctgcagtagataagataaaggagacgcaggcactgtttacatagtagagtttaaaatattacaattatatgtctcatgttttactctgtttattatagatagtctgagtccggcagcgggtaccggaaacgtgtcgtggatgcgtattattcgcggcgtgtggccctgtggatgcatccagcaggtgaggccatggacgtgcctgctatagaaagagagtgcggtaacatccgcatcctctctcctctgtccattcacatcttccctgttttcgtcggtacagacatgctgacgcgcagtccgaatacggtagctactggatgacgggcctcctatccgcgctcgctgatgggtcccactgcagaacgaggtgttttccgcgttggggctgtctccaccaagggccctaatgccgactccagcaagaatcgctgcatggttctgaacctcagctaaaatagagtacgagcagcgcatgcaacgatacgattcttgtttcgctattatttattaagagaatatagtatgttaatatagttggtatattatagaggataaaatttagaatacgctgctggagatggtaaagatatagaagacgatttttttagagtgaactgtaaaaacaaagaattttcctttaaaagatgaaatttagagaacgttgatggagatagccgaaagcgtcatttactctaaatatagaggatcctctagactctccagcagcatttaaacggtcatctaaatttataggtcgttgctacactctctctctctctatatatatatagtttctctaaacgatcctctatttatttgaatactataaataaccgttttaccaaaactaaaatatgtacaatatattttagagcatgacaaatacgtaggtataaaaaataaaaatgtttgtaatataggtatttaagtatagatgacgtgatttagaaaacgttgttggagatgaaaaagatatagatgataaaatcttttagagaagaccgtaaataatggatataaaggatattgctgaagacaacctttatcttatctttagcaggttgtatatacgaccccggatgcagaaaatgagtaagaaatcgatattgttcacgtgtccagcagctcgcgtacgcggtcgcacaaaaaccacaccccacatcgacgtgcatatcttcgagctctcgcggtcgcgcacagtccaagccacgtcctccatttttgtgtccaaggcctgctgaacggatgcacaatcattttgcgcaatctgctggaaacgaactcctttttgcgcgacgtagtggactcataaattgctagtatccgcaaccgcgcaacagcacaaccattttgcatgttgtcacataataacagcttacggagcaacactgtgatcctctgagaaggacaaaatgaggttttgctgattgttgtgcgctacggccttgttggaaaatgtcctgacgggtgctacatagggggtgtttggttagagatagggggtgtttggttagagggactaaagattagtctctagtttttagtcccatttagtccctttttttccaaacactaggactaaaatatggactaaaatgatttagtctttagtccttcacataggtgctaaaagagactaaaagcccataattatcatgttgcccttaccttttttatagataactaatattgtgagtatattctaagggta

SEQ ID NO: 125798 - DNA, 2111 bp, Zea Mays
gaggcgcggcaggaaggaaagcagcgctgcggagcagagtgtgtcgcttcgctgtaaaaacaggggagagggagacgcgcccgctgccagtgcctgccgcacacgcgtttagcgtttaagttccactcctcgccgccccagatctccgccctcctcaccactgcccctcattccccggcgcccagcacccggcggccgcaaccgccgcagtccggagcaagatcggcgggtagacggacggacggacgggcgacaggcgggcgggcgcggctctgtctgtatctatctgttggtgggagaccggttgtgtcggttaggcggcggcgggtgggaaggaagaatggcggcgggcggcagatccatcgcgtgctttgccgccgtgctgctcgcggccgcgctgctcctctccgcaccgaccaccacagaggcctacgattcgctggatccaaacggcaacatcactataaaatgggatatcatgcagtggactcctgacggatatgtcgctgttgtcacaatgttcaattatcaacaatttcggcacatcggggcacctggatggcagcttgggtggacatgggcaaaaaaggaggttatatggtcaatggttggggctcagaccactgaacagggtgactgctcaaagttcaagggcaacaccccccattgctgcaagaaagatccaacaattgttgatttacttccaggcactccatacaacatgcaaattgccaattgctgcaaggcaggagttataaatacctttaaccaggacccagcaaatgctgcttcctccttccagatcagtgttggtcttgctggaactaccaataaaactgttaaggtgccgaagaatttcactcttaagactccaggccctgggtacacatgtgggcgtgctattgttggcaggccaacgaagtttttctctgcagatgggcgcagggtaacccaagctctaatgacatggaatgtgacctgcacatattcccaatttcttgctcagaagactccatcctgctgtgtatctctctcatcattttataatgacacaattgtgaactgcccgacatgctcatgtggctgccagaacccaagtgggtcaaactgtgtgaacgaggattcacctaatctacaagccgcaattgatggtcctggtaaatggactggccagcctcttgtacaatgcacttctcacatgtgcccaataagaatccactggcatgtgaagctcaactacaaggaatactggagagtgaaaatcactatcacgaacttcaacttccgcatgaattacacacagtggaacttagttgctcagcatccaaactttgataatatcactcagttgttcagcttcaactacaaaccacttactccatatgggggtggcataaatgatacggcaatgttctggggtgtaaagttctacaatgatttgctgatgcaagccggcaaacttgggaatgtgcaatcagaactgcttctccgcaaggactcacggactttcacattcgaaaagggatgggccttcccacgccgagtgtacttcaatggtgataattgtgtcatgccatctcctgaaaattatccatggctgccgaatgcaagccctctaacaaaacaagcattgacactcccactcttgatattctgggttgccttggctgttctgttggcttatgcatgatgagtgggatcaagatgtttagcaagcttcaagttgatgtcggattccatgaggtgcactgcaacgggatatttattcattcaattccatagcggcacaggagagatgaggcgaagccaagaaaaagtggatgtgtgtgtgtgtgtgtttgtaagttaaagggccaaaatgtatttcttgtctggtagtatatagcagctctacaacactttggtgaacttagttactgcaaattaggcaattacagttgcaccttttgtattttatagcaaacccagacttctattggattctatgactgcccctcttgtagtaaacgcaaggcttcactggtactcctgtttaaagattggtcaaatagaagagacgacggtgattgtctgattgagataactaagttctggtgtcttgatccatttga

SEQ ID NO: 125799 - DNA, 1784 bp, Zea Mays
ggctactgctactgggctcgccgcgctcatcagggcaaacgcatactacgctacaagtgaagtgagtgatcgatgacgacggtagctagctagtttggtgcggttctcgtcggactatgggctgtttggttcagctctgtcgtctgtcgagctaacctatcatatcagcgccatgcgccccggccggtcgtaacctagctaggagtagctagctaggactagctagctaggagcctaagcgcccagcccagtgggtggtagcctaccaagggtgaggaagaggagctgagctaggaccgcgaggcgagcgagatccaatctgcaccccacgaacgaaaagattcttccccgccggcgtcgctctctcatccgtcgacgtctcgctccttccttcctctctctctctctctctctctctctctctctctctctctttctctctctcagccagcagcaagcatatagcccagcaccaccacatgcccaagggccctccctctccctcgtcgtcgggccaattgagtgtgagagctcgaaaaaacccaggggatcggccggaccagcagcgagcgagcgcgagctctgcgtgcgtgtgtgtgtctgcgcgctagattagatcacctccatcgtcaataattgcaggcagatccatatagtctgctggtggcgagacaaagcaacggatcgtcgtcgatccggagagcggaaagcgcgcagatcgcggcggccatggggcgcgggaaggtggtgctgcagcggatcgagaacaagatcagccgccaggtcaccttcgccaagcgccggaacggcctgctcaagaaggcgtacgagctctccatcctctgcgacgccgaggtcgcgctcgtcctcttctcccacgccggccgcctctaccagttctcatcctcctccgatctgcttaagactctagagcggtaccagaggcacatctatgcttcagctgatgctgcagtgccatctagcgatgagatgcagaataactatcaagaatatgtgaagctgaaagcacgagttgaggttttacaacactcgcaaaggaatcttcttggtgaagaactggctccacttagcccaagtgaacttgaccagcttgagagtcaagtagacaagaccttgaagcaaataagatcaagaaagactcaggtgttacttgatgaactttgcgacttaaagagaaaggaacaaatgctgcaagacgctaacagggttctgaaaaggaagctgcacgagtttgaggcagaggctgcttctcccccacaattggcgtggcaaggcggaggcggcatgttgtcccatgaccctccacagccagaacacttcttcgtggctctggagagcaacgcgcctctgcaacctacataccatactatggacatgaaccagcagccagagccagcgccgggcggctgctaccctcctgcgtggatggcttagccagcgctttggttccattgccttgacaagtgccgtgtccttcagagatcgctacgagtcctgctgctgcttttgcgaaccccccctttgctgcctgccatgcttaccgaactgttcaaataagaaataaccacatggtcctatataggttgctgttgtctttatcttctgttgatcacgtcctgctcagatgctttaaacgctatgcaaaatggcttagcgatgcatgctggaatgggctgaactgcttgtgttttgggagtataaatcgcttgggcgcttggcaataagtattattggcatgcctccctctgtttttataaatacaa

SEQ ID NO: 125800 - DNA, 1608 bp, Zea Mays
cgcgataccccctcactgctccagtgctccctcctcccctcccctccgatcaagtcggggcaacgcgcatcactcgctttaaatccgcacctcccggccggtccccttatcacctcaccttctcctttgagtcctctctctccgccgccgcagctagctgtgacgttatgctctcgccggcgccatagcgccagcgcctaccgtctacaactatccagccttaggcttacctatcccgtcaatcaagcctctcgtaaggaacaaggaaggtagctagctagttctatagctgctgtcgtcgtcgtcatcggcggcggcggcgcctgttcttagaggataaggttgtcctagcggagagggagctagccaggatttcggttgagatcaagagggggagcaggcggcggcggcggcgatggggcgcgggaaggtgcagctgaagcggatcgagaacaagatcaaccgccaggtgaccttctccaagcgccgctcggggctgctcaagaaggcgcacgagatctccgtgctctgcgacgccgaggtcgcgctcatcatcttctccaccaaagggaagctctacgagtattccaccgattcatgtatggacaaaattcttgaccggtacgagcgctactcctatgcagaaaaggttcttatttcagcagaatctgaaactcagggcaattggtgccacgagtatagaaaactaaaggcgaaggtcgagacaatacaaaaatgtcaaaagtaatttgtagtgattagttgctgaaaaaatgtaatatgccctgttgaagataaatatgaccaatacttttgtgtcctgcaggcacctcatgggagaggatcttgaaacgttgaatctcaaagagcttcagcaactagagcagcagctggagagttcactgaaacatatcagaaccaggaagaaccaacttatgctcgagtcaatttcggagctccaacggaaggtaaattcgtcgagcttgcttaaagttggccgttggaacttcctttttaagaaatgtaaggtttctttagctgggcattaggtgggcatggtttgttgcaagtattgactgctctggttgcctagttacatccacaaaatattcctgctcttgtgctgtgctgagtattggcatgcgatgcattgccgcaggagaagtcgctgcaggaggagaacaaggttctgcagaaggagctcgcggagaagcagaaagcccagcggaagcaagtgcaatggggccaaacccaacagcagaccagttcgtcttcctcgtgcttcgtgataagggaagctgccccaacaacaaatatcagcatttttcctgtggcagcaggcgggaggttggtggaaggtgcagcagcgcagccacaggctcgcgttggactaccaccatggatgcttagccacctgagcagctgaaggtttcagcaactcttcccgtttatccgcctggtgcagtatagtatcatcgtgatcgcgagagcagcagcagtgggtttgccgtatctttttttaccaatgtatgtctatatatgtaagtatcaaatctgcaatgtgttaatcaccatttccgctggggcggccgcacgagtactttacgc

SEQ ID NO: 125801 - DNA, 1526 bp, Zea Mays
cgcgataccccctcactgctccagtgctccctcctcccctcccctccgatcaagtcggggcaacgcgcatcactcgctttaaatccgcacctcccggccggtccccttatcacctcaccttctcctttgagtcctctctctccgccgccgcagctagctgtgacgttatgctctcgccggcgccatagcgccagcgcctaccgtctacaactatccagccttaggcttacctatcccgtcaatcaagcctctcgtaaggaacaaggaaggtagctagctagttctatagctgctgtcgtcgtcgtcatcggcggcggcggcgcctgttcttagaggataaggttgtcctagcggagagggagctagccaggatttcggttgagatcaagagggggagcaggcggcggcggcggcgatggggcgcgggaaggtgcagctgaagcggatcgagaacaagatcaaccgccaggtgaccttctccaagcgccgctcggggctgctcaagaaggcgcacgagatctccgtgctctgcgacgccgaggtcgcgctcatcatcttctccaccaaagggaagctctacgagtattccaccgattcatgtatggacaaaattcttgaccggtacgagcgctactcctatgcagaaaaggttcttatttcagcagaatctgaaactcagggcaattggtgccacgagtatagaaaactaaaggcgaaggtcgagacaatacaaaaatgtcaaaagcacctcatgggagaggatcttgaaacgttgaatctcaaagagcttcagcaactagagcagcagctggagagttcactgaaacatatcagaaccaggaagaaccaacttatgctcgagtcaatttcggagctccaacggaaggtaaattcgtcgagcttgcttaaagttggccgttggaacttcctttttaagaaatgtaaggtttctttagctgggcattaggtgggcatggtttgttgcaagtattgactgctctggttgcctagttacatccacaaaatattcctgctcttgtgctgtgctgagtattggcatgcgatgcattgccgcaggagaagtcgctgcaggaggagaacaaggttctgcagaaggagctcgcggagaagcagaaagcccagcggaagcaagtgcaatggggccaaacccaacagcagaccagttcgtcttcctcgtgcttcgtgataagggaagctgccccaacaacaaatatcagcatttttcctgtggcagcaggcgggaggttggtggaaggtgcagcagcgcagccacaggctcgcgttggactaccaccatggatgcttagccacctgagcagctgaaggtttcagcaactcttcccgtttatccgcctggtgcagtatagtatcatcgtgatcgcgagagcagcagcagtgggtttgccgtatctttttttaccaatgtatgtctatatatgtaagtatcaaatctgcaatgtgttaatcaccatttccgctggggcggccgcacgagtactttacgc

SEQ ID NO: 125802 - DNA, 1548 bp, Zea Mays
cgcgataccccctcactgctccagtgctccctcctcccctcccctccgatcaagtcggggcaacgcgcatcactcgctttaaatccgcacctcccggccggtccccttatcacctcaccttctcctttgagtcctctctctccgccgccgcagctagctgtgacgttatgctctcgccggcgccatagcgccagcgcctaccgtctacaactatccagccttaggcttacctatcccgtcaatcaagcctctcgtaaggaacaaggaaggtagctagctagttctatagctgctgtcgtcgtcgtcatcggcggcggcggcgcctgttcttagaggataaggttgtcctagcggagagggagctagccaggatttcggttgagatcaagagggggagcaggcggcggcggcggcgatggggcgcgggaaggtgcagctgaagcggatcgagaacaagatcaaccgccaggtgaccttctccaagcgccgctcggggctgctcaagaaggcgcacgagatctccgtgctctgcgacgccgaggtcgcgctcatcatcttctccaccaaagggaagctctacgagtattccaccgattcatgtatggacaaaattcttgaccggtacgagcgctactcctatgcagaaaaggttcttatttcagcagaatctgaaactcagggcaattggtgccacgagtatagaaaactaaaggcgaaggtcgagacaatacaaaaatgtcaaaagcacctcatgggagaggatcttgaaacgttgaatctcaaagagcttcagcaactagagcagcagctggagagttcactgaaacatatcagaaccaggaagaaccaacttatgctcgagtcaatttcggagctccaacggaaggtaaattcgtcgagcttgcttaaagttggccgttggaacttcctttttaagaaatgtaaggtttctttagctgggcattaggtgggcatggtttgttgcaagtattgactgctctggttgcctagttacatccacaaaatattcctgctcttgtgctgtgctgagtattggcatgcgatgcattgccgcaggagaagtcgctgcaggaggagaacaaggttctgcagaaggagaaagcgttgctcctgcctgcagctcgcggagaagcagaaagcccagcggaagcaagtgcaatggggccaaacccaacagcagaccagttcgtcttcctcgtgcttcgtgataagggaagctgccccaacaacaaatatcagcatttttcctgtggcagcaggcgggaggttggtggaaggtgcagcagcgcagccacaggctcgcgttggactaccaccatggatgcttagccacctgagcagctgaaggtttcagcaactcttcccgtttatccgcctggtgcagtatagtatcatcgtgatcgcgagagcagcagcagtgggtttgccgtatctttttttaccaatgtatgtctatatatgtaagtatcaaatctgcaatgtgttaatcaccatttccgctggggcggccgcacgagtactttacgc

SEQ ID NO: 125803 - DNA, 1335 bp, Zea Mays
cgcgataccccctcactgctccagtgctccctcctcccctcccctccgatcaagtcggggcaacgcgcatcactcgctttaaatccgcacctcccggccggtccccttatcacctcaccttctcctttgagtcctctctctccgccgccgcagctagctgtgacgttatgctctcgccggcgccatagcgccagcgcctaccgtctacaactatccagccttaggcttacctatcccgtcaatcaagcctctcgtaaggaacaaggaaggtagctagctagttctatagctgctgtcgtcgtcgtcatcggcggcggcggcgcctgttcttagaggataaggttgtcctagcggagagggagctagccaggatttcggttgagatcaagagggggagcaggcggcggcggcggcgatggggcgcgggaaggtgcagctgaagcggatcgagaacaagatcaaccgccaggtgaccttctccaagcgccgctcggggctgctcaagaaggcgcacgagatctccgtgctctgcgacgccgaggtcgcgctcatcatcttctccaccaaagggaagctctacgagtattccaccgattcatgtatggacaaaattcttgaccggtacgagcgctactcctatgcagaaaaggttcttatttcagcagaatctgaaactcagggcaattggtgccacgagtatagaaaactaaaggcgaaggtcgagacaatacaaaaatgtcaaaagcacctcatgggagaggatcttgaaacgttgaatctcaaagagcttcagcaactagagcagcagctggagagttcactgaaacatatcagaaccaggaagaaccaacttatgctcgagtcaatttcggagctccaacggaaggagaagtcgctgcaggaggagaacaaggttctgcagaaggagctcgcggagaagcagaaagcccagcggaagcaagtgcaatggggccaaacccaacagcagaccagttcgtcttcctcgtgcttcgtgataagggaagctgccccaacaacaaatatcagcatttttcctgtggcagcaggcgggaggttggtggaaggtgcagcagcgcagccacaggctcgcgttggactaccaccatggatgcttagccacctgagcagctgaaggtttcagcaactcttcccgtttatccgcctggtgcagtatagtatcatcgtgatcgcgagagcagcagcagtgggtttgccgtatctttttttaccaatgtatgtctatatatgtaagtatcaaatctgcaatgtgttaatcaccatttccgctggggcggccgcacgagtactttacgc

SEQ ID NO: 125804 - DNA, 1357 bp, Zea Mays
cgcgataccccctcactgctccagtgctccctcctcccctcccctccgatcaagtcggggcaacgcgcatcactcgctttaaatccgcacctcccggccggtccccttatcacctcaccttctcctttgagtcctctctctccgccgccgcagctagctgtgacgttatgctctcgccggcgccatagcgccagcgcctaccgtctacaactatccagccttaggcttacctatcccgtcaatcaagcctctcgtaaggaacaaggaaggtagctagctagttctatagctgctgtcgtcgtcgtcatcggcggcggcggcgcctgttcttagaggataaggttgtcctagcggagagggagctagccaggatttcggttgagatcaagagggggagcaggcggcggcggcggcgatggggcgcgggaaggtgcagctgaagcggatcgagaacaagatcaaccgccaggtgaccttctccaagcgccgctcggggctgctcaagaaggcgcacgagatctccgtgctctgcgacgccgaggtcgcgctcatcatcttctccaccaaagggaagctctacgagtattccaccgattcatgtatggacaaaattcttgaccggtacgagcgctactcctatgcagaaaaggttcttatttcagcagaatctgaaactcagggcaattggtgccacgagtatagaaaactaaaggcgaaggtcgagacaatacaaaaatgtcaaaagcacctcatgggagaggatcttgaaacgttgaatctcaaagagcttcagcaactagagcagcagctggagagttcactgaaacatatcagaaccaggaagaaccaacttatgctcgagtcaatttcggagctccaacggaaggagaagtcgctgcaggaggagaacaaggttctgcagaaggagaaagcgttgctcctgcctgcagctcgcggagaagcagaaagcccagcggaagcaagtgcaatggggccaaacccaacagcagaccagttcgtcttcctcgtgcttcgtgataagggaagctgccccaacaacaaatatcagcatttttcctgtggcagcaggcgggaggttggtggaaggtgcagcagcgcagccacaggctcgcgttggactaccaccatggatgcttagccacctgagcagctgaaggtttcagcaactcttcccgtttatccgcctggtgcagtatagtatcatcgtgatcgcgagagcagcagcagtgggtttgccgtatctttttttaccaatgtatgtctatatatgtaagtatcaaatctgcaatgtgttaatcaccatttccgctggggcggccgcacgagtactttacgc

SEQ ID NO: 125805 - DNA, 1661 bp, Zea Mays
atggcagtttcgtcggaccgcgcgcgaggcgccttgttgccgctgccttgatttaaaaattcaccttctctgtcttctacgacggccctgagggggcgcagtactggcgtgagcggtggttcgacttctctacacccaggaaccgtcatccaaggagtatgactcgtgggcccgggcccgtgtcagagactgggccgctgctttcgtcatcgatgctggagattgacattgagaggttcgtccgtgacaataccttcgcagagatttgggagggtagggcaaaggacatggaggcctcgctggttgagtaccaggactgtgttttccaagtcaatttgaaggaggaagagatcaagcaaactggcgcagcatcgttcatccacacccaaatcctagaaaaccacgagtgcataagccggcggcacctgaccggggcgcgccaaggacgggactctaagatagaaagaatcatcggcagcggtctcgcgatcgggaggggagcagggcgcatgcgcgagcaccggcactgcaaggacgagcatgagccccagccggggtgcggggagggggcggggcaggcggcggcgaactgcgcggcggtgtgctgctgcttcccgctggcgctgctcgacgtcctgctgctcgtcaccgtccggctccccacgggcgtcatgcggcgggtgaggaggaggcgccgccaccgcggccctacaggagccggagccggagccaacaggaagaggccggcctccgcgggggcggcgcccgcgccgccgtcgggaagcagcgccaaggcgatgatcggcgcgactctagtcaccgagaaggaagagaaggcgcgcggcgaggcggagtcgtcggcggcgacggctgagctggagcgcgagatcatggactcccacttctacggcgccggcttctggcgcagcgtctcctccagctccagctcctcgtccatgcgctgccaatagcaaaactgccaacgatcactcggcctgttcttggagttcccgccccgccgttcttggtgatgttgtgccagactgccagtcagtgcagcatgcatggcaacaggagcagccttgggtatcgtacaagcgaccgtgcacttgcgctggatcgacactttttacggaagcgaaactggcccttgtggtcttgtggattagattattctactgccagccattgtcttgcatgggccacgccggcagctgctgcttaggaaggtgaagccaaagggatcggtgattgtgcttaggtttttcatatttcgtccctgtgggagctgcaaatgctgaaacttcaaacttgtgctcaaacgatccattagtattactggcttggagatcggtcgacaacaaatgaacagacagatcactgttcatgatccattggtacttggatgctttatacagctccaggttgctctagaaccaaattattgggaccacagatcctctcaaagaagcgtacatggactccgtatcttaaaacaacaatgtttccaatcaacctgacgcggctgaggatgtatttggtttgaggtcaaaatgagataggacgagtgttgtcttgattttttagatcacgtcgccaccaaaaactactccggtgttaacatcgtccttatgtaactctcattcaaacactataaaaac

SEQ ID NO: 125806 - DNA, 835 bp, Zea Mays
gaggggaactgggaagggaagggagcggaagagaggtgggtgaccgccgctcctccgtccagccttccagttccaggcgtggcgaactaggcaagcggcaagctcaccgctcctcgagtgaggcccaggttccgtcgccgccgtactcagcagcggataccggcgagtcaacaggtagtagagggggaaggaggggagcagttcctgttcgcccggtcaccgcgcggccggagcaatcccgctggtgcgtccgcctcagtttgccgtcaccctgttgcacgtacggctagggtttggagatagatccgcccgccagctcgtgtggaggcgcgccgtggtgcggggaggaatagaggaagcgcggttttggttccttgctcctgaagcttcagggcgtgcgaaccggttcggtcgcaatgtcgggctcgtcggcggcaggggaggacatagtgcagcacctatcgtccaattctaacccgtcttcgtcgaagctcgcgaagctcgaggcacgcatggccggcaaggctgtctccgcgccatcgtcaccgccacaccatcccatggctgcccccgcctccgcacctgccatatccttcatggaccaggaggagctgcctgagacttcctcttccgatgacgataactgtgaggagtttttgatacaaaagaataccctgaagcgtccgagatctccagatggtgacaacatctctgctcttggaaattttgagggttcatcaaacgaggcagcaaagattttagatgtcacggataatctcgtggaagagctaagtattaaacaagctcaagaagaccacaaagggtgtataattgt

SEQ ID NO: 125807 - DNA, 2826 bp, Zea Mays
gaggggaactgggaagggaagggagcggaagagaggtgggtgaccgccgctcctccgtccagccttccagttccaggcgtggcgaactaggcaagcggcaagctcaccgctcctcgagtgaggcccaggttccgtcgccgccgtactcagcagcggataccggcgagtcaacaggtagtagagggggaaggaggggagcagttcctgttcgcccggtcaccgcgcggccggagcaatcccgctggtgcgtccgcctcagtttgccgtcaccctgttgcacgtacggctagggtttggagatagatccgcccgccagctcgtgtggaggcgcgccgtggtgcggggaggaatagaggaagcgcggttttggttccttgctcctgaagcttcagggcgtgcgaaccggttcggtcgcaatgtcgggctcgtcggcggcaggggaggacatagtgcagcacctatcgtccaattctaacccgtcttcgtcgaagctcgcgaagctcgaggcacgcatggccggcaaggctgtctccgcgccatcgtcaccgccacaccatcccatggctgcccccgcctccgcacctgccatatccttcatggaccaggaggagctgcctgagacttcctcttccgatgacgataactgtgaggagtttttgatacaaaagaataccctgaagcgtccgagatctccagatggtgacaacatctctgctcttggaaattttgagggttcatcaaacgaggcagcaaagattttagatgtcacggatacaagaccatccctggacaattcaaataggaaaaaacaaggccgtggaaggggtcgtgctggtacaggccgaggccgtggctcaaagactgttgatcaaccacgactgactttgatttcctcagcagttgtaacaaatggtcaactagataaattaaccaacaaggaaccccaatcgagtgttcaactgggccatgacgacagggctgctttacaggaagaattgtcaatgttacatggcaaagttgcatttttggaggaggaactttctaaatcgcgtcaagacgcaacaaattaccatcaactgagtgatagggtagcaaaggaattgaaggatctcaaagatcatgaccaacaaatgagatctaagcaaatgaaggtgctgtctgatctgctgatagctgtgtcgaaagcagagaggcaagaagcgcggatgaggataaggcaggaatctttcagacttgggaatgttggtgttatgagagctggaactatcatatctgaaatttgggaagacggacaggcaataaaagatcttaattctcacctgaaatctttactggaaactaaggagactattgaaaggcatcgtaaatcacttaagaaaagacaatctgacaagggtgatggcagtgacgctgagactagcatgtccgaggaggacattgtcttacaggacgaaatatgtaaatctcgtctaaccagtatcaaacgggaggaagaacagtatatgagagagagagatcggtatgagttggaaaaggggaggcttatacgagagatgaagcgtctcagagatgaagatggctcacgctttaacaacttccaaattcttcaccatcgttatgctctgttaaatcttcttggaaagggagggtttagtgaggtttacaaggcttttgatttggtggagtacaagtatgtggcatgcaagcttcatggattgaacgctcaatggagtgaggagaaaaaacagagctacatacgtcatgcgattcgtgaatataacattcacaaaactttggtgcatccaaacattgtcaggctatgggatatatttgagattgatcacaatacattctgcaccgtcctagaatattgcagtggcaaggatcttgatgcagtccttaaagccacaccaattcttccagaaaaagaagcaagaatcataattgttcaaatatttcagggcctggtttatctaaacaagaggggccaaaagatcattcactacgatctaaaacctggcaatgttctctttgatgaggttggtgttgcaaaagttacagactttggcctcagcaagattgtggaggatgatgttgggtctcagggaatggaactcacttctcagggagctggaacctattggtatcttcctccagaatgctttgaccttagcaaaacaccatttatttcatctaaggtggatgtttggtcagctggtgtaatgttttaccaaatgctttatggaaggcgtccttttggtcatgatcagactcaggagagaatacttcgggaagatacaattatcaatgcacgaagagtggagttcccctcaaagccagctgtatcgaatgaggcgaaggatctgatacgccggtgcttgacatacaaccaatcagagaggccagatgtactaaccataactcaagatcattatctctcgtatgcaaagaagtagccactaccccggagaacattttggcgatggtatctgttcaggcattgagattatggatggggatggataatctcgtggaagagctaagtattaaacaagctcaagaagaccacaaagggtgtataattgtaaattttagtctgccctattacggcaatgacctgaaatccagaaggcatcagttcaaaggccagcttcttttgtaacatagagaaaacatgcattaacgggcccatttaccctttgactgagatctccttgactcgcttgtggcatgcccccgtgcgtaacgcgacggttacttggctggtgggcaatggtcctcttgattttctgtttgctgatactgtcgataaggactgccgaatca

SEQ ID NO: 125808 - DNA, 1265 bp, Zea Mays
tttttggtatgaattgtctattgcgacattgttttggcttattctaccctcgttcataactcagagctggaactatcatatctgaaatttgggaagacggacaggcaataaaagatcttaattctcacctgaaatctttactggaaactaaggagactattgaaaggcatcgtaaatcacttaagaaaagacaatctgacaagggtgatggcagtgacgctgagactagcatgtccgaggaggacattgtcttacaggacgaaatatgtaaatctcgtctaaccagtatcaaacgggaggaagaacagtatatgagagagagagatcggtatgagttggaaaaggggaggcttatacgagagatgaagcgtctcagagatgaagatggctcacgctttaacaacttccaaattcttcaccatcgttatgctctgttaaatcttcttggaaagggagggtttagtgaggtttacaaggcttttgatttggtggagtacaagtatgtggcatgcaagcttcatggattgaacgctcaatggagtgaggagaaaaaacagagctacatacgtcatgcgattcgtgaatataacattcacaaaactttggtgcatccaaacattgtcaggctatgggatatatttgagattgatcacaatacattctgcaccgtcctagaatattgcagtggcaaggatcttgatgcagtccttaaagccacaccaattcttccagaaaaagaagcaagaatcataattgttcaaatatttcagggcctggtttatctaaacaagaggggccaaaagatcattcactacgatctaaaacctggcaatgttctctttgatgaggttggtgttgcaaaagttacagactttggcctcagcaagattgtggaggatgatgttgggtctcagggaatggaactcacttctcagggagctggaacctattggtatcttcctccagaatgctttgaccttagcaaaacaccatttatttcatctaaggtggatgtttggtcagctggtgtaatgttttaccaaatgctttatggaaggcgtccttttggtcatgatcagactcaggagagaatacttcgggaagatacaattatcaatgcacgaagagtggagttcccctcaaagccagctgtatcgaatgaggcgaaggatctgatacgccggtgcttgacatacaaccaatcagagaggccagatgtactaaccataactcaagatcattatctctcgtatgcaaagaagtag

SEQ ID NO: 125809 - DNA, 1668 bp, Zea Mays
attcctatttcgcatatcatcctagtcctttctcatgtctgaactgtaaaagtgatatccatatcttttataggctttgctagtttgctgtctacaccatcttactctttggtaatgatgtattttcatatttctgatggttatgtttgctgaatctttctgtagaaatctttactggaaactaaggagactattgaaaggcatcgtaaatcacttaagaaaagacaatctgacaagggtgatggcagtgacgctgagactagcatgtccgaggaggacattgtcttacaggacgaaatatgtaaatctcgtctaaccagtatcaaacgggaggaagaacagtatatgagagagagagatcggtatgagttggaaaaggggaggcttatacgagagatgaagcgtctcagagatgaagatggctcacgctttaacaacttccaaattcttcaccatcgttatgctctgttaaatcttcttggaaagggagggtttagtgaggtttacaaggcttttgatttggtggagtacaagtatgtggcatgcaagcttcatggattgaacgctcaatggagtgaggagaaaaaacagagctacatacgtcatgcgattcgtgaatataacattcacaaaactttggtgcatccaaacattgtcaggctatgggatatatttgagattgatcacaatacattctgcaccgtcctagaatattgcagtggcaaggatcttgatgcagtccttaaagccacaccaattcttccagaaaaagaagcaagaatcataattgttcaaatatttcagggcctggtttatctaaacaagaggggccaaaagatcattcactacgatctaaaacctggcaatgttctctttgatgaggttggtgttgcaaaagttacagactttggcctcagcaagattgtggaggatgatgttgggtctcagggaatggaactcacttctcagggagctggaacctattggtatcttcctccagaatgctttgaccttagcaaaacaccatttatttcatctaaggtggatgtttggtcagctggtgtaatgttttaccaaatgctttatggaaggcgtccttttggtcatgatcagactcaggagagaatacttcgggaagatacaattatcaatgcacgaagagtggagttcccctcaaagccagctgtatcgaatgaggcgaaggatctgatacgccggtgcttgacatacaaccaatcagagaggccagatgtactaaccataactcaagatcattatctctcgtatgcaaagaagtagccactaccccggagaacattttggcgatggtatctgttcaggcattgagattatggatggggatggataatctcgtggaagagctaagtattaaacaagctcaagaagaccacaaagggtgtataattgtaaattttagtctgccctattacggcaatgacctgaaatccagaaggcatcagttcaaaggccagcttcttttgtaacatagagaaaacatgcattaacgggcccatttaccctttgactgagatctccttgactcgcttgtggcatgcccccgtgcgtaacgcgacggttacttggctggtgggcaatggtcctcttgattttctgtttgctgatactgtcgataaggactgccgaatc

SEQ ID NO: 125810 - DNA, 1393 bp, Zea Mays
caagtttgtttttttattgttgaaagcacctgtttagtaagtgttttcctgacagagctgcagcatgctttaataataaacataaaacggattaatgtgaacatgctccggactagatatttcttgcagcagtttctgtaaattcatagcacacgttaaagctaaaagaaacaccaaaatatcaaacgaatttcttgtgcgtggtctaaaaaaccccccgcccctgctaattagttgccaatgaatggaaggaaacccatcacgatttgcttgcaaagctctactactccaaaaccggcaaacttgggaggaaggaggaggaggagggagctgcggctatgagagcgaaccagtcaaccaccagaagcagaggagctggagccagaaatgcgtgagcccggcaaggacgaacaggaggctcgggttataccgcgtgaagcaagaagcgccggcgctcttgggtgaaccggcggcaaggcaacactgctcgttgcagcggacttgaatccctctccctcgcatcgcacacgaaaggcccaacacgcgtgagagtccaactccagagagtgcccggacacgcgctacgtgccatgaacaagaggacaacaccagcgaactgccagtgcagtgccgggactgctattgctacatactacaagcgtgattgattcagcgacaagtcgcccgtgtcttactcttaccagaaaggtagagcagcagattggaagaagaggaataaagaaatataagaacgcaacatgccctctgatctgttgttctgtcttctctctctccctctcttccttttgccaaaacattattgaggactcactcgttcgagcagtttcatccccacccccatgtgtgtgacgatggaagatcgagcaatgccgcgacgaaagcccagaggaggcacgaggaagagaggatggctagactactagatgatgcatttgcatgccctgcgcgagatttgtacctgtatttataaaggagaagagtgaggaagggcggggccggctgttacttacaggatcggatgaggctagctgcctagctaggggtagtcgtctcgctcaagacgagaaccaatccacgcgatgatgggtgatgggctggtggtggccgcggcagagcaggggaccccgtcggtcgaaagcgacgcccgccgcgcgcactgttccttgacggcagcgagaacactcctctgtctcccacctaaatctaatcaaagccctagctatctgcagcgccgccaactgacaagcttatccctgctccctccggccaccccaacttgtcagtgtgtgggcgcagaagcaacgccgcacctgcttgcgcaagcaacaatggcggacggaggaccgaggaagacgaagaagcggagggggag

SEQ ID NO: 125811 - DNA, 2476 bp, Zea Mays
cctggtcgaaccagattaccagaagcccgacgcatttcgaagcctgagtgcccaacttcccccctccgcctgcccccgcgccgccccgtgaaatcaatcaatccaccgcagctcctcgccgccacgccggagcggagctacctgtgtggccgcgccgaactgcccgcttcccgctctctcctcattcgtcacctccgtctcgcgtccccgcgcttatcagagaggcaacagccgccgctgcgtgccccgttcgcggagctatactatacggggagaccggggtccccggcggccgccgcccgttcccaagctacccagggcggattggtttctgtgaatctctgaggcggagaaggccaccccagggccgaacacagtccgggaaccgattggggcgccgctcggccgacgatgtcgtcgagcaggttctcgccggcgctgcaggcgtccgacctcaacgacttcatcgccccatcgcaggactgcatcatctccctcaacaagaacacctcctcctcctcccgccgcccccagaacaaacagaaagaaactacagtgagctcaaaacctccagaagaagcagtcaagatttcactaaaagactgtctggcatgcagtggttgtataacatcggcagagacggttatgctggagaagcaaagcttgggtgacttcattgatcgtataaactctgataaagctgttattgtatctgtatctccccagtcaagagcatcactagctgcattctttggtctttctcagtcacaggttctcagaaaactgacttctttgttcaagtcgattggtgtaaaggctgtttttgacacaagctcgagtcgagatctatctcttattgaagcatgcaatgaatttgtttcacggtatcagagaagtcaaccatctagtggccaagaagctggagccaatcttccactgatttcatctgcatgtccgggttggatatgctatgctgaaaagactcttggttcatacatactaccttacatatcatctgtaaagagcccacaacaggcaattggtgcagccattaagcaccatgtggctgagagacttggtctaaagccgtatcatgtatatcatgtcactgtgatgccctgctacgacaagaagctagaggccgtccgggatgatttcactttctcagtagatggtaaagaagttacagaggtggattcagtactaacaactggtgaagtgttagacttgatacagtccaaatcgatcgatttcaagacagtagaggaatcttcattggacagattgttaacaaatgttgatgaggaaggccatctatatggggtttctggaggttctgggggctatgcagaaacaatctttcgctatgtagcacatgtaatttacaagagagaaatagagggtcctcttgacttcagaatcctccgaaattcagattttcgtgaaattacactggaggtggagggcaaacctgttttgaagtttgcactttgttatggattcaggaacctgcagaatgttgttaggaagattaagatgggaaaatgtgaataccacttcattgaagttatggcgtgcccttcaggttgtttgaacgggggaggtcaattaaagcctgttgaaggccaatctgccaaggaacttatccagcaattggagagtgtgtacacacaagatatattaatatctgatcctttccgtaaccctatcgcgaaaaaactatatgacgaatggctggggcaacctggttcagagaatgcaaagaagtatttgcacacagaatatcacccagtggtgaagagtgtggcctcacagttacagaactggtgagaggtttcttgttgcactgggagttcctatgttcttcaagagccaggagggacttgcacacagaacaaacatggcgacctgtccatgctaagcaaatattggtcatacaggaattgaaacttgtcccttttttgcattatagcgaagaagtttttgttagccctataggttttcagctgctttctagttaatgttgtacgctgccaacgggaaacaacctttaaactgcaatgtgtaaaatgaacggagtaggtcttgacgaccttttcattgtttgatactcgtcctttggcgtttttttttttgtctggaagatatgcgagctttgttggttatccatatctgtttttaaatgctcaaagaataaaggaactaaatttctaccctaaaaataatattatgttcttaccagcaaattttttatactataatcctctgcagtcatatttacctcatatcttaaccttatatcaactactttatacttactctgcttttttatttatcgtaatttagtatatttactctgtttttttatttatcgtgatttagtttaaaaagtaactagccgactataaatattcaataattattatattatttttaattctcattcatgcacatgtgcccgctagcttccatataa

SEQ ID NO: 125812 - DNA, 447 bp, Zea Mays
atgtcgtttgtgaactgcttgtatgtccaacatgcgtttccaaagtcaaccagcttgcattttagatcagccttcattgccatcatcttcttggcccctttgctaccgcgcctatctcgtgtcacccgcttcttagctccatcctgtctaggactaccctcatttgttgtacccagatctcctcggtcatctgacccatctgtgtccgcagatgccacagcactacttccttctgaagttgcagcaactgcacgtttagctttcttccggatcttcttcttctggttcttggtgaggccaccatttcctgattgtgcaggcaccttaggaggtggctcgtctgtcctcattgaaggcggaactaggggtacgcctgatttccgagggtcctttgtgggatcaatggtagacacaagcaatatgttctctggtttaaggtcagtgtga

SEQ ID NO: 125813 - DNA, 691 bp, Zea Mays
ctggagctggtgaacctccaggctccagccccatcaatttaactgtgaaccgtggaaaacagacataagcgacatatttgtcacctctgcagtttcacaaaaaataattttggtggtgcactctacgatagtcagcttctccccataattagataagagaaaagaatcatcgcttccattttttttcaaccctcagcaatcactacgtctacccaagaaaaccgactcctcttgtataccagtagtctacgtaaatgctctacctaggccacccaagcctttgaatcttacaatcaatcatcgccgcctccatcgtcagcatccatatcagcatcatcgtcgtcccctgcgtctgcatggtcggcagcatcatcgacattcatgagctcctgccttacaacttcttggttgatctcttccagtactcgagcattcagctctggcggaggacgcctttccaccttcatagtcttcaggttatcctctgcaaagaatgcggtcaatggcttggggacctgcaaaacgtgcgtagtttggactcatccagatgctttactctttcatgctaaggaaacaataatagcagcagtcacaaacacaccttgaataagcagtttcgctccttggcactctcaacaaggttgttccagtgtttatcttgcttcaatgttgaagcagaacctacaacctg

SEQ ID NO: 125814 - DNA, 349 bp, Zea Mays
agatatcagtccgtgtgctgctgcagaagaaagtgaaactgagaattctgcctcagtagcgggggcggttccacatcggacggatcgatgtgaagcatcagccgagctatgtcatccaacgatatcggttatctctgattatcccgtatatcttctcgacatatgctgtcaagtgttgcttgaaccgaagtgctggatattttgcctctaccatcgatgcatcagtgtcaggccttcccaccattccactgtatccactagctatgcctaagcctgatgatgtccgggcactctgaaatgaaagttatggggtgtaatctcatgtttacaatgtgaacatcagtactcg

SEQ ID NO: 125815 - DNA, 1085 bp, Zea Mays
cttttatgtgtttccccgtttcgttgttttcggttctcctttgcctttgtttcccttttctgttctttaggggttgagctctgaggttttcatacggggtttcatctctagcctaccccaacgtgcttgggacaaaaaggctttgttgttgttgttgttgttgttgtatatgaacggctatatcaagccaagcgcccaagccaatgtagcgctgcagataaggttttggattggaccaagcataggctcgacttgaaccaagaacaaggtacgtaggagcaatccaaagcacccattgcacgcttctgcattgcagaggtagtagcaaggaggatcagcaatgtcttcccctccgccgcctccgatgtccactctgcacaagtgctgctcgtcgccgtcgcagccatcacctaagctaccgcctaagctgcagcgagctccggacagcaggcacaggcctatctgcggcggagccaggctgtcggtcaccaggagagctcacgccgcctccctcctcctcctcggcctggcgggcggtgcggtgccggcgccggtcagggcggcggaggacgacgggagcagcggaggggagggcgtcctcggcgccatcaagtccatcttcgaccccaacgagacgaccaaggccgggaaggtgctgcccaaggcgtacctcaaggcggccagggaggtggtgcgcacgctccgcgagtcgctggaggaggacgacggtggcgacatggccaggttccgccgcaacgccgacgccgccaaggagtccatcagggcgttcctgggcgggtggaggggccagcaggccgtcgccgacgaggagtcgtacgtcgcgctggagaaggcgatcaggtcgctggccgagttctactccaaggcagggccgtccgcctcgcttccacaggacgtcaagaacaagatcctcgatgacctcagcgccgcagacgcctacctgtagattttgcttctcctcagggacattgtattgcattgcatgcaacgcacatctcaaacgatgatatggtttcgctctagtataatgacccgcaaaagctttccttcacaggaagaacaca

SEQ ID NO: 125816 - DNA, 1712 bp, Zea Mays
gtttgggctttccaagctttcaaccttccggactctcctacatgacactggtatctgggccccatgtgctaactgcctgtaaaccctaatcccgaatccctcccggcctcctccgtctcgcgctcgattcgaatccgagctccctatcctgctgctcctgctgttcccgctgcaatggaggacaacgcggtcgaagagcccgagttgagcggtgcggcggagttcgcgccggcgctcgtcgccgcccacccacacggcaactccgtcgccgtcgccatcgggcccgagctccgcgtgtttgatctcagggctggtcatccagtttcattgtcagatgattgtggtggccattctcattcagacgcaataagagctatctgcttcagtgtgagtggagctttgtttgcttcagctggtgatgacaaacttgtgaaggtttggaagactgattcgtggcgttgcatccagactataacttcggagaagagggtcagtgcagttgttattagcaacgatgacctgtatgtatcttttgcagataaatttggtgttgtttggttagtcactttgcgggaagatagtgcagagcaggtttcagttgataacaaacctgtgtcaattcttggtcactattgcagtatcatcactagcatgaagttttcgccagatggacggttcattgctactgctgatagggacttcaaaatacgagtcacattattcccaaagaatcctctaaaaggggcccatgaaatacagagcttttgccttgggcatacagactttgtatcatgcatcaccttcactagcatatctgaaaaccagagttttcttatatcaggaggaggtgattcaactgttcgcctgtgggactatgtaaatggatgtctccttgatacatttcaagccaaagataagatggcagaactcttaggaccaaatgaaacagatgatagcagcctagccattacagatatatgtccgagtaatgatggctcattggttgctgtagctattcaaagtttcagtggcataatgcttttagcatgtgatttggtaggaaagaagctatctttcctaaaggtgattacaatggaaaagagttatattcctactagcctagcatccagcccgtcctcggaactcctgtggactgtcatgggcgcatcaaacatgcccagccaggcttcctcccatctattgacccgtttaaggatcatcacgtgtttccaaaaggacagattatcttcttccgatgccggtcctgcaacccttgaagacggcgatgtaccccacggtgagaagctccttctggcactgcaaggaagcctcgacgtcgcgaagcaagaggaggtgctagcttcagtgctggctgcgctgaaggtttccatgcataagatgctggtgaagaagcactactcggaagagaggagggagcagaggaaaagaggtaggaacgacaagaagatgaagaactagctgaaaagaggatgaagaactagctcagcatgcggtatcgagttgctataacggttctcttttttgtttgtttgtttttttagagaaacaaaaacagatattactgtagtatcagaaaccgtaagagtaataaatttgccaggatttttcttttcttagtacgagcgtattgtaacagtaattcatgcttatcgctcccagtaaaactgcagcagcttttgcgtctccttgtc

SEQ ID NO: 125817 - DNA, 1701 bp, Zea Mays
gtttgggctttccaagctttcaaccttccggactctcctacatgacactggtatctgggccccatgtgctaactgcctgtaaaccctaatcccgaatccctcccggcctcctccgtctcgcgctcgattcgaatccgagctccctatcctgctgctcctgctgttcccgctgcaatggaggacaacgcggtcgaagagcccgagttgagcggtgcggcggagttcgcgccggcgctcgtcgccgcccacccacacggcaactccgtcgccgtcgccatcgggcccgagctccgcgtgtttgatctcagggctggtcatccagtttcattgtcagatgattgtggtggccattctcattcagacgcaataagagctatctgcttcagtgtgagtggagctttgtttgcttcagctggtgatgacaaacttgtgaaggtttggaagactgattcgtggcgttgcatccagactataacttcggagaagagggtcagtgcagttgttattagcaacgatgacctgtatgtatcttttgcagataaatttggtgttgtttggttagtcactttgcgggaagatagtgcagagcaggtttcagttgataacaaacctgtgtcaattcttggtcactattgcagtatcatcactagcatgaagttttcgccagatggacggttcattgctactgctgatagggacttcaaaatacgagtcacattattcccaaagaatcctctaaaaggggcccatgaaatacagagcttttgccttgggcatacagactttgtatcatgcatcaccttcactagcatatctgaaaaccagagttttcttatatcaggaggaggttcgcctgtgggactatgtaaatggatgtctccttgatacatttcaagccaaagataagatggcagaactcttaggaccaaatgaaacagatgatagcagcctagccattacagatatatgtccgagtaatgatggctcattggttgctgtagctattcaaagtttcagtggcataatgcttttagcatgtgatttggtaggaaagaagctatctttcctaaaggtgattacaatggaaaagagttatattcctactagcctagcatccagcccgtcctcggaactcctgtggactgtcatgggcgcatcaaacatgcccagccaggcttcctcccatctattgacccgtttaaggatcatcacgtgtttccaaaaggacagattatcttcttccgatgccggtcctgcaacccttgaagacggcgatgtaccccacggtgagaagctccttctggcactgcaaggaagcctcgacgtcgcgaagcaagaggaggtgctagcttcagtgctggctgcgctgaaggtttccatgcataagatgctggtgaagaagcactactcggaagagaggagggagcagaggaaaagaggtaggaacgacaagaagatgaagaactagctgaaaagaggatgaagaactagctcagcatgcggtatcgagttgctataacggttctcttttttgtttgtttgtttttttagagaaacaaaaacagatattactgtagtatcagaaaccgtaagagtaataaatttgccaggatttttcttttcttagtacgagcgtattgtaacagtaattcatgcttatcgctcccagtaaaactgcagcagcttttgcgtctccttgtc

SEQ ID NO: 125818 - DNA, 1714 bp, Zea Mays
gtttgggctttccaagctttcaaccttccggactctcctacatgacactggtatctgggccccatgtgctaactgcctgtaaaccctaatcccgaatccctcccggcctcctccgtctcgcgctcgattcgaatccgagctccctatcctgctgctcctgctgttcccgctgcaatggaggacaacgcggtcgaagagcccgagttgagcggtgcggcggagttcgcgccggcgctcgtcgccgcccacccacacggcaactccgtcgccgtcgccatcgggcccgagctccgcgtgtttgatctcagggctggtcatccagtttcattgtcagatgattgtggtggccattctcattcagacgcaataagagctatctgcttcagtgtgagtggagctttgtttgcttcagctggtgatgacaaacttgtgaaggtttggaagactgattcgtggcgttgcatccagactataacttcggagaagagggtcagtgcagttgttattagcaacgatgacctgtatgtatcttttgcagataaatttggtgttgtttggttagtcactttgcgggaagatagtgcagagcaggtttcagttgataacaaacctgtgtcaattcttggtcactattgcagtatcatcactagcatgaagttttcgccagatggacggttcattgctactgctgatagggacttcaaaatacgagtgtcacattattcccaaagaatcctctaaaaggggcccatgaaatacagagcttttgccttgggcatacagactttgtatcatgcatcaccttcactagcatatctgaaaaccagagttttcttatatcaggaggaggtgattcaactgttcgcctgtgggactatgtaaatggatgtctccttgatacatttcaagccaaagataagatggcagaactcttaggaccaaatgaaacagatgatagcagcctagccattacagatatatgtccgagtaatgatggctcattggttgctgtagctattcaaagtttcagtggcataatgcttttagcatgtgatttggtaggaaagaagctatctttcctaaaggtgattacaatggaaaagagttatattcctactagcctagcatccagcccgtcctcggaactcctgtggactgtcatgggcgcatcaaacatgcccagccaggcttcctcccatctattgacccgtttaaggatcatcacgtgtttccaaaaggacagattatcttcttccgatgccggtcctgcaacccttgaagacggcgatgtaccccacggtgagaagctccttctggcactgcaaggaagcctcgacgtcgcgaagcaagaggaggtgctagcttcagtgctggctgcgctgaaggtttccatgcataagatgctggtgaagaagcactactcggaagagaggagggagcagaggaaaagaggtaggaacgacaagaagatgaagaactagctgaaaagaggatgaagaactagctcagcatgcggtatcgagttgctataacggttctcttttttgtttgtttgtttttttagagaaacaaaaacagatattactgtagtatcagaaaccgtaagagtaataaatttgccaggatttttcttttcttagtacgagcgtattgtaacagtaattcatgcttatcgctcccagtaaaactgcagcagcttttgcgtctccttgtc

SEQ ID NO: 125819 - DNA, 1108 bp, Zea Mays
tcctttcatgtcatgtataaccatgctttatcgtttgcttgggattgcagaagttttcgccagatggacggttcattgctactgctgatagggacttcaaaatacgagtcacattattcccaaagaatcctctaaaaggggcccatgaaatacagagcttttgccttgggcatacagactttgtatcatgcatcaccttcactagcatatctgaaaaccagagttttcttatatcaggaggaggtgattcaactgttcgcctgtgggactatgtaaatggatgtctccttgatacatttcaagccaaagataagatggcagaactcttaggaccaaatgaaacagatgatagcagcctagccattacagatatatgtccgagtaatgatggctcattggttgctgtagctattcaaagtttcagtggcataatgcttttagcatgtgatttggtaggaaagaagctatctttcctaaaggtgattacaatggaaaagagttatattcctactagcctagcatccagcccgtcctcggaactcctgtggactgtcatgggcgcatcaaacatgcccagccaggcttcctcccatctattgacccgtttaaggatcatcacgtgtttccaaaaggacagattatcttcttccgatgccggtcctgcaacccttgaagacggcgatgtaccccacggtgagaagctccttctggcactgcaaggaagcctcgacgtcgcgaagcaagaggaggtgctagcttcagtgctggctgcgctgaaggtttccatgcataagatgctggtgaagaagcactactcggaagagaggagggagcagaggaaaagaggtaggaacgacaagaagatgaagaactagctgaaaagaggatgaagaactagctcagcatgcggtatcgagttgctataacggttctcttttttgtttgtttgtttttttagagaaacaaaaacagatattactgtagtatcagaaaccgtaagagtaataaatttgccaggatttttcttttcttagtacgagcgtattgtaacagtaattcatgcttatcgctcccagtaaaactgcagcagcttttgcgtctccttgtc

SEQ ID NO: 125820 - DNA, 1198 bp, Zea Mays
gattttgctgctgcgcctgccaagcacctgtcgacagcaaatctaccctgccttggcgccaacagaccgccggaatctaccgctgccgtgcgtgggccgtgggctccaacgccagaccagcggatggccggcggtaacacacagcacaaggagctcgcggccgatcgagctgcgttgcgagggcagagaaagagatgggcagtgcagtgacgaagataaggacccgccctttggaagtgcacacacacaaaccaacactgacatcacagcgggttcaggggaggaggagagggagagacttctttaagatcaccacaccctcccctcacccctcctcctcattgtcatctctccctctctctctctctctctccattgcactcgctctatactaggtccaaggtaactagcaattgagctattaaattgttgcttgaggtgcagcagaaaggcacactgctacaaacaagctgatcagctgatgcccggtggcttcaggactttgccaaggttagcgaggtcccgccccattttgcttctcccctgggcttgcggttgcgtttgagtgcacccctgaggctttgattgggccctcccgctccgcacttaagctctccgcctcgtccatggcgtcgcagccctcaagacttgctgtctcttggtagctgccgcttctagctactccacctaactgaaagagcgtatagttagttggtcttggattcttggtccggtgctgccgccgccatgttcctgagatcgaagatccaggagatgatcctgcggaggagatcgaggtcgatgaacagcgccggcgcgcagaggggccacgtccccgatcaggccccgagctcgtcgaccgttccgtgcgacgatgacagtgccggcgccggcgtcgtcgccttcgccaggagccccgcggcggagcccgagcccgagacggcctcctccctgagcccgacctccgtgctggacgcggcggcggcctacgtgccacgcacgggcaagcggcgccgcccgtggcgcgcgcgggacaacaacggcggcctcgcggacgtgctggactgcaccgatgaccagcagcaggagcggatcgtcctcgcggctacgtcgtcctcgcgctctctgctcaggtcgtgctccctggaccgccgcgtcgagttcggcgtcaagaacaagagctcgtggctgcccctcc

SEQ ID NO: 125821 - DNA, 1179 bp, Zea Mays
gattttgctgctgcgcctgccaagcacctgtcgacagcaaatctaccctgccttggcgccaacagaccgccggaatctaccgctgccgtgcgtgggccgtgggctccaacgccagaccagcggatggccggcggtaacacacagcacaaggagctcgcggccgatcgagctgcgttgcgagggcagagaaagagatgggcagtgcagtgacgaagataaggacccgccctttggaagtgcacacacacaaaccaacactgacatcacagcgggttcaggggaggaggagagggagagacttctttaagatcaccacaccctcccctcacccctcctcctcattgtcatctctccctctctctctctctctctccattgcactcgctctatactaggtccaaggtaactagcaattgagctattaaattgttgcttgaggtgcagcagaaaggcacactgctacaaacaagctgatcagctgatgcccggtggcttcaggactttgccaaggttagcgaggtcccgccccattttgcttctcccctgggcttgcggttgcgtttgagtgcacccctgaggctttgattgggccctcccgctccgcacttaagctctccgcctcgtccatggcgtcgcagccctcaagacttgctgtctcttggtagctgccgcttctagctactccacctaactgaaagagcgtatagttagttggtcttggattcttggtccggtgctgccgccgccatgttcctgagatcgaagatccaggagatgatcctgcggaggagatcgaggtcgatgaacagcgccggcgcgcagaggggccacgtccccgatcaggccccgagctcgtcgaccgttccggcgccggcgtcgtcgccttcgccaggagccccgcggcggagcccgagcccgagacggcctcctccctgagcccgacctccgtgctggacgcggcggcggcctacgtgccacgcacgggcaagcggcgccgcccgtggcgcgcgcgggacaacaacggcggcctcgcggacgtgctggactgcaccgatgaccagcagcaggagcggatcgtcctcgcggctacgtcgtcctcgcgctctctgctcaggtcgtgctccctggaccgccgcgtcgagttcggcgtcaagaacaagagctcgtggctgcccctcc

SEQ ID NO: 125822 - DNA, 1784 bp, Zea Mays
gattttgctgctgcgcctgccaagcacctgtcgacagcaaatctaccctgccttggcgccaacagaccgccggaatctaccgctgccgtgcgtgggccgtgggctccaacgccagaccagcggatggccggcggtaacacacagcacaaggagctcgcggccgatcgagctgcgttgcgagggcagagaaagagatgggcagtgcagtgacgaagataaggacccgccctttggaagtgcacacacacaaaccaacactgacatcacagcgggttcaggggaggaggagagggagagacttctttaagatcaccacaccctcccctcacccctcctcctcattgtcatctctccctctctctctctctctctccattgcactcgctctatactaggtccaaggtaactagcaattgagctattaaattgttgcttgaggtgcagcagaaaggcacactgctacaaacaagctgatcagctgatgcccggtggcttcaggactttgccaaggttagcgaggtcccgccccattttgcttctcccctgggcttgcggttgcgtttgagtgcacccctgaggctttgattgggccctcccgctccgcacttaagctctccgcctcgtccatggcgtcgcagccctcaagacttgctgtctcttggtagctgccgcttctagctactccacctaactgaaagagcgtatagttagttggtcttggattcttggtccggtgctgccgccgccatgttcctgagatcgaagatccaggagatgatcctgcggaggagatcgaggtcgatgaacagcgccggcgcgcagaggggccacgtccccgatcaggccccgagctcgtcgaccgttccgtgcgacgatgacagtgccggcgccggcgccggcggcagcaggagcgcgggtgcgcgtgccctgttcgcctccccgaggatgctgcactcgtcctccctgcccgccggcgccggcgccggcgtcgtcgccttcgccaggagccccgcggcggagcccgagcccgagacggcctcctccctgagcccgacctccgtgctggacgcggcggcggcctacgtgccacgcacgggcaagcggcgccgcccgtggcgcgcgcgggacaacaacggcggcctcgcggacgtgctggactgcaccgatgaccagcagcaggagcggatcgtcctcgcggctacgtcgtcctcgcgctctctgctcaggtcgtgctccctggaccgccgcgtcgagttcggcgtcaagaacaagagctcgtggctgcccctccgcggccgcggcgagcccgcggcgccggcgccggccgacccgcgcgagatcgggccgtcgtcggaggactacacgtgcgtcatctcccgcgggcccaacccgaggacggtgcacatcttcggcgaccgcgtcgtggaggcggaggcggagacggagacggagagctcgccgcggccgatcagtctgccgacgcgaacggatccccgtccacgcacgcgtagcctgatgagtgatgacgccgcctagctaggtaaagaaaccgaatttaattagctgagtgctattattgagttcaggcagccttgatgttgctgtattgtattggttgctccgatccgttccatcgtctgatcagaaagatagatagagttgatcattcataggtgttttcttgatcagatgatgaactagacgttttgtccaggttgagctgaagctgtgatataaatttgatcatgttgttactaggggggaaaaaaagaagaagaagtgca

SEQ ID NO: 125823 - DNA, 1352 bp, Zea Mays
acacaaaccaacactgacatcacagcgggttcaggggaggaggagagggagagacttctttaagatcaccacaccctcccctcacccctcctcctcattgtcatctctccctctctctctctctctctccattgcactcgctctatactaggtccaaggtaactagcaattgagctattaaattgttgcttgaggtgcagcagaaaggcacactgctacaaacaagctgatcagctgatgcccggtggcttcaggactttgccaagagcgtatagttagttggtcttggattcttggtccggtgctgccgccgccatgttcctgagatcgaagatccaggagatgatcctgcggaggagatcgaggtcgatgaacagcgccggcgcgcagaggggccacgtccccgatcaggccccgagctcgtcgaccgttccgtgcgacgatgacagtgccggcgccggcgccggcggcagcaggagcgcgggtgcgcgtgccctgttcgcctccccgaggatgctgcactcgtcctccctgcccgccggcgccggcgccggcgtcgtcgccttcgccaggagccccgcggcggagcccgagcccgagacggcctcctccctgagcccgacctccgtgctggacgcggcggcggcctacgtgccacgcacgggcaagcggcgccgcccgtggcgcgcgcgggacaacaacggcggcctcgcggacgtgctggactgcaccgatgaccagcagcaggagcggatcgtcctcgcggctacgtcgtcctcgcgctctctgctcaggtcgtgctccctggaccgccgcgtcgagttcggcgtcaagaacaagagctcgtggctgcccctccgcggccgcggcgagcccgcggcgccggcgccggccgacccgcgcgagatcgggccgtcgtcggaggactacacgtgcgtcatctcccgcgggcccaacccgaggacggtgcacatcttcggcgaccgcgtcgtggaggcggaggcggagacggagacggagagctcgccgcggccgatcagtctgccgacgcgaacggatccccgtccacgcacgcgtagcctgatgagtgatgacgccgcctagctaggtaaagaaaccgaatttaattagctgagtgctattattgagttcaggcagccttgatgttgctgtattgtattggttgctccgatccgttccatcgtctgatcagaaagatagatagagttgatcattcataggtgttttcttgatcagatgatgaactagacgttttgtccaggttgagctgaagctgtgatataaatttgatcatgttgttactaggggggaaaaaaagaagaagaagtgca

SEQ ID NO: 125824 - DNA, 1036 bp, Zea Mays
gcaaggagtacgaccccccgcccccgttccgtacccacgcgattacgcgattagccgagtcctttattgcaaaaacacgcatcacctccgtcgccatcccgatccctgataccacgctgagggcggtggtattaggagattagcgatggcgaggtggcggccggcggcgctgctggtagtggctctggcggcggttctatcggcggcgtggcgggcggatgcgctatcggttacggtgaccgacaccgagtgcatccacgagttcgtgccctatgagggcgacaccgtgtccgggaacttcgtcgtcgtcgaccacgacatcttctggagctccgaccacccaggaatcgacctcacggtaacgtcaccaggtggcaacactgtgtacacattgaagggaaaatctggtgagaaatttgagtttaaagctccaagaggtggcatgtataagttctgcttccataacccatatggagcacctgaaactgtttctttctacatccatgttgggcacatacccaatgagcacaatctggcgaaagatgagcacttggaccctatcaacgttaaaatcgcggagctgaaggaagcattagaatccgttaccgccgagcagaagtacctaaaagcacgcgaagctcgtcaccgacacaccaatgagagcaccagaaagcgtgtcatgttctatacgatggcggagtacctggctttcatggctgctagcgcgttgcaggtcctctacatccgccgcttgttcagtaaaaatgtgggatacaacagagtgtaggatagaaatctacttcaaaggcgacggtggaagcaccttatatggtcggaacgggaaacattctctgccagtttgacaaattgtagttctgcaccctctttttttttgttagtttataagaaacactttaatttatcatcatgtacttttagcaacacttgtggtatgttaagtgcatttggtgctgaacattgttccataactgatcttcagaggattgttatgaaagttagtattgttctgctaccg

SEQ ID NO: 125825 - DNA, 840 bp, Zea Mays
atgcagcagccagcaaaggcgttggccatgctgtgcctgcaggcgcagcaggtggccggcttgcccgacgccgcggagggccgccgcatccagctgagtaccacttgtactcttgctgcggcagtgtgcagggcgggcgtggcagacttccacggtcaggtgctcctcctgcactgcgcaaccgtcaacagcatcgacgctgtcgcggtcacggtcaccatggacgacaccttcaccgaccccgccgcagcagctcgtattattgccactgtcaacctcgacctggcagggcagctgcgtcgtccctcccccgtcgtcctcagagtcggcggaggcgccgtcggtgccatgctctctctcactctgcaccacaggctgatggtcaccaccatcacaggcacaggctgcagcctgtgggtgcccctcgccgccgccggctgctgcctaccagtaccagtaccagggctgcggacgacgacgcggcagagacgtcagcgtcagcatggccgccgcccagacactgcggacgccgactgctcatcgtcgtcctctggcttcatcactatcgagaaaggcaccatctccagacggcgcccgccgtccgactacctgctcaccaccgacgacgacgaacgagatggacatgaacagcaagcggccgggctgcccccaaccacgacaacgcccacctgctgctggtccttggacgacgatgacgacaccaaggtggaagacgacttcttggccatgctagtgctagaatacgacgacgacgtggaccagctggacgcgctcatcaaggacgccgaggccgaactcgctgccgtatccatcacctag

SEQ ID NO: 125826 - DNA, 438 bp, Zea Mays
agacagtttctgttagaggaggaaaaagaggatgatgaactcttcttagtaattgtccctgctgttctcttggccatgcaagaagagaaaaggtcagtccgtaccagaagtacgtcagcacatggaagcgcgaaaaagcggaagaaaaatcatgttgcaagtgttctggaagactatttggagcacaggaagaagcaaacggagaagactgtagaggcgttacttgagatgaagagtcgtgaagaggagtactctattgagaggtgtcttgacatagttgatgcattggaggagttgacggatgaggagaaggccgctgcagcagaggtgttcaagaatgaagtgaatcgggagatgtttgtgattgcgaagcaaaaaattccaaatgtggggttgatttggcttcggaggaagataagtaggattgcatctacctga

SEQ ID NO: 125827 - DNA, 1993 bp, Zea Mays
tcccatccaggttcacgcgcacccgcctcccctcttgccttttcctaatcaaatcacccacgcagccactgcgaaggtccggtggtggccgcctttcacaaaaccaaacaaaacgcacccgcaatataaagaggagaccaaggcgtgaagtggaggaggcagaggtggacgaggcgcgccaccgcccgagccgaatcgagctgcagaaaccaccttggcatggcgacacaggccgctttcctcgcagggttctcgcagctcgccgcgcagccgggccgcgaccgcgccgtggcggtggcggtggcgccggcgccgggcccggcccgggtggccgttgcggcggtgggtagcgccaagttgggcgtgaaggcggggacgtccaggaccgcggcggtggcgcgcctcggggtgcggtgccgggccagcctgatcgagcccgacggcgggcggctggtggacctggtggcgcccgaggagggcgggcggcgcgcggcgctgcggcgggaggcggcggagctgccgcaccggctgcgcttgggccgcgtcgacaaggaatgggtccacgtcctcagcgaagggtgggcgagcccgctgcaagggttcatgcgcgagcatgagttcctccaagcacttcatttcaatgccatccgcggccaggatggcaggatggtcaacatgtccgtccccatcgtgctctctgtcggggacgcacagcgaagggccatccaggccgacggcgccacgcgcgtcgcgctcgttgacgagcgcgaccgccccatcgccgtcctcagcgacattgagatctataagcataataaggaagaaagggtagcacggacatgggggacaactgcacctggattaccttatgtcgaggaggcaattaccaatgctggtgactggttggttggtggggacttggaggttatagaaccaatcaagtacaacgatggtctagatcagtatcgcctgtctccagcacagctgcgtgaagagtttgccaggcgcaatgctgatgcagtatttgcctttcagcttcgcaatcctgtacacaatgggcatgctcttcttatgaccgacacacgcaaacgtctccttgagatgggttataaaaaccctgttcttctgctccatccactgggaggattcacaaaagcagatgatgtgcctcttagttggagaatgaagcaacatgagaaggttcttgaggaaggtgtcctcaacccagaatcaactgttgttgcgatctttccctctccaatgcattatgctgggccaactgaggtgcagtggcatgctaaggctcgtattaatgctggtgcaaatttctatattgttggaagggatcctgctggtatgagccatcccacggagaaaagggacctctatgatgctgaccacgggaagaaggttttgagcatggctcctggcctcgagaggctcaacatccttcctttcaaggtggctgcatatgacacaaagcaaaagaaaatggatttcttcgatccatcaaggaaagatgatttcctcttcatctctggcacaaagatgcgcactcttgccaagaaccgcgagagtcccccggatggttttatgtgcccgggtggctggaaagtgctcgttgaatactatgacagcttggtgccatccgagggcagcagcaagctgcgcgagccagttgcagcctgaaatatgggaagcgcttcagataaggaaccgtactatgtcagcacaagcggttctttgcgacatagaaccgttgttgtatgattgtatactggcttgtaagacttaaaaacactgggcttgatttggacgttaatgtgtgcattgtaactggtgtgccctatctgctgacagtgttgcacatcacatgtttggtgttaataaggacagactatgtatcatctgccagattgttgtacatatacattgtggtgatataaacatgaagctgtcttctgctattttataaccagttctttttaagcat

SEQ ID NO: 125828 - DNA, 1974 bp, Zea Mays
ccgcctttcacaaaaccaaacaaaacgcacccgcaatataaagaggagaccaaggcgtgaagtggaggaggcagaggtggacgaggcgcgccaccgcccgagccgaatcgagctgcagaaaccaccttggcatggcgacacaggccgctttcctcgcagggttctcgcagctcgccgcgcagccgggccgcgaccgcgccgtggcggtggcggtggcgccggcgccgggcccggcccgggtggccgttgcggcggtgggtagcgccaagttgggcgtgaaggcggggacgtccaggaccgcggcggtggcgcgcctcggggtgcggtgccgggccagcctgatcgagcccgacggcgggcggctggtggacctggtggcgcccgaggagggcgggcggcgcgcggcgctgcggcgggaggcggcggagctgccgcaccggctgcgcttgggccgcgtcgacaaggaatgggtccacgtcctcagcgaagggtgggcgagcccgctgcaagggttcatgcgcgagcatgagttcctccaagcacttcatttcaatgccatccgcggccaggatggcaggatggtcaacatgtccgtccccatcgtgctctctgtcggggacgcacagcgaagggccatccaggccgacggcgccacgcgcgtcgcgctcgttgacgagcgcgaccgccccatcgccgtcctcagcgacattgagatctataagcataataaggaagaaagggtagcacggacatgggggacaactgcacctggattaccttatgtcgaggaggcaattaccaatgctggtgactggttggttggtggggacttggaggttatagaaccaatcaagtacaacgatggtctagatcagtatcgcctgtctccagcacagctgcgtgaagagtttgccaggcgcaatgctgatgcagtatttgcctttcagcttcgcaatcctgtacacaatgggcatgctcttcttatgaccgacacacgcaaacgtctccttgagatgggttataaaaaccctgttcttctgctccatccactgggaggattcacaaaagcagatgatgtgcctcttagttggagaatgaagcaacatgagaaggttcttgaggaaggtgtcctcaacccagaatcaactgttgttgcgatctttccctctccaatgcattatgctgggccaactgaggtgcagtggcatgctaaggctcgtattaatgctggtgcaaatttctatattgttggaagggatcctgctggtatgagccatcccacggagaaaagggacctctatgatgctgaccacgggaagaaggttttgagcatggctcctggcctcgagaggctcaacatccttcctttcaaggtggctgcatatgacacaaagcaaaagaaaatggatttcttcgatccatcaaggaaagatgatttcctcttcatctctggcacaaaggtaagttttcacaactgctgggatgttgtgattttcagcaccaatcctttgtcgtcactagtcaaatcctaactaatcatgccttattcagatgcgcactcttgccaagaaccgcgagagtcccccggatggttttatgtgcccgggtggctggaaagtgctcgttgaatactatgacagcttggtgccatccgagggcagcagcaagctgcgcgagccagttgcagcctgaaatatgggaagcgcttcagataaggaaccgtactatgtcagcacaagcggttctttgcgacatagaaccgttgttgtatgattgtatactggcttgtaagacttaaaaacactgggcttgatttggacgttaatgtgtgcattgtaactggtgtgccctatctgctgacagtgttgcacatcacatgtttggtgttaataaggacagactatgtatcatctgccagattgttgtacatatacattgtggtgatataaacatgaagctgtcttctgctatttt

SEQ ID NO: 125829 - DNA, 1506 bp, Zea Mays
aatataaagaggagaccaaggcgtgaagtggaggaggcggcggagctgccgcaccggctgcgcttgggccgcgtcgacaaggaatgggtccacgtcctcagcgaagggtgggcgagcccgctgcaagggttcatgcgcgagcatgagttcctccaagcacttcatttcaatgccatccgcggccaggatggcaggatggtcaacatgtccgtccccatcgtgctctctgtcggggacgcacagcgaagggccatccaggccgacggcgccacgcgcgtcgcgctcgttgacgagcgcgaccgccccatcgccgtcctcagcgacattgagatctataagcataataaggaagaaagggtagcacggacatgggggacaactgcacctggattaccttatgtcgaggaggcaattaccaatgctggtgactggttggttggtggggacttggaggttatagaaccaatcaagtacaacgatggtctagatcagtatcgcctgtctccagcacagctgcgtgaagagtttgccaggcgcaatgctgatgcagtatttgcctttcagcttcgcaatcctgtacacaatgggcatgctcttcttatgaccgacacacgcaaacgtctccttgagatgggttataaaaaccctgttcttctgctccatccactgggaggattcacaaaagcagatgatgtgcctcttagttggagaatgaagcaacatgagaaggttcttgaggaaggtgtcctcaacccagaatcaactgttgttgcgatctttccctctccaatgcattatgctgggccaactgaggtgcagtggcatgctaaggctcgtattaatgctggtgcaaatttctatattgttggaagggatcctgctggtatgagccatcccacggagaaaagggacctctatgatgctgaccacgggaagaaggttttgagcatggctcctggcctcgagaggctcaacatccttcctttcaaggtggctgcatatgacacaaagcaaaagaaaatggatttcttcgatccatcaaggaaagatgatttcctcttcatctctggcacaaagatgcgcactcttgccaagaaccgcgagagtcccccggatggttttatgtgcccgggtggctggaaagtgctcgttgaatactatgacagcttggtgccatccgagggcagcagcaagctgcgcgagccagttgcagcctgaaatatgggaagcgcttcagataaggaaccgtactatgtcagcacaagcggttctttgcgacatagaaccgttgttgtatgattgtatactggcttgtaagacttaaaaacactgggcttgatttggacgttaatgtgtgcattgtaactggtgtgccctatctgctgacagtgttgcacatcacatgtttggtgttaataaggacagactatgtatcatctgccagattgttgtacatatacattgtggtgatataaacatgaagctgtcttctgctattttataacc

SEQ ID NO: 125830 - DNA, 663 bp, Zea Mays
atggcatcgtggatgacctcctccaggcgccggatctcgacctccccctcggtcgcatctgccttcctccgtggcctcgctaccaaggtcaagatcatcgagatcgacctcaccgaggaagacggggaaggtgggaagggcgacgtctccggtgttgaaggggatcgggtgtccggtgttgaaggggccgcgactgcaagattggcggggggagggcgagggcggcgccatggatctgggcttggaccgcgctgccgacgaggtttctgcgcgaccggcgggaccaaggcggaggaggagcagagcgacagccagctcgagcaggagcaggaggtcccctgcgtgccggacatcttcgtgcaaaaggtgcccgtgtcccgccgctcttctcccgccaaggcggcagagaagccgacgccaccgcccgacgtcgacgaggccaccacggcgcccgtgtcccgccgctcgccagacacgccaacctcgcgcggcgagaaggctaaggcagacgtgttcccgactccgatcgaggacatcgacatggagttggattggaggcggacaaagcggggaagttcgcaacgggccagacacggtcgccatatccatatacgatgccagcgctacgggaaaaaatcgaagtgcctgagcgtgaaggcctga

SEQ ID NO: 125831 - DNA, 455 bp, Zea Mays
aatagcgattacagagaattatagtctaggaaggaagaacatcgtgaggattaaggataggagaagaatgtcgaagccactctacaagggtctagaagaatctagagggggaggtagaggatacatagaagagagtaaactggagaaggaagataacagtagcactctgaatattcgatgtctatcctcctgaccccgccctgctcttttcaacttgggctggtatagaccgtttgtgctcacattccctgacattctccccttcttaaaaatcggcttgcccccaagccgatacatggcatcaattccaccgagatcccattgcaagtgcaagcaatttatccaaataataccagtgtgctatcctttgatcggctgaacatcgtgatcaccaggatccaaaacaaagatggagaaattgccttggtcaccgaactcattggtcttctgcaacc

SEQ ID NO: 125832 - DNA, 1585 bp, Zea Mays
tttgctaaaggaagctaatagttaaattattagccccactgtgctagcaagctggcctctctgcccatgaatacagaatccaaacgaagaaaacatggaacaaaaataattggctccaacctccaactgggctcactcatgctccaactaactgctaagttgcaaccccactcccatttctatctctctcctcctgccatcaccctagaataggagcatttacctccgctttctctctctccctctcttccatcctcatgctccctctatatatacacatctccaccctgttgctgggtcctctcttccacccactgcaaccccaaatctctccttcctcacacacgcgaagctgagagaccaaagaagaagaagaaggagcgagcaagcagaaagttagctagctgctagcgtggaagtgcccaaggcgagagagagagacaagcctaggacggccgcgccaggctagccagccagctgctagctcctgcggacgagccgatggctggcgccgacgtcgacgtcgggacggagctccggctcggcctgccgggaggaggcgccgcggcggccaagaaggacaccatcgacctcaagctgaagctgcccaccgccggcatggaggaggcggctgccgccgccaggccggagccggcagccgagaaggccaagaggcccgccgaggcgccggccgccgatgccgagaagccacctgcacccaaggcacaggccgtgggctggccaccagtccggtcgtaccgcaggaacgccatgaccgtcgtccaggccgtgaggagcaagaaggaagaggaacctgagaagcagcaacagcccgctgccgccaacgccttcgtgaaggtcagcatggacggcgcgccctacctgcgcaaggtggacctgaagacgtacggcagctacaaggacctctccgctgcactcaagaagatgttcggcaccttcgtcaccgcaactgggaacagcatgaacgaggggagattggttgatccggccggcgatgctgatgatgtggtcactacttacgaagacaaggatggtgactggatgctggtcggcgacgtcccgtgggagatgtttgtcgactcatgcaagcgtctgaggatcatgaagagttctgaagccataggtcttgcaccaagaacgaaggataagtgcaagaacaagagctgaagaagatgcagtgttaaagatgttgcccattgtatcagaagaatggtccccttgcagtgcgctgccgttttttttttcctactagaaatataacgcgttttaattactagttggagggagacctgtcttgttcaactcgttcatggaccagaagcaataatatatccgtgtgtagctggattggtgttatgtcatgtcccctaccgtgtctcccagaatctacttggtgattttattccagtgttgttaatcaagtttatgtgattgttaagtaaagggcatcaatgggactattattatttattattatggtacctgtatgtggtcaagtgggtggaacaggccatgtgccaggtgatgggggaatccattagtataactctagtctatttgagtt

SEQ ID NO: 125833 - DNA, 315 bp, Zea Mays
atggttgatgaactgcaagatataaagagtgtctacgtgaccacttatcaggccttcatatctgttcaagacatcggagatgacccaatgctccacgaggctgaggcgcgtcttgcggcgcacggtgaggagcagcttctcgtcgacgcgaagacaatggcggcgggagcgggcgtagcagtcgacgtaggtggaccaagcgagaatcgggctatgcttttgggtgcggttgagataaaagtggaagagacagacagaggagaggatggtgggttgatagaagaaaaagtgagggagatttgtgtaaaattttga

SEQ ID NO: 125834 - DNA, 1764 bp, Zea Mays
gcgcaccccgcgcctcgccggagctccgccgccgccgctgtccgattccgcagcagagaagccaccaacaccgccgcacgtccgtggattgtcctcagatacgcctccccgcgccgcgtcttcctgaggccgaggctccgacgcagccgaacccgtgcatcccacgggtccggaggaggaagaggaggagggaggagctgctgctcggcggccgcccaggacgagcctaagggatgagggccgcgaggcggttggcccgcgtgcggcgggaggcgcttgccgcgtgcatgacgtgcccgctctgccggggacttctcagggaggccaccgccgtagccctgtgcctccacacattttgccgggactgcattgtggagaaaataaatgatgacgacgctgactgttgcccagtctgcaacattgatcttggctgcgatcctgaagagaaactcaggcctgaccacaaccttcaagatatcaggaataaggtatttccaattaaaaagataaatgctgattctccaaagtctctaacaacattgccagcaaagagaaaacaaaggtccctttcttccttggtggttgacactccaaggagcgtagtaaagcggactggtttgactggaaagagaaccaaagctaaaagaaagacagtagcttctagtgcagcttctcccatcaataatggaaccatgcaattaccaactaaatttgaaaatcgagatcagaagactgataaaagttgtgcatcacaatctaccaatgtagcatcagctgcaaacaaaactgaaaatcaagatctaaagaagaccaggaaaacttcggcaaaacagtcgaccagggcagcaacatcagcaaacagaaaacagcaaaatacagatgtagatgtttcaagtaaaccatcttctgaaaatagaaagaatggcacgacagctgacaaggatgagctccgtaagtattcaaaaatacctaggtcaactcccaaaatccatgctgtcaatgaagagcaaataaaaaagaaagaggacgaactccctacaaggaaagcagaggcagacaacaaagtggttattcctgggacaactgtgagagaacattcaaataactcaaatcttaaagagaaagataacggcagttctccagaatcttcaccattgaaagacaaaacaacagcagacgatgattcgtaccaatgtttgcttggttctgcaagcgatgtgcgtgatccaataactactccggtgtggttcttgttaatttctttgcctaaccagaaagaagatccacaactgcctcagttatcaaagagttacatgagaatcaaagaccgcagtttgcagatttcttctgtacagaggtacatcatgaagaagctggatctagctaatgaaaacgaggtggagatcatctgccacggcgagccaatctgcccctcgagcacgctgcatgggctgatggaactgtggcatcgtagacagccggcagagcccgtggaggcattggtgggtgcgccagccaaggagttcgtcatagagctgggcttccgtcgccgccgccacccttatttggcgcccggcaccgtcgcggtgcctccggagccctcctgatcagcttgcaagggtggctccgctccgctgtggagcctgagctgcactcttccgtccgtcgtccgctcttgtcctcggtcctccatccccaaccagtttagccgtgtatgataaaacagttttcttttactcatttcagacttttcttttactcatt

SEQ ID NO: 125835 - DNA, 112 bp, Zea Mays
atttgtccaaacttactattttaagaacaaaagcttactcttacaaaagtagtaaacctgactatttatgtggatatttcggctttcttgatatcatgggagatgatttgat

SEQ ID NO: 125836 - DNA, 859 bp, Zea Mays
acgcgtttcggccgatcttgtccgcggtctgcctccctgacttttgttggcgctagccgtgtcgaaccgaaagtcccaagtcccacccaccaaacccaacacatcgtgtctgcgttctccccctttacgccggcgagtgttcgtcgctggctcgctgcagcggggagaatagaggcagagagcagggatgagcgacgagcgggtgaaggcggaggcgctgcagatcctgggcctattccaggtgctcccccgcctcgtcgtcttcgacctcgactataccctctggcccttctactgcgagtgccggtccaagagggattcgccgagccttttcaggcacgccaggggcatcatgtacgccctcaaggagaaggggatcgacatggcgattgcttctcgctcccccaccccggacatagccaaggtgttcctcgacaagttggagttccagtccatgttcgtcgcccaagtaagaatccttcctcagccggccgtaattttcgtgtgggtcgttgtttccctttctgcatataagaattcattgatgcaacatagttcaggcaaattattcttataaaacaggaccatcgtccatcgataacatatgaaactgaaaatggccctttatgtggctatatgactatatcgctatatgtaagcaaataacgatgcgaacggatggtgtgttacttgtgcaagttttttagggttactgggttagtttcatcgagcacattgataatggacacattgtagcgaaagaggctctagtcgagttggttaggtggttttggtagcactcttcgagttctcggttccactctatgtgagtgcgaatttcagaatatgcttaaaaaat

SEQ ID NO: 125837 - DNA, 975 bp, Zea Mays
acgcgtttcggccgatcttgtccgcggtctgcctccctgacttttgttggcgctagccgtgtcgaaccgaaagtcccaagtcccacccaccaaacccaacacatcgtgtctgcgttctccccctttacgccggcgagtgttcgtcgctggctcgctgcagcggggagaatagaggcagagagcagggatgagcgacgagcgggtgaaggcggaggcgctgcagatcctgggcctattccaggtgctcccccgcctcgtcgtcttcgacctcgactataccctctggcccttctactgcgagtgccggtccaagagggattcgccgagccttttcaggcacgccaggggcatcatgtacgccctcaaggagaaggggatcgacatggcgattgcttctcgctcccccaccccggacatagccaaggtgttcctcgacaagttggagttccagtccatgttcgtcgcccaagaaatattctccagctggactcacaagactgagcatttccaaaagatccagaggaaaactgggattccctacaaatccatgctgttctttgatgacgagaacaggaatattgaagcagtatcaaaaatgggagtgacgagtgttttagtagagaacggggtgaaccttgacatgtttaagctgggtctcagtaactttgcaactaactgtgctgcctccagcagaaaggatgacgaataacctcgagaagtgatacatagaagaaaataccttcaaaacactgtactcgaattcattgtaatcaatttgcccgattcatgaacaatttattggtgaaagatgacctcacagactagcttttgaactgatgcaacgcctgtctaatatatttatttgaaggcaaatcactccatgtcattatttcacgtgcaaagcaatatattggtgcatatctgttttgttttcttttgtgtcagaattttcttgagccctgtaaggctgtaacg

SEQ ID NO: 125838 - DNA, 858 bp, Zea Mays
acgcgtttcggccgatcttgtccgcggtctgcctccctgacttttgttggcgctagccgtgtcgaaccgaaagtcccaagtcccacccaccaaacccaacacatcgtgtctgcgttctccccctttacgccggcgagtgttcgtcgctggctcgctgcagcggggagaatagaggcagagagcagggatgagcgacgagcgggtgaaggcggaggcgctgcagatcctgggcctattccaggtgctcccccgcctcgtcgtcttcgacctcgactataccctctggcccttctactgcgagtgccggtccaagagggattcgccgagccttttcaggcacgccaggggcatcatgtacgccctcaaggagaaggggatcgacatggcgattgcttctcgctcccccaccccggacatagccaaggtgttcctcgacaagttggagttccagtccatgttcgtcgcccaagtatcaaaaatgggagtgacgagtgttttagtagagaacggggtgaaccttgacatgtttaagctgggtctcagtaactttgcaactaactgtgctgcctccagcagaaaggatgacgaataacctcgagaagtgatacatagaagaaaataccttcaaaacactgtactcgaattcattgtaatcaatttgcccgattcatgaacaatttattggtgaaagatgacctcacagactagcttttgaactgatgcaacgcctgtctaatatatttatttgaaggcaaatcactccatgtcattatttcacgtgcaaagcaatatattggtgcatatctgttttgttttcttttgtgtcagaattttcttgagccctgtaaggctgtaacg

SEQ ID NO: 125839 - DNA, 813 bp, Zea Mays
cagcccaaatccaagaatttgcaaatctgagtccatcttagcttagtactactataccacggtaccattttcctcaaagagtgcacatattgccttaatatactataagatagtggcatacagtacagtaaattcgattgtgaccataaaaatattccatgcccaacaatatgttcctttaatgatcctgcacactcacacgcttgtgtcccttcctcaagtttttttctcctgaatcaggtgccttttctggtgtaagaacagaatgctgaatactatattattttcttttggttgttgtatgaaggaaatattctccagctggactcacaagactgagcatttccaaaagatccagaggaaaactgggattccctacaaatccatgctgttctttgatgacgagaacaggaatattgaagcagtatcaaaaatgggagtgacgagtgttttagtagagaacggggtgaaccttgacatgtttaagctgggtctcagtaactttgcaactaactgtgctgcctccagcagaaaggatgacgaataacctcgagaagtgatacatagaagaaaataccttcaaaacactgtactcgaattcattgtaatcaatttgcccgattcatgaacaatttattggtgaaagatgacctcacagactagcttttgaactgatgcaacgcctgtctaatatatttatttgaaggcaaatcactccatgtcattatttcacgtgcaaagcaatatattggtgcatatctgttttgttttcttttgtgtcagaattttcttgagccctgtaaggctgtaacg

SEQ ID NO: 125840 - DNA, 786 bp, Zea Mays
gtatggactaaactttagtccctgtactaaagaaaccaaataggcccttatagtttagtgggtctgcttgttcttctctgtgctatatgattaaaaaataatactttggctttatgtggatcaaatggcatattccaatgaatataccaagttgattatcgtagaaacacactaaaataacgacatacaaacggtgtaggatatttgggttcttgcatgcacttggttcccaaaaacacaacaatcctttatataggtcatattgtattgtgattacacttgcataccgcatacgtgtatgcatctcaactgcaagtatgcgcgcatagaagttatttttatgacgctcctggcttcacgtcaccttaactgaaatatattcatctcttgttttcaggtatcaaaaatgggagtgacgagtgttttagtagagaacggggtgaaccttgacatgtttaagctgggtctcagtaactttgcaactaactgtgctgcctccagcagaaaggatgacgaataacctcgagaagtgatacatagaagaaaataccttcaaaacactgtactcgaattcattgtaatcaatttgcccgattcatgaacaatttattggtgaaagatgacctcacagactagcttttgaactgatgcaacgcctgtctaatatatttatttgaaggcaaatcactccatgtcattatttcacgtgcaaagcaatatattggtgcatatctgttttgttttcttttgtgtcagaattttcttgagccctgtaaggctgtaacg

SEQ ID NO: 125841 - DNA, 3276 bp, Zea Mays
ctcccagtctccctccctccctttctctaagcgcgacgaccggcgccgccaccgccaccgccttacgccagatacccaggtccgtcttagtcggcaccttctccagcaacaagcacccaacaaatgaatgctttggagcagttggcatccattgatctcattgagctatgcaaggaggccagaattgagcgctgccgtgcaactagagacttgagtagctgtggccgctatgtgcatcatgtgcttaactcatgtggccatgcctcattatgtgctgaatgcagccaaagatgcgacgtctgcccaatttgcaggagtccaataccggacaatggaaacagggttcagctacgtctttactacaagtgcctggaagagggccttatttctaagcagcacgatgaaaggtttcaggaaaaggaagaccatggcaatccagttagcatggatgtccagcagctgcattcattgttcgatgttgcagtacagaacaatcttacttcccttatttgccactatatcacagatgtttgtttggatgagaatgctgtgtcaagtgatccacttctggcttttcttttggatgaggtggtcatcaaggactggtgcaagagggctgttaatgtgctcattactgagattggtgtgatctataggtctggattagaaacgatgagatctaggttatcccaactgcaaaagtttgccacacagttggcaggaatttacagtatacttgaagttatggtttcatctttcaatgaagcagtttcagcgcatgttaatgacctgcaccaactcattgagaacacattgaaggcaaagcagcatttggaggccatgatctggtgtatcaggcatagatttattcaggacatctgttcaaggtacactgatcatacatcatggagctctgatgtgattcaaaggaaggcatatgcagaagaaagaaaatggcctggattttctgataaagggtcagatataaatgaagccaatcagactacactattcatcgagcaggccctacaaaaccttggcattgaacaaaattatagggataaggaggaagacataacaataacatgtttacagaatgaacaatcatcatctatgttctgttccacaattacaaccgatcattgtagtattgacagatacccttttaagaatttgcgtgaggcagttgatgtactctttctacacggagcatcagacatggtgattgcaaagcaagctattttattgtattatctatttgatcgacattggagtagaccagattcagaatggaggtatctggtggatgattttgctactacctttgggattactaatagaacattgcttgagtgcctggtattttgtcttctagacgatcattcttcagaagccttgaaggaggcctgctctcttctccccaagatctttagcaaggaaacacatccaaagatagcacaagttcttctggaacgccagagacctgatatggcacttcttgtgctaaagtgcacagggcgtgatagcttctctgctacagagaacttcgaaaaggatggcatttcatctcttagcgaggcagtgactgcggtccgtgttagaattgaatgtggcctcctaacagaggcatttatgtatcataggagctactgctctaaggtgaaagagcaacactcagcaaatatgacacacacggaggatgcattcgaaggctcttggatttatcatgttgagatgatgatggtcgaattttgtactatctgcattgaaagaaatttagttgataaaatgattgatctgccctgggattctgaggaagagaaacatcttcacaagtccctcttcgagtctgctcatgaagcgcccatggatccaattggtagtctgcttgttgtctactaccttcggcgttatcgatatttggaggcatacggggttgatcgtagtcttcagaaatttgagcaaaaggaattggaaaatgccactgaagagattgcttcaaaaattagagcaattgctcaatggagagaaagtttggttgctaaatgccttgacatgcttccagaggttcagagagagaatgtgaaagccatcaacagtggagaacaaattcagtttgctcgaactgctcaaatatcttctccagctcatgtgggcaaatcacaaaatcctgtaatggacttgagcacaacttttaccagtgttcttcaaaataagtcaagcctcttctcaaaaaacaatgcattgactgattctagtggtctgatccgaagcagccactcagagagaaaggtcccatctgctctgcagaccagggcaccaccccatgggtcacctatatccaatatgagatcaactgtagggggtaagttccccacagtgggccagaatgttgacagtccatttttgaggggggctaaaggtatcagttctagaaaaggagagacgggattcaaagaagggattaaatatgctgatcacgatccactgcctatgtatttgaacttgagttctggtgatacacccaccaaagactaccgaacaagtttgttgaaggccgaggctaacaaaaccacttattttcaaggacaagattctgttggaaaaggagagttccactttggttcacgtgctgtgaagcctttcaacttaaatggaactggcgcaggtcaaaatggcctcgctaagatctcgggatatgctggttttcgtgaggattataaagtaccaactaaggagaacatcttgagctttagcaagaaatcttcagttggtggagcagaagccagcaaaggtgtgtcaaggtggagatccgatgagtctagtgaagaagagagaacaaaccgggagagcggagctcctcttgttactagaaggcgacctagattttcgagaagatgatatatccacatcctcagggatttttttaattgtttgcagctatgccctaatgtgacaacaattgttttaagggaatgtgtatgcgggatgcggctatcatgcataatctacattgccatggccgagatgtagttcaagtgtcactaaggatgctagaaaacaaaatcgagaaggcgtatgcatgtagcattcagagttcagtggctaaattatattttcccaacttttgtgccaaatgccttgtaaatatagtcgtactaatctcgtttcttgggctgatggtagtgttgtccgcgtcaaaaagttcaagggccaatacgtccgtaccttatggtatttatatatgaaccactgtggcagaaaaaaaaaaataca

SEQ ID NO: 125842 - DNA, 3339 bp, Zea Mays
tcttttgtaccccccatttagcagtttccatggcgtcaattatagtttagcggctacgaaatacaagtatttttttggtatttgagtgagccccatgtggcctcaaatcaagtgataaaatgttgtctatatggagtaaatttttgatattagttgctgaaaagactatttctgttgggccgttggcagaatgctttggagcagttggcatccattgatctcattgagctatgcaaggaggccagaattgagcgctgccgtgcaactagagacttgagtagctgtggccgctatgtgcatcatgtgcttaactcatgtggccatgcctcattatgtgctgaatgcagccaaagatgcgacgtctgcccaatttgcaggagtccaataccggacaatggaaacagggttcagctacgtctttactacaagtgcctggaagagggccttatttctaagcagcacgatgaaaggtttcaggaaaaggaagaccatggcaatccagttagcatggatgtccagcagctgcattcattgttcgatgttgcagtacagaacaatcttacttcccttatttgccactatatcacagatgtttgtttggatgagaatgctgtgtcaagtgatccacttctggcttttcttttggatgaggtggtcatcaaggactggtgcaagagggctgttaatgtgctcattactgagattggtgtgatctataggtctggattagaaacgatgagatctaggttatcccaactgcaaaagtttgccacacagttggcaggaatttacagtatacttgaagttatggtttcatctttcaatgaagcagtttcagcgcatgttaatgacctgcaccaactcattgagaacacattgaaggcaaagcagcatttggaggccatgatctggtgtatcaggcatagatttattcaggacatctgttcaaggtacactgatcatacatcatggagctctgatgtgattcaaaggaaggcatatgcagaagaaagaaaatggcctggattttctgataaagggtcagatataaatgaagccaatcagactacactattcatcgagcaggccctacaaaaccttggcattgaacaaaattatagggataaggaggaagacataacaataacatgtttacagaatgaacaatcatcatctatgttctgttccacaattacaaccgatcattgtagtattgacagatacccttttaagaatttgcgtgaggcagttgatgtactctttctacacggagcatcagacatggtgattgcaaagcaagctattttattgtattatctatttgatcgacattggagtagaccagattcagaatggaggtatctggtggatgattttgctactacctttgggattactaatagaacattgcttgagtgcctggtattttgtcttctagacgatcattcttcagaagccttgaaggaggcctgctctcttctccccaagatctttagcaaggaaacacatccaaagatagcacaagttcttctggaacgccagagacctgatatggcacttcttgtgctaaagtgcacagggcgtgatagcttctctgctacagagaacttcgaaaaggatggcatttcatctcttagcgaggcagtgactgcggtccgtgttagaattgaatgtggcctcctaacagaggcatttatgtatcataggagctactgctctaaggtgaaagagcaacactcagcaaatatgacacacacggaggatgcattcgaaggctcttggatttatcatgttgagatgatgatggtcgaattttgtactatctgcattgaaagaaatttagttgataaaatgattgatctgccctgggattctgaggaagagaaacatcttcacaagtccctcttcgagtctgctcatgaagcgcccatggatccaattggtagtctgcttgttgtctactaccttcggcgttatcgatatttggaggcatacggggttgatcgtagtcttcagaaatttgagcaaaaggaattggaaaatgccactgaagagattgcttcaaaaattagagcaattgctcaatggagagaaagtttggttgctaaatgccttgacatgcttccagaggttcagagagagaatgtgaaagccatcaacagtggagaacaaattcagtttgctcgaactgctcaaatatcttctccagctcatgtgggcaaatcacaaaatcctgtaatggacttgagcacaacttttaccagtgttcttcaaaataagtcaagcctcttctcaaaaaacaatgcattgactgattctagtggtctgatccgaagcagccactcagagagaaaggtcccatctgctctgcagaccagggcaccaccccatgggtcacctatatccaatatgagatcaactgtagggggtaagttccccacagtgggccagaatgttgacagtccatttttgaggggggctaaaggtatcagttctagaaaaggagagacgggattcaaagaagggattaaatatgctgatcacgatccactgcctatgtatttgaacttgagttctggtgatacacccaccaaagactaccgaacaagtttgttgaaggccgaggctaacaaaaccacttattttcaaggacaagattctgttggaaaaggagagttccactttggttcacgtgctgtgaagcctttcaacttaaatggaactggcgcaggtcaaaatggcctcgctaagatctcgggatatgctggttttcgtgaggattataaagtaccaactaaggagaacatcttgagctttagcaagaaatcttcagttggtggagcagaagccagcaaaggtgtgtcaaggtggagatccgatgagtctagtgaagaagagagaacaaaccgggagagcggagctcctcttgttactagaaggcgacctagattttcgagaagatgatatatccacatcctcagggatttttttaattgtttgcagctatgccctaatgtgacaacaattgttttaagggaatgtgtatgcgggatgcggctatcatgcataatctacattgccatggccgagatgtagttcaagtgtcactaaggatgctagaaaacaaaatcgagaaggcgtatgcatgtagcattcagagttcagtggctaaattatattttcccaacttttgtgccaaatgccttgtaaatatagtcgtactaatctcgtttcttgggctgatggtagtgttgtccgcgtcaaaaagttcaagggccaatacgtccgtaccttatggtatttatatatgaaccactgtggcagaaaaaaaaaaataca

SEQ ID NO: 125843 - DNA, 265 bp, Zea Mays
ttatacctgctaagtaatcgaccactgtaaattgctgctgtagaattgccgaacaccgtaatccacagatgagccaaagtaaggggattcggatgactcatttggatatgcatgttttccatcctcgtaagtagggggcgaatacctagaactacctgtgacgccactgccattctgccctctggagctttgcttgtttagcatcgtgtacaagtcggcctgctttgcgtcatttgtgctccccttgaatgcaaaacagaagtca

SEQ ID NO: 125844 - DNA, 1617 bp, Zea Mays
aaacatgtatccagtaaatgtttcttcccgccctgttatcgaacggtttcaacgattggggaaaataaatttttttccaaaataaagaggggttcatctcatagccgttgtccccgcatcgcttccctccccggccatcgcctcgcccaacggctctattgtgcacgccgctccacgttgaccgttgcgagtttaaagcatccccttcctctcgagactccttcctctcacttctcatcgccgggatccagatcgttcttcctcttgcccgccgattcgttccaccaccgcgaaagccacacagagagcaggagagacaatccagagagatcggcgccatgaacgacctcatgactaagtccttcatgagctacgtcgacctgaagaaggcggcgatgaaggacctggaggcggggggcgacgggatcgagctcccggagtcgggcgccggcggcgtcacggacgagcgcctgcgcggattcttccaggaggcggaggcggtgaaggcggagatggcggccatccgcgacgcgctcgaccgcctgcacgccgccaacgaggagggcaagtcgctgcaccaggtcgacgccctccgcgcgcaccgcggccgcgtgaacgccgacatcgtcgccgtgctccgccgcgcccgcgacatccgcgccaggctcgagtccctggaccgcgccaacgccgcgcagcggaggctctccgcggggtgccgcgagggcacgccgctggaccgcacgcgcaccgccgtcacctcggggctccggaagaagctcaaggacctcatgctcgacttccaggcgctgcggcagcggatgatgtccgagtacaaggacaccgtgcagcggcgctactacacgctcaccggggaggtccccgaggaggaggtgatcgagcgcatcatctccgacgggcgcggcgaggagctcctgggagcagccgtcgcggagcacggcaagggcgccgtgctcgccgcggtgcacgagatccaggaccgccacgacgcggcgcgcgaggtggagcgcagcctcctggagctccaccaggtgttcctcgacatggccgtcatggtggagatgcagggggagaagctcgacgacatcgagagccacgtcgccagcgcctcccactacgtgcagggcggcaacaaggagcttggcaaggccaaggagtaccagcggagcagccgcaagtgcctctgcatcggcatcatcatcctgctcctcctcgtactgctcgtcatcgtgcccattgccaccagcctcaggaagagttgatcgagtttgtgatgggaagaactgtgaaaaaaaatgaggggttcgaatccgatcgggtgggtcggtggtcctagtgatcaggacactctgcagttgtgtctcgtctcgtgttgcttgatttcgtattcgttaatttgagcctgaatgtttccgtatccatcaggatttgctgatgataccaccggcaattgcagttgctatctcttactgggttgtattgtatggtgtgagattcggtgaaacaaattcgtacttagcagttcgaatttaaaattctcatacatgacatggatggtgcttgattgcttgttgtttgggtttcccattgtctgcc

SEQ ID NO: 125845 - DNA, 1050 bp, Zea Mays
acccttccccacactgctgcgccgcgcagtcttctgcttctccccaccctcgcctcagcttccctgccgttccctccgatcaccagctgcttgtgctgctgagtgctgagggtagcgatgaagatcttgaaccagcccatcagcccaggcggccatctcgtgccggcgcagccgagcaccacggcggccgcggggcggtcccatgcgcactgccctcggtggcaggcgcagacgctgcgccgggacagcagctacgtcggcgtcgagcacatcgacgggaccaccgcgtccgtcccagtcccagtcccagtcccagtcgcggccccgttcaagccgctcacgctcgacttcctgcggtcgctcctggaccggaactgcagcatggcccccgccgtcccggacggcgaggccagcgccccgccgccgccgcagatggtcgcgctccgggtgctggtgacctccgccgtggagctggacgcgcgccaggccgagcgcatcgcgcgcaagatgcgccgcctcaccggctttgtcgacctcaaggtagagaccgccgtggacgcgtccctcatcgccggcttcgtcgtctgctacggcaccgacgactcgcacgtcatcgacctcagcgtcaggggccagctcgcggcgctcaagagccgcgtcgactccatcgaccagaccgcgcatgcccacggacacccacaccaccactgaccgtcgatccaacacctgaggcaccggagcaaagcacagcgcgccgtcaccgtgctacagcttacaatacaagcctatactgtacacgcacagaatgacagaacagaaccgaacgcgcgccatggcaacaacagttttcctaggtaatgttgttgtaaatcgatagcgagaaaacttaattgctgctaccttccttcctgctgagcttgtatacgtttctattgctaaagaaacgaacgctattgattgtatatttgatcgatgtggagacagcatgcagcctctatggtgtaaagtctaatatgctattgcaaggttgaagtttgtatatggaggatc

SEQ ID NO: 125846 - DNA, 1372 bp, Zea Mays
catattctctctgcaccgatcagattagcgacgcaagcacaccaggagttttcggtggttctcttattcatcaagaacatcagatgagataaaggtatcacagttcatcatggacgaaataagtagcagtaggactgtcggacctaacccaagcctgatcagcatcagcagcgctggtgggcgctgacatcgcggtgctgcagggcctcgtagagattcttgagggccttgtcgtagttcacgaaccccatgaaccagaactcgtggttatccatggtcctgatctgaatgtacctttctgcccggttgcgcatgctggaagaagggttcacggatgtcacctggctcagaggaagcaccacctgcagtacatgcactcgtgcggctggccggcagggccctggtagcagagcgggctgtcgctgcagaaggcgaggcgcgccgtggagaggtagagcgtgccgatgacgggccccgaggaggtggagaggtagcaggcgtaggccttgcggagctgctccccgggcatggcgccgaacgtctggtagaacaccctgtcgtggccgccctccgcgtacaccttggtcccctgcgtcagccgcgccaccgccgcgtccgccatgttcggcgccgtccggactgtccgccaagggggagcagcaagtcacacatcggaagccatagcgtgcgtatcatgacgattggcgaactgatcagagacagacagagagagatagagaggatcaaagcatggggcacgcacggtggtgccagatgttgccggtggcgtcggcggccttgcgggttccgtcctcgagcagcttgccgtagcggcccagcgccttcctgacggctgcaacgacgcatccaagcgaacaaaacacgtaagcaggctgaggatttctcttgcttcaaggggggcgcaaaggatgagcgagagcagattcaggcgcgcactctggcaggtggacggtgcggcagacgcgggggtgacgacgacgtaggggttgcccacgccgttgctcgccgccgtcacggccacggccgtcgctgcctgaggcggcggcgtggccagctgctggtcgccgtacgcctgcccgtgcccggccgggtagcccggcggcggagcagcccactgcgacgccatctgttcactggcggattggatggaactggaggggtcgaggcgtccgccggcaccgtggatcgattcgatcagggctcaggggagaggggagggaggagaggaccggaggagaaaagcgggcgatctggtcttgcggaacggaactgcgggcggtttgctttctttacgtgctgaatcggaggtagccagccacttctccagtggcgacgagtcgaaggttctgtg

SEQ ID NO: 125847 - DNA, 2135 bp, Zea Mays
gcagagctttcggatgcagtagcaggagggctggaattataccaaggtcgattttgcaagtaactagttcttttgatgctaccaaaggtgcaaagcagcctcactcgctggacagtttcaagtgcaagttaagtatacatcgtctcgtgtcatatatataggaactgtcgtcctaatccttagggtaccctgtcatcagtgctgaaacattcatgtccaccagctgaactagtttttgcatgcgcccctggccctctcatacctttcttgtactgacattagcttgaaagaaacgatcactgttcgatcagcagtttgcgaggcatggatggcgagggagagaggcgcatggtggatagcgagggagagatacacatggatccggcgttgtacatggcggcgacgcaggggaaagtgtcgatcctgaagcaactggcggatccggaggaacccagtgtcctcagcgccacgacgccccagctgaacacggcgctccacctcgccgcgctgcacggccacgccgagttcgccggcgaggtcctgggcatgaacgaggagctgctcgtcatccggaacggcgacggcgacaccccgctgcacctggcggccaaggcgggcaagctggaggtggccaggctgcttgtcaaccgcgccatagcgtggccggaggacaagaagagccctctcatcatgaccaacaaggcgggcaacaccgcgctgcacgaggcggtgcagtaccgcaggggcgccttggcggtggtcctgctggacgccgaccccagccgcggccacgacctcaacgagcagatggagtccccgctgcacatggcagcccgcgagggcctcgtccaggtcgtcgagaagatcgtcagctacccctgggtcggccagaagttcttgccctccgcctccctcagcggcacggctctgcaccaggccgtgctgggcactcatcaccggatcgtggagatcctgctggagaagatgcctgatctgatcgacctcaccgactcccaaggcaacaacgccctgcactacgcggcgcagaaggaccaccagaaggcggtggagctgctgctcaagaagcggacggagctagcctacaaacgcaacctcgagagcatgtccccgctgcacgtcgccgcgcagtacggctcgacggctgccatcaaggcgctgctccggcactgcccggacgtggccgagatggtggacaaggacggccgcaacgccttccacacctccgtcctcagcggcaaggcggccgcgctccggtccctgctccgccgcgtccgtcccgcggagctgctcaaccgcgtcgacatccacggcgacacgcctctgcacctcgccgccaagaacagccgcgtccactccgccctgctgcttctcagggacaggcgcgtcgacccctgcgtccgcgacaagaaaggccacacagcgcgcagccttgtcgagaagaagctgcacaccggcgagatggacgcctacgagatgtacctctggcggcagctcaagcaccaggagtacaagaggtgccgcaagcagcagctgccgccgctcgccacctaccccagccgcaggggcgacgacaagtacttcgagcgcatcgtcgagacctacatcctcgtcgccaccctcatcgccaccgtcaccttctccgccaccttcaccatgcccggcggctataaccagagcgacggcatcgcccttaagggccaccacgtcgcgttccagatcttcgtcatctccaacaccgtcgccatgtgcagctccatcgtcgtcgtcttctgtttcatctgggcctggcaggaccccgtcaggttcaaggtcgaccagctcttgtggggtcacaggctcaccgtcatcgcctgcctcgccatgctcgtctcgctcatgacggccgtctatatcaccgtggcacccgcgtcacggtggccggcctacgttgtcatcgccatcggcaccagcacaccggccgtcgtcgttctcatgctgggcaaggaggtgatcttcgtgccggtgtaatcaagtgcctacacggcttgtgtaatttttcccattctctacaggccatattatgtgttattttgactacttaaacaggagtgcagtagttacgaagatcgtcagtg

SEQ ID NO: 125848 - DNA, 1588 bp, Zea Mays
aaaccgtattgttggctccgcctagggttttagcacctgccgccgcaacctcccttctacttctactgccgccgcaacctccccatccttcgaatcccatccgacctaaccccgcaacccgccggacgacgagtggcgaggcccccggccgagatggaccggtaccagagggtggagcggccgcggaacgagtcaaccatcgaggagaacgagatccgcatcaccgcgcagggcctcatccgcaactatgtctcctacgctacctccctcctccaggaaaggagaattaaagagattgttctaaaagccatgggacaggcaatcagtaaatctgtagctgttgcagagattatcaagaaaaggatccctgggttacaccaggataccaacatcagttctgttagcatcactgatgtctgggaacccatagaagaaggccttgtcccattggagatgactcggcatgtttcgatgatttcaattactttgtcccccagagagctggacaagcacactcctgggtaccaagctccagtgtacattgaacaaccaaggcaacagcaggtgccaccaccacagcgccaaccacgcagaccaccagcacaattccagcagctggagtatgaagattcttatgcacggggtcgaggaagagggcgtgggcgtggaaggggctggggtagaggtggctacggtggctatggtggatatggaaacaaccaaggtggctatcatcagggtggtgggtattatgacaatcaaggtggatataatggctatgataatcaaggtggatatagtggctatgataatcaaggtgggtatggtggtggatatggctataaccaaggcagatatgggaactatcaagaaaatggtggatataaccgaggaagaggaagtggtatgcgaggaagaggcaattggggttaccgaggaggttatgaaggtggcaggggcggtggctatggaggtggcaggggcggtggatacgaaggaggcaggggaggcggctatgaaggaggcaggggaggcggctatgaaggtggcagggtctatgaaggtggcaggggagggggctatgaaggaggcaggggaggcggctatgaaggtggcaggggagggggctatgaaggaggcaggggtggcagtgctcagggtggaaggggttacggtggccgtggaaggggtagaatgggtggtcgcggacgagggaactagtgcagttctggcgtttccttcaaaatgcatgcctcacctataccaggggaaacgacaagttatctgagcattttatgtttgaagccatgtgactgtgaggtctgttattttttcccctgagcgcgaggtttggttgtgagcataatgcatttgcaaagttttatcttgtacgtcatccttcaacgtttcaaattttatcatgtacgtcatccttcaatgtttctgctgccagaggttttcccagtgatcgttgagtgctgagcatgttgtccaatgttcatgcctgcagtattaacagatggccactcttttcctgtgaaattgttaattgcatttgagcaacaccaaaaataccaaaaaaggaaat

SEQ ID NO: 125849 - DNA, 75 bp, Zea Mays
acgacgaactccgcctcgcccgactcagggctcggacacgacctcggccccggaagacgacgaactccgcctcgc

SEQ ID NO: 125850 - DNA, 2248 bp, Zea Mays
atactatgttgaggcgggaaagcgagagctgattcaatgtgctttgtgccccaaacaaataaaaggaggtatcaagagggtgaaacaacatctagctagtggctatggagacattgtcaagtgtcctaacactactagagagattgctaaagagatgaatgaagctttgaataatgggaagcgggctaggccgttgtacctagatgacgatgtaatggaagatgaagcaggacaagaagatgatgtccaatttatgggaagcaggtcaatgtcagcatcatccaaggcttcctcgtgtactgtgccaagttctggaacagctgccaaaagaaacaaagcaattttccaattgaagccccacccaattgcagctccaaagaagtccattgcatctatgattcgacgtacacctcaagaggttgtagcagagagacatgcaaagggacctgctcaaactaccataagtgctaccataaagcctaaggaagaaagaaaatttgtttgtttggagatagctaagtttttctatgagtgtggtataccattcaatgctgcgaactcaaggcaatttgagatagctgtggaggctattgctcaatatggatctgggttcaagcctcctactttccattagttacgtgagcctttacttgctagggttgtcaaagacatagatgatgagaggaagaagcatgaggaagcatggagccaatatggttacttattagaaaagagaattgaggggattggtaaggaaaacgttactcagattgtcactgataatggtgctaattattataaggcagcaggtaagattttgatggagaggattcctaccttgttctggactccttgtgcggcacattgcttgaaccttatgttggaggacataggaaagctgaaggattttaagaagcctattgctcgtgctcgtcatgtcaccacttttatttatagacatgggaggatacttagtgaaatgagggtgcatacaaatgggatgatcttgtgagacctgctgctactagatttgctactgccttccttaccatgaagagtttgcacaagcacaagaactcattgaaaggtctattttcaagcgatgttttcactcaatccaaggtatccaaaacagaggcaggtaaaaaagcatatgacatcgtttctctcaagaattttggaattcaattgaggattgtcttagagcttttttaccgcttcttgtcgtgctgagattggttgatggtgatgagaagccagccatggctaaggttgctgcaaccatgactatagcaaagaataagttacctcctcattttctactcaaaacaagaaagcatgtctgaaacttatcatgagcattgtggatcgacgttgggcgaaccaaatggataccccattatatggagcaacactatatttgaaccctggaaaattctacaatatcaaagcaggtgttgatgaaggctatgttggagagctaaggggttgctttaatgatgtgcttgtcaaaatggtggtagatgaggatcttagagagaagattgatgcccaagctgttctttatgagaaccaaagagaagcatttgcaaatccaatggctataaaaaatgcacaaacaaggaatccacttgattggtggcttgcatatggtggtcgtactattgaattatataagtttgcaagacggattgttagtctttgtgcttcatcatccggttgtgagcggaattggagtacatttaaatttatgcataccaaaaagaggaataggttggagcacaaaaggttgaatgacttggtatatgtttcatacaacagaaagatggctgataggtttcaaaaaatacgtgaggaaggaaaaaactttgatcctttgattttagaagactttgattgggacaatgaatgggttgatccattagctaattcttcttatgttagcaatgctcttggagatgattctaatttatcgtgggaccaagttgatggagctattggtgcatctgcacatctcagaggtcgtaattttcttaggagagctgctggtgggtgtgtgagaaggaatgaagaccttgaggaagaggagactaatttagcaaatgaagatgacgaggatcaggaatatattcttgatgatcttgatgtggaagatgaaattgaaggaagcaatagtggaaacgatggtgatgatcaaggcgtggatgctcatggtcttaatattgatgagttcgatgatggttactaa

SEQ ID NO: 125851 - DNA, 1284 bp, Zea Mays
ccgcggctcccaagttcacgaagcgggaggcgcaagcgaagcggctacctctcgccggagatgccgctggggacctctccagtagtggcggaggccgaggcatggacgtgggagaacgcagcggctggagctgccgccgggttcgccacggtcgcggccctccacccgctcgacgtcgtccgcacccgcttccaagtgagcggcggaagggggtggtctgaagtgcctccgtacaggaacaccgcgcatgctgtgtacactatcacacgatctgagggcctgagaggactttatgcaggattttatcccgcagttcttggatcaactgtttcctggggcctatatttctttttctataacagagctaaacaaaggtacttacagaggaagaatgaccagcttcatccagtccatcatctcatctcagctgcagaagcaggtttccttgtttacaaatcccatatggctggtgaaaacaagactgcaactacaaacagctaaacaccatacttctcagtattctggtttttctgccagatgctttgaaaactattctaagagaggagggatttcttgcactttataggggaattggacctggtcttttgctggtcacccatggcgcaatacagttcacggcctatgaggaacttcgcaaagctatgatattctttaaaagtgcacaatcaagggcagacgacgcaggaggcggggagtcattgctgaattccatcgattttgcggcacttggggctggttcaaaagtagctgctattctacttacttatccttaccaggtcatcagagcccgcttgcagcaacggcctggcactgatggtactccaaagtactcaaatagctggcatgtagtgaaggaaactgcaaagtatgaaggcgtccgtggattttacaggggcatcacgtccaatctactgaaaaaccttccagctgcgtccctcacgttcgtggtgtatgaaaatgttatcaaactattcaaagcaaccaaggagaagacgtagctactcattaaatccaggagtactatgcatggtctgacatttctgagttcaaacgatgcctataatttccattccacgtcaagcccatattttatccatttaacatcgtatatgacaaatatgtaacagtacaggttgtgaccaacctgggtcgtggaaattttttgtacttgcattttgtagagagaaaatacacattttgtttcttcccaaagaaatatgtctttgttatataatccagccgggacgctggcgttgtagatct

SEQ ID NO: 125852 - DNA, 1288 bp, Zea Mays
ccgcggctcccaagttcacgaagcgggaggcgcaagcgaagcggctacctctcgccggagatgccgctggggacctctccagtagtggcggaggccgaggcatggacgtgggagaacgcagcggctggagctgccgccgggttcgccacggtcgcggccctccacccgctcgacgtcgtccgcacccgcttccaagtgagcggcggaagggggtggtctgaagtgcctccgtacaggaacaccgcgcatgctgtgtacactatcacacgatctgagggcctgagaggactttatgcaggattttatcccgcagttcttggatcaactgtttcctggggcctatatttctttttctataacagagctaaacaaaggtacttacagaggaagaatgaccagcttcatccagtccatcatctcatctcagctgcagaagcaggtgctttggtttccttgtttacaaatcccatatggctggtgaaaacaagactgcaactacaaacagctaaacaccatacttctcagtattctggtttttctgatgctttgaaaactattctaagagaggagggatttcttgcactttataggggaattggacctggtcttttgctggtcacccatggcgcaatacagttcacggcctatgaggaacttcgcaaagctatgatattctttaaaagtgcacaatcaagggcagacgacgcaggaggcggggagtcattgctgaattccatcgattttgcggcacttggggctggttcaaaagtagctgctattctacttacttatccttaccaggtcatcagagcccgcttgcagcaacggcctggcactgatggtactccaaagtactcaaatagctggcatgtagtgaaggaaactgcaaagtatgaaggcgtccgtggattttacaggggcatcacgtccaatctactgaaaaaccttccagctgcgtccctcacgttcgtggtgtatgaaaatgttatcaaactattcaaagcaaccaaggagaagacgtagctactcattaaatccaggagtactatgcatggtctgacatttctgagttcaaacgatgcctataatttccattccacgtcaagcccatattttatccatttaacatcgtatatgacaaatatgtaacagtacaggttgtgaccaacctgggtcgtggaaattttttgtacttgcattttgtagagagaaaatacacattttgtttcttcccaaagaaatatgtctttgttatataatccagccgggacgctggcgttgtagatct

SEQ ID NO: 125853 - DNA, 1777 bp, Zea Mays
gaacacggggcgtaaagtccttcgagatctcgcttctgcaagcttccgcgccggcgcggtgggtgatatgaaccccgctccggtggcgaacggcgccgcggccggcgctggcgtgggcatgaaccggctgggcggtaggttgtggtacgcggccgccggcgccctcatcgtggcgctcctcgccgtggccgtgagctaccgcagcttcccggacatcccttcgtcgtctcctggaagctgcggctgcccggctgcgaggaagtacacggggatggtggaggattgctgctgcgactatgagacggtggacgccatcaacgaggaggtcctgcatccaatcctacaggaactcgttaagttgcccttctttaggtacttcaaggttaaattgtggtgtgactgccctttttggcccgatgatggaatgtgcaagcttagagattgtagtgtttgtgagtgctcagagaatgagttccccgaaccattcaggaaaccttacagtggactttctccagatagtatgatgtgccaagaaggaaaaccacaggctgcagttgataaaacacttgacagcaaggttttcaaaagatgggttgaaactgacaatccgtggacatctgatgacgagactgataataatgagatgacttacgtgaatcttcaactgaatcctgaacgatacactggctataccggtgattcagcaaggaggatatgggatgctatttataaagagaactgtccaaaatatccctctgaagaactgtgccatgagaagaaggtattgtacaagcttatttcagggttgcactcctcaatctcggtgcatattgcttatgattaccttcttgatgaatctactaactcatggggacaaaatctttctttgctgtatgaccgtgtcctgaagtacccagaacgtgtccagaatctatacttcacctacctgtttgttcttcgagccgtgacaaaggcagcagattatcttgagcaggctgagtacaatactggcaatcctgaagatgacttgaaaacagaatctcttgtgaagcaattgctttacaattcccagttaagatctgcatgtccattgccttttgatgaagccaaactctggcaaggtgaaaatggtcctgagctaaagcaagagattcagaagcaatttagaaacattagtgcaattatggactgtgttggatgcgagaagtgccgactgtggggaaagctccaagttcttggccttggaactgctctgaaaattcttttctccgttgatggagacagccatttgaatcagccgttgcagctgcagcgaaatgaggtcattgcattgttcaatcttctgaacaggctctcagagtctgtcaaatttgtacatgaaaaaggatcatcagtcgaagaagtcatcaacgaacagagcccttcaactgttcaaaagggtgcttccaagacgaatcttaagggcttgttcggttattcccaatacacatggattggatgggattgaaaaaaattgtgaagaagtttgacttgtttgggattcaaacccatccaatcccgctcaatccacatggattgagagctaaccgaacaagccctaaactggtacccccacccctccccggctttgtattgtttcttgcattcatcgctcgtaatctttcgttattgattcttccgcaggacttcctctgagatgtaagggtgtaatttgtagttatagaaggacacgctggaagattaacatagatatgcacggatataccgaaagattaac

SEQ ID NO: 125854 - DNA, 110 bp, Zea Mays
tttgtgtctcagccttgggaggggccatggcccctgccgggccccttggctccgcccctgctgacgtctcacttctcattatacgaattcgtcgtctattttatcgatcc

SEQ ID NO: 125855 - DNA, 3078 bp, Zea Mays
atctaccacctgctcggccttagggcgcttcttgggccgagccctagcagtccggaattccgatctcggccaccacctcctcttctctcctctcctctcctgaaagcagtaagctcctccgttgccatactcgtccgcccggtctccctcccctcccctgctccagctcgtctggtggcgttatgatttcctcgcgctcgcgagttcatcctagatctgcatggtctgggctagattccgccggatctgtggcggccgtttaaatctgtgggcttttattttgctgcgtttaagcgcgattttgaaaggttttcgcccgtcccgatttgggcctagtgggccatgctgggatttcttccgatttcctgaaattttaccggtcggtgtgcggtctacaagtccaggccatagaggagctcccgtggctgctgttcatagtaggatttcgaatttggggcgcgaggttctgttccgcgggccagatgagatctgtagtctcctccatgcgccatggcagtaatttggggaaaactctgcggcgagcggacttttgattctcagtcagctgtgtcgactgggaaacgctcagatctcaaaagttcagcgggtagcctatcaagatggccgaggaaactgccaatgacgctcaggtggcacaagataacgagattgctctcagcaatgaggcaatccaaggtgatgagttggtccatgttgaagagctgtcccaaggtgatgatttggttcaaggaaatgagctagttgtttctgaggtgacaactcctactattggaaccagacgcaggagaaagaagtctttggtatgggagcacttcactattgaagccgtcgcaggtggggccactagggcatgctgcaagctctgcaagcaaacctttgcttacagctctggttcaaagattgctgggactagccatctcaagaggcacatcaccttgggctcttgtcctaagataaagaatcaagagcagaggctggcgctgccttcaactggagggactgacaatgatggcgagggaactatagagcggcgaaccaagagacgctacagatacactggttatgcaaatgctgcttttgatcaggaccgcagttgctcatacttggcaaagttgatcattcagcatgactacccacttcacattgttcaacagccgtcatttgccatttttattgaaagtctgcagccacgtttcaagattgtggatgttgaaacgatggaaggagaggtatatgctgtttatcagaaagaaaaggagaacctgcttcaagcattcaacagtatgcctggaaggatcagcctcactataggattgtggacaactagtcagactcttgggtacgtttcacttgcagggcagtttattgactctgagtggaaagtgcaccgaagaatgcttaacttcatgatggtgtcatctcctcattcagagaatgcacttagtgaggcaattagcatgagcctttctgactggaatatgaaggacaggctattcaccatcacattggataatgaatgctcctcacatgatatctacagtgcaaatctgagggaccatctctccaacaagaacaatctcatgcttaagggacagctctttgttgtgaggtgctatgcccatatccttaatgctgttgccctagatgtcattgcttcaattcatggtgttgtatacagcattcgtgaaagcataaagttcataaaagcttcttctgcccgcgaagagaagtttgctgagattgctctgcagctggagattcccagtaccaagaccctctgtctggatgttacaacccagtggaacaccacctatctgatgctgctggctgctttggattataagcagactttcactacactagaaacatgtgatgataactacaatgaagctccatcagcagaggattggaagaaagttgaggctgcctgtaattacctgaaactgctatacgattctgcacatagtatcatggcggcagcaaacccaactgcaaacatctttttccatgaagcctggaaacttcagctagagctggcaaatggcacaggccacgaagatcccactttcagtagcatcgccaaggatatgcatgagaggttcgacaagtactggaaagattgcagcctcgtgttagccattgctgttgtcatggatccacgtttcaagatgaagctcgttgagttcagttactcgaaaatctatggggctggggctgcaaagtatgttaaggtggtcgatgatgctgtacatgagctgtataaggagtatgtggctcagccactcccactgaccccagcctatgttgaccaaggcgaagggaataatggaccagccaatgcgaatagcagtcaaggggctcctgcttccactggtgatgggcttctagacttcgatatgtacctttctgagatccaaagtagccagccctcgaaatctgagctggagcagtacctagatgaatccctcactccacgtatccaggagtttgatatcctgaactggtggaagctaaacacggtcaagtttccaaccctctctaaaatggcccgtgatatcttggccattccagtgtccatggtaagcagtggcagctctatattctgtgctggaacaggaagtcacatgctcgatgactacagaagctctctgcggcctgagattgtggaagcacttgtttgcgcgaaagactggctccagtattcaccacctgccaccgaggcaccgagttctgcactggtgaaggctcaaggatcgtaggtttgtcgtggtcactgcctgccttgtggaagcaaagcaagaatccatttacccatctgtcgtatctctgagtgtagttaactgtaggtgtattgtaggctgagattgtgaaccgattttgatatattctggtatctatcacgtaaaggtgtaacatgtgttgaactctgctgaactcgtggctgttctgatgtcgtctgactttgcagtttgcacacttccctatgtgcttgtacaagccgtgggatgtatcttgtttttgtattaaatttgttttataccgtggattgatgtctca

SEQ ID NO: 125856 - DNA, 2592 bp, Zea Mays
tttgttgcgaaactatgatgtatttgtcagttctgttatgttcaaagattgaatcctattttgatgtcattttcgcgcttccacaatgtcctgattttaccattgccatgacttacagatctcaaaagttcagcgggtagcctatcaagatggccgaggaaactgccaatgacgctcaggtggcacaagataacgagattgctctcagcaatgaggcaatccaaggtgatgagttggtccatgttgaagagctgtcccaaggtgatgatttggttcaaggaaatgagctagttgtttctgaggtgacaactcctactattggaaccagacgcaggagaaagaagtctttggtatgggagcacttcactattgaagccgtcgcaggtggggccactagggcatgctgcaagctctgcaagcaaacctttgcttacagctctggttcaaagattgctgggactagccatctcaagaggcacatcaccttgggctcttgtcctaagataaagaatcaagagcagaggctggcgctgccttcaactggagggactgacaatgatggcgagggaactatagagcggcgaaccaagagacgctacagatacactggttatgcaaatgctgcttttgatcaggaccgcagttgctcatacttggcaaagttgatcattcagcatgactacccacttcacattgttcaacagccgtcatttgccatttttattgaaagtctgcagccacgtttcaagattgtggatgttgaaacgatggaaggagaggtatatgctgtttatcagaaagaaaaggagaacctgcttcaagcattcaacagtatgcctggaaggatcagcctcactataggattgtggacaactagtcagactcttgggtacgtttcacttgcagggcagtttattgactctgagtggaaagtgcaccgaagaatgcttaacttcatgatggtgtcatctcctcattcagagaatgcacttagtgaggcaattagcatgagcctttctgactggaatatgaaggacaggctattcaccatcacattggataatgaatgctcctcacatgatatctacagtgcaaatctgagggaccatctctccaacaagaacaatctcatgcttaagggacagctctttgttgtgaggtgctatgcccatatccttaatgctgttgccctagatgtcattgcttcaattcatggtgttgtatacagcattcgtgaaagcataaagttcataaaagcttcttctgcccgcgaagagaagtttgctgagattgctctgcagctggagattcccagtaccaagaccctctgtctggatgttacaacccagtggaacaccacctatctgatgctgctggctgctttggattataagcagactttcactacactagaaacatgtgatgataactacaatgaagctccatcagcagaggattggaagaaagttgaggctgcctgtaattacctgaaactgctatacgattctgcacatagtatcatggcggcagcaaacccaactgcaaacatctttttccatgaagcctggaaacttcagctagagctggcaaatggcacaggccacgaagatcccactttcagtagcatcgccaaggatatgcatgagaggttcgacaagtactggaaagattgcagcctcgtgttagccattgctgttgtcatggatccacgtttcaagatgaagctcgttgagttcagttactcgaaaatctatggggctggggctgcaaagtatgttaaggtggtcgatgatgctgtacatgagctgtataaggagtatgtggctcagccactcccactgaccccagcctatgttgaccaaggcgaagggaataatggaccagccaatgcgaatagcagtcaaggggctcctgcttccactggtgatgggcttctagacttcgatatgtacctttctgagatccaaagtagccagccctcgaaatctgagctggagcagtacctagatgaatccctcactccacgtatccaggagtttgatatcctgaactggtggaagctaaacacggtcaagtttccaaccctctctaaaatggcccgtgatatcttggccattccagtgtccatggtaagcagtggcagctctatattctgtgctggaacaggaagtcacatgctcgatgactacagaagctctctgcggcctgagattgtggaagcacttgtttgcgcgaaagactggctccagtattcaccacctgccaccgaggcaccgagttctgcactggtgaaggctcaaggatcgtaggtttgtcgtggtcactgcctgccttgtggaagcaaagcaagaatccatttacccatctgtcgtatctctgagtgtagttaactgtaggtgtattgtaggctgagattgtgaaccgattttgatatattctggtatctatcacgtaaaggtgtaacatgtgttgaactctgctgaactcgtggctgttctgatgtcgtctgactttgcagtttgcacacttccctatgtgcttgtacaagccgtgggatgtatcttgtttttgtattaaatttgttttataccg

SEQ ID NO: 125857 - DNA, 2813 bp, Zea Mays
agccacgagtaccctccggtccctctctctccacgggtcgaagcccctctctctcccggatcgtcctctcccccacaggatctagggtttgctcgctcggccttcgtccttcttgggccgagccctaattcttctgcaccgccacccagcaggcttcggtttggttcgcatccgctgcgcccgcttcgtccccgtacgtattcttggattccattggcttctatcttcagtatggatgagccaaacaacaattttaatgcaacggtgcatgccaatgagatgtttgatagcaatggtgtgatccatgaagatgagatggcccatgacgatgagatgatccatggccatgcgatgttccttggcgatgagatgattcgtgggaccgagatggttgaaggaagtgagatgatccatggtcatgatatggttcaggttaatgatctcatccacggcaatgagatggttccagttcacgacatggtcaacggtgacaagatagcccatggtaatgaattggttaattctcagatgaccccacgaatatcaagacgtcggaagaagaagtcgctagtttgggagcacttcactatagaactcatgccagggggaagttcaagagcatgctgcaagttatgcaagcaaacctttgcgtatagttctggctcaaaaattgcaggcactagccatctcaagcggcacatcacactaggctcctgtcctgttatgaaagaccaagacaggaagctagcattgccacttgcagggggccatgtcactgataatgatggtgagggtactgcagaacgtcctactaagaggcgttacagatacactggttatgcaaatgctacttttgatccacagcggagcacctcttatctgacaaagatgataattttgcatgactacccacttcacattgctcaacagtcatcctttattaattttattgagagtctgcagcctcgtttcagagttgtagatgtggagacaatggaaggagaggtgtatgctgttttccagaaagcaaaagaaaacctgttgcaagcattcagcactatgccaggaaggatcagcctcactataggactctggacaaccagtcagactcttggctatgtttctcttgctgggcagtttattgactccgattggaaagtgcaccgaagaatgctcaacttcatgatggtgtcttctccccattcagagaatgcacttagtgaagctattagctcaagcctttctgagtggaatatgaaggacaagctgttcactatcacattggataatgattgctcttcccatgatatttacagtgcaaatcttagggatcacctctccaataagaacaacgtcatgcttaagggacagctctttgttgtgaggtgctatgcacatatcctgaatgtagttgctcaagatgtaattgcttcgattcatggtgtgatttacagcatccgtgagagtatcaagttcataaaagcttctccaagtcgtgaggagaagtttgctgagattgctctgcagctggagattcccagtaccaagactctttgtttagatgttacaacccagtggaacacaacttatctgatgctactggctgccttggactataagcaggcttttgctacactggagacatgtgatgataattacaatgaatctccttcagcagaggactggaagaaagttgaggctagctgtaattacctgaaactgctatatgactctgcacatagtgtgatggcttcagcgaaccctactgcaaacatctttttccatgaagcttggaaaattcagcttgaactagccaatggcacagaacatggaagtccctttttcagctgtattgccaaggatatgcatgagagatttgacaaatactggaaagattgcagcctggtgttagccattgctgttgttatggatccacgtttcaagatgaagcttgtcgagttcagttactctaaaatttatggtgctgaggctgcaaaatatgttaaggttgtcaatgactctctgcatgagctgtataaggagtatgtggcacagacactccccttggctcctgcctatgttgaagctaataacgtggctgccaacacgaatgttaaccagggaaatcctcctccaactagtgatggtcttcttgactttgatatgtacctttctgagattcaaagtagccagcctgcaaaatgtgaactggagcagtatctggaggaatctctcactccacgcatccaggagtttgatattcttaactggtggaagcttaatacacttaagtttccaaccctgtcgaagatggcccgtgatatcttggcaatcccaatgtcgatggttagcagtggcagctccatattctctgctggaactgggaaccgcatgcttgatgattacagaagctctctccggccggagactgtggaggcacttgtatgcgcaaaagactggctccagtattcaccggccgcaactgaggcgccaggttctgagatgatgaaagcagaagcattgtagattgccgatactgcttccctgttgaagcacaaataaggttgcagtatctttgagcatagttaacagtaggtatattttaggcagcagttgcagacatatatttcttctggcatttatctcatagtggtctaatttgtcatgtcgaacaaagtttaactcattgtagtgtgagctgagtttatctgtggtctgacccggcacacatggtgcgggtgcaaactgcaaactgcgggattttttagggattcaggttgttgagcaccatttatggcactgggcatggtcgg

SEQ ID NO: 125858 - DNA, 2809 bp, Zea Mays
agccacgagtaccctccggtccctctctctccacgggtcgaagcccctctctctcccggatcgtcctctcccccacaggatctagggtttgctcgctcggccttcgtccttcttgggccgagccctaattcttctgcaccgccacccagcaggcttcggtttggttcgcatccgctgcgcccgcttcgtccccgtattcttggattccattggcttctatcttcagtatggatgagccaaacaacaattttaatgcaacggtgcatgccaatgagatgtttgatagcaatggtgtgatccatgaagatgagatggcccatgacgatgagatgatccatggccatgcgatgttccttggcgatgagatgattcgtgggaccgagatggttgaaggaagtgagatgatccatggtcatgatatggttcaggttaatgatctcatccacggcaatgagatggttccagttcacgacatggtcaacggtgacaagatagcccatggtaatgaattggttaattctcagatgaccccacgaatatcaagacgtcggaagaagaagtcgctagtttgggagcacttcactatagaactcatgccagggggaagttcaagagcatgctgcaagttatgcaagcaaacctttgcgtatagttctggctcaaaaattgcaggcactagccatctcaagcggcacatcacactaggctcctgtcctgttatgaaagaccaagacaggaagctagcattgccacttgcagggggccatgtcactgataatgatggtgagggtactgcagaacgtcctactaagaggcgttacagatacactggttatgcaaatgctacttttgatccacagcggagcacctcttatctgacaaagatgataattttgcatgactacccacttcacattgctcaacagtcatcctttattaattttattgagagtctgcagcctcgtttcagagttgtagatgtggagacaatggaaggagaggtgtatgctgttttccagaaagcaaaagaaaacctgttgcaagcattcagcactatgccaggaaggatcagcctcactataggactctggacaaccagtcagactcttggctatgtttctcttgctgggcagtttattgactccgattggaaagtgcaccgaagaatgctcaacttcatgatggtgtcttctccccattcagagaatgcacttagtgaagctattagctcaagcctttctgagtggaatatgaaggacaagctgttcactatcacattggataatgattgctcttcccatgatatttacagtgcaaatcttagggatcacctctccaataagaacaacgtcatgcttaagggacagctctttgttgtgaggtgctatgcacatatcctgaatgtagttgctcaagatgtaattgcttcgattcatggtgtgatttacagcatccgtgagagtatcaagttcataaaagcttctccaagtcgtgaggagaagtttgctgagattgctctgcagctggagattcccagtaccaagactctttgtttagatgttacaacccagtggaacacaacttatctgatgctactggctgccttggactataagcaggcttttgctacactggagacatgtgatgataattacaatgaatctccttcagcagaggactggaagaaagttgaggctagctgtaattacctgaaactgctatatgactctgcacatagtgtgatggcttcagcgaaccctactgcaaacatctttttccatgaagcttggaaaattcagcttgaactagccaatggcacagaacatggaagtccctttttcagctgtattgccaaggatatgcatgagagatttgacaaatactggaaagattgcagcctggtgttagccattgctgttgttatggatccacgtttcaagatgaagcttgtcgagttcagttactctaaaatttatggtgctgaggctgcaaaatatgttaaggttgtcaatgactctctgcatgagctgtataaggagtatgtggcacagacactccccttggctcctgcctatgttgaagctaataacgtggctgccaacacgaatgttaaccagggaaatcctcctccaactagtgatggtcttcttgactttgatatgtacctttctgagattcaaagtagccagcctgcaaaatgtgaactggagcagtatctggaggaatctctcactccacgcatccaggagtttgatattcttaactggtggaagcttaatacacttaagtttccaaccctgtcgaagatggcccgtgatatcttggcaatcccaatgtcgatggttagcagtggcagctccatattctctgctggaactgggaaccgcatgcttgatgattacagaagctctctccggccggagactgtggaggcacttgtatgcgcaaaagactggctccagtattcaccggccgcaactgaggcgccaggttctgagatgatgaaagcagaagcattgtagattgccgatactgcttccctgttgaagcacaaataaggttgcagtatctttgagcatagttaacagtaggtatattttaggcagcagttgcagacatatatttcttctggcatttatctcatagtggtctaatttgtcatgtcgaacaaagtttaactcattgtagtgtgagctgagtttatctgtggtctgacccggcacacatggtgcgggtgcaaactgcaaactgcgggattttttagggattcaggttgttgagcaccatttatggcactgggcatggtcgg

SEQ ID NO: 125859 - DNA, 1566 bp, Zea Mays
atatttagtatctataccacaatataatacaatagtttacactttacaaaagttatccaaccaaataatccacacacccataatctttactaaatccaccaaacaaattacacttatacttaacacaacatcaaaagtaacggttcagatcgttgaatatcatcatctctcttgctcacttaaatctgatggacaatattatttggatcattctttagtcatctcctcctcacgtccacaccgccgtcaacccctcccctcgcgccaccaccgtcgtcgttcaccccactcttacccttcttaggaacgtagcattagcacgagctatatactagtaataaaatagtataggtagctaacaagctggtagggctaggcacacggatactcgacgcacacggaccacgcgacatgtgttgcccactgcctagtcatcacgcgcacatcgtagcgcgtctgtgcgaccacgccctccacgtgattgtcgtttgtcatctcgccaatccagccctccaggattctagagcgctaggcgccactgctccagcctccagacatgcacggtcgagcaatcagaattcatgttattccgtggtcgtcgttcttatttctcaacttgcgaagtgctaatctgcactgatgtatattatctagcatcttagatattttaaaaatcaatttcaatgcacatcatcatttacatacaaagtattaatcttcttcgctgcatatcatataattttttatatagtctaaagggtcaaccataatcagttcgtctggggccctcaaaatcataggaccggggctgcgtaccgacatagtacaatgattacatagtcatcatcgtccgctaaaaaaacagctgttctttcacgagcgaactgtgaatgctcatatacactgccaaaatgagagcaagctttgaccaacaatagagtaccctagcctcctgccaaaatgctcatatacactgccaaaatgttcatacgatcgaaggggatttaatctcctctaatcccatcacagaatcgaacaaagcccttattaagcagcaatcgcatatacggattactattatatataaaatagcaatagacatctttttatccgggaaccataggtcaactgctgccacacctactatacttgtaaacatgacctgataataatgccacaaacagtacacacatccatggtatatacacgatatatagatggaaaaccgaatcttaattaaatttcacggcgcatagcaggacgacaaagaacacaaaacccccgtacctgtagtccactccacatatataggctagagaaggttgtgatattggcacggctcaatcaattaaacactgcgcccgcacctcgatcgaatgcgcagaattaagctataagccacccgcggccggcgagttgattgagccatgccaacatcgcactctctcagccaacaaccaaacgccaccaccccttctcgatcgatcgccatggacgactagctacccgagctcccagccacgcaaccctaaactggagggagacggagaacttgagctgctgtgc

SEQ ID NO: 125860 - DNA, 599 bp, Zea Mays
aatattacactgaggagtgaggagcacaattccttccaggatcccagaagattcgacgttccacgggctccggcggcggcaggaacgcctcccgatttcgacggcagaactagagagcgatggcgctgactaacttcatcgtgacggtggccgtggttggcgcgggggtgcttctctttaccaccgacatccgcaggtctggcgccctcttccgccgcaacgcgcgccagctccggctgtggctcgaggaggacacggcctccgccgcgtccaagtctgcaaaagaagcagctccaaagaaactcgactcgacggtccccaaggagaagccaaaggaagatagtcactgattggagctgtttatatgaacggtataacccctatttgaagtattgcaagttccgttttctacagttgctgcgatacaaacttgtagctctcaagtaaggtgcacggcaagattatgtttccgtttcaacatcggcctctgtggaacagctagctaaatgttggtattatgtcgtgtgcttatatggatctgaagcacttcgctaatctacacgtacctcaaatcttgttgatgttgtactgtgcccccc

SEQ ID NO: 125861 - DNA, 1544 bp, Zea Mays
aatattacactgaggagtgaggagcacaattccttccaggatcccagaagattcgacgttccacgggctccggcggcggcaggaacgcctcccgatttcgacggcagaactagagagcgatggcgctgactaacttcatcgtgacggtggccgtggttggcgcgggggtgcttctctttaccaccgacatccgcaggtctggcgccctcttccgccgcaacgcgcgccagctccggctgtggctcgaggaggacacggcctccgccgcgtccaagtctgcaaaagaagcagctccaaagaaactcgactcgacggtccccaaggagaagccaaaggaagatagtcactgattggagctgtttatatgaacggtataacccctatttgaagtattgcaagttccgttttctacagttgctgcgatacaaacttgtagctctcaagtaaggtgcacggcaagattatgtttccgtttcaacatcggcctctgtggaacagctagctaaatgttggtattatgtcgtgtgcttatatggatctgaagcacttcgctaatctacacgtacctcaaatcttgttgatgttgtactgtgcccccccccccccccccccccccccaattttgtaactgttgcgctggctgccgatttttctgcgccctgatcaatctgaagcggttgatttaagcagaccttgaatgaagggaatcatggtgcatttaaatgcaaccgtcgcctaacgtgtgtccgagtggggttttcttgtttttttgagcaggagaggaaaccgtcggcattctgaatcagatagaggtgacgcaacctgggacagctgccgggtggacggtccgtcgactggtggaggaggagaggtgagcagcgactgtacgagtcggaaggtggtgttgaatgatggctgctccagtgcagtgcatgggatcactcgaggttgcactagcaactttcgacgtggttgttggttcagttaggtttgcaatcgtcgtcgtccctcgcagatcatcacagggtggcgaggagatactaacagtgtatggacggtgagtctgaggagaccatcatgcctttgtcgttcagagccgggctagcacttgactgattggcctgcagagcggaaatggaaagccagagccaaaccctgctctgctcaccgtcggagataagagctcgcattgcatcagccggtctcttccgcgcacagccggactctcttcaccaaggcacacggccacacgggtcacgaggaaagtttcctttaaatacccactcggtactcatatagtataagacataaccacttttttattttatccccacgatataaagtgttctctctaaatagtgttctctctctaaatatacgtgaattgatgtaatattattagtactaatatagagaattaaatacatttattggttttgaaccagaggtgggtacaccttatatactaggacaaagagattatgatctgttcagttgggttattgctatgaaaaaagctatcatgggttgtaggctattaaaaa

SEQ ID NO: 125862 - DNA, 2297 bp, Zea Mays
ctctgcccaaaaatttgaaatccttttcgcttccatcttcaccgacccccgagcaccctatctagatggcggatccaccgcctgtgctcacgctcctggtgaagaagggaccctgcgaggggaagaccgtgcatcgccgcgccggcgccacggcgctccgtgtcggccgcgttgccaagggcaacgacctctccgtgggcgacgctggcgcgtcgcagaggcatctctccgtcaagttcctcccgccgcctgcggcccggtggtccgtcaccgatttatgctcctccaacggcaccctcctcaacggtacgcctctcgtggccactatccccgccccgctctccgacggggacctcatcaagatcggggaggccaccgtgctcgccgtctccatatcgaccgaggcaggcccggtaccgggcgccgccgcgactaggcgttccgcgcgcaacgcagcagccgtggcgacggcggcggaggaacaggtggccgctgtttctcgcagggtcggacggaggaaggccgtttcggctgaagcccccgaagctgggaatgaagtggaggaggaagctgcactcccgactcgccgaggcgggcggaggaaggccgttgagcccgctggggtggagacggaagaggaagacgaagaggaggaagcggcaataccgcgccgtagcaggccgaggaaggctgcagcgacggttgtccttccgccacagccgcaaaatatgaggtctacgagggctgctgcaaggagagttgaggttttggggtgcgaaaacgatgagggagaagtggtgaggaccgggtccgggaggggtcgaggacgggttacaagggcaaatgcaaggaatggtacgggtgttactcccggggaggaggaagacgagagtgaggtggctctggccagagatcgggaagggacagctgccgagcgcaagggtgaagtggtgccggcggctgggagaggacgatcaaagaggagcagaggaggccgaggccgaggaagggctacgagggcaagtacaaggaagcctgagggtgctattgttgggaacgatgaaaatgagcaagaggaaacggatatagttgatggcagagaacgattgagtgtgttgaccgtaaatgatggttctcaagaagataaagtggcaaatgaggttgataagttggatggaaactcaaagacacccttagaggatgagaagatggtggatgtggagcatgcgacattgacagagaggacgatagaggggagggtcaatgctcagcattctcctgctgacagtggtggtctggaagaagaggaggtgaagaatttgaccaagggaggggaaatcgaagtagaaaaggaattgagggaaagagtgtcaccagagtcaaagctggatggtgttggagaagtggaaaagaatgacaagagggaagttattggtgccggtggagagaaaggccatgtgtgggagcgcaaaggaagacacagattagagaatatgacattgggggagtggtttgttcaaatcgagaaataccttctagcaaagaatgaagaggctgctgaaatggcgatatctgaagtgcaagagaaacaccggcggttttgtgaacatgttaaaacgttcgagctcaaaaagggtactgctccttgagattccatggataatctggaaatattttggacagcctagtgttggataatttgacaccatcagatatcacaatgaagacaataacactgaagcgttgcaaactgtaggtttgtgatataaccatcattagcagggtggtgacattggaaattgtttattccagacttaggccttgtttgataatcttgctatggacatatgtattggaaactggatacatatgctgtacaagaaaatgtagaggtcaaaactgtttgtgaaaagaatagggcaccatgaaaaccgggcggcttttttttgcattataggcccgttcggctttcacggattcatggcccggaacgatggctagttcttacttcatagacagattgattatctaatttatataagattttttattagatgtcagaatgattcctggagtccagtcctgaacaaacgaacaaggtcgctgagctgccggggtgaggccactgttcaagccactggggtgaagacactatgatcttatcgctggagatatagcagggtgctacatttcactagcattaccgtttgtaatttgattcaccctcctttgtacataagaattcgtgatgttaaaggtcggaacaataaagttccattcgttgtttggccaaagaa

SEQ ID NO: 125863 - DNA, 131 bp, Zea Mays
cgggcagttcgttcattttccacgtgtattgggagcgacaggaagcttgtttagggctagtttagtaactccaatttccaaaagatccctaatttctcaagtgaaaataaactaattcaccttgaaaaaaa

SEQ ID NO: 125864 - DNA, 295 bp, Zea Mays
gtaaaaaccctattagggcacgggtatgacggattttgatacccatgggtattttattgggtcatttgttatgcccatcgggtacggtgggcgtgggtatgttctctgttgccccatacctgctacccgatggggaacccgctaatatatgacacgtgggtccggatttatatgtcacatataaaatgaattatatggtatgtccacagttttgtaaaatcaatgctatgttttgtgtgatttgaagacaagatgttgccatttaatgttgaatattgttgaacctgtgataaaa

SEQ ID NO: 125865 - DNA, 1282 bp, Zea Mays
aaaacaaatttagctgttttttctttcgacgttttcgtccctacctcgcggttggggctcgcggctctcgcggcccgcctgtgctactgctgcacccgcacggccgcgcgcacctccaccgcaacggtcacttctagctctcgtgcagtcgtgcgtcctccatcgtcgcctctcctcccgcggtcagggtaacgccgcgtgtctcccgtcgcatactcgctcacacccatggccgcaccgccggccgcctcgctagtggcacgcgccgccctcccgccgcgccttcgcccaaccaccgcttctccccttggccccgccgtcctcggtcccagcagccgccgccggtacctccgtctccgccgctcgccatcgctggcggggactgccgcggcggcggcgagctccccatccgtgccttcctcgtttccggggcccgggccaggtatcggcgatgccctcggcgacgtcgaaatctactccgcggccaccggcgagcccgtcctgttcagagacctgtgggaccaggacgagggagtgtctgttgttgcgctgctaaggcatttcgggtgcccatgctgctgggagttggcctctgttctgagggacacaaaggagagatttgattctgctggagtaaaactgattgctgttggtgttggcactccagctaaagcccgtattcttgccgagcgcttgccctttccgttggaatacctctatgctgatcctgatcggaaggcgtataatctcttgggtctatattttggtgttggtcgcacgttcttcaatccggccagtgcgaaagtgttttcacggtttgactcccttaaggaggcggtgaagaattatacaatcgaagccaccccagatgacagggcaggtgtcctacaacaggggggaatgtttgtgttcaaaggtaaagaactgttgtacgcaaggaaagacgagggcacaggcgaccatgcacctttggacgatgtgctcaatatctgctgcaaagttcctgtaacctaacccgacggcttgtcccacagctcagtaggtccgtaacacagatcactttgagctatctttactagtgatttcttatttcatccttgttacaaaaaggagagtaagaatatactcgtaacaggcacattgtctttcatccattctcttttggcaattggcgttagcagatcccttatcttgttcacaagctggacaaggttctatatgctctgccgattccctgcatgccgatttttgcataacgtcactctaagttacttctgtacag

SEQ ID NO: 125866 - DNA, 1482 bp, Zea Mays
aaaacaaatttagctgttttttctttcgacgttttcgtccctacctcgcggttggggctcgcggctctcgcggcccgcctgtgctactgctgcacccgcacggccgcgcgcacctccaccgcaacggtcacttctagctctcgtgcagtcgtgcgtcctccatcgtcgcctctcctcccgcggtcagggtaacgccgcgtgtctcccgtcgcatactcgctcacacccatggccgcaccgccggccgcctcgctagtggcacgcgccgccctcccgccgcgccttcgcccaaccaccgcttctccccttggccccgccgtcctcggtcccagcagccgccgccggtacctccgtctccgccgctcgccatcgctggcggggactgccgcggcggcggcgagctccccatccgtgccttcctcgtttccggggcccgggccaggtatcggcgatgccctcggcgacgtcgaaatctactccgcggccaccggcgagcccgtcctgttcagagacctgtgggaccaggacgagggagtgtctgttgttgcgctgctaaggcatttcgggtgcccatgctgctgggagttggcctctgttctgagggacacaaaggagagatttgattctgctggagtaaaactgattgctgttggtgttggcactccagctaaagcccgtattcttgccgagcgcttgccctttccgttggaatacctctatgctgatcctgatcggaaggcgtataatctcttgggtctatattttggtgttggtcgcacgttcttcaatccggccagtgcgaaagtgttttcacggtttgactcccttaaggaggcggtgaagaattatacaatcgaagccaccccagatgacagggcaggtgtcctacaacaggggggaatgtttgtgttcaaaggtaaagaactgttgtacgcaaggaaagacgagggcacaggcgaccatgcacctttggacgatgtgctcaatatctgctgcaaagttcctgtaacctaacccgacggcttgtcccacagctcagtaggtacttggaaagcactttcggcgtccttgattcctgaacttccaggatcgcctgctgcaagagtgtcttctccaccaatgtgccgatattttcttttgagatgcttggtttactttgatatctttttggtgatggatcgtgagttgttggcttgttgcattatgaattgcgtactgtaagtatccagtttgctgtttagcacttatacaattcgaaagcaaagttcgaagtcctggctgcctggctcttccttggagatggaagtttttgcacttccagaaatatcgggaacataaagtccatgtgatcttttgtgcctttaaaattttggatcgtttcctaatggaaatctgttccagttttattgacatcagaaatcctatctcctgtagtcctgttattcagcgtctgagtggagctataaaattgatcttatcatt

SEQ ID NO: 125867 - DNA, 1323 bp, Zea Mays
aaaacaaatttagctgttttttctttcgacgttttcgtccctacctcgcggttggggctcgcggctctcgcggcccgcctgtgctactgctgcacccgcacggccgcgcgcacctccaccgcaacggtcacttctagctctcgtgcagtcgtgcgtcctccatcgtcgcctctcctcccgcggtcagggtaacgccgcgtgtctcccgtcgcatactcgctcacacccatggccgcaccgccggccgcctcgctagtggcacgcgccgccctcccgccgcgccttcgcccaaccaccgcttctccccttggccccgccgtcctcggtcccagcagccgccgccggtacctccgtctccgccgctcgccatcgctggcggggactgccgcggcggcggcgagctccccatccgtgccttcctcgtttccggggcccgggccaggtatcggcgatgccctcggcgacgtcgaaatctactccgcggccaccggcgagcccgtcctgttcagagacctgtgggaccaggacgagttgccctttccgttggaatacctctatgctgatcctgatcggaaggcgtataatctcttgggtctatattttggtgttggtcgcacgttcttcaatccggccagtgcgaaagtgttttcacggtttgactcccttaaggaggcggtgaagaattatacaatcgaagccaccccagatgacagggcaggtgtcctacaacaggggggaatgtttgtgttcaaaggtaaagaactgttgtacgcaaggaaagacgagggcacaggcgaccatgcacctttggacgatgtgctcaatatctgctgcaaagttcctgtaacctaacccgacggcttgtcccacagctcagtagtaggtacttggaaagcactttcggcgtccttgattcctgaacttccaggatcgcctgctgcaagagtgtcttctccaccaatgtgccgatattttcttttgagatgcttggtttactttgatatctttttggtgatggatcgtgagttgttggcttgttgcattatgaattgcgtactgtaagtatccagtttgctgtttagcacttatacaattcgaaagcaaagttcgaagtcctggctgcctggctcttccttggagatggaagtttttgcacttccagaaatatcgggaacataaagtccatgtgatcttttgtgcctttaaaattttggatcgtttcctaatggaaatctgttccagttttattgacatcagaaatcctatctcctgtagtcctgttattcagcgtctgagtggagctataaaattgatcttatcatt

SEQ ID NO: 125868 - DNA, 354 bp, Zea Mays
atggccagcgggcgcaggcggatcctcctccagctcgtccctgtctccggcgcgtgctctgctcagctatggcgagctctgtacagtgagctctcctgtcaatggcaggggctagggcgtgctctgctcaactacgttgaacagggaagacaaagagcaggggaacatttgctttttgtatctaaacatttgctggttgaactactaattgaaactgaacatttgctgctagttgaaactgaacatttattgttgcatgtgctgctgaatttgctagttgaaactgagactgttgttcgtatcttggacagaacatgtgttgttggacatttgtcgttgcatgcctgtgtctag

SEQ ID NO: 125869 - DNA, 1329 bp, Zea Mays
atggcttataatggacagtatgggtttggatcttatggcatgggcttagaagataaactggggttgtatccatcttcatctggtacactgagtcaggacatccagatgagtgaagagcatagcggagttgtgaagaagaggaaaggagtggaggactgtgtcacattgttgcacgatgcaggtgatcaacaaacaaaaggttcgcctcagccagaaaggaattcagtggaggaggggaaccgaaagatttcgcccaaaatgcaaagcaaggaagattcttctgatggtgatggtactaaagaggactatgttcatatccgggcaaagcgaggccaagccactaacagccacagccttgcagaaagactgaggagaaagaagataagtgagaggatgaagcttcttcaagatcttgttcctggatgcagtaagatcactggcaaggcagtcatgctcgatgagattatcaactatgtgcagtcattgcaacgacaagtcgagttcttgtcaatgaaactcgcaactgttaaccccgagcttggctttgacattgagcagatcatatccaaacaaatgctgctttcacaagacagacatcttgctttctatggagtcgaaccaggatcaagcggccttactggcccatttaaccaaggaatcatgcagccagaattgatgtgcaccattgccaatcccgttgatgttttgcacggagctattcacgacgcgtcaacaatgaaccatataccttctatgtgggaaggacttcagaatatgcctcagatgaacttcaaccctggcgtggcagccgatagcggcaccaacaactctggctccatgaagatcgagcagtgagcttctgtatagctccggaattgttctgtgaatcatgaatcgtcgaaaagcgctcacggggtggagtcttttttgtatagctggaggcctaaccattcatgccggtttccttctgttgcttccatactgtgcgacacattgtttatggtacggcaaatgaggatcatgtacagctggagctggaaaactgatgccactgtaaatttctgctgtgttttggcctgtggaaattgggatggaaacctattaccatccatgaaatccaatggcagaagcttgttggaactagggaccaggtgctgaatgctgatgggccaacatactagaatggaatagtaggtacaaaaatgcagagtttgaagcctctttgtcggaaattccatggaacatgcaatgtaaggtttcatcatgcaatggaaggaaactcattattgttaatacttgttatttcaaacgtgtgatcataattttagt

SEQ ID NO: 125870 - DNA, 852 bp, Zea Mays
aaaatcaatctaatagtgccaaaaatgtactttgtatcaattggccaatatagagatggtcgatatgggggggaaataaagagcaaagacaagttccccatgtaaatatacaagagaaaaaaaagcataaaaatggtttaagtggtttggaaatagcccggaatttctgatgccaaattgtcttctatcttttaggagctagattttgtaaacgatcggagaaacataataaatgtgtgcgtaactttttttagccacttggagaactcattgatttgccagtttcgtttagtaactattgaatatgctcttaggctgtaagtgtcatttcaaatatagatttcagactcatacaaatcggacgagcattgaataagaaaagaataattttatatttgcatccacagtagacagtacttgattgccatttgactgatatttatgttgaccttgaaggaactgagcataggagaagaaagtttcacaccctcagatgtcgagagagcactgtggagctcggcaattgcgtccaagtcaccaccaagcggtaacccaaagagggaatcaaagatgcatggcaagaggaaaagatgatttacaccgcgcttctttattgaggctaaaagggttttagtagctgcgggtcttagattcttagttgaacacttgtttttgtaacctgcggaatggaatcctttggtggagtataatttgaaatccttagttgaccaaaacactttatttcctacatgcctaccagtgaccctcgctacatgagctcggatgcatcgtgcatgtgtatttcaagactaatgcacccgttgttgctattgctgaaaatatgtgccggtc

SEQ ID NO: 125871 - DNA, 839 bp, Zea Mays
aaggaaatctgggcctttaatcgtcgtcacctagctcgcggatggtccgcacgcagtttccaccgtcagtatcgcattggagtgaaacaactcccatcattgccaccgattaggaacttaggaatggactcgccggtgcctgctacgctcgcgcgcgcgccagcgagaccgcaagcgcgggcgggcgaggaggcttgcgcggatactcggcaggatgctccggcggaagcggagccacctccccgtcggccggccgcgttctacagctccgtgttcgcgcagatcgaagagatcgggtggaagcagctggtgagcgccacaggagacggagtgtcctgtctcaccttccgcgtcgtggatgaaccaggacggatgcatttactggagatcacactgcccatgggctatcccgaaagtcctccttcaatctctgcagacgtaccatatctcccgaaaatacattggtcaaaaaactcaagactgaaagatgttatttgccaatttcaagcggtaggtgaactgtttatatcgcctaaaacatatggttgtcctattcgtggattgttatgttgtgttgttctatgttattgggttcacacaatcagcacttgaaaatcttgcaagagttctggaatacgatggacgagattgataaggtcctttggattgttgatccaacaaagccgtcttatgctatgtctcatcgtcgtatagctttaggtaattcccttactcgtctgcaagtgatagttgcggtccccttatttatgtttgcttagattgctatttgtgcctgaaatcactaggtgacgattgctacattttgttgcaagttgatg

SEQ ID NO: 125872 - DNA, 1429 bp, Zea Mays
aaggaaatctgggcctttaatcgtcgtcacctagctcgcggatggtccgcacgcagtttccaccgtcagtatcgcattggagtgaaacaactcccatcattgccaccgattaggaacttaggaatggactcgccggtgcctgctacgctcgcgcgcgcgccagcgagaccgcaagcgcgggcgggcgaggaggcttgcgcggatactcggcaggatgctccggcggaagcggagccacctccccgtcggccggccgcgttctacagctccgtgttcgcgcagatcgaagagatcgggtggaagcagctggtgagcgccacaggagacggagtgtcctgtctcaccttccgcgtcgtggatgaaccaggacggatgcatttactggagatcacactgcccatgggctatcccgaaagtcctccttcaatctctgcagacgtaccatatctcccgaaaatacattggtcaaaaaactcaagactgaaagatgttatttgccaatttcaagcgcacttgaaaatcttgcaagagttctggaatacgatggacgagattgataaggtcctttggattgttgatccaacaaagccgtcttatgctatgtctcatcgtcgtatagctttaggtgacgattgctacattttgttgcaagttgatgcacgcaagcccaactccttaccagagtgtcgcttcttgggcacagatggcaaacttgatcagctgataataaattggagaaagaaccgtaaaaaatgggatacaaagaaaaaattccatgagaatttggcagccgtcttggactttgcactgccttcacccccttcggtcggtgataaagcgaaagatgacgagcaagctgattgtgggatatgttatgccaagcatctgccagttgatgacgaactcggtgcccacagcgggtgtgcgacggactacatgtgtgagaaccccagctgcagcagagccttccattccgtgtgcctgagagactggttgcgctccatcaccacgactaggcagtcgttcgatgtcctgttcgggaactgcccctactgcagcgatcccgtcgccgtcaagatcaccggccactaacactgtatcttggtcagcgtttacaaagtcagccaggcgattttaggtgcaccttaacttgcgtttcacgtcacacaagggagaaaacgagactattttggttcctgcttacatgtacaatagccaagtgtcaccttcggttacgttatctaaatgagctcctgcttacatgtagtattatgtcagtttcctttcagaaaggtcaagatcgctctaggtggatacattcgtccgatttagcggagctgcaactgaaatatgtcaaaatttgccgccggcttctagagaacaaacgctcttctatagaagggaaggggttattcgataataattctac

SEQ ID NO: 125873 - DNA, 1515 bp, Zea Mays
aaggaaatctgggcctttaatcgtcgtcacctagctcgcggatggtccgcacgcagtttccaccgtcagtatcgcattggagtgaaacaactcccatcattgccaccgattaggaacttaggaatggactcgccggtgcctgctacgctcgcgcgcgcgccagcgagaccgcaagcgcgggcgggcgaggaggcttgcgcggatactcggcaggatgctccggcggaagcggagccacctccccgtcggccggccgcgttctacagctccgtgttcgcgcagatcgaagagatcgggtggaagcagctggtgagcgccacaggagacggagtgtcctgtctcaccttccgcgtcgtggatgaaccaggacggatgcatttactggagatcacactgcccatgggctatcccgaaagtcctccttcaatctctgcagacgtaccatatctcccgaaaatacattggtcaaaaaactcaagactgaaagatgttatttgccaatttcaagcgcacttgaaaatcttgcaagagttctggaatacgatggacgagattgataaggtcctttggattgttgatccaacaaagccgtcttatgctatgtctcatcgtcgtatagctttaggtaattcccttactcgtctgcaagtgatagttgcggtccccttatttatgtttgcttagattgctatttgtgcctgaaatcactaggtgacgattgctacattttgttgcaagttgatgcacgcaagcccaactccttaccagagtgtcgcttcttgggcacagatggcaaacttgatcagctgataataaattggagaaagaaccgtaaaaaatgggatacaaagaaaaaattccatgagaatttggcagccgtcttggactttgcactgccttcacccccttcggtcggtgataaagcgaaagatgacgagcaagctgattgtgggatatgttatgccaagcatctgccagttgatgacgaactcggtgcccacagcgggtgtgcgacggactacatgtgtgagaaccccagctgcagcagagccttccattccgtgtgcctgagagactggttgcgctccatcaccacgactaggcagtcgttcgatgtcctgttcgggaactgcccctactgcagcgatcccgtcgccgtcaagatcaccggccactaacactgtatcttggtcagcgtttacaaagtcagccaggcgattttaggtgcaccttaacttgcgtttcacgtcacacaagggagaaaacgagactattttggttcctgcttacatgtacaatagccaagtgtcaccttcggttacgttatctaaatgagctcctgcttacatgtagtattatgtcagtttcctttcagaaaggtcaagatcgctctaggtggatacattcgtccgatttagcggagctgcaactgaaatatgtcaaaatttgccgccggcttctagagaacaaacgctcttctatagaagggaaggggttattcgataataattctac

SEQ ID NO: 125874 - DNA, 1647 bp, Zea Mays
aaggaaatctgggcctttaatcgtcgtcacctagctcgcggatggtccgcacgcagtttccaccgtcagtatcgcattggagtgaaacaactcccatcattgccaccgattaggaacttaggaatggactcgccggtgcctgctacgctcgcgcgcgcgccagcgagaccgcaagcgcgggcgggcgaggaggcttgcgcggatactcggcaggatgctccggcggaagcggagccacctccccgtcggccggccgcgttctacagctccgtgttcgcgcagatcgaagagatcgggtggaagcagctggtgagcgccacaggagacggagtgtcctgtctcaccttccgcgtcgtggatgaaccaggacggatgcatttactggagatcacactgcccatgggctatcccgaaagtcctccttcaatctctgcagacgtaccatatctcccgaaaatacattggtcaaaaaactcaagactgaaagatgttatttgccaatttcaagcgcacttgaaaatcttgcaagagttctggaatacgatggacgagattgataaggtcctttggattgttgatccaacaaagccgtcttatgctatgtctcatcgtcgtatagctttaggtgacgattgctacattttgttgcaagttgatgcacgcaagcccaactccttaccagagtaaggtcagattttaggactatttgaagccaaccatggttgatcccatgtgtcaccatttcttctaggtgtcgcttcttgggcacagatggcaaacttgatcagctgataataaattggagaaagaaccgtaaaaaatgggatacaaagaaaaaattccatgagaatttggcagccgtcttggactttgcactgccttcacccccttcggtcggtgataaagcgaaagatgacgagcaagctgattgtgggatatgttatgccaagcatctgccagttgatgacgaactcggtgcccacagcgggtgtgcgacggactacatgtgtgagaaccccagctgcagcagagccttccattccgtgtgcctgagagactggttgcgctccatcaccacgactaggcagtcgttcgatgtcctgttcgggaactgcccctactgcagcgatcccgtcgccgtcaagatcaccggccactaacactgtatcttggtcagcgtttacaaagtcagccaggcgattttaggtgcaccttaacttgcgtttcacgtcacacaagggagaaaacgagactattttggttcctgcttacatgtacaatagccaagtgtcaccttcggttacgttatctaaatgagctcctgcttacatgtagtattatgtcagtttcctttcagaaaggtcaagatcgctctaggtggatacattcgtccgatttagcggagctgcaactgaaatatgtcaaaatttgccgccggcttctagagaacaaacgctcttctatagaagggaaggggttattcgataataattctacataagagtggttttacgaggcgactcgactcgtttcggcttgatttcagacctagtcgtagtcgagtccttgtgctctccatcgagcccatggacccatctataatgtatagcttgatctgaatacccatagtatatattcttaacatta

SEQ ID NO: 125875 - DNA, 2964 bp, Zea Mays
aaggaaatctgggcctttaatcgtcgtcacctagctcgcggatggtccgcacgcagtttccaccgtcagtatcgcattggagtgaaacaactcccatcattgccaccgattaggaacttaggaatggactcgccggtgcctgctacgctcgcgcgcgcgccagcgagaccgcaagcgcgggcgggcgaggaggcttgcgcggatactcggcaggatgctccggcggaagcggagccacctccccgtcggccggccgcgttctacagctccgtgttcgcgcagatcgaagagatcgggtggaagcagctggtgagcgccacaggagacggagtgtcctgtctcaccttccgcgtcgtggatgaaccaggacggatgcatttactggagatcacactgcccatgggctatcccgaaagtcctccttcaatctctgcagacgtaccatatctcccgaaaatacattggtcaaaaaactcaagactgaaagatgttatttgccaatttcaagcgcacttgaaaatcttgcaagagttctggaatacgatggacgagattgataaggtcctttggattgttgatccaacaaagccgtcttatgctatgtctcatcgtcgtatagctttaggtgacgattgctacattttgttgcaagttgatgcacgcaagcccaactccttaccagagtgtcgcttcttgggcacagatggcaaacttgatcagctgataataaattggagaaagaaccgtaaaaaatgggatacaaagaaaaaattccatgagaatttggcagccgtcttggactttgcactgccttcacccccttcggtcggtgataaagcgaaagatgacgagcaagctgattgtgggatatgttatgccaagcatctgccagttgatgacgaactcggtgcccacagcgggtgtgcgacggactacatgtgtgagaaccccagctgcagcagagccttccattccgtgtgcctgagagactggttgcgctccatcaccacgactaggcagtcgttcgatgtcctgttcgggaactgcccctactgcagcgatcccgtcgccgtcaagatcaccggccactaacactgtatcttggtcagcgtttacaaagtcagccaggcgattttaggtgcaccttaacttgcgtttcacgtcacacaagggagaaaacgagactattttggttcctgcttacatgtacaatagccaagtgtcaccttcggttacgttatctaaatgagctcctgcttacatgtagtattatgtcagtttcctttcagaaaggtcaagatcgctctaggtggatacattcgtccgatttagcggagctgcaactgaaatatgtcaaaatttgccgccggcttctagagaacaaacgctcttctatagaagggaaggggttattcgataataattctacataagagtggttttacgaggcgactcgactcgtttcggcttgatttcagacctagtcgtagtcgagtccttgtgctctccatcgagcccatggacccatctataatgtatagcttgatctgaatacccatagtatatattcttaacattattctcttagtcgtccatagtatacattcttaatagtaggtcctgagttttatttgtccgagttattaaatcaagcagataagacacttatcttgaaccttctaggataacttgattttgttgtatctgtgttgatgtcttcgatcgagtcctttaatcccttgtgcaggacccgagtttatagactcagcccactgttcatgacgcgtacgcttttactgaactgtcacgtcgttttagcttctttagccactttacaatgtaaaataactcgcttctcagttctggaaaggcggtacggacagcgcatatagggggttaaatggaaaatgggggatggaaaaaggattcattttttggaagatatatggtttggaaattcaagcttagcaactccattctgccccctatacgttgttaacaatgaacaaggagcctcgttgggagatatttgggaaggtcgtgtgttgaaattggcttttagaaggagtgtttcggatcaaaacatgagactctggtgggatctatgtgctataatggaaaatattactttgttaaatgaagatgaccagattatttggtcctatggttccaatggaaaatattgggtgcaatctctgtatgcagttatcaattttagaggggttcgcccagtttttgttcatgttgtctggaatcttatggttccgcccggaattcatatgttcctttggctaatgtccaatgataagcttcttaacagagataatttgtcgaaaagaaaatagttatctgataagtcctgccttttctgtttggaagatgaatcaatttatcacctcttttttgaatgttactccctccgtttctttttatttgtcgctgcaaataaaaagaaacggaggaagtacatagctaagagaatgtggaatgtgattaacaacctgttgaactggaacgtgggtgaggacttggaatatgtgctgctgttttatggtctatggaaaacccgtaatgctttgtgctttcaggggaaaatgggagatgtgtgaaggaggtgtcgagaagagtgacacagacgctctggaggcctcttttcaagccaaaaaaattgggaggagccgaatttatacattggtgctttggagaaaatggcttgggggccggagcgcatttcttggaggatgaattctgatgaggtagatagtggagataatacaaaagataatggctggagtatgtctaggacctttgagccactttggagatgttttggagaatagcggacgcgcttcgaatacgttactgatgtaataatctcatgctgttacgctttatttcgggaggaatatagtgggggcaaacctttccgtctaaaaaaataacaaatgtcactttattttcctc

SEQ ID NO: 125876 - DNA, 966 bp, Zea Mays
atggactcgccggtgcctgctacgctcgcgcgcgcgccagcgagaccgcaagcgcgggcgggcgaggaggcttgcgcggatactcggcaggatgctccggcggaagcggagccacctccccgtcggccggccgcgttctacagctccgtgttcgcgcagatcgaagagatcgggtggaagcagctggtgagcgccacaggagacggagtgtcctgtctcaccttccgcgtcgtggatgaaccaggacggatgcatttactggagatcacactgcccatgggctatcccgaaagtcctccttcaatctctgcagacgtaccatatctcccgaaaatacattggtcaaaaaactcaagactgaaagatgttatttgccaatttcaagcgcacttgaaaatcttgcaagagttctggaatacgatggacgagattgataaggtcctttggattgttgatccaacaaagccgtcttatgctatgtctcatcgtcgtatagctttagatgcacgcaagcccaactccttaccagagtgtcgcttcttgggcacagatggcaaacttgatcagctgataataaattggagaaagaaccgtaaaaaatgggatacaaagaaaaaattccatgagaatttggcagccgtcttggactttgcactgccttcacccccttcggtcggtgataaagcgaaagatgacgagcaagctgattgtgggatatgttatgccaagcatctgccagttgatgacgaactcggtgcccacagcgggtgtgcgacggactacatgtgtgagaaccccagctgcagcagagccttccattccgtgtgcctgagagactggttgcgctccatcaccacgactaggcagtcgttcgatgtcctgttcgggaactgcccctactgcagcgatcccgtcgccgtcaagatcaccggccactaacactgtatcttggtcagcgtttacaaa

SEQ ID NO: 125877 - DNA, 2872 bp, Zea Mays
atcgcaaacgcctacgcggccgcatgcatgcccccgacgcggccgattgggcatttggggcgaacggttgtttcggcaaggaagccgcgcctacgcccgcccgcgctcgcgcctctccaccgccgccggcgtgaacctcaaccaagcaccgcgcccgcgccggcgactgtccataaggccgtgtcctgccgtcgcgcacccctgcgtcgtacgatcgtccacgataccaaggtatcagcacagactgcagcatcagacttatttggctggagaaatcagggatcatcagagtcaaaggcaacaagattctgctaccatatcagtgcaagcgaatggctgactgtttaaagacatgcctggatcttctattgtgaattcgcagttctttcatgggtggattgtcaggatcccaaactggtagaggtgggggatggaattctctgctcttctgacttcagcggggataaacatcgctgtctgcgtgctcttcttgtccctctattcgatcctcaggaagcagcctcacaacttcagcgtctactttgggaggcggcttgctgaagagaggttccagaggcaggacgattacttctcgtttgagaggctactgcctactgctggttggattgtaaaggcgtactggtgcaccgaagaagagattcgacaagttgctggcttggactctgttgtgttccttcgcctcttcattttcagcatccgtatcttctcaattacttctcttgtttgtgtatttgttgtgcttcctgttaattatcatgggaaagagatgaatcacaatcatattccggaagagtcactgaatgtttttactatagccaatatcgtcgaagaatctcgaaagctttgggtgcactgctctgctttatatgtcataacaatctcagcctgcattcttcttttccacgaatacaagtatatttcgaggaagagactagcacatgttactggatatcctccaaatcctgggctttttaccgtgcttgtccgttcgattccgaggtttgacaatgagctgcttgatgacacaatcagaaatttctttgttaactatcacggatcaagttatctgtcgcatcaaatgatctttcgcaagggacattttcagaagtttgtggatagagcagagagggcttacaggagatttgtaagggtaagactctccgtatctgagcggaatgggagatctagcatgtccaggtgtggtgtctgtggtgtaagagcttcctcatttcagctttaccgcaacaagttcatcgaggccaagaagtcagacctcactaatccggaagtagtggaagctcaaaagaactgtcccggtgccttagtgttcttcaagactcgctacgcagccgtcgtcgcctcacgggtattccagtcatcaaaccctatgctatgggtgacagatctggctcctgagccacgcgatgtgtattggtcaaacctctggatcccctacagacagatctggctccggaagctagcgacactcgcagctagtatcgttttcatgttcgtgttcatcgtccccgtcgcgtttgtccagagcatgatgcagctggagcagctcaaaaggatgttcccgagcttgacaggtctcctaaataagtccttcttcgccagagtgataacgggataccttcctagcgtcaccttgctgctgtccctgtacaccgttcccccgctgatgatgctcttctcctctatagaagggtccatctctcgcagcgggaggaagaggagcgggtgcttgaaaatcctcttcttcaacatctggaacgtcttctttgtgaacgtcctgtcgggatccgtgctcaaccagctcaacgtcttctccagacccaaggacatgccgacgatgctagctgaactagtgccgaagcaggcaacctttttcatcacgtacgtgctcacctcaggctgggcgagtctgtgctcggagatactgcaggttttcaacttggtctacaacttcttcagcaggttcgtctgctgctgccatcgccagaataaggaatacgtttactctttcccgtaccacaccgaagtgcccaaagtcctcctgttcaacctgctcggcttcacgttctcgatcatggcgcccctcatactcccctttctgctcgtgtacttctgcctcggctacttggtgtatcggaaccagattctgaacgtgtactacccaaagtacgaaatggggggcaagctgtggccggtcatgcacaacgccatcgtgttctcgctggtcctgacgcaggtgatcgcgctcggcgtcttcaccatcaagcgctcccccgtgacggcgggcttcaccatcctgctgctcgtcggcacggtcctcttcaacgagtactgccggcaccgcttctcccgcatcttcgaggcctactccgcccaggacgtgatcgagctggacagggacgacgagcagtccgggaggatgcaggagatccaccagcatctgctggacgcctacagccagaccccgccgggggagggatcctccaggggcggcagccaggtgcccatcgagctcatcatggaggaccccgcgcaggaggcgtcggagtccagccaggagctctgcgacaccgtgcaggaggtgtccggggccatccacgaccacgaccacgtcgtcgaggacaaggcgcattccgtgtagactagatggtctggactctctgcgggtgcgtacgcatgtagatgctgtacagcgcgcatagcagactcgaaacccggaagcaaatacttacatttataaatctacgtgtatagaaacaacagtctaatctattggcaatcgggtactttggcccggcccaacacttcactctctgtccattggattggcaca

SEQ ID NO: 125878 - DNA, 745 bp, Zea Mays
atgcacagaggccttgagctcccagtccgtgatccagctgcggggaaatcaaatggtgtcgtcgccgctgtgctccgcttccccacggccgcttcgagccccaggccagcctccctgagacgtccgctcgccgcggacggtcgtcgtggccgcaggcacccgtgtgagcggagcggaggcccgcacgtcgctggtgctggccttggcctcgcatgcgctctccgcctcgcagcgccgcttcgccgagctcgccgatgaggccgccaagtaagccttcccgtccggccgcttcgagccccgcaccctcgaggaggccctcatgtctgtgcctgatctcgagacagttccgttgcgcatactgaagcgtaaggcagagtacgagatcaaagaagtggagtcatacttcgttgctgaaacgacgatgcccgaaagatctgggttcgatttcagtgggtcatctcagtcgttcaacgtgctggcatcatatttattcggtaagaatactgcctctgagcaaatggaaatgacaacacctgtttttactcggaagggtgagttaaacagccaatcaatggacatgaccccagtgataacaaaaaagtcagctggtacaaataaatggaaaatgtcatttgtgatgccagcgaagtatggttccaatttgcctcgcccaaaagatccttttgtgactatcaaggaggtgccctgcaaaatagttgtcgttgcagccttttcaggttcataa

SEQ ID NO: 125879 - DNA, 1882 bp, Zea Mays
tcagagattatgatacaagcatgactggttcttgaacactatacaaggctttggagagatgggatgtgctgcttccaggttagaagatgaggaggctgtcaagatgtgccgggacagaagggacttgatcaagcaggcactggagcagcacaaccgatttgcatcttcccacattgcttacattgagtccctgaagcgtgtttcggtggctctccaacggtttgttgccggagatgatcaccatgagctaatcttcgatacattcatctcccctatcaagcaacagaagccagagatgcttggtctgccttatggttcatatgagaagagaactattcatgtttcaaggtacctgaggtcagggcctaacccatcagtgtccattgaggagcacccacgtccggtggaaacagtccgtgtcgagtcaaattaccctatggacaacgacagtggcatggtggatagattcctaccaacacactcttcaccagtgagatcgtcttcatactacccgccaccttataacaggccaagctaccaacctccattggaccaggaaacagttagaaattcttcctattgcatgccttatgacaggccaagctatgcacctccatcaccccaggagacaatgaggacttcttattatgcatcttatgacaggccaagctacccaccaccatcaccccaggagccactgagaaattcatatcacgtgccatatgacaggccaagctacccacctccgtcaccccaggagcaggaatcatcaccgtgggacttcttctggaacccattctcatcactggacagctttacatatccccgccctcggagtagctatgacaatgtggtcactgatgatgaactcgtgaggttacaacgggtacgagaggaggaaggaatcccagaacttgaagaggaagatgatgagtgtcaagagcatgtacagatggacagaaaagaggaaaaagaagagcacgacaatgcagatgatgatgaagacgatgatgaagacgatggcgaggaatgtgagcattcagatgagtgtatggtttctaatgtgaattttgatgccaatatgaagcaagaaacaaagggatttgaatccaaaggtattcagtgtactgaagcaccagaaccttgcaagacagtagaacttgagataaaggcacacaagaaagagttgatgagaaacagagtagcaaatgcagaagaaactcctggtttcacagtatatctgaatcgaaggccagcaagcttggttgaggccatgaaggatatcgactgtcagttctcggggatatgtgacgctgctcggaaaatctcagtaatgttggaggcaagtagagctcagtactcaacctcaaacgatctttctgcgaagatgctgaacccagttgcacttttgcgttctgcgtcatcccgttcatcatcatctcgtttccttcttgctccctctagctcaatagatgatctctttaacaatgagactagcagctgctactctgaagaatcttgcagtaccatgtctggaagtcaccactctaccttggatagactctatacatgggagaagaaattatacaaagaagtaaaggcaggtgagcggttaagaatcgagtatgagaagaggctgacacatttgaggaaccaagatgtgaaaggcgaagaacctatctctgttgataagacttgtgcagcattgagaagcttgcatactcggctgaaggtgtcaatacacacagttcagtcggtatcaaggaggattgaaattctaagggatgaggagctgcatcctcagcttatggagttgattgtggacacggagacgatcagcaagcacgacgtgatcagggattttccttcgcatctcctgtag

SEQ ID NO: 125880 - DNA, 2006 bp, Zea Mays
tcccaccactctcactcacatctccattggtggccattgcgaacgaacccgagctccgatctccacaggacttgttgagcttccaagcagctagcagcagcatcgagcgctagcagtccatttggattttggtttggaattggaagcaagcaagacgtccaattcccagtcctcaccaatcaaatcaacctgcagatggcaacgcagtggttctccaacatggtggtggacgagccgagcttcttccaccagtggcagtcggacgcgctgctggagcagtacacggagcagcagatcgcggtcgcgttcggcggccacgggggtctggacctcgacctcgacctggacctggaccacggcgtggcgacgccgccgccgctgcagcgagtacccgcgccggcggccgaccaccgcccgcgcaaggcggccaggggcaacgccagctgggactcgtgcgtcacggagcagggctcccccgacgactactcctcgccgaccatcctctccttcgccggccaccacgccaaggcgcccaagcaggagctgctcgacgccgccgccgccgcgctgccgtcgttccagcaggcgcgcccggcgcccaagcgctcctacgacgacatgatggccgaggccgccaggtcgccggcggccgccgcacgcccggcctcacagaaccaggaccacatcttggccgagcggaagcgccgcgagaagctcagccagcgcttcatcgcgctctccaagatcgtcccgggcctcaagaagatggacaaggcatccgtgctcggcgacgcgatcaagtacgtgaagcagctgcaggaccaggtgaaggggctggaggatgacgcccggaggcgcccggtggaggcggcggtgctggtcaagaagtcgcagctgtccgccgacgacgacgagggctcctcctgcgacgacaactccgtgggcgccgaggcctccgccacgcttctgccggagatcgaggcccggctgtcgggccgcacggtgctggtgagggtccactgcgacaaccgcaagggggtgctcatcgccgccctctccgaggtggagcgcctcggcctctccgtcatgaacaccaatgtgctccccttcaccgcctcctccctcgacatcaccatcatggccatggctggtgacgacttctgcttgtctgcaaaggatattgtcaagaagctaaatcaagcattcaaatcacccttctgatgggattagcttaatctatgtcaacttttttcccattagccttaaggatttgaggctaatggttaggttatcaggtccttccttgcctttgcttccgaagagagttgcttgcagtccccaagagtccccccacacaaagatagccatttccactggttttttgctacatgggtgcagagattgatcacctagctagttacctacttaccatcccattttatctgtctctccagttttttacatggtttgatgttgtcactccatgtttttgggagagagcagattgtaaaaaaaaaacagcctttttttctagggctttgctatataggcctggggagtttgacttttacaaacctaatttttctttctccccttcgcccgtatgttgccctttaattcaccttgttttttccatgagaggatggtgtttttcaaacaccagcacctaccttcgccgtcctctcaaccttgatcacactgctcccagaaaaagcttcagttgtggagaaaatggcgccgtctttttttttaatcagctctgagggggactttgcaagccttgatttggaagtactgtagggatgcctcacttctattgtttctgttttttttgagggtcctacaagttggccgccacttgaaacttgatggagcctttgcctatagttttcacatgtgagttttgttgtcacaggacaggatgaaggtgtagttgttgtcatctcttgtttactctcatagaagcataaataaataaatgtgctcgtttggtacctctcatggct

SEQ ID NO: 125881 - DNA, 1008 bp, Zea Mays
aaactccacgactcggtctcctcttcctagcaccatccggcccatccagccgccgccgccttgcatcctccacctctccggatcccgccgcgatggaggaagacgacgagttcggcgacctctacacggacatcctcatccccactcatacccccgcatccacctccgcgctatccaaccctgttctagtcgaaaccctacaccgcccgcctccacaccctaatcctacccccgtggcggcggcagcagaggaggtcgacgatgactggctcctaggagggagcgaacccatacccggggtcgacccgaccggcgattgggccgacgaggacgacgatggaggggagcccgcacctcccgcgaagcggtccacctctgcggatgatatcgatccgctcatggggggtggtgcgggggattccgggccggtcatccctgggctctcgtcatcatcggcagctggtgcggccgggagcgacgaatgggacagcgatagcgaggacgacatccagatcgtgctcaacgagaccgatggccgcccggggcttgtggaggatgaaggagacgacgaagacggtgaggacctcgtcatcgtcgccgacggaccagcgatggaggagcaggattggggagaggacccagcagcggcaggggcagaaggagagcgaaaggacggatgtgagcctggtaagacggtggcagcaccgaccggaaggatcgggtacagtggcggcggcccagggttccatcagcagcaccattccatgttcaaggtcagttatttgtgccaagaagccgtacgatgcgctctggctacccctgcagagggagacggcataaaactagttgcaactcactatcctttatgttgtaatgtgttagtctgtggaaatttcttgtgaagttagtttctgttttacaatcctttgcgaaccattccacaatgtaactgtaaatgcattattagcatggtctataaaggaagaaaagaagaaaggttcaatgata

SEQ ID NO: 125882 - DNA, 2335 bp, Zea Mays
atggaggaagacgacgagttcggcgacctctacacggacatcctcatccccactcatacccccgcatccacctccgcgctatccaaccctgttctagtcgaaaccctacaccgcccgcctccacaccctaatcctacccccgtggcggcggcagcagaggaggtcgacgatgactggctcctaggagggagcgaacccatacccggggtcgacccgaccggcgattgggccgacgaggacgacgatggaggggagcccgcacctcccgcgaagcggtccacctctgcggatgatatcgatccgctcatggggggtggtgcgggggattccgggccggtcatccctgggctctcgtcatcatcggcagctggtgcggccgggagcgacgaatgggacagcgatagcgaggacgacatccagatcgtgctcaacgagaccgatggccgcccggggcttgtggaggatgaaggagacgacgaagacggtgaggacctcgtcatcgtcgccgacggaccagcgatggaggagcaggattggggagaggacccagcagcggcaggggcagaaggagagcgaaaggacggatgtgagcctggtaagacggtggcagcaccgaccggaaggatcgggtacagtggcggcggcccagggttccatcagcagcaccattccatgttcaagtatgtacgacctggcgctcctggtgcttcagtaggtggggtacctggtggtcctggtcaattccgccctcctgggcctttaggccctttctctggtcgtggcagaggtgaatggaggcctgctgctggtcgaggcatgaacaaaagttttcattcaggctatggaatcactccatggggtggttcagggcgcaattttggtggtggactagattttgcacttcctcctcacaagacaatatttgatattgatgtggaaactgcatttgaggagaagccatggaaattccctggtgctgatatttcagacttttttaactttggccttgatgaagagaagtggaaagatttttgcaagcagctggaccaacttcgactagaatccacaatgcaatctaggatacgggtgtacgaaagtggccgctctgaacaggattatgacccagatttgccacctgagcttgctgctgtgactggtcatccagacatctctgctgacagtcgcaataaaatggttaacgggcatacagattttagtgcccaaggaagaggtccggcaaacatgacagggagacctattcaagttgaaactaattacacagaccggtttccatctgttgattcacgctcgcatcgaatgcgtgaatcagattcggttattgagattgtgtgccagggccgtgattcgatggatgatgagacagtggaccaaactgaaaaggattctcaaggagtgaaaaagacacagcataagggacagctaccagtttcatctgaaagtgatatgttatctatggatgccaatactcactcccctcccagctacaaaacaagaggttcacctcgtggagcatggccattgaaaggaagctcactgggtcagaactctattcgagaaattgaaagctccaatgaagtaattcctcgtcagtcatcttcaaagagatgccatgattcccagaaagagaaccttattgagggctcagaaaataaggctgattcagattcagaagggtcacttgctgctaatgatgacgtggcagataaactgagtacagaagatcattttgatgatgctggtggtggtggtggtggtgatgatgataagctcacattggttggtcgtgttgaaatggatgttgatgatgctacctcagaccccaacatgcctagtgatgcaaatcacgatgataacctggttcattctgatacaaagcagaaacacatatctgtggttgagcaacctactgaacacaatagcagtgaacctgatgaattgaggaatactgaaaatagtaaagggaggtctggtagcagcaaagatcagcagaaacaccttgaatctggtgaagaagttcttcaagataagcaattaaggagagtaaataatgtaagaatgcatcatgacgcggaagaacacaaacttcgccaaaaagatgagcattcacgagatgcaaaatcagatttggaaagatcacgtttaccctccagaggcagggaagatatccaccaatcttatgcaaacagagatagggttgacatacagggcaggagttataataaggtaagagagactgaaattttgccaaggagagatgatggtgttcacagccgacgtgctaaagaggaagatttgaggctagagtacaatgttg

SEQ ID NO: 125883 - DNA, 2242 bp, Zea Mays
acaatgttgaaggtggtgcaaggcatagaaataaggtgaggcccattgataggaatgatagagatgaagatcattcacggaagcgtttggatgatggcgataggagaggctctcgacaaagagagcgtggtgatgtggttttgaatcgccgtgaaagtgatgattctcttataaagagaaagaaggacgatgagaacttgcgtaggttgaagcctgaaaatgaagacatggtcgcgacacatggttataaagcaagggatgacagtaacagaagaaaaaaagagagggatgatggaattgatcagaaaagacgagatgatagtggtagactgcgggaaaaggatgatgatcgttatcatgtcaaacagaaggatggcaactggagacaaagagaaagggaggatagacagaggcccaagcaagaaaatacattaaccgttcagagggaagaaggaagaggaactggtcggggtagtcggatgatggatgataagttagtcagtggtggtaggaagaaggatgaaccaagatcttcattattaagcaaagacactcaagagcgtacaaggcaaaatgaaccttcgaggagaggtcagggtgtggaagaaaacaacatgcagaataaagggcgttttgatgacaattcaaacagtgagaggaactccaggcaagaaaaacaaaacaataatcgtctatctggcagttctgacgctcgccatgcaggcagagataagcatagggagagcacaaggaagggcagaggttccgagcttgctgagcatgatctccacagatcgagcaaaaggaggtgtgaagaccatgaaagccatcgcagtgggaaggttgaaacaaaagaagtgaatgaacaagagagtagtagaggtcatgcagcattatccaagaagggccagaatcctcagccagataattcattgttgaatgaagtggaagaagatgccatatcagatgacgaaaaccacgaggattctagaaggggtcgctctaagttggagcgatggacaagccacaaagagatagaatatagtaatattgatgatgatagtacacaaacatttccgaccatcaaagctgatgttgaagccgatgaggtaggtaaatctcaagtttctgctgcagctggcaactcggacatcaatagcaatgttgatactgggcagacatctgataagatgactgaagaatgtgagcgtgaccgacatctagacacagttgagaggctcaagagacgaagtgagcgtttcaaacttcccatgcccggcgagaaggatgcacctcaaagcaaaaaggtagataccgaagtgcagcctccccaaaatgaatcgtcagctgttgatatggaagtgaagccagagcggccagctcgcaagaggagatggactgggagttagttgaactggaacatttccacttcatcaagaaatttcagcagattccatggcagttgcttgcacttcggcatgtttcttccttacagttgaaagttgagttgatgtatggttttactgtttaacttgtaccagcaaagtgtaaacttagttgttttgtggctgggaactggatactgtactaaaatcacatccattttcccaccatgattcgggattccggtgaccattgtgtggcacaggtgccactgtactcaggatagttctgaggctgttacgagaagcagtggcctcggagcccagttgaatatctgggttcggaatgagctgcattttgaagctggagtgcccctgctgcaagttgattttgtttgaagtgcaggtggcctggaagcactgggtcttgtaacacgcttgtgctggtgggagatacttgcaagctgtggtggctgaatgcttgccatgtgatgctgttttatggagcaataggtgatagaaacaaaggactagagatttcagaactgatgatataatcactaatttgtatgcttaatactatattagccatgtacattctgataaacatataactgtcgtgcatgagttgttgatggagtaaaggtagactgtagtgtagagctgcagggtgcactggaccatttggatggatcaatacatatatatatatacctgtaggcagtgctaggtaagaagaatatgattgtttgcttgttgtagatttgcgatgtatataactggttcatgtggagttttgctaatcatacagagttctgaatggcactatgtaaatttattgaaatttagcatttcagatt

SEQ ID NO: 125884 - DNA, 1672 bp, Zea Mays
tgtatctacaaaataaaaaccatctgcacacaattctggtatagctgatgcatagaagtaaatttactacattcaaaattgtaagttgttgtggcttttctagatttatagcttagacagtgtgtatatctagatgcatagcaaaagctatgtgcctagaaaagccaaaacaacttacaatttggaatggagtaccttttggtttagtacttttggagaacactcttttggtcatatttttccctcagcagttacaataattctgtatataggttgaaacaaaagaagtgaatgaacaagagagtagtagaggtcatgcagcattatccaagaagggccagaatcctcagccagataattcattgttgaatgaagtggaagaagatgccatatcagatgacgaaaaccacgaggattctagaaggggtcgctctaagttggagcgatggacaagccacaaagagatagaatatagtaatattgatgatgatagtacacaaacatttccgaccatcaaagctgatgttgaagccgatgaggtaggtaaatctcaagtttctgctgcagctggcaactcggacatcaatagcaatgttgatactgggcagacatctgataagatgactgaagaatgtgagcgtgaccgacatctagacacagttgagaggctcaagagacgaagtgagcgtttcaaacttcccatgcccggcgagaaggatgcacctcaaagcaaaaaggtagataccgaagtgcagcctccccaaaatgaatcgtcagctgttgatatggaagtgaagccagagcggccagctcgcaagaggagatggactgggagttagttgaactggaacatttccacttcatcaagaaatttcagcagattccatggcagttgcttgcacttcggcatgtttcttccttacagttgaaagttgagttgatgtatggttttactgtttaacttgtaccagcaaagtgtaaacttagttgttttgtggctgggaactggatactgtactaaaatcacatccattttcccaccatgattcgggattccggtgaccattgtgtggcacaggtgccactgtactcaggatagttctgaggctgttacgagaagcagtggcctcggagcccagttgaatatctgggttcggaatgagctgcattttgaagctggagtgcccctgctgcaagttgattttgtttgaagtgcaggtggcctggaagcactgggtcttgtaacacgcttgtgctggtgggagatacttgcaagctgtggtggctgaatgcttgccatgtgatgctgttttatggagcaataggtgatagaaacaaaggactagagatttcagaactgatgatataatcactaatttgtatgcttaatactatattagccatgtacattctgataaacatataactgtcgtgcatgagttgttgatggagtaaaggtagactgtagtgtagagctgcagggtgcactggaccatttggatggatcaatacatatatatatatacctgtaggcagtgctaggtaagaagaatatgattgtttgcttgttgtagatttgcgatgtatataactggttcatgtggagttttgctaatcatacagagttctgaatggcactatgtaaatttattgaaatttagcatttcagatt

SEQ ID NO: 125885 - DNA, 1101 bp, Zea Mays
atgtgcgggacagggatctgctggtggtggtttttgaggtcgacaacaacaccgatttgcttgcctcgaagaccaccagcatcgacgacgggcggcgtgaagaagctacaccacttctcgattcgctcgtctgatgctgcgtcgtcgtcccgggagtgggggagctgggcggagtgctccgtcgaccgcaagtgccacgactaccaccgctgccacaaggttcgccgacttaattcaagctatcctggaggtctggtatcttacatccagaatgccaaaaaacttcttgcggattcaaaggaaggcaaaaacccatatgatggtttcaccccttctgtagcacttccccgggaaacaactactggaaaatgtttccttcaactctatatagagtctatcctggcttttcaagaggccagctgcaaaatggttgatgaggggtgccaaacaaagattccatttgttattatgacttctgatgatacaaatgcgctaactatcaagcttttagagtcaaactcctactttggaatggaaccatctcaagtgaaaatactaaagcaggaaaaagtagcgtgtctagctgacaatgatgcaaggcttgcattagacccaagcgacaagtacaaaattcaggcaataccatcagcattaggtgtcagtgccaccaagggttacaatgtaaattctctcgctgttcctaggaaagccaaggaaacaattggaggaattaccaaacttactcatgtcgatggtagaacaatggtcatcaacgtagagtacaatcagcttgatccactccttcgtgcaactggacatcctgatggagattcaaattgcgagacaggctattctccatatcctggaaatataaaccagatatttggaaggcgcatgctggttcatcacagtcagagggttcgggtctggatatggagaggaacggatgcaatcatatttattgtccatatcctctccaaccaattgcctcagctgctgaaggccgtgctaattactttgggaacctacagaagggtgtactaccaggacatcttggtcgcttgccaaagggccaacaagctaccaccttacttgatttaa

SEQ ID NO: 125886 - DNA, 156 bp, Zea Mays
tacttacctggacgggatcaacgggcgaacaagaaggcctgtggtctaggtcagtggtccgcattgcacgtggcgggtgcgctggcctaccatctccccaagtgggagagtggacgtcataatttgtggcagaggggtacgcgtccgcgcggccct

SEQ ID NO: 125887 - DNA, 757 bp, Zea Mays
attgaagtttctagagttagaagcttgttgtatgatctagttatggaataccaaggatctatggaaggcatggcaacaactgatggagtaggtgcaaccaataggaatgttgtcctcaatgaaggagatgatcttgtcttcggcatgtttgacaaatatttgtcagaggaaactgaagaaagttcaacctttgtgcgtactgaattagatttgtatttggaggaaccaacaatgccaagaactcaagaacttgacatcattcattggtggcaatatgccggggttaaatacccaactttgagaaatatagctcgagatatcatggcaattcctgttacaactgtggcatctgagtcagtctttagcactgggggaagggtaattagctcacatcgtagtaggcttgctccaaaaacagttaaaggattgatgtgcatgcaagcgtggtcacgtgctgacatgctaggtgataaatcttgctttattaaagcattgatgacttgtttggaagatgaggaggatgaaatggatgatcctaatagtatgataactgactgaaaattggaaaacaagcaacaagtcagcaatctacattcaggtcagttttccctagttttttgttcatttaatcatttgttgcaggttattaaattatgcaacatattttctttgttgcaggtcacctagagctggagtgtattgtggaatgttgttgctgctgtgcttgaagtatgggtgtatctgtgtatgatgcctg

SEQ ID NO: 125888 - DNA, 2155 bp, Zea Mays
aggtaaccaaacagatacatataaattataatctcaaaaattataatatatattatgtatagattatatagcccataagactctaaactttattattgggagccaaacgcttagcctggaccagctagaaatcttgcgcgtcttctttggcccgatgccttctcgccctctacggtcaggagtccctggccgaggccgaatacaaggatccaatcgcgcccaaaacgaggagtccgtgcgcggaacgtggcccaggcccaatgcttctagttcattctgactctgacgcctcctcatccaaacgcggagaccgtgcgtggaacgtggcaaggctgaatacaggcatacaaccatgctagtggagactggaggagtgtagagccgcagattattaaacgcaaactaggcaattacgcgatacagcagagctgcacagattccacagaaaatagcaaaccctcggtcccggtcccggtcccggccaactccgtctccccgctgcgccgccgccctaatcaccacgatgacgtctccccgcgccatcgcaagcgccgcgcgtccccgtccctatgtccaccccgctcgcctttcctcggcgtcgacgcggaccgtcgtcgcagatctagggcttcgccgcccgatttcgatatccgcggtcgccgctgcgatgccaagccctctgaggagaaggagaacggccatgccaagcccggaaaggatgaggacggcgacaaccgatctccccggcgcgacagggtttcagacagggaggaaggtagcgaacgccggaggatacgcgatatggtttctgacgacgagaaggtggaaggccgtcggcgcaggcgggcaagggatccggacgaccgccgtggcaagcaagaccgggagaggaacagacggcgccaccggcgccggagcccaagctcggagtcagggtcctcacccaacgaacgtcgccaccgccgccggcgccgagacgagggctcgaggcggcgggatgaccgcagtcgaagggaggacgagctccgtagaagccctatgaagagggagctgaccccgccactgtcgcccccaccgccgcctccttccggagatgatccctgggcgcacgggtgggatctacatcccgcctttccgcatggcgcagatgatgcgagatgtggaggacaagtcgagccctgtgtatcagcgcctcacctgggatgctctcaagaagagcatcaatgggctggtgaataaggtgaatgcgaccaatatcaagaatatagtgccagagctctttgcagagaaccttgttcatgggcgggggctcttctgtcagtcttgcatcaagtcacagatggcctcacctgggtttactgatgtatttgatgagaaggcatatgagaatctaaagagaagcatcctgggagcagagtcttttgaagatggaggaggatcagatgctgcttctgatgatgaagaggatgaggaacaaatggagataagggatagaacagagacaaatcttgtgaatcttagaagaacaatatatttgactattatgtctagtgttaattttgaagaagctggacacaagcttatgaaaattaagctcgagcctggtcaggagatggagctgtgcattatgcttcgttattatgggctgctaggacatcggttttgcatgatcaataaagtgcaccaagagaacctcgaaaaatgctttgtgcaacaatattcgatgatccatcgccttgaaacaaacaagttgaggaatgttgccaagttctttgcacatttgttggggactgatgcactcccttggcatgttttggcttacatcaggctgacagaggaagacacgacatcatcttctcgaatttttataaaaatattattccaagaattatcggagcacctgggcatacgcctactcaatgagaggctgaatgatcctaacatgcaaggttccttcgagtctatcttcccaagggatcgtccgaagaatacaaggttctcgatcaacttcttcatgtccattggtcttggtggtatcacgaaaagcctgagggactacttgaagaacatgtcgcgcctaataatgcagcagcagaagccggaatcgtcaagagtcagattcaagtggatccgaatctggttcggaaagctctag

SEQ ID NO: 125889 - DNA, 1936 bp, Zea Mays
cgagagaaaggcagactgggggagagagaggaatcgagagaccacacgccggcgccacgtagcttgatctaggcgatggaggtggcgcttgtggagcggttggaggcggcggtggcgcggctcgaggccgccgtggcctccggcgcctcgctcgcgtcgacggctccgcgcgacttcgacgctctggaggcccggtcggatccggccatcatggcttacgacgagttcgtcgcggaggccgtcgggcggctcacggccgcggcggagaagatcggcgggaaggtgctggacgcgaccaaggtgctcgccgaggcatttgccgtcgccaaggacatgctcgtacaggccaagcagcaccagaaaccagcatcaatggctgatgcgcagggcttcgttaagcccctcagtgatgttatggcaaaagcaactgcaatgaccgaaggaaggagaccagactatttcaaccatttaaagagtgttgctgacagtctacctgctttggcttgggtggcattcttaggaaaggactgtggcatgagtttcccaacggcacatgtagaggaaagctggcagatggctgagttctataataacaaggttcttgtggagtacagaaacaaagaccctgatcatgttgaatgggctaaagcattgaaggatctatatatgcctggtttgcgggattatgttaaaaagcactaccctcttggtcctgtctggggtcctgctggaggcgctgttgtttctcaaccaaaggctgctgctcctacacctaaagctccagcggttaaggctccccctccaccagctcctcctgcagcgcctctgtttagcacagagaagtctccaaaatcttcaaagcctaaagaagggatgtctgctgtcttccaagagattagttcaaaacctgtgactgcagggttgcgaaaggttaccgatgacatgaagtctaaaaaccgcgctgatagaagcggtgttgtcagcagcactgctcctgctcctgctgcagctcctgaaaagacttcccgtgcagggtccttctctttcaaatctggaccccctaaactggaacttcagatgggacgcaaatgggtggttgagaatcaggttggcaagaagacccttgctattgatgattgtgattccagacaatctgtctatgtgtatggatgcaaggattctgtccttcaagtaaacggcaaggttaacaatatcactgttgacaaatgcactaagtttggaattgtattcaaggatgttgtagcagcttttgagattgtcaactgcaatggcgttgaggtccaatgtcagggtacgtcaccgacaatatcaatcgacaacacatctggatgtcaattatacttaagcaaagattcgctgggagcttcaattacttctgccaaatctagcgaaatcaatgtgatggttccaagtggtggcgctgatggtgattgggtggagcatgcattgcctcaacagtacatccatagtttcaaggatgggcagttcaccacttcaccagtttcacactcaggagcgtgaatacaattgttactgctgttgtttttgaggtttgtaaacagttttgggtcttgcagcactggactcggtctgcgattgttgttttttgttgcccttgctcagtccgcggtgtgtatgtcctgcatgcacgtggttcctttctgttggtgtttttgtgtgccaacaaaccaccaaacttggtttgtatgtctttagctgatcattctttgacactgaatctcattatatttgtattcatttggacgcttgcttttttcgagtctcttttcagattcctttaacaaagtgacaatggcaaatgctgttatcgtactttaaatctcgacgctgtgcttggatcgtgaaacacgtactagaatacgagaggtggcgcaatacattaggcagaaaaaag

SEQ ID NO: 125890 - DNA, 2090 bp, Zea Mays
gaaaggcagactgggggagagagaggaatcgagagaccacacgccggcgccacgtagcttgatctaggcgatggaggtggcgcttgtggagcggttggaggcggcggtggcgcggctcgaggccgccgtggcctccggcgcctcgctcgcgtcgacggctccgcgcgacttcgacgctctggaggcccggtcggatccggccatcatggcttacgacgagttcgtcgcggaggccgtcgggcggctcacggccgcggcggagaagatcggcgggaaggtgctggacgcgaccaaggtgctcgccgaggcatttgccgtcgccaaggacatgctcgtacaggccaagcagcaccaggtacctggcgggcgctcgcgcgatctggtcgatttgcgtgtgctccgctcgtagatctccttgtgttttgccaatccaatgcgtcatatcacggggaaatgacagattttgttcatcaaatctaagatcattctgctgaagtagttttttctgctgaagtagtttctctagtagtaattagctccaggattgttttcctatatgttacgaatcgtgtaggtattggtggatctaactaagcaatgcttattgagttattgttacctcactgagcatttcccccttttatgctgtgcagaaaccagcatcaatggctgatgcgcagggcttcgttaagcccctcagtgatgttatggcaaaagcaactgcaatgaccgaaggaaggagaccagactatttcaaccatttaaagagtgttgctgacagtctacctgctttggcttgggtggcattcttaggaaaggactgtggcatgagtttcccaacggcacatgtagaggaaagctggcagatggctgagttctataataacaaggttcttgtggagtacagaaacaaagaccctgatcatgttgaatgggctaaagcattgaaggatctatatatgcctggtttgcgggattatgttaaaaagcactaccctcttggtcctgtctggggtcctgctggaggcgctgttgtttctcaaccaaaggctgctgctcctacacctaaagctccagcggttaaggctccccctccaccagctcctcctgcagcgcctctgtttagcacagagaagtctccaaaatcttcaaagcctaaagaagggatgtctgctgtcttccaagagattagttcaaaacctgtgactgcagggttgcgaaaggttaccgatgacatgaagtctaaaaaccgcgctgatagaagcggtgttgtcagcagcactgctcctgctcctgctgcagctcctgaaaagacttcccgtgcagggtccttctctttcaaatctggaccccctaaactggaacttcagatgggacgcaaatgggtggttgagaatcaggttggcaagaagacccttgctattgatgattgtgattccagacaatctgtctatgtgtatggatgcaaggattctgtccttcaagtaaacggcaaggttaacaatatcactgttgacaaatgcactaagtttggaattgtattcaaggatgttgtagcagcttttgagattgtcaactgcaatggcgttgaggtccaatgtcagggtacgtcaccgacaatatcaatcgacaacacatctggatgtcaattatacttaagcaaagattcgctgggagcttcaattacttctgccaaatctagcgaaatcaatgtgatggttccaagtggtggcgctgatggtgattgggtggagcatgcattgcctcaacagtacatccatagtttcaaggatgggcagttcaccacttcaccagtttcacactcaggagcgtgaatacaattgttactgctgttgtttttgaggtttgtaaacagttttgggtcttgcagcactggactcggtctgcgattgttgttttttgttgcccttgctcagtccgcggtgtgtatgtcctgcatgcacgtggttcctttctgttggtgtttttgtgtgccaacaaaccaccaaacttggtttgtatgtctttagctgatcattctttgacactgaatctcattatatttgtattcatttggacgcttgcttttt

SEQ ID NO: 125891 - DNA, 798 bp, Zea Mays
gcaagcggtagtggtccctctcgacgtagccgtccctggccccggcctgcagatgccggaaggcccagctgccgccgtcgagccctgctgcgctggagtcacctgcaccgacggaggcactcttatcaggaagaagccagtgagcaaaagacgaaccaggaagaagcagctacatcaccatgtatcatactgtaaccccacctgtgtctgctgccctggcgttggcttcagcgtcgcggcggacgtggttggcgccggagccggcgccgtggctggtatcggtccggccgtgccgttcctgagcaaccccgtcgggtacgtctcggcgaggctggtctggaacagcccgaagtaccgctccgacgccttgccgggcttgaggtcctcgtcgtacatggcgaagatgtacgtctccaccgacttgccgggcgcgcgcggcgtgccggacagggagcggaggtgggacacgaggcccgacacgaaggcgcgcgcgttctccaccgtggcgccggcctcgtcggggtcacccttgtgcggccagccggtctcggccaccacgatgtccacgtccttgtaccccttggcgtccagcgcggcgcgcacggcgtcgacctgcgcgtcgaacatgttggtgtacgtgaggctcgaccccgcgtccgggcggccggcgttgggctggaacaggcagaaggccagcgtctccgggcgcgggtcgctgaggtacgcgaagtaggggtacgggttgatgaggaacggcgagccggtcttgctcaggaacgccagcagcgggtcgagcgc

SEQ ID NO: 125892 - DNA, 378 bp, Zea Mays
atgctacaacaagctggcaggtttgagtctttggggtatgcttctaaaagaatggggtatagatcactgggtgtccggaatccggaatttcctcagctggtgggccgaggcattgcgtttggaggccttacaggagggttgccatacccaggtggtaacctgtttccggctacacctgtctggtttggcctagacggcaatgcgcccatccgagctgcaataatcgcatttcgttccttcaggagcttctttctggtcttctcggtgtactctctcgttcgaaagaccacctgctcaatctctgaaaacaatgacatcttcacttctattttttggaacagcttttcgattacaagtgctgtcagccttcgaatttga

SEQ ID NO: 125893 - DNA, 90 bp, Zea Mays
acggtgtattatttttcagtggcttgattgtatctcacagttgttacgtctgtacccatctgcatttcagttttcatctgtaagccttct

SEQ ID NO: 125894 - DNA, 147 bp, Zea Mays
gcaaaggatattgctaagtggagggcaaaagatatcaaattgaaattggaatctatgaaacaatacctgcagagggagaaacgtattaatagtatagctctagtcacagcccgaagtgctcaaagggagaatgctgcaactccgcgg

SEQ ID NO: 125895 - DNA, 720 bp, Zea Mays
atggccgcgggacctcgccccccgcgtcccctgcttggcttggccgccgcgcttggaaccagatccggtggcgcgcatgctccgtgggctgtgggccacgccagcgtcgaagctgcctctgttcgtggggcatggagttggccgctgccggtggcccaagtcggggcggtcggtggccgcagcagattggccttggggcggcagtcagatctggaggtccggtggccggatttgccgtccctgaggccgatgctggttgtggagcgccggcgggcgagctccccatggtggtgcggcaccttgacgacggtgacgcccctgggcgtcgcttcccctggtgagggcgtcgtgcttctcagcgctgtcttccatgggcgaaagccccgtccatttcggaccgacggcggtggcgtccccgacgtcactcccttcctgaaggcgtcgctactgctggcgggggcagaacagaggatcaaggttttggaagtctcgctggtgaagaatcggagctgtctcgagtggggtgtctcgtggcttggcccggatgcaccggcggaccatttttgcgaatcattctgccccttccgcacaagagaagggtgcagatggccagatgctccgtgtgcacagcttggaagtcagtttgttggtttgaaggcaaattttgatgcttttgaccggctgtcaatacatgattactatttggaccggagtagttga

SEQ ID NO: 125896 - DNA, 591 bp, Zea Mays
atggcgaatccggccgaccagctccatctgctgctcgaagtcgcggcgcccggtgctgacctccttgctgagccgcttgacgacggccgtggtggcgtcctccagcatggcccggtacgccgtcccgaacgcgcccttgccgaggacctcggcggaggcgcggagcaggtcctccaggtcgaacgccagcgccgggccatccaagaagaccatccggttgccctccccggccttgccgatgacgaccttggactccggcgactccctccccttcttctcccgcccttcccgacacccgtgccgccgccggcccctcccgtgtcgtcgtcgtcgtcgcggccctccctgttgcagaatgcgaggagcagcaccgcggcgacggcgaacgcgaggacgcagccgccgacggcgacgacgaggatggccgcctcgctgagcctgacccgccgcctccgcgcgacggcggcggtgggaggagctgctgcgggcgggcgcgtcaggtcgttgcccgcgaatgcggcgtcggcgaagcggaggagggacggcggcacgggcccgtcgaggcggttgttggagaggttgaggaactga

SEQ ID NO: 125897 - DNA, 940 bp, Zea Mays
caagaagccgttgccagttgccacggttttgcccgtatcccagcaccagcaggccagaaaagcccagccaagcggagccaaccatccccgcggcagtcaaccccccaactccgttcattgcggcagccaaatcgagatctcgcccgtgctgaatcccaccactctcgccgacccggccggccgcagcaagcgcagcgcatcgacaggagccgaagaaccgaagaggagatggcgtcggcgctgtcctccctgcgctacggcgacagcctctcggtggtgggcatctccgccgcgacggccgtgctctgcgaggccatgtcctggctcctcatctaccgcaccgccacctacaactccctccgcgcctccatcgagcgccactcccgcaagctagacgccatgaagtccggctccacctccgcctcctccggcaccgctgcctcctccgcgcagcccgcatcgtcgcgggctaagaagatggaccgcgtcgagaccagcctcaaggacgctgcgcgggagctctcgctcgccaagctcaagtcgggcgccgtcgtcgctgtcatgctcttcgtcgtcttcggcctgctcaactccctcttcgagggccgcaccgttgccaagctgcccttcgcgcccatcccgctcgtccagcggatgagccaccgcggactgcccgggaacgatcccaccgactgctccatggttttcctctacttcctctgctccatgagcatccgaaccaacctgcagaaactgcttggcttcgcgccgccacgcgcggctgctgcagccggcggtggcctcttccccatgcccgatccgaaagttaattgaggtactagatcgatctctctgcttcaattttcgttgatacgcttgattggattgtagatcgtgctaaaatccgaagccgcagtgcacaagttacagggactccaag

SEQ ID NO: 125898 - DNA, 1265 bp, Zea Mays
caagaagccgttgccagttgccacggttttgcccgtatcccagcaccagcaggccagaaaagcccagccaagcggagccaaccatccccgcggcagtcaaccccccaactccgttcattgcggcagccaaatcgagatctcgcccgtgctgaatcccaccactctcgccgacccggccggccgcagcaagcgcagcgcatcgacaggagccgaagaaccgaagaggagatggcgtcggcgctgtcctccctgcgctacggcgacagcctctcggtggtgggcatctccgccgcgacggccgtgctctgcgaggccatgtcctggctcctcatctaccgcaccgccacctacaactccctccgcgcctccatcgagcgccactcccgcaagctagacgccatgaagtccggctccacctccgcctcctccggcaccgctgcctcctccgcgcagcccgcatcgtcgcgggctaagaagatggaccgcgtcgagaccagcctcaaggacgctgcgcgggagctctcgctcgccaagctcaagtcgggcgccgtcgtcgctgtcatgctcttcgtcgtcttcggcctgctcaactccctcttcgagggccgcaccgttgccaagctgcccttcgcgcccatcccgctcgtccagcggatgagccaccgcggactgcccgggaacgatcccaccgactgctccatggttttcctctacttcctctgctccatgagcatccgaaccaacctgcagaaactgcttggcttcgcgccgccacgcgcggctgctgcagccggcggtggcctcttccccatgcccgatccgaaagttaattgaggctgatttccaagacgagtgaatccgaaccaaagatagcaatagtcgcccgggaaagactctgtgcgactgcaccgatatccgtacccaattcattttccacagctcaccggtttgttgttgcgcaccggtgattgcaaacctgaaggttggcttatttattgcattgactgaaacaacgaacatgaattacctgctgggaggcagagaaatgtgcagcctaattttttcggcctctacgattctctgtctttataatataattgatgacgtcgactctctcttgattgtgtgcacgtctgataccattcagagttaacagtgattttagcatcaacgccatagggggcgtttggatcccttgcggctccttgctttgccaggacattttgtacttggattttttgctggctttcttggtttcaacgctg

SEQ ID NO: 125899 - DNA, 491 bp, Zea Mays
catttatttatagttcgctatctgatcgcaaactgtttccttccgctgtttatcaccacaggctgatttccaagacgagtgaatccgaaccaaagatagcaatagtcgcccgggaaagactctgtgcgactgcaccgatatccgtacccaattcattttccacagctcaccggtttgttgttgcgcaccggtgattgcaaacctgaaggttggcttatttattgcattgactgaaacaacgaacatgaattacctgctgggaggcagagaaatgtgcagcctaattttttcggcctctacgattctctgtctttataatataattgatgacgtcgactctctcttgattgtgtgcacgtctgataccattcagagttaacagtgattttagcatcaacgccatagggggcgtttggatcccttgcggctccttgctttgccaggacattttgtacttggattttttgctggctttcttggtttcaacgctg

SEQ ID NO: 125900 - DNA, 2369 bp, Zea Mays
attctcgggtcgagacggcaagcgtcagaccagtgacgaagcaaatctaccatgcgatgcgagcatgacaaataaataccctttacctcgtccttgccgccgcggccgccggggcgtcccggatcgtggtggtgcttgccgtcgctggtgagtccatgagacgtgtgtcacccggccgttcagcgcagagcccatccggccatcccgttcgtacctaaccggcaccttcttctgcggatcaatccggcaaagccagcgcgcgcgatgcgccggcggtgggacagctgcttctcgggcagcgacgtccgcgtgggcgggcgcgtcccccccgaggagccggagccggaggtcttctccttcgccgagcccctcccgtcgtggcccacaggcgggggattcgcgcgggggaggatacgtatcggcggaggggagctggagctcgccgcggccaccgcgttccagaagatctgcaccctgtcgtcgcggcggcgtggcggcggcggcagcgccaccttttaccggccggtcggcgtcccagaggggttctcgctcctgggttactactgccagcctaactgccgcccgctccacggccacgtcctcgttgccagagcgggggagcgcccgtccggcgcctcacctcagccgccgccgccgccgctctgcaagccgctggactatacgctcatctgggaattccaagccagtggcgataccggctacggctacggtcgaagcgacgcctacttctggatccccgtgccgccggagaggtatcgggcgctcgggtgtctcgtgaccacggaaccacggagaccaccgctcgaggaggtggtatgcgtccgcgaggacctgacggacgagtgcgagccgcacggctcgctgctctgcctagagcagccgcggccgtcttcgttcttcaccgtgcggggcgttcgtccggtgcgccgagggatacgggagaaaggagtgtgcgtgggcaccttctgctgcgccgctgacgggctccccccgcgcgagcacggcatggcgtgcctgggcaacgtcgagctcgacctgtcggcgatgccaacgctggagcaggcgcacgcggtgatccggcactacggccccacgctgttcttccaccccaaggaggtctacctgccgtcgtccgtctcttggttcttcaagaacggcgccgcgttgtacaggcgagggggagacaccgcgggcgaggagatcgacggcgaggggtccaacctccctggtggcggttgcaacgacggggagttctggatcgacgttcccagcggcgagcggggccgcgccgtgtgccgcggcagcatcgacagcgcggagctctacgcgcacgtgaagccggccatgggcggcacgtgcaccgacgtggccatgtgggtgttctgcccgttcaacggcccggcgaggctcaagctgggcccgatcagcctcccgctgggcaagaccgggcggcacgtcggggactgggagcacttcacgttccgcgtcagcaacctcaccggtgagctcatgggcgtgtactactcgcagcacagcggcgggcactgggtggacgcctccgcattggagtacatcgacggcaaccggcctgtggtgtactcgtccaggaacgggcacgcgagctacgcgtaccctggcgtgtacctgcagggctcggcggcgctcggggtcggcatccgcaacgacgccgctcggagcagcctattcgtggactccagcgccaggtaccgcatcgttgcggcggggtatctgggcgagggcgccgtcgtcgagccgcagtggctgcagttcatgcgggagtggggtccgacggtggtgtacaagtggaggaagcggatggagtgggtgatcggccgcctacctccctggctcaggtgcagagcggagagcatgctgaacaagatgcccaacgagctgtccagggaagaagggccgaccgggcccaaggagaagaacaactgggagggagacgagagatggtaagactggtacgtaggaacagtgctcaacgatgtgattttataacatgtgtggcttaaattaaggggcgtgctatatttaggtgtttgaaaaacagcttcttcgcggaccatacactagtacaatttggctctataccagcggtacgctttttacatcacagacggttcggttagaaaaccgcctgtaatgtcccaggcggttcagtacgcctgtgatgtaatagtatcacaagcggtttttgtttaggaccgtctgtggtgctctatccttttcacaaacggaccctaagaaaaaaccgcctctgattgtaaaaatatttttaatttttaacagaaatatgcaaatacaatttaaatgaattaata

SEQ ID NO: 125901 - DNA, 1013 bp, Zea Mays
atgtgcaccaggggccactggagaccgtcggaggacgagaagctgaaggagctcgtcgcgctctacggcccgcacaactggaacgccatcgccgagaagcttcaagggagatcagggaaaagctgcaggctgaggtggttcaaccagctggacccgaggatcaaccggagccccttctcagagcaggaggaggcgctgctcctggcgtcccaccgcgtccacggcaaccggtgggccgtcatcgccaggctcttcccggggcgcaccgacaacgccgtcaagaaccactggcatgtgatcatggcgcggcggtgcagggagcggatgaggctctcgaacaggggcggcgccgctgctggccagcatggtgccgtcgacaccggtgctgtggaagatggcagtaaccctaggaacgccaagaagctgaggcctgatgccagcagcgtggcctccttcctagacaagtaccgaagagaattttccgtcgtcgtcccgtttgctattaaccatgatcgcaagcagcaggactattgttcaactactaacgaagcagacgcaaacaaatcggttgaattctacgattttctccaagtgaatgcgaactcgagcgacaccaagtgtggttcgagcatcgaggagcaggaggagaaccgggatgatcaagccgaagggcaggtgcagttcatagacttcctggaggttggggtctctcatccccagtgatttatctgtattaatttctatatatatatatatatatatatttaactagggatgcatccaaagcaggttgtaatgctttgtgaaagacgcatatgctgcaaatggcaatcgtctgctagctaacaccaaacgtacttatagaggaagcagaatgcaccgcgtacatatatgacatgtaacttattgatatgtatacatatctgtccatatccgcgcgccgtttgggggccggtacacatgcaaaattattctgagataaatgaggaattaattattatttcatcatattt

SEQ ID NO: 125902 - DNA, 204 bp, Zea Mays
atgacgtcgatgacatgggagatgctgctgctgctttgttcggtgttgatagcactcctaatcccgggccgcactggtaaacgtcgatctgctgtttgggatgacttcactgaagtcacagaaaaccgtaatggtaagaaggtgcgcattgcagaaactgggaatatgatcctcaagtggctagaactgagctttgtcgtttga

SEQ ID NO: 125903 - DNA, 2413 bp, Zea Mays
ccaacttgacacccaccagccgaccacctccatgtcgtggctgcacacacgcgttccttgctccgtgcagacgccgtccttgcggggcgtcgtcggaatcacccagacgagcggcggacccgacgcacgcagcctgatggacagctcacggagctggatcttcaccgacgacattggcaagctcgtcccgtcccgcgacggctccgtccacaccacactcgacatcggatgcggggtgatgagctggggcgcgtacctgctgacatgggacatactagccatggcgttcgcgctgcaggactctcacgaggcgcaggtgcagttcacgctggagcatggcgtgccggccatgatgagcgtgctcgttgggaaggaggtagttgagggcggcgttgtgctgcgcaaggacgaagagcgccccaaggtgccacacgatggcttcggcgacgagggtctcaacaccttgcccaccaggtgtttgacgaattgtgttaacctcatacagaattgtttctcgcactcatgcagttgcagatgggattcggtgctacataagcaaccatggccaccacccgtgcagcccgtgcagtttgtgataccgggagatggtgttcaagtctggcttccgccttggccaccacctgtttgggaattctggctgtcactgaagattactggtccacagatgatgcattcggtaggatactttggattgccagttatgccagcgacatgtattacaatttcagagattgtgtctggttcaagcgagcaaatatttcctgaaacatttctgcaaagcttacacgagtgcagagtttgtcttagtgaaaatactggcagaagtttactccagctcccatgccaccatttgttttgcttgatgtggttgaagtctaattgcagaattcatgtaatagaagggaatttaacccaggtctggttaagagaagatgcagttgcttacttcaaaaatatgtttgatggtggcctgaggccaacctcaaatgcatttaacaaagttatagatggctgggtgaaggttgatatgctcaacgaggcccatgggttctttgatatgatgcctgaaaaggacatagatgatgttacggtggccattttctactttggaggacaacatgtgggctgggaaatgaagacagaatggttgtctaatggttggctatgtttggtatgtggtgcatctgatactcaagagcttcctctacatttcattaaacttgcaaaggatacgtacacatctgactgcatgttcggaaaaatcggatatggcactgtgagtgaggctttggtttacattctgtccttactatttgttcgaagagattattgcaacgaggaaccattttttaggaatgtgcttgagcattatcaatgtggcattgagatgatacggagggatttatttactggccattggaaacattatcttcaaggtgctataccacttcaaccctgctttgatggtctcataaatgttggcaaggtagccgcacgtaccctccaagatactgttgtagggaattcttgcattgtgtctagacagcctccatggccacccccaacgcgtcaccatttcagaactatgcatgctgaaactgtggcaaattggaaccacttattcagttggtgttttgcaaattcagatttgggtgaattactgactctcaactgccctgctgacagagcaatggtgctgctgatgcaccaaattgaattgagactgctcaattgggcctgggcagacgagtgtgttttcaacctgtgtccacttcgattacacagtgttgttcatagcagcctagccaatgcttataaatcctggttgataacagtgattcaccgaacacactcaattggccaagatcatgtttggcataacgtggataggggtgtggtgtgtggaattaaggatagatgctgtgcgagattggcaaagctagttttatctgctacactgacacaagattctggcaagctttctcaacttgaattgcaccatccattgttgttgaatactcagtcaagcggcttgaggacaagccgcatttcaagcggtggggaatgtcagcataccatcttctcctcaagtcaaagatggtaccagaagaatacaaacaatgctgctacgacgacgatgaccatacatggagtatatgaagatagaggcatcgcgggaaaaggcacaggcgcgccaggagagcgggctcggtgtctaatgaaagctagcgtccgtctggcttgggcgggagtgggccttgtaaatgttggcaggctgattggtcgtgtggaccgagtgattgtgtggttataagtaacacccaaaccctggctgtaaggggtcatgaacaatttagctatcacatatcaaatcaaatcgtctttctcgctg

SEQ ID NO: 125904 - DNA, 3387 bp, Zea Mays
ccaaaatttactccagtttctctttcttcttatctctcccccaagcctgtctctctgacgcaatgccgtttcccaccgcgcggtggcggcggcggcgcgagggcaccgcctctcggtggtgcgggatcttggtcctggctctggtggcgctggcggccggtgcgacggcggagacgtcgccgttggacgtggcggcgatgcgggctgtggcgaaggcgcttggcgcggacaagacgctgggatgggacgtcgcgggcgacccctgctcgccgaagcggtgggacggggtgtcctgcgactcgtcgggtcgcgtcacggcgatccaggtcggggcgcgaggcctgacggggaccctgcccccggaggtgggcgacctcaccgagctcacccgcctcgaggttttcgacaacaagctctccggcccgctgccctcgctcccgggtctctcctcgcttcaggttttactagcccacaacagcagtttcgcctccatcccctccgacttcttcaaaggcctcaccgggctcaccgccgtcgctatcgactacaacccgttcgcgtcgtggtcgctccccaccgacctcgccgcatgcgcctccctcgccaacttctccgccgtcagcgccaacgtctctggcacgctccccgacttcttgggtgagatgccggcgctccagcggctgtcgctgtccttaaaccagctgtcaggacccgtaccggcgtcgctggccggcgcgccgctggtgcagctctggctcaatggcgcgcacctcaatgggtcgattagctttgtcagcaacatgacgtctctggagcaactgtggctgcattctaacgacttcactgggcccatgccggacttctctaggtttgataatctatgggatttgcaacttcgcgacaacgagctcacagggccggtgcctgagagtcttttcaagttgaaggccctgaagaacgtgactctgacgaataatttgctgcaggggccgatgcctcagattcctaatcaacttcatgctgacatcaaagcagattcagagcggttttgtgtgcaggaagccgggaagccgtgcgatccccgtgtgagcctgctgcttgaggttgctgctgggttcatgtacccgaaggcacttgctacggattggaaggggaatgatccgtgtgtgtttccgggcgttagttgcatacaaggtaacattactgagctaattttcaccaataagggtctcagtggtagtatctcaccgtccatcgggaagattagctcacttaaggtgctaaatcttgctaacaataacatcactggtactgtgcctgaggaggttgccgcgttgccttcgctgacagaggttgatttgtcaaacaacaatctatatgggaaacttcctacatttgcttccaagagtgcagtggtgaaaactgctggtaaccctaacataggcaaggatgctcctgcaccaacagcaggatcaggtggtagcaacgacagtctatcggggggaggcagcagcggaagcattggtaacaatgggggttcctctccatcttctgttggagtcattgtaggctcagtggctggtacagtcgttggactaggccttgttgctgcattgggattctattgttacaagaggaaacagaagcctttcggaagggtgcagagtccacatgccatggttatccatccgcgacactcaggttcagatgacatggttaaaatcacagttgcagggggaaatgctaacgatggtgctcgcgcaagcgagacatatagccaagcgagcaatggtccacgcgacatccatgttgttgaaagtggaaatatggtcatttcaatccaagttctccgcaatgtgaccaacaacttcagtgaggagaacatccttggtcgaggagggtttggcactgtttacaagggcgagcttcatgacggcacgaaaattgctgtaaagcggatggaggctggtgttatgggtaacaaggggctaaatgagtttaaatcagagattgctgttttgaccaaggtccgacaccgcaatcttgtttcactgctgggctactgccttgatggcaatgagaggattctagtgtatgagtacatgccacagggggcactgagccaacacctgtttgagtggtctgagaaaaatttgcgaccattggaatggaaaaaacgacttagcattgcacttgatgttgcaagaggcgtcgagtaccttcacagccttgcccagcagacctttatccacagagacttgaagccatcaaacatacttcttggtgatgacatgaaggccaaggtggcggactttggattggtccggcttgcaccagctgatgggaagtgtgtctccgtagagacaagacttgctggcacttttgggtaccttgcaccagagtatgcagtcactggacgagtgaccacaaaagctgatgtcttcagctttggtgtcatcttgatggaactgattacaggacgcaaggcacttgatgagactcagcccgaggatagcatgcatttagttacatggttccggaggacgcagctcaacaaggaaacattccgcaaagcaatcgaccctgtcattgacctcgacgaggaaacctacgctagtgttagtaccgtctcagagcttgctggccactgctgcgctagggaagcgcaccagaggcctgacatgggccatgctgtcaatgtgctctctaccctttcggaagtttggaaaccagccgatccggactcggatgacagctacggtatcgaccttaacatgtccctgcctcaggctctgaagagatggcaggcgttcgaggacagcagccactttgacggtgcgacctcgtcgtttgttgcgagcctggataacactcagaccagcatccctacgaggcctcctgggttcgcggactcgttcacctctgccgacggaagataaagacatttagcgctgctagtaagggtgtgcaaaaaccttatgtttccgttgaaatggaagctcgggcgatccttgttcattcttttagtctcttcacccccgccaccaatctttccatgtctctttattcgtctctgtactgccgtgtagctgctctttggtcgtgtatgctgtgatcttgtcccgaaaattgcctggaagttcgaagactttgctaactggtctatgtcgtttgctaagattaaagtagaagaatgctagagctgtatggttgtatcgggtactgacaatttgcaaaggaaggtgaccctgtgttcgtcaaaaagaagtatggccctggcctgaagcttttccaacgcctaagctatgatcatttcactcgctgtacttactgtcatctactgtgagaactcaactatttgtcatgatctggtctcttatccgctgg

SEQ ID NO: 125905 - DNA, 2478 bp, Zea Mays
atgccgtccaggcgcgcgctacggcggtctccgccgccacgacagagcccgcaggcagcggcggacgcgaaggaggcggcgagcccgtggctaccgtcctcatcctccacctcgtcgtcttcctcctcagcctccgcgctcgtcaggcgctccgccgccttctcggcggctgggccgaggggcggatcggggacgcgcgtgtacccgttgcgggacttcccgggcggggacgcggccgcgctcggcggtgcgttccgggacaacgtgcggtggctcctgaagcagtggagctgcgttccgggttccgtgtcggcgtggcgcgcgctgctgtcagacgagcggacgggcgccttagtccccgtcatcgccgtggaggagctcgcggcatcgtcgcccttgccgctctgcgatctctgtcgctgcgccggttggagccaccactgggtgtcaaagcggaagtaccatttcatcattccggcagtggtcgactgggaccagccattcagggctgatgggttacttgggcacagcgagcacctcctacatggtctgatccatagtaatggctttggtcaccttctcaccctccgtggtcgtgttggtggctccactttcctctctggctgccagatcatggatatatgggatcaactttgcacagctctccgtgtaagagccgtctctgttgtggacttgacccagaagtactctgtggacctccgcctcctgcttggagtggcacaaagcaagacttggttcactcgctgggggtactgccttgccaagggttgtttcagcgtgtctaggtccacttatactgctgcacttgaagcccttgctgccctgcctgttgattgtctccgtagtcgtcatgtccgtcgtgtggtcaccatctaccgccgcctctccagcaaacctctggttacagtccgcgagtttctcctctgcctgcttgattggaagcaccgtgagcccccgctttctcctcctcccgtgaaggcatcctcgcggctgatgttcttgctgccaaagtcatgtatgatgaagaggcccaggcagccatgtcaacgctttgaggacgtagttgacctgcttgagtgtcggtggtcaaagaagcgtctgcttagtgctgcaaatgttgttgttgcaaagctgcgagagcatgcggatggcacaaagataacacggcaagcagtgcgagatgctgcaaggggtggcatcggtgacactggtctcctggacttcgtcatcaagtccctcaataacactgttgttggtaaccacattgtgcgccgcgtgcctgaccctgagaatcgtgtgcttcacttcagccttgaggaatatgctgagcctgagccacagccacaggcagatcatgagcttgaaccagtggaacttgatgcagagaacacccctcctgcagtccgatggccaaacgcagccgaggcggagcgggatctgcgtgctgtgtaccgagcaatggtgggggcacgcagtgaagcagcacaggctgtactggactgcaagcactgggtgaaatggtggggcctcagggacgagtctgatgaccagctaaggttccttgttgagtggcgaccacagccatgggaggctactgaacttacaaggccaatgccgcctggggatattgtggtagtaccactgcatgcatccataggcgagctgcttgttgaggcagagcatgcactgagggatacatactgcttctttgagaatttccaggccgagtcactggatggcattactggggataaatgggatccggtgatgcttggtggagcagagtctggtgacaccattggtgtgcacggccacggagctgacatggagactgggctgcggtgccagggaggtgcagatgcgtgggaggtgcagtgcgtttgtggtgcacaggacgacgatggggagcgcatggtggcatgcgatgcatgcaatgtctggcaccatacacgctgtgtcggcattgcagatggtgctccggtgccaccattgtttctctgcatatcctgcagtggcgcgctaatggccgctggaccaatttctggatgagacactaacggtacctgaagttaagtgacaattcttttgcacctttttcagttcatgcctgacaggtaggtgtctgactagtaaaccagatactattgagacctcgtgtgtaaagtgcgttgctgtagtagtatgtgatgagtttagtaacgatggagtaataccgaatgctatctgtactaagtcgactagtcgtagtagagtagagaggattaggcagtagaaagggaagcactatccttgtcgttagcaatccgactggaaattttgtacatggacatattacagaatagacgcggtaaatagctgtcctgtgatttgcgcctttctaccgtctgtgaatcttggcaacgaagtttaacttgttcattgtgttataagaatttatttattgtgagacaaaacaag

SEQ ID NO: 125906 - DNA, 279 bp, Zea Mays
atggctggaggatgctgggaggatgacattggtagctacggctgcacatcttgcccgaccgagcaaggcggcgttggcgaaggtcgcgacaaagatcatgacgacctggcggcgacaacgaccctcacgacgctgtcgtcgaggaccttgccttggccggcgaaaaccagcacagtgaggccggacgtctctggcggggccggggcggtagcaggtgcccgtcacagagaggaagcggacacttcaatagcacgggagagagaaacgatcgacgtgtag

SEQ ID NO: 125907 - DNA, 3290 bp, Zea Mays
agtccttcccattcctctgcaagtcgcaactcgcaaccaaaggcaaggagcatttcaaaaaccctacctccctaccccacttcgcagtccgcaccgcacccaccccgatctccttctcccacccagatcgccggcccgtgcgcacgaaatggaggtgccgcggagatgctcgacgccctcgcaggctggttcgcgcagtcgctctctcccgacaccgccgcgcgccggccgagcagacatcgcctccgccgcctcctccccgggcttccgctggcctcctcggcctcgcggcctccccgcgccacgacctccaggcccgcctcgccgcctccgtccacttcaagaatcttctccgccgccggtgcccaagcccgacgccgatgccgacgccgacgtcgaccaccttcccgcctccgactgcgccatcatcaaggcgaccttctccagctcctcctcaccaccccgcccctcatccaggcgcagtctccgaggcctcgcgccgcgcgctccgatttccccgccaggtgggagtcccttctcccgtccatcgtgtcctccctaggcactgccgtcaacgcgggggacatcaccgccaccaactctcttctcgctgccgtggtgtcgctcttctctcgcttccgcaacgcattcgacaataatgccctccgcctcgacctcaagtactgccttgacatcttcgccgccccactccttgaggtttttctctttgcctcccgccgccttcaagccgctgccaccacggccaacccgctcgagctccgtcccgtgtttgagtgccttcgcctctgttgcgagatcttctactcgcttaactccattgaccttcctgagttcttcgaggataacatgcgccagtggatgacagagttccaagccttcctcaccacatcctacccaccgcctgttgaggcagatggtgccccggatgcgctccgtgctgctgtctgtgataacctgcagctttatatggagaagtacgaggaggagtttaggggatacctgaaggagtttgttgaggctgtgtgggggctcctcatggcgcagaccgcttcgccttcccgtgtgcagcttgccgttactgcgataaggttcttgactacagttgctgagagtgtgcaccatgctttatttgggagtcctgaggcgatgaagcagatatgtgatagtgtcgttgtgcctaacttgcgcctgcgggatgaggatgaggagttgtttgagggcaattgggtggaatatgtcaggcgcgactctgagggtagcgatgcagatacactcagacgggcagcgtgccggttgctgcggggccttgcagcgaactaccaagagcaggtggctgcactcgtctcagcacaggtccagcagatgttggttgcatatgctgctaatcggtcaaacaactggaaggagaaggatgctgcaatataccttgttattgctcttatgcagaagcctggtgccacaggtggtggcacacctgtggttgacatggagagcttctttacatctgtgattgtgcctgagctccaagcccctgattggcagtctgagccaatgttgaaggcaactgtgctcaggttcttgaaggagttcaaggatcagatccccaaagctactgcactggcactcctacaaagtgtgatgcggtttttgatgcatgagtccaatgttgttcattcatatgctgcaacttttatcgagaacctgttgataatcaaggatgctgtaccggtaccaggggtgaccacagtgatcaggtctccacgttatgttgctgctgatatcaatccatttgccccacagatcattcagaacctgtccacagcactaggtttccctgattcacaagagaacccctacctgatgaagtgcctgatgcgggtgcttgggattgctaatattgctggtcaaattgttcatgagatcacagctcaacttgtgggtattctcatggaagtgtgtaataatcccaagaaccctgacttcaaccattacttgtttgaggctctggcagcagttattggccggactggtgagcaggacccaacactactccctgcttttgagaccagcctctttccagtgctccagaggatattggttgaggacatctcagagttctggccatatgcttttcagatatttgctcaacttgtcaatttgagccgaccacctctctcacagaattacatgcagctatttggtgtccttctcagtaatgcaacttgggaccggccaccatgtgttcctgccttggttcgtttgctgcgagcattccttaggaaaattctaaatgagctaaaccaagagggcaggcttccaaatatattggcaatatcccgtagcctcctctcacgcagcagcactgaagattctgcattctacatgctgaacacactagtggaaaacgttggttttgacattctgaacccatatataagtgagatatggagtgctttgtttactcggctacagactagacagacagtgaaatttgtgaactctcttgtggttttcatgtcgctagtgctggtcaaatatgggtcaagtgttcttgtcaattccgttgatgcaattcagccaaatcttttcacccaaatccttcagcgattttggattcccaacctcaatttgatcaaaggtgctcttgaagttaagttgacagcagttgcttcgataaagttgctttgtgagtctgcggtcctgttggatgctgcagcagcccagttatggggtaaattacttgacagtattgtcacactattgtccagaatgaatcaagatggatcacaacaagagcataatgatggtactgatgcagtggatactcagaagacatcaagttattctgtttcatttgtacgacttcaatatgctgggaagagtgaagatgaccttttgaaagaagtaaatgatccaaaacagtttgtggtcacatccttagccacaatttctgcccagtttcctgggaggtttggtcctgtcattgagcagcatgtggacctagcaaacaaaagtgtgcttcttcaactttgtgcagcctacaatgccaacattgtctaggtaacaacttcaatgatattattttataagtttaaaccatggatcaaactatgcattgagaatggatgtttcatccaagtttaatttcattttatatggcatggtagtcttggaaacaatgccatgaaactctccactaggaatggtcttggactcttggtggtctcaacgttcaagtacggagtaggatttagctacatggctgtccc

SEQ ID NO: 125908 - DNA, 981 bp, Zea Mays
atggctctgacggccagagtgaggaggcttccccagttgcacatctcgctcgacgtcccctcgtgcgccttccgtcaccacaacccgcccgcggcggcctcgacgtccgcgtcgcgagccagcggtgagttccggctctcggacttcgacaggctcgccgtgctggggcgcgggaacggcggcacggtgtacaaggtcgcgcaccgccggacgtcggcgctgtacgcgctcaaggtgctgcaccgcggcgaccccggggccgcgtcggaggtggacgccctgcggcgggccgacagctcgccgcacgtcgtgcggtgccactccgtgctccccgcggcggcccccggcgaggtcgcgctcctgctcgagctcgtggacggcggctcgctggacgccgtcgcggcccggcgcggggcgttcgccgaggccgcgctcgccgaggtcgcggcgcaggcgctggccggcctggcgcacctccacgcgcgccgcgtcgtccaccgcgacgtcaagccggcgaacctcctcgtcagcgccgccggggaggtcaagatcgccgacttcggcatcgccaaggtcctctcgcgcgccggcgaccactgcgccgcctacgagggcaccgccgcgtacatgagccccgagcggttcgacacggagcgccacagccacgccgacccctgcgccgccgacgtgtggagcctgggcgtcaccgttctggagcttctcatgggccggtacccgctgctccctgccgggcagaagcccagctgggcggggctcatgtgcgccatctgcttcggcgagctgccgtcgctgccggacggcgcagcgtcgccggagctccgtgcgttcgtcgccgcctgtcttgagaaggactacaccaagcgcgcgtctgtggcacagcttattgcgcacccgttcgtcgccagaagagacgtcgcggcctccaaagacgcgctccggcgactggtggccggggcctga

SEQ ID NO: 125909 - DNA, 1619 bp, Zea Mays
attccacgtgtgtagtgagtgagtttagacactgggggtgagccggtgaggcaataaaaaccctatcccagtaaacgccgcggctccttccgctaccaccttcatccatcctggcgtcggtgtcttgccctgccccagcgccgccgctccttcccccaccccgaagcgccgcctcttctgcctccgtcgacggtggtggtgctcctgatccccgccgttgaactggccataggagagcaaagaggaaggggaggccacgagggcgccagtagatatattcatcttcatctcggcttgcgatatttttgaattttctattccgtattgaaggcgtcgatggccttgtccgccctaatcagcaccctcctcgccgccgccatctggtgcgccgcttacctcgccgctgccatctcctccgccttctgattcccactccccactccccaaccctaacctcccccctgtagcacaccccacctccagctttgtaggtcctactatacttgcaacctctcccgccgactcgcttcgatctacccgccctcgcgtcaccatggggtacgcgcagctcgtcatcggccccgctgggagcggcaagtcaacttattgctccagtttatacgaccattgccagaccgtgggaaggacaattcatattgtcaatcttgatccagctgctgagcacttcgactatcctgtagatatggatatcagagagctgatttcattggatgatgttatggaggagattgggttggggccaaatggcggtctcatctactgcatggagcaccttgaagacagcttggatgattggtttgatgaacagctagagaactacctagatgatgattatcttgtgtttgattgccctggccagattgaactcttcacacatgttccagttctgcggaactttgtcgagcacctgaaacgaaaaaatttcaacgtttgcgctgtttaccttcttgattcacagtttgtcagcgatgtaacaaaatacatcagtggttgcatggcttctctatctgctatgattcagcttgaacttcctcatatcaacatcctttcaaagatggatctggtctccaacaaaaaagatgtagaagagtacctggacccgaatgcacaggttcttctttcacagctgaatcggcagatggcacctcggtttggcaagttgaacaagtgtttagctgaactggttgatgattacagcatggttaatttcattccacttgatttgagaaaggaaagcagcatacaatatgtgctatcttctatcgacacatgtatccagtatggggaagatgcagacgtgaaggtcagggacttcgaagaagacgaagactaaccactggatgctgtgggaggtgcaaactggttgctagcagtcgtgtagtgcggagtgagactttgggactgtgtatggcgcaggcatgcaaaaacgtcgtaggatgctgatggcagctatgtggtctatgtaagacgaactaaaccagatactccatttggcaagtcctagtaaaacgtgtgcgcgccttgatggtcctgttctccctcgatgctccgttggtattttatcaaaatcaattcaacggttgccgtatttatagaaa

SEQ ID NO: 125910 - DNA, 1541 bp, Zea Mays
ggtgaggcaataaaaaccctatcccagtaaacgccgcggctccttccgctaccaccttcatccatcctggcgtcggtgtcttgccctgccccagcgccgccgctccttcccccaccccgaagcgccgcctcttctgcctccgtcgacggtggtggtgctcctgatccccgccgttgaactggccataggagagcaaagaggaaggggaggccacgagggcgccagtagatatattcatcttcatctcggcttgcgatatttttgaattttctattccgtattgaaggcgtcgatggccttgtccgccctaatcagcaccctcctcgccgccgccatctgcacaccccacctccagctttgtaggtcctactatacttgcaacctctcccgccgactcgcttcgatctacccgccctcgcgtcaccatggggtacgcgcagctcgtcatcggccccgctgggagcggcaagtcaacttattgctccagtttatacgaccattgccagaccgtgggaaggacaattcatattgtcaatcttgatccagctgctgagcacttcgactatcctgtagatatggatatcagagagctgatttcattggatgatgttatggaggagattgggttggggccaaatggcggtctcatctactgcatggagcaccttgaagacagcttggatgattggtttgatgaacagctagagaactacctagatgatgattatcttgtgtttgattgccctggccagattgaactcttcacacatgttccagttctgcggaactttgtcgagcacctgaaacgaaaaaatttcaacgtttgcgctgtttaccttcttgattcacagtttgtcagcgatgtaacaaaatacatcagtggttgcatggcttctctatctgctatgattcagcttgaacttcctcatatcaacatcctttcaaagatggatctggtctccaacaaaaaagatgtagaagagtacctggacccgaatgcacaggttcttctttcacagctgaatcggcagatggcacctcggtttggcaagttgaacaagtgtttagctgaactggttgatgattacagcatggttaatttcattccacttgatttgagaaaggaaagcagcatacaatatgtgctatcttctatcgacacatgtatccagtatggggaagatgcagacgtgaaggtcagggacttcgaagaagacgaagactaaccactggatgctgtgggaggtgcaaactggttgctagcagtcgtgtagtgcggagtgagactttgggactgtgtatggcgcaggcatgcaaaaacgtcgtaggatgctgatggcagctatgtggtctatgtaagacgaactaaaccagatactccatttggcaagtcctagtaaaacgtgtgcgcgccttgatggtcctgttctccctcgatgctccgttggtattttatcaaaatcaattcaacggttgccgtatttatagaaacttagcaaagggtgagtttgatgtcaaatcgattgagttgtttacgggcc

SEQ ID NO: 125911 - DNA, 2326 bp, Zea Mays
cgaccggaaaaggacattgttcttttctgcgcccctactccacccgccgcctccgctcctcgccgccgcgcggcgcggcgacgtgcaatcttagggttcgtgagagggttcccgaatcctccttgccgtgcaccacaccgtccccctccaccgacgccgctgcttcccatgtcgctccgatccggcggccgccagctatctttcgagcttctcgcgggcgacctcaccgccgacgacccggacgacatctccccgcgctccctgcccgatacatcgtccgatgggcagcgccggcgcaggaggcggtctaagcgcaagcgtgggttccggagccccccgatccaggaggcggtttcggagggggagcagcagccgcgcgtggagggcggcggcaactcggccgcggcgttcagggtcctggatctgaagtcgactgcggagacggtgtgcgagagctcggacgcggaaaggtctgcggcgagctgcgtgacctatgttggcgtggagctgaggcagaggagcgtctccgggggcgggagggtggtggcagcgtccgcggatgatgggaccagcagctgcggaagcagcacgcgggagagcgccgcagctgctgcggctgtggcggatgtggcagccatggcgtggcggcctgaggcaaatggcggcatgaagaagaagctggagaaggagtcgtcgctggactgggagaagtacatgaaggacaataacaaaattctcggagaatttgagcgccttgacaaatcaccattcagatactttcttggggaactatatggtggcaattcactgagaagcacaattgcagtgggcaatgagaagaagcggcagcgggtgtacaacactatgtttcatgtcccatggagatgtgaacggctaattgtcgcaggattcttcgtctgcttggattcctttctgtcattgcttacaattatgcctgcacgaattgtcgttaccatctggcgggtgatgaagaccaggaagttccggcggccaaatgctgctgatttatcagattatggatgttttgtagttctagcccttggagttgcctctttgcaaatgatagatattagcttaatttaccatgtcattcgtggtcagggcacaatcaagctttatgtcgtatacaacgtactagagatctttgacaaactctgtcaatcattcggtgaggatgtgctgcaagttctgttcaactcagctgaggggttgtcagcatgctcgacagataatgtgacatttgaactgatgcggttcattttggatgaggctatagccgttgttgcatttgttgtccattcatttgtcttgttagctcaggcgatcaccctgtcaacatgcattattgcccacaataatgcattattggctctactggtatcaaacaattttgctgagattaaaagtaatgtatttaagcgtgttagcaaagagaatcttcataatttggtatactatgacatcattgagcgatttcacatcatggcctttctgctatttgttcttgctcaaaatatcttggaagcagagggcccatggtttgacagctttcttattaatgcgtcattggtttttttgtgtgaagtacttatcgatgctatcaaacattctttccttgcaaaatttaatgagataaagccagttgcatattcagaatttttggaagatctttgcaagcagattttgaatgacaaacctgatgaccgtcagaaggacctaacattcatcccacttgccccagcttgtgttgtaattcgtgtattgaccccagtatatgctaccctccttcctgctggcccttttatctggagaatattctggattttactttggtcagttctgacctattttatgctcgccatattcaagataatcgtgggattgatactgcgctgccttgcaaattggtatgtaaatctacggctcacaagaaaacaacacgtggattgagtacatggcaccacaattctgctgctatcgttacatctgtgagtagaaattttgctgtggtgcatgaagtgcagcaagcactgcagctgctgagagttatatgacagaagtattcatagtatagtacagcgcagatgaatattatagtctcttcttccaagggttttgtcgattcgaggaacagattagtcaaattttgtggtgtttagacttctgacctccgtttgtgcatagctcagcttcatccaaaactatctgctgtcacctaaccaagatgttctggtctgtgatgtaagacatgtttatacattttttttaaaaaagaaacaaactgtactttcgtgttcagcagaag

SEQ ID NO: 125912 - DNA, 1224 bp, Zea Mays
atgtccatcacaaggttggccgcgtacgtggaccccggcaccggagtccccctccgccgcgcgatcctttacgtcgccgtcctccttggctctaacctggccacgttcctcttctcttcccgctattcttcctgtgcgacgcctccggccgccacggcggcaccgaaaatggctactccagggaccaccaccgtcccggagcagctggcggacctcccgctggagttccacgcgttcgcggggccgcacgcgctgccgtatgggcgcaaccccaactggggcaccgccgagctgcggccgcccgtgggccacccgtgcctggccttcccgcacctgctcgccgccttcatgtcgtaccctgtcaacggctcctgccccgacgacgagctccacgcgcagcggctccttctccgcggctgcgagcccctgccgcgccgacgctgccgccccgccgcgccgccggacccggcaccgccactgccgttccccgacgcgctctggtccacgccgcccgaccgctccgtccactggtccgcctacacgtgcaagtccttccgctgcctcgttgaccgcgcgcgctccccgcgcttcgacgactgcaaggactgcttcgacctagacggcggcccggagcggtaccgctgggtcaagcccaacgccacagacaagaagagaaacccgctcaacttctccgtcgacgaggtgctcttggcggcgtccccgccgggatccgtccgcatcgggctcgacatcggcggcgggtccggcaccttcgccgtgcgcatgcgcgagcacggcgtcaccgtggtggccaccaccgtgaacctcaacggccccttcagctccttcgtggccgcgcgcggggtcgtgccgctctacgtgagcgtcgctgcgcggctgcccttcttcgacaacacgctggacatcgtgcactccatgcacgtgctcagcggctggatcccgcccgtcgcgctgcagttcgctctgttcgacgtgtaccgggtgctccggcctggcgggatgttctggcttgaccacttcttctgcggggaggcggagatggcgacgtacgtgggtgtggtggagagcatcgggttcggcaagctgaggtgggtgacgggtaggaagctcgacaggggaccggacaggaaggagatgtatctctcggcgttgctggacaagccgctgaagaactcgtggcgcatcaattccggtaactcttga

SEQ ID NO: 125913 - DNA, 345 bp, Zea Mays
atggggggctccgagaaggggcccacgaccggcgatgaagggggtcccatccccgagaggctcgctgttgtgggagatgaggctgcccgcgacggggaggggacccgcgaccgtggtggctgcggtgcgcacgccgcgtccgcgctcgcaccagtagtgttggcgacgagtttccctcttccttcagaatcttgtaccaatctagaacttcagaaagggtcaaatagcaacgaaccatatgaccttcacgtgatgtgcgggaccttaggtttggctctaggaggtgtcggatggtccgtggtagatcattggaccctccgcagtaggccatcgaatcgtctgtga

SEQ ID NO: 125914 - DNA, 2868 bp, Zea Mays
aggatatgttcccatccctctgaccgaccaccctcccaaggtcgagggctcctgtatctttaccgtctccaatcgatcccatctcctcgccatcgccgccgccatggcgttcctagcgcgggctctccgccagtccaattcgcgtctgtcgtcgtgcccctccgtcgccgcgtcctgccgctggatctcccggaccgccgccgcgggatcgccggaggccggcgcggcggtggcgccggctgacccggagttgcctccaccccgggagcctgttggcggcgcccgcgtggagcttcctcccaacccggaggacgcgctcgaggtgttcgtggatggccacgcggtgcggatccccaaagggttcaccgtgctacaggcctgcgaggtcgccggcgtcgacatcccgcgtttctgctaccatagccgactctccatcgctgggaactgccgtatgtgcctcgttgaggtcgagaagtcgcctaagcccgttgcatcttgtgccatgcccgcgctgccagggatgaaaatcaagacaaacaccccagtggcgaagaaggcgagggagggtgtcatggagttcttgctgatgaaccatccactggactgcccaatctgtgatcagggtggggagtgcgacctccaggatcagtctatggcatttggtgctgaccgcggtcggttcactgagatgaagcggtcagttgtggacaagaatctgggtcccttggttaagacagtgatgactcgttgcatccaatgtacaagatgtgtcaggtttgctactgaggttgctggtgttcaagaccttggtatgttaggtcgtggcagtggtgaagaaattggaacatatgttgagaaacttatgacaagtgaactatctggaaatgttattgatatctgccctgttggggctcttacatccaagccatttgcatttaaagctaggaactgggaactgaaaggcaccgagaccattgatgttactgatgcagtggggtccaacataagagttgacagcagaggacctgaagttatgcgcattgttccacgcctcaatgaggacattaatgaggaatggatttcggacaaaacacggttttgttatgatggtctgaagaggcaaagactaaatgaccctatgatccgtggtcctgatggcaggtttaaggctgtgacgtggcgtgatgctcttgcagttgttgctgaggttttgcaccaagttaaaccagaagaaataactggagttgctggaaagctttctgatgcagaatccatgatggcactgaaagattttgttaacagaatgggttcagataaggtgctgtgtgagggaaatggtcctaatcctccagcagatctgcgatctaactacctaatgaatacgagcattgctgggcttgaaaaggctgatgtcttccttttggttggcactcagccaagggtggaagctgctatggttaacgccaggattcggaagactgttaaagcaacacaagcaaaggttgggtacattggtcctccagctgactttaactatgaccatgaacatcttggcacaggaccacagacccttgttgagattacagagggtcgtcatcctttctgttcagtactgcaatctgccaagaaccctgtcatcattgctggagctggattatttgaacgggaagaccaagatgccctattctcaatgattgagactgtagccaagaggttcaatgtgactagaccagactggaatggccttaatgtcctgttgctccatgctgcacaggctgcagctcttgatcttgggcttgttgctaatcctgccgagagcatcaagtcagcaaagttcttgtatctgatgggagctgatgatataagcctggacaagcttccagacgatgcatttgttgtttatcagggacaccatggagacaaggctgtctatagggccaacgttatcctgccatcttcagcattcagtgagaaggaaggcacctacgagaatactgaaggatgcacccagtggaccattccagccgttcctacggttggtgatgctagggatgactggaagatcatccgtgctctttctgaggttgctggggctctactgccttacgacagtctctcagctgtgagggaccggatcagtacggtcgcacctaatctagtacatgtagacgagagggagccatccacaatctccgtcgaggtgaagccgcctgtaaagcaaaaggtcagctcgacgccattcaaaactgtggtggagaacttctacatgactgatgcaatcactcgagcttcgaagattatggcccaatgcagtgcgacattgctgaagaagtgagatttgcacccttcgagctaatcttcagcaaacaacttcttagttccctccctttttttttttacttgctacgagtttcgccaccgttgcttgttttcttgggaggttttggtgtataatttggactgcctctagattttcttcagagcagcaaaacctgatcagtacatctccgtgctgtgtatgagaagcagagcatactcaataagcttgttgccccaactgaatcatcatacaagtgacacaaacacatgattttgccttcaaatactcgccccttatgtttgtttgtaatgtgcaacttgccaaaagatagcaatctaaatcattgcttggttaggttgttaaaaggatattgcatggttatgttgttagtgcgattcaggcggttaatagtcttggtattgtgtttcctaacaaaaaattcacagctcttagtttcttaccttgttgcaacatctataaagtctgagagaacttaaattttgttaacgagagtttgacagccgagaccgagaccgctcgcagattac

SEQ ID NO: 125915 - DNA, 841 bp, Zea Mays
gtcgcgtcctcgtcccttggctgccacactgcagaaacgacgacaggtagtggcagcactcagaccgcgccttatccaactgactgacacctcgctcgctctgtcgctcagccctcacccacccagcatggtgctccagctccactgcgccacaccgaccatcaccatctccccgcctcccgcccgccctcgtcactacccccaccacctctacggcgccagcggagcgctccaggccccagctcgcggcctcgggcaccttccccgcctcctcgtcggcgtcagagacccgcgcgccgacggagcggtctgtcacgtgaggaggcaggtgcggtacgacgaggacgacgaggaggatgacgacggcgaggagtggggccacaacgaggacgtcgcgaggatggaacggtacagcgaggacgcccgcgaccaggcgctcctggtgaaggcccgagtggacgacgaggtcgaagtcgtgctcgtcttcaggggcttctcgtcgagcttgagcgggggaacggccgcggatccggcgaggagcgtcctgccggagagggcgatcatacagtcggtcgacgtggtgaaggggccgtttgaccccaacaacatcgagtacctggagaagggagtgggatgggaggacttcaggagccgcctgcgatagtaacagcactagcacattgtgctgttgttcttttaaggcaattttatctgcttccgactgatcaggccatgcaatggtcgtccaaaaccagaaatgtacagttggtcatcctatcccacaatttcattttgtagcatctgacagattgtccagcctggcaccccacccaataaaagt

SEQ ID NO: 125916 - DNA, 726 bp, Zea Mays
aagcttggctggcgacctaggagaggtagcagcagtgggaagccagctggagatcgcggccgccatgggggctggaggcagagcgtcgtgcgtccgggggcttgtgcccgctgagcaaggagccagacgaccagagaggaagcagagagaggaagagcagcgactgttgtggaggaaacagggagaagaagatgggggtgtcggcttcttgaggagagggatgacggccaagctctccaccagcgccgacgcctcggcctcggtgcggctctccgcagcagtgcaggcggctgcgatccagccctcctccccacgcttcttctgctcctcgctagccggaactaacccgacctcccccgcatcgccattgcctgaggctgggcgcgagcaggatggggtgggtgaggagggagtgcgcgagcacggcgaaggagagcgggaagacgaggcaggcggtgagcagcgcgaaggggcgcggagccgcgcgccggatcgacgccgagacgcggaccagctccgctgcgcccagcgccgtgaggtcgctcgacgctaggtccatcgccgccggcgggatgctgcttgtgtcggccgacccggttggttcagggggcagaggatgaactccatggctgcgcgcgcggccgccctagccttcgcggcgacggtggcggatctggaccgcggctggggtgtggccgcccctgggagggaaggatgagcctcccg

SEQ ID NO: 125917 - DNA, 92 bp, Zea Mays
gcctgggccatggtgagcatgacctcaatcttcttgtgaaaggtcacgacctcctattcagcatgggtgtgctcctcgttagtcgatgagat

SEQ ID NO: 125918 - DNA, 2774 bp, Zea Mays
ccctctcgcccggccccaccaccccgagcggcgcaacctcccacccgcgaatttactaaactccccgaggcccattccacgaaatgcgcacgggagttttagggtttttctctccccgcacgccagacgcaagaaacgaagaaacggacgagaccactctcaacctcggctcgttccggaccgggcccgctctcgccacctcagccgccgccgcgatgcggtcgccttcgccaccgccgtggcggctccggcgcatccgtttcgcgttccccatgctcctcgtcgtcgcgtcgctggcgggggccgacgacctcgcgagcgacgcgcgggcgctcgtggcgttccgtgacgccgtggggcggcgcctggcgtggaacgcctcggacgtcgcgggcgcgtgctcgtggacgggggtcacctgcgagcacggccgcgtggcggtgctgcggcttcccggggcgacgctctcggggacagtccccgcggggacgctcgggaaccttacggcgctgcacacgctcagcctccgcctcaacgggctctccggcgcgctcccagccgacctgtcttccgccgccgcgcttcgtaacgtcttcctcaacgggaacaggctgtcgggcgggttcccgcaggcgattctcgctctcccggggctcgtcaggctctcgctcggcgggaacgacctgtccgggcccattccgacggagctcggcaacctcacacacctcagggtcctgctccttgagaataatcgcttttccggcgagatttccgatgtgaagctaccgccgctgcagcagttcaatgtctcgttcaaccaactgaacggatccatcccggcctcacttcggtcgcagccgcgctccgcgttcctggggacgggcttgtgcggcggacccttggggccttgccctggtgaggttcccccgtcccctgctccagcggggcagacaccgtcgccgacgcctgttcccagtggcagcggcggcggcggcggcaccaacggtggaagcggcgtagaaaatggccataagggcaagaagctctccggtggcgccattgccggaatcgccataggctctgccttgggcgccgcacttctcctcttcctccttgtctgcctctgtcgcaggtcggggggcatcagaacgcggtctctggagatgccgccttcttccccagcgcctgccggcggcaggaaacctcccgagatgactagcgctgccgctgtagcgccgttgaccacgataggccaccccaacgctcctattgtccagtcgacgtccggtaagaagctggtcttctttggttcagcggccgccgtggcgtctttcaagctggaggacctgctgcgcgcgtcggctgaggtgctcggaaaaggaacgttcgggacgacgtacaaggcagtgctcgagtctggtgcaactttggccgtgaagcgcctcaaggacgtgactctgtctgaacctgagttccgtgaacgcatttctgagattggcgagcttcagcacgagttcattgtgccactccgtgcttactactacagcaaagatgagaagctacttgtttacgacttcatgcccaaggggagcctgtctgcagtcctgcacggcaacataacttctggcaagacacctcttaactgggatttaaggtcaagcattgctctagctgcagcccgtggtgttgagtacatccactcaacgagttcaacggcttcccacggtaacatcaagtcatccaatgtcctcctgggcgaatcgtatcaagcacacgtatcagacaatggccttaccgctcttgttggtccatcgtcttcaccgtctcgcgccactggataccgtgcacccgaggttattgatccccggagggtttcccagaaggcagacgtgtacagcttcggtgttctgttgcttgagctggtcacaggcaaggcccccagccaggccgctctcaacgacgagggcgtcaacctgcccagatgggtgcagtcagttagtcgctccgaatggggttcggaggtgttcgatattgagctcatgagacacgaggctggcgaggagccgatggctcagcttgtgctgcttgctctggactgcgtagcgcaagtcccagaggcccggccctcaatggggcatgttgttacgcggatagaggagatcaggaagtcaagcttgaccacaaacatggaggaagaagttgatgatcaatcttccaaggctgaatccgaggtgccgaccaatccgttcgcttcttgatctcagtcgacctaaaagagaatcagctataactctagcctgcatccaatcgatcttagaccgagtcgactctttttttcatcttttagcgtacatgatttaacgggtaacttgattgtcaaaagtagcacgggtgcacggcatccggtgctgctgagtttgaccggtggcggtgtgcttagggaccagttctaaagtgattgctaaattgctgtgctcattctagccttgattagtgctgctgctgctgtcattcagctacccatgtgtaattactgagccccatgtagtgtttggaatttctttttggctggatcagtctctcgtttgatctgctcaagttgcttgccgatatgtttgtcgtggggggcattctttttggggaagtctggtggtctactgtcaacaacgactggtgctacggtggcagctgctcgatggcggcgttgtcatcagtccgcgaaataccttaataccaccttatgagccgtactagcggtggtatgtgaatatgtt

SEQ ID NO: 125919 - DNA, 111 bp, Zea Mays
aataagtcatgtggtcttcgtgtggaggacagtccgcacagcatctctgctatccgcacagcatccctgctataggacagcagcaacacagcagtttttgactgcaaggac

SEQ ID NO: 125920 - DNA, 734 bp, Zea Mays
ctagagattcgtctatcctcaccaccaccagccgcccatacctcaccaccaccagccgccgcgccatcagccgccgcaacgacctcccacccgccctctccaactctagatgcattcactcggctcaaagagagttttggccgcttcacagagcagtgggatcagttcgttgtgatgttccaccgctacaaggagaagacagagaaggaactccaagcagcggtgcggcttcagacggcagcgcgagggttcctggcacgccgccaggtacagtcccttcgtggggagaagcaccttgctgtggcctccagggccaccccatggccgtcatcacatgagcaggccgtggtgcgcctgcaagccgcagtgcgcggcttccttgttaggcgggcggtgcggaagctgcacttgctgatcagctcatcgctgcaccaactcgcagcctgcgtgcccaaccaccaggtctcatctatactttttgaaccccctgcagaagtagagatctgggtatgcagcccccctgcacggccaaagagggtcgtctccttcattcgggcacctgccttggtgttggacagacccaacataagaacgggctggttcctcctccacctttcatccaacgtcaaggccgcaattcagctctttccttgggatccaggaggacaggaggacatagctgcagttcaaatttatattttagttccacaattattttatattttcgtcttaaa

SEQ ID NO: 125921 - DNA, 486 bp, Zea Mays
atggactgggggaagccgcctccgtcattcatcgtccacaatgccgatggggcctggggtcaattgcttgctggtgatgatgcttcgtcgggggaccgcaccgatccgcagatggggtatcgccgcgctatgcactggaaaaggaaacctcggaaaaataccacaaaacaatggtttccaaaaaatatggccgaatcagctcaacatcaggatgacaacacacaagatgttcccggaagaactgaaggtactagtgaaccacaactgatgttgctacagggaggtgagattgggcagcaggagtttgaagccgttcaaattgggcagcaggagtttgaagccgttcagattgggcagcaggagtttgaagctgtcgatgttgggcagcaggagtttgaagctgttgatgttgggcacttaaccccaacaaggcacaaaaaaagagcagtaggaaagaagttgacgccgaagaagaaaaatgtttga

SEQ ID NO: 125922 - DNA, 2391 bp, Zea Mays
agattccttgtcgaaactgtacttgcattccatgaggcccgcctcagcggcagcgcccttcccagtctcagatccgcgtcgtcgcggcccctccccctctcccgtgcgctgcgtcccccaattcccgctccccacgcacccagacacgccgagcgggagaggaagcgacagccagcagccgaggcggccagcgccagcgctggcatgaccactcccactcccagtggcgacggctcgcccccgggctcctccgacctcgtgcccccttcctaccccgagatgatcgtcgccgcgatcaccgccctcgccgaggagaacggctccagccaggccgccatcgcgcgccgcatcgaggcgcaggcccgcggcgacctgccggcctcgcacccggcgctcgtcgccgcccacctctcgcgcatgtccgccgcaggggagctcgtcgccgtcgcgggggggaagtacgcgctgcccccgccgccggcgcagccggcgccggagtcaccggctgacgacggcgaagacgatgactgcgctgacgaggtggacgaggaagaggaggcgccggagcctctgcccgtgcctgtgccgcagccgcccgccaagcgcgggcgtgggaggcccccgaagccgcggaccgcggacttacgatgcatagcaaatactcctctggatgaagaaagtgcattatctcaaatggttacctgcatagaagatctccaagaaattgtcaactgcaggaagcatgagtctctcacagtgcagacatttggaacacgaatagaaaaactacacagggagaagtatctgcagctctgtgactcggttgatatggacaaggttgattcaacaagcaccataatggatgaggaagacgacgttgttcgtagcttgcgcgcaagtcctgtccatccaatcaaggatcgcacttcaattgatgactttgaaatcatcaaacctattagccgtggagcatttggacgtgttttcttggccaagaaaagaactacgggagacctttttgctataaaggttcttaggaaggcagatatgattcggaaaaatgctgtcgagagtatattggctgaacgtgatatattgattacagtcaggaacccttttgtggtacggtttttctattcgtttacctcacgggataatttgtatctggtcatggagtacctgaatggaggggacctttactcattactgaggaatttagggtgcctggatgaagacgttgttcgtgtgtatcttgcagaagttgtactagctttggaatatttgcactctatgcacatagtccatagggatctaaagcctgacaacttgttgatagcccatgatggacatattaagttgacaggttttgggttgtccaaggttggtttgattaacaacacatatgatctgtctcgccctgttgttagtggggcttcactgtatggagatgatgagcctcagatgaatgaattcgagcaaatggatcaccgagcacggagacaaaatcgttctgctgttggaactcctgattatttagcaccagaaatcattttggggacaggacatggttgcagtgcagattggtggtccgttggtgtcattctatttgagctcattgttggcatacctccgttcaatgcagaacacccccagacaatttttgacaatattctgaattacaaaataccttggccgcatgtcccggaagagatgagttttgatgcacaagatttaattgacaaattattgaccgaagatcctcatcaacgactaggagcaaatggcgcctcagaggttaaacaacatccatttttcaaagacattagctgggatacccttgctaggcagaaggctgcctttgttccctcctcagataatgcatttgatactagctacttcaccagtcgctattcctggaatccatcagatggaaacatatatgaagcatacgagtttgaggattccagtgataatggaagccttagtggaagcagtagttgtctgagcaaccgccaagatgacatgacggaggacagcgatggcctcaatgagtttgaatctagtgcaaatgtcaattattctttcagcaacttctcgttcaagaatcatgcttccatcaattatgatatgttcaccaaaggattgaaggatgatccaccgccaagaactgaaacgtagcaatcaatccaaatttggactctcatccgagtaatcaaacagtctacaaggtgctcgcgcgatgtaggtcttgtacatgtaactaggcattttcactcttatatcacctcttctattggcacctggttatctataacaatgttatagttgttactgtcacttgtgcagatcaaagtgtgaggcatggtctgttccaattgaggctgttcctac

SEQ ID NO: 125923 - DNA, 2791 bp, Zea Mays
agattccttgtcgaaactgtacttgcattccatgaggcccgcctcagcggcagcgcccttcccagtctcagatccgcgtcgtcgcggcccctccccctctcccgtgcgctgcgtcccccaattcccgctccccacgcacccagacacgccgagcgggagaggaagcgacagccagcagccgaggcggccagcgccagcgctggcatgaccactcccactcccagtggcgacggctcgcccccgggctcctccgacctcgtgcccccttcctaccccgagatgatcgtcgccgcgatcaccgccctcgccgaggagaacggctccagccaggccgccatcgcgcgccgcatcgaggcgcaggcccgcggcgacctgccggcctcgcacccggcgctcgtcgccgcccacctctcgcgcatgtccgccgcaggggagctcgtcgccgtcgcgggggggaagtacgcgctgcccccgccgccggcgcagccggcgccggagtcaccggctgacgacggcgaagacgatgactgcgctgacgaggtggacgaggaagaggaggcgccggagcctctgcccgtgcctgtgccgcagccgcccgccaagcgcgggcgtgggaggcccccgaagccgcggaccgcggacttacgatgcatagcaaatactcctctggatgaagaaagtgcattatctcaaatggttacctgcatagaagatctccaagaaattgtcaactgcaggaagcatgagtctctcacagtgcagacatttggaacacgaatagaaaaactacacagggagaagtatctgcagctctgtgactcggttgatatggacaaggttgattcaacaagcaccataatggatgaggaagacgacgttgttcgtagcttgcgcgcaagtcctgtccatccaatcaaggatcgcacttcaattgatgactttgaaatcatcaaacctattagccgtggagcatttggacgtgttttcttggccaagaaaagaactacgggagacctttttgctataaaggttcttaggaaggcagatatgattcggaaaaatgctgtcgagagtatattggctgaacgtgatatattgattacagtcaggaacccttttgtggtacggtttttctattcgtttacctcacgggataatttgtatctggtcatggagtacctgaatggaggggacctttactcattactgaggaatttagggtgcctggatgaagacgttgttcgtgtgtatcttgcagaagttgtactagctttggaatatttgcactctatgcacatagtccatagggatctaaagcctgacaacttgttgatagcccatgatggacatattaagttgacaggttttgggttgtccaaggttggtttgattaacaacacatatgatctgtctcgccctgttgttagtggggcttcactgtatggagatgatgagcctcagatgaatgaattcgagcaaatggatcaccgagcacggagacaaaatcgttctgctgttggaactcctgattatttagcaccagaaatcattttggggacaggacatggttgcagtgcagattggtggtccgttggtgtcattctatttgagctcattgttggcatacctccgttcaatgcagaacacccccagacaatttttgacaatattctgaattacaaaataccttggccgcatgtcccggaagagatgagttttgatgcacaagatttaattgacaaattattgaccgaagatcctcatcaacgactaggagcaaatggcgcctcagaggttaaacaacatccatttttcaaagacattagctgggatacccttgctaggcagaaggctgcctttgttccctcctcagataatgcatttgatactagctacttcaccagtcgctattcctggaatccatcagatggaaacatatatgaagcatacgagtttgaggattccagtgataatggaagccttagtggaagcagtagttgtctgagcaaccgccaagatgacatgacggaggacagcgatggcctcaatgagtttgaatctagtgcaaatgtcaattattctttcagcaacttctcgttcaagaatcatgcttccatcaattatgatatgttcaccaaaggattgaaggatgatccaccgccaagaactgaaacgtagcaatcaatccaaatttggactctcatccgagtaatcaaacagtctacaaggtgctcgcgcgatatcaaagtgtgaggcatggtctgttccaattgaggctgttcctacatctcccggagccgagtacagttttgctgttaccttgttttcatgaccaattgacatgccatcatcagtgaatcacccttgaccgaattgggcagagcgctgtctttttgttcccctttgcttttttttttaaaaaaatcagtccattatgagccttgggtttgcggagattggcccaggttactgtattcagaatacaacccctgaagatgtaggtgggttttaggaaattgccattctggcatttatagttgacgatggtttgttaagctggtagcccgctggatttcctgcggccagaaatgttcacagcattttttatggccatgggatacatcattttgctaaatgtgtccagtgtcccacagaatctgggacattataagaataggaaccgattgaggctggtgctgtttgtttcaacagagagtacgggaacggtaaatgcaactagcaaacggtgataattgttgcaaaggaataaaaacgctctctgtttggttca

SEQ ID NO: 125924 - DNA, 2778 bp, Zea Mays
agattccttgtcgaaactgtacttgcattccatgaggcccgcctcagcggcagcgcccttcccagtctcagatccgcgtcgtcgcggcccctccccctctcccgtgcgctgcgtcccccaattcccgctccccacgcacccagacacgccgagcgggagaggaagcgacagccagcagccgaggcggccagcgccagcgctggcatgaccactcccactcccagtggcgacggctcgcccccgggctcctccgacctcgtgcccccttcctaccccgagatgatcgtcgccgcgatcaccgccctcgccgaggagaacggctccagccaggccgccatcgcgcgccgcatcgaggcgcaggcccgcggcgacctgccggcctcgcacccggcgctcgtcgccgcccacctctcgcgcatgtccgccgcaggggagctcgtcgccgtcgcgggggggaagtacgcgctgcccccgccgccggcgcagccggcgccggagtcaccggctgacgacggcgaagacgatgactgcgctgacgaggtggacgaggaagaggaggcgccggagcctctgcccgtgcctgtgccgcagccgcccgccaagcgcgggcgtgggaggcccccgaagccgcggaccgcggacttacgatgcatagcaaatactcctctggatgaagaaagtgcattatctcaaatggttacctgcatagaagatctccaagaaattgtcaactgcaggaagcatgagtctctcacagtgcagacatttggaacacgaatagaaaaactacacagggagaagtatctgcagctctgtgactcggttgatatggacaaggttgattcaacaagcaccataatggatgaggaagacgacgttgttcgtagcttgcgcgcaagtcctgtccatccaatcaaggatcgcacttcaattgatgactttgaaatcatcaaacctattagccgtggagcatttggacgtgttttcttggccaagaaaagaactacgggagacctttttgctataaaggttcttaggaaggcagatatgattcggaaaaatgctgtcgagagtatattggctgaacgtgatatattgattacagtcaggaacccttttgtggtacggtttttctattcgtttacctcacgggataatttgtatctggtcatggagtacctgaatggaggggacctttactcattactgaggaatttagggtgcctggatgaagacgttgttcgtgtgtatcttgcagaagttgtactagctttggaatatttgcactctatgcacatagtccatagggatctaaagcctgacaacttgttgatagcccatgatggacatattaagttgacaggttttgggttgtccaaggttggtttgattaacaacacatatgatctgtctcgccctgttgttagtggggcttcactgtatggagatgatgagcctcagatgaatgaattcgagcaaatggatcaccgagcacggagacaaaatcgttctgctgttggaactcctgattatttagcaccagaaatcattttggggacaggacatggttgcagtgcagattggtggtccgttggtgtcattctatttgagctcattgttggcatacctccgttcaatgcagaacacccccagacaatttttgacaatattctgaattacaaaataccttggccgcatgtcccggaagagatgagttttgatgcacaagatttaattgacaaattattgaccgaagatcctcatcaacgactaggagcaaatggcgcctcagaggttaaacaacatccatttttcaaagacattagctgggatacccttgctaggcagaaggctgcctttgttccctcctcagataatgcatttgatactagctacttcaccagtcgctattcctggaatccatcagatggaaacatatatgaagcatacgagtttgaggattccagtgataatggaagccttagtggaagcagtagttgtctgagcaaccgccaagatgacatgacggaggacagcgatggcctcaatgagtttgaatctagtgcaaatgtcaattattctttcagcaacttctcgttcaagaatcatgcttccatcaattatgatatgttcaccaaaggattgaaggatgatccaccgccaagaactgaaacgtagcaatcaatccaaatttggactctcatccgagtaatcaaacagtctacaagatcaaagtgtgaggcatggtctgttccaattgaggctgttcctacatctcccggagccgagtacagttttgctgttaccttgttttcatgaccaattgacatgccatcatcagtgaatcacccttgaccgaattgggcagagcgctgtctttttgttcccctttgcttttttttttaaaaaaatcagtccattatgagccttgggtttgcggagattggcccaggttactgtattcagaatacaacccctgaagatgtaggtgggttttaggaaattgccattctggcatttatagttgacgatggtttgttaagctggtagcccgctggatttcctgcggccagaaatgttcacagcattttttatggccatgggatacatcattttgctaaatgtgtccagtgtcccacagaatctgggacattataagaataggaaccgattgaggctggtgctgtttgtttcaacagagagtacgggaacggtaaatgcaactagcaaacggtgataattgttgcaaaggaataaaaacgctctctgtttggttca

SEQ ID NO: 125925 - DNA, 723 bp, Zea Mays
ggaaaaaaaatatttgtttggtgagccacgctcccatccggatccgcgggggaggacggcgatttcgtccccagcctcatgaggtcgggaaggggttcccgcacccacatttgtgaacctcgccggcgcccatcccctgccttcacgaacccgccgccgcccgtcccctactcttcctcgtgcacccaccgtcgctcgtcccctcgtcttccttgcgcactcgccgtcgcctcctcctcaccctcacgcacttgaggccagctgcagaacgaggtcggacggcggagacgaggtcgaggtctacgacctcctcaacttgcgcaagactgccgagactgcagggacaagctctttgctgcctcgtcagctgctagctgacttctcgtttgtagtatgtgaatatcttatttgacaaagtgatacacaagggtttttcatcaacaagtggtcgccagaagaactgaaacatcaagatggcgtttgcttttaggtcatgccattcaggagatgatgctaagctaaataatcacatctatgtgtacactgagactgttttattatgagactatgttttattatgatgcactgagactatgtttgtgtacactgagactgttttattatgatgcactgagactgttttattaagcagtgtggagttctcggctgctgttctcatttttaatgcaagtgtgttcaatgagcagtgttcaatgacaaaca

SEQ ID NO: 125926 - DNA, 691 bp, Zea Mays
ggaaaaaaaatatttgtttggtgagccacgctcccatccggatccgcgggggaggacggcgatttcgtccccagcctcatgaggtcgggaaggggttcccgcacccacatttgtgaacctcgccggcgcccatcccctgccttcacgaacccgccgccgcccgtcccctactcttcctcgtgcacccaccgtcgctcgtcccctcgtcttccttgcgcactcgccgtcgcctcctcctcaccctcacgcacttgaggccagctgcagaacgaggtcggacggcggagacgaggtcgaggtctacgacctcctcaacttgcgcaagactgccgagactgcagggacaagctctttgctgcctcgtcagctgctagctgacttctcgtgatacacaagggtttttcatcaacaagtggtcgccagaagaactgaaacatcaagatggcgtttgcttttaggtcatgccattcaggagatgatgctaagctaaataatcacatctatgtgtacactgagactgttttattatgagactatgttttattatgatgcactgagactatgtttgtgtacactgagactgttttattatgatgcactgagactgttttattaagcagtgtggagttctcggctgctgttctcatttttaatgcaagtgtgttcaatgagcagtgttcaatgacaaaca

SEQ ID NO: 125927 - DNA, 756 bp, Zea Mays
ctagtaaaatctgctatttagttacctctattatttaattgcttaaatctgctatttcaattttgtttctagtaaaatctgccgatatttgagttcagctatttatgtttacataagcaagtgcttcataaacatctaaatccacacctttgttccagttcagcaacgtcttctctttattacagatgtgctgatccaattcagttttcagagtatgttgacaatctgaatttagttcaagcaataccttctctttattacatatgtttaagcaggtgcttcataaacatctgaattcagttcatcaatgtcttctctttattactgaatattgaattgaatataaaggctttcatgtccccaaatacagagagtctccaaattggatattgaactgaatatagaggaattgaatatatatacatttgtctaagttttctcatcaacaggtgatacacaagggtttttcatcaacaagtggtcgccagaagaactgaaacatcaagatggcgtttgcttttaggtcatgccattcaggagatgatgctaagctaaataatcacatctatgtgtacactgagactgttttattatgagactatgttttattatgatgcactgagactatgtttgtgtacactgagactgttttattatgatgcactgagactgttttattaagcagtgtggagttctcggctgctgttctcatttttaatgcaagtgtgttcaatgagcagtgttcaatgacaaaca

SEQ ID NO: 125928 - DNA, 1311 bp, Zea Mays
ggcgccgcgccagcagcagcgccgaacggtgagccgagccgatccgaacccacccgttggagcgcgagcgagagcgcccgcgggtcacggtcacccccggacccggtaccacgcgcggaacatccgacagattccttgtcgaaactgtacttgcattccattgaggcccgcctcagcggcagcgcccttcccagtctcagatccgcgtcgtcgcggcccctcccccctctcccgtgcgctgcgcccccaattcccgctccccacgcacccagacacgccgagcgggagaggaagcgacagccagcagccgaggcggccagcgccagcgcaggcatgaccactcccactcccagtggcgacggctcgcccccgggctcctccgacctcgtgcccccttcctaccccgagatgatcgtcgccgcgatcgcagccctcgccgaggagaacggctccagccaggccgccatcgcgcgccgcatcgaggcgcaggcccgcggcgacctgccggcctcgcacccggcgctcgtcgccgcccacctctcgcgcatgtccgccgcaggggagctcgtcgccgtcgcgggggggaagtacgcgctgcccccgccgccggcgcagccggcgccggagtcaccggctgacgacggcgaagacgacgacgacgacgacgactgcgccgacgaggtggacgaggaagaggaggcgccggagcctctgctcgtgcccgtgcctgtgccgcagccgcccgccaagcgcgggcgtgggaggcccccgaagccgcggcccgctggcttccccatcggcgtccccggagccgctgcgtcccccgccgccgcgccgcgacggcgcggccgccctcccaagccgcgtgacccgcacgcgccgcccaagatcccgcgcccgcgcggccggccgcgcaagaacccgctcccggaggggatggccccgcgcccgcgccccggcgcgccggcgtcggccaaggcagcgcgcccgcagttcgccgaggtcggattcgtgtgacgcgaggggctctcacccgccgcggcgagctggcgcaagctaacattctgcccctgtttcagctcttgtctgtctgatgtgggtctcgtctcagttcgtgtgttgctgtctaatccggggagggtaggggggcaggaatatgaatggaggcaacttcgtcggtgtgttggtgtctgtgtagtctctacgttagtattggtgggtggtggccggagtggtgtggctccggcggtgtatcccgtgtctcctcgccgcgttcgcgcaatccaatgcagttgtctgatcgtttcattt

SEQ ID NO: 125929 - DNA, 6466 bp, Zea Mays
cgcaactgccatcgtcctctgctcgtcgcgtcgttctcctctcgaccgcatcgcgcccgtggcggggaacgagccatcgacgccgcgtcgcgtgcctttcttcttcgtcccccccctgcctgcctagctgtctcaggctgccgcccgcccagccccaaaacattcggcagccgagtcaaccgagaacacgagccatccacccaccctgtcccttccccggctttcccccgtcctcggctccaccaattgctctcgcgtcagtggaaggaaaaaccaagggcgagggagggaggagcgcatctccgccccgcccgcgttcccgtaccccgatccgccacatgatctgacaccgcattgccgccgaggtgacccctcccgcccccagaatggaggcgctcaacgagctctgcgacctggtggccgcgcacccggatctcctcctcgccgacaagcttgcatggctctcctcccgctgcgccgccgccccgggtgccgccgccccgcagcgtgcgtcgagggcgcaccttcattcgctcctcgcgttggcgcgcctcctcccggcgggtggcgccggtgccggtgccgaaggcgatgcggcgcccccggccccactcctattcttcctcgcgtcccacgccttcctctcgccggccttctggccccagtctttcgccccggcgccgtttctcgctaggctcctcccgctcctcgccgcggccccatcctcccccgccctttcttccgcgctctccgccgccctcctcgcggcgctcgacgtcgccgacccgacctccgcgccgctcgcccgcgcgtttctctccgccgccgctgccgcggcgcccctgccgctcctccccgcggatgccgcgcccatcgctgcccggctgctcctcgagtttcttggctccgaggaggagccgatcagggccaaggggaagggagaggacaccttgggcgaggaaaacggtggggcaaaggaggtagtgcggaggttcgaggaggaggaggtcgatgagctggagcggaaggaagtcgcattcagactgaccgtgcatatgcttgggggcgagggtgggctagagaccgagcagattgggaaggtcaggaatgctgctgcgcgacaggtccgatcactcacggattttctcaagattagaaagcgggactggagggagcagggtacacagctcagggcaaggataaacaccaaattgatgtgttgtcaagctgcagtgggggtgctggtgcgaagcgtttccaccatggatactgatatcaaatcttcgaaggatatgctccagcagactctagcttggttcatcgaggccaccaagtcgtgcatcctgtcatcctggcggaaactgaagatatgcgaggagctattttgcacactgctcaatgggatcagccagataactgtctcacgtgggggccaacttctgccggctgacatggcaggcagtagtcctggggctctatttgaagcagttgtgaagttgagctgtgagatcatagagtttggctggacaaaggatagggcccttgttgacacatttgttatgcgtctagctgcttatgttcgtgagcggaatgattacgaggaggagattgcaagcacaccgattcagattgttaaattgattatggttgaggatggcaaaggaaaagaggcagttccagttattcgacttaatgtcatacgccttttggctgagttatgtgtttgcttgaaaaaatgggaagttgtggacatgattttaccccttttcattgaacatctagaagagggtgatgcttcatctccaagttcattgcgtttacgattattagatgcaatatctcgtgttgcgtgcttgggttttgaaaaatcatatcgtgagagtattgtcttgatgacaagaagctatcttgacaaagttaaagctctaggggcttcagaaaacaatacagttccatcagaagcaacaactgagcgaacagaaactcttcctgcaggctttctgcttgttgcttccaaccttacaagcacaaaactcaggtctgattatcgtcataggttactgtctctgtgctcagatgtggggctagttgctgaatctaaaagtgggaggagtggtgctgatttgatgggtccgttacttcctgcagttgctgatatatgttctgattttgatccagtgtccactgttgagccatcattattgaaactattccgaaacctttggttctacgttgtattgtttgggctagctccacccatacagaataatgaggcacctacaaaaccggtttccacttcattaggtacagcagaaagcagcagtgctatagcccttcaagctgtagctggaccatacatgtggaacagccaatggtctgtagcagtgcaacgtattgcgcaaggaacacctcctctggttgttagttctgtaaaatggcttgaagatgagctagagttaaacactctacacaacccaggtagtcgtggtggtaatggtaatgaaaattctgctgttgggcagagagctgcactttctgctgctttgggaggtcgagttgaggtagcagcaatgaacactatttcaggggtaaaagctacgtacctacttgcagttgctttcctggagatactacgttttagttgcaatggtggcatactctcggctacatctacattgaatagatcaaacagtgctttcagttgtgtatttgaatacctgctcactccaaatttgacaccagcagtaactcagtgtttgacggcagttgcacatagagcttttgaaacagtgctgtcgtggctggatgatcgcatatctgacataggtgaaggagctgatgttagagaatcggttctttctgttcatgcttgctttctgataaaaagcatgtcccagagagacgagcatgttcgtgatgtgagtgttaagcttttaacgcagctgaaggaaaagttcccacaggtcctctggaactcttcatgcttggatttacttcttatttctgttcacaatgagttgacttctggtccagtcagtgatcctgcttgggttgcaactgtacgctcactgtatcaaaagatcgctagggaatggttaacaagtgctctttcatatgctccatgtaccacacaaggccttatacaggaaaatttttgcaagccaagtggagtacaaagaacacaacatacagcagatgttgtttcacttttatctgagatacgtatttgtagtggaaagaatgattggaacggtattaggacggccaatgttcctgcagttatggactcagcagcagcagcatcgggagccaaaaaagaagcacctgacttcactttggaagtactctctactgcagtagtgagtgcaactgtgaagtgcaatcatgctggtgagattgctggtatgagaaggctgtttagtactatgggaggcataaacatgggcatgtctcctcctgggacacaatctttgcacccccatcagtcatttgatgaagtttttgtctccaagtttgtcagtcttcttcagaactttgttgttgcagctgagaaacaaccaatagataattcacaatttcgtgaaacatgttctcaagctacagcattacttcttgatcatatggtgtctgattctagagcaaacctggaagggttttctcagcttatacggcttctatgttggtgtcctgcttatatttctacccctgatgcaatggaaactggaatctacatctggacatggctagtatcggctgcgccttctttaggtcctcttgtgcttgcggaacttgttgatgcatggctgtggaccatagatacaaagcgtggattgtttgcatcagatatgaattactgtggcccagatgcaaaattgaggccgcatcttatcgctggtgagcctgaggcaccaccagaaaaggacccagtagaagcaataatagcccatagactctggcttggcttcttcattgatcggtttgaggtggttcggcatgacagcattgaacaacttctacttctaggtcgaatgttacaaggaacaatgaagtctccagctcatttttctcaccatcctgctgctactggcactttctttactgcgatgctccttggattgaagttttgctcatgccagtctcaatctaacttgcagaagtgtaatatggggcttcagttgttagaggacagggtataccgtgctgctttgggatggttttcttatgcgcctgagtggtatgaatctccaaacaaaacttatgctcagagagaagctcaatctgtgtcagtatttgttcattttctacaaaatgagcgcaccagtggtcctgtcgattcggtttcaaagttacagggacgtgaaggtgaacctagcatggcagatcacattcatcctgtttggggctgtgttgacaactacacaaatgcaagggaaaagcgtaaacagttacttctgacactttctcagaatgaggcagacagacttgaagtctgggcacaaccaatacatacaaaagatacaacgacttttcgcggtaaaatcagctcggataaatggattgatcatgtcagaactgcttttgctgttgatcctcgaattgctctttctatgcctttgaggtttccaacgaatgctacaatgcaatctgagattactcagttggtacagacacgattactggagcttcgtacaattcctgaagcattaccctttttcattactccaaaagcagtagatgaaaattcagtgctgttacagcaactaccacactgggctccatgttctgttacacaggcattggagtttcttactcctccttataaaggacatccacgtgttatggcctatgtccttcgtgtcttggagacttacccccctgagactgttaccttttttatgccacaattggtacaatctctcagatatgatgaagggaaactggttgaagggtacttgcttggagctactcgaagaagtaatatatttgctcatatcttgatatggcatctgcagggagaatatgttgatgaatctgagaaagatgcagctgctctgaagggcagtgcattccagtccttgctcccagctgttaaggacaaaattatagagagttttactccagaggctcgtgacatgtttgaaagagaatttgatttctttgacaaagtcacatctatttctggtgttcttttccctctccccaaggacgagcggagagcgggtataagaagggaactggagaagatttctattccaggtgatgacctctacctacctactgcaacaaacaagctagtacggggtatacagttggacagcggtattcctctccagtctgctgcaaaagttccaataatgattacttttaacgttgttgaccgtgacggggacccaaatgatgtaaaaccacaggcttgtatttttaaggttggtgatgactgtagacaagatgtgctggcgctgcaagtgattgctctattaagggatgtatttcaagctgtcggattaaacctgtatctttttccatatggtgttttgcctactggaccaggccgaggcataattgaggtggtcccagatactcgaagtagaaatcaaatgggtgaaacaactgatggtggtttattagagatatttcagcaagattatggtcctgtaggttcaccttcttttgaaactgctcgagaaatgtttatgatcagtagtgctggatatgctgttgctagcttactccttcaaccgaaggatcggcataatggcaatcttctctttgatagccatgggagattagttcacattgattttggttttattttggagatttcacctggaggtaacatggggtttgagagtgcacatttcaagctaagccacgagatgactcaattgctggatccatctggaactatgaagagtgatacatggaaccaatttctcaggttgtgtgtcaaaggatacctagcagcaaggaggcatatgaatgggattttaagtacagtcaacctaatggtggacagtggccttccttgctttagcaggggagatcctatcaataatcttcggaagcggtttcatccagagatgaatgaacgtgaggccgctaacttcatggtacgaacatgtgctgatgcttacaacaagtggactaccgcagggtatgacttgattcagtacttgcagcagggtattgagaaatagtttgtttctcgttttttaagtggcgttcgtgtacatcaattgtatgtagccactatctttttatgtagaatttattttttgagttgtatcatcgggcaaggatggaattcatgtgattaacgtaggatgcttggtgcaaagaggcaattctttttttttcttgcactgtaaaactgccaagaaagtagctagtaagttgatcaagattctgtattgctgtcgcagaatgcattttcgtttactagacatgtatgattcgcatttttatc

SEQ ID NO: 125930 - DNA, 104 bp, Zea Mays
gaatgattgaatttatttcctgcaaatacaaatacaaatactctggagaaaggaatttattctcctgcatgtataaatgcaactatgaaacgtttggagtacag

SEQ ID NO: 125931 - DNA, 203 bp, Zea Mays
ggcgacgacgagagcagcgcagggcgatcggcacggcgaacgaccaagcgaccgggacatggagggcagctcgccggagggtcgaggtcggctgggggcagggctggccgccgccatggccacggctagcggctacagccggccggctgccgtgcgcacaggcccagacctgccttgccgcgtccgcgggagcggttggtggc

SEQ ID NO: 125932 - DNA, 2619 bp, Zea Mays
acatatataccggttcctcacagagcgtcgtcgcccggtcgccgtccgtcccaccaccggatcccgcccacccgccagatccaggtgtccagatccccgaagggcgaaggcctgaacccctgcgcatatccccatggagccctcgccggcgcaagcgggcgcgtcggaccgcgaccgctcgccgcctccgcccccgccaccgccgtcccagtcgtctaccgcagcgacgatctcatcgccgcttgccgtcgtctgcagtttctggaaagattttgatttggagaaggaaagaagtggattggatgagcaaggtttaaagattgcggagaatcaagaaactagtcaaaagaacaggcgtaagcttgctgagaacacacgggatttcaaaaaggcatcatcagatgagaaactcagtttactcaattctttgctgaagagttatcaagaggaagttgataacctcacaaagagagcaaagtttggagaaaatgcatttctcaacatctatcagaagctctatgaagctcctgatccatatccagctcttgcttcaatgactgatcaagaccagaaattgtctgaactggagactgagaaccgtaagatgaaactagagcttgaagaataccgtgctgaagctgcacacttgaagaaccagcaggcaacaattaggcgacttgaagagcgtaatcgccaactggaacagcagatggaggagaaagtaagggagatggttgaaatgaagcagcgaagcatggctgaggatagtcagaaaactctagaagccctgaaagatagggaacggtcattgcaggaccaactaaggcaagctacagaaagtgtaaagaatatgcaaaagctacatgaatcggcgcaaagccaattgtttgagcttcgcactcaatcagaggaggatcgagctgcaaaggaggttgaagtcagccttctgatggatgaagttgaaagggctcaagcacgattagtcagtcttgagagggaaaagggggatctgcgttcacaattgcagacaactaatgaggatgcaagcaaaagtagtgactatttggaatcaagtgatatacttgagagttccttgaacgccaaggagaagattatttcggagttgaatgcagaacttcgcaacattgaaagtactttatcaagtgagagagaaatgcatgtgaacgagcttaagaagttgactactttactcactgaacaggaaagtgctcttatggagttgaagaaagaactccaggaaagacctacacaaaaactggtagatgatctcaagaaaaaggttcagattttgcaggctgttggttacaactccattgaagctgaagactgggagcttgctactaatggtgaagaaatgagcaagttggaagcattgcttctagacaagaaccgtaaaatggagcatgagctaacacaactgaaggttaaaatatcagagaaaacaagtgttcttgaggaagctgaaaaaaggattgttgaactaacttcaaaggttgaagagcagcaaaagctgattttgaaacttgaggatgacatactaaagggctacagttcaactgataggaggggctcactcttgaatgactgggatattcaagaaatcggctcaagtgaagcatctgagggctctgatccaaggcatgcatcggcagatcaagatcaaagttcgatgctcaaggtcatttgcaaccagagggatcgtttccgtgcacgtctgcgtgaaactgaggaggaactgaggagactaaaagagaagcatgagatgctgactgttgaactggaaaaaactaaagctgataatgtgcaactgtatggaaagattcgatatgtccaagactatagccacgacaagattgtttccaggggaccaaaaaagtacgcagaagatattgaaagtggttcttctgatgttgaagcaaagtacaagaaaatgtatgaggatgacataaacccgtttgctgctttttcaaagaaggaaaaggatcagcgttataaggaacttggtttaagagacaaaatcacacttagtagtggccgttttgtccttggtaacaaatacgcacggacgtttatattcttctacagcatcggattgcatctccttgtatttacattactgtacagaatgtcagctttgagctatctcaacacaacaactcagcaggatgaaatcattctggatgctggtaatcagaggctaacgcacatgctttaggccaagttccatataacagtagaaaaagaggctctctgggttttgatctatagaatctttggacaggatcgttgctgagattgctattgatttgtttgctttgtacccttaagcgccttgatatgtttctgtagataaaaagaaaaaaaaacctgttttgggggcaggcgtgggtgcggcatgagctttgaactatgtaatactgttgtactgccaatttaccattttgttggtaaatgaaagcacacttgtcacaaaggtatacggtatgccataccatcactacatcgtttagagtgaaatgcctctaaactttttctgcattctcttctagctctatgaactcatggaatggtcattcgttattttttttcactttttaa

SEQ ID NO: 125933 - DNA, 2940 bp, Zea Mays
cctcacagagcgtcgtcgcccggtcgccgtccgtcccaccaccggatcccgcccacccgccagatccaggtgtccagatccccgaagggcgaaggcctgaacccctgcgcatatccccatggagccctcgccggcgcaagcgggcgcgtcggaccgcgaccgctcgccgcctccgcccccgccaccgccgtcccagtcgtctaccgcagcgacgatctcatcgccgcttgccgtcgtctgcagtttctggaaagattttgatttggagaaggaaagaagtggattggatgagcaaggtttaaagattgcggagaatcaagaaactagtcaaaagaacaggcgtaagcttgctgagaacacacgggatttcaaaaaggcatcatcagatgagaaactcagtttactcaattctttgctgaagagttatcaagaggaagttgataacctcacaaagagagcaaagtttggagaaaatgcatttctcaacatctatcagaagctctatgaagctcctgatccatatccagctcttgcttcaatgactgatcaagaccagaaattgtctgaactggagactgagaaccgtaagatgaaactagagcttgaagaataccgtgctgaagctgcacacttgaagaaccagcaggcaacaattaggcgacttgaagagcgtaatcgccaactggaacagcagatggaggagaaagtaagggagatggttgaaatgaagcagcgaagcatggctgaggatagtcagaaaactctagaagccctgaaagatagggaacggtcattgcaggaccaactaaggcaagctacagaaagtgtaaagaatatgcaaaagctacatgaatcggcgcaaagccaattgtttgagcttcgcactcaatcagaggaggatcgagctgcaaaggaggttgaagtcagccttctgatggatgaagttgaaagggctcaagcacgattagtcagtcttgagagggaaaagggggatctgcgttcacaattgcagacaactaatgaggatgcaagcaaaagtagtgactatttggaatcaagtgatatacttgagagttccttgaacgccaaggagaagattatttcggagttgaatgcagaacttcgcaacattgaaagtactttatcaagtgagagagaaatgcatgtgaacgagcttaagaagttgactactttactcactgaacaggaaagtgctcttatggagttgaagaaagaactccaggaaagacctacacaaaaactggtagatgatctcaagaaaaaggttcagattttgcaggctgttggttacaactccattgaagctgaagactgggagcttgctactaatggtgaagaaatgagcaagttggaagcattgcttctagacaagaaccgtaaaatggagcatgagctaacacaactgaaggttaaaatatcagagaaaacaagtgttcttgaggaagctgaaaaaaggattgttgaactaacttcaaaggttgaagagcagcaaaagctgattttgaaacttgaggatgacatactaaagggctacagttcaactgataggaggggctcactcttgaatgactgggatattcaagaaatcggctcaagtgaagcatctgagggctctgatccaaggcatgcatcggcagatcaagatcaaagttcgatgctcaaggtcatttgcaaccagagggatcgtttccgtgcacgtctgcgtgaaactgaggaggaactgaggagactaaaagagaagcatgagatgctgactgttgaactggaaaaaactaaagctgataatgtgcaactgtatggaaagattcgatatgtccaagactatagccacgacaagattgtttccaggggaccaaaaaagtacgcagaagatattgaaagtggttcttctgatgttgaagcaaagtacaagaaaatgtatgaggatgacataaacccgtttgctgctttttcaaagaaggaaaaggatcagcgttataaggaacttggtttaagagacaaaatcacacttagtagtggccgttttgtccttggtaacaagtatgatactatctttgtgtaaaaatcatcccacctacctttttatttatttatttctaatgatactgtttgataataactggtagattattgtagaaaaatcaagttagacatgtctttgtatgcccatttgttttttatactagaaactggaattgattactatgactctacctttttgaaatcatgctgtactcatcacagggatgcttaaatttccatacatggtcaatatgcaatgtccagatctgttattattattttttgcttcattgcatgcgaaactcgttccaagttgaaccatatatataaatctttcatgatacataatcatatatgtttattctgcatggggccataatttctttatttttgtcatggagtggggaatagaacatggtattaacattgccatctatttatttccactcagatacgcacggacgtttatattcttctacagcatcggattgcatctccttgtatttacattactgtacagaatgtcagctttgagctatctcaacacaacaactcagcaggatgaaatcattctggatgctggtaatcagaggctaacgcacatgctttaggccaagttccatataacagtagaaaaagaggctctctgggttttgatctatagaatctttggacaggatcgttgctgagattgctattgatttgtttgctttgtacccttaagcgccttgatatgtttctgtagataaaaagaaaaaaaaacctgttttgggggcaggcgtgggtgcggcatgagctttgaactatgtaatactgttgtactgccaatttaccattttgttggtaaatgaaagcacacttgtcacaaaggtatacggtatgccataccatcactac

SEQ ID NO: 125934 - DNA, 1093 bp, Zea Mays
aaaaaaatcttatctcatctctccccgtcctcccgtcctccatgtcgacttgtcgagacaccacaggctaactccccggcccgctgcatcttctccacgtgaccgcccatcccacaatcacagtgccgcgctgccccgcagcctcagccgcatggctctcctcgcctcccccacgccgttcggcgctgcagccatccgccgccgcgtcgccccgcttgctctcatccctgcaggcggtcgcgccgccctgcacgtggccctcgcgcgccgcggcggggtctcgtcccgcacgcagcggcgcctcgaggagcgcggaggcaagaagcgccgcggcggggtcgcggcgcccgacgtggacgaggacgcggcggaggcggggacggcggcggagtgggaaggggagccgctggggttcgaggtgtcgacggagcccatgccggagctgccgaacccggagaagcccgacttctgggaggggcctcagtgggaggccctcggcttcttcgtgcagtacatgtgggcgttcggcgtcgtcttcggcctcattgcttgtggcgtcgctgtggccacctacaacgacggggcaacggatttcagagacacgcctgcttacaaggaatcccaatcacaggagttccctgaggagtcggaatcatcgagcgctgatgtgttcgaaggcaacccgactgaggtagcaccagctcttgagtaggactagcaaggaggcacgggggagaaaactcgtctctctattcaagctttagcctatagggagggcttcgcgtttgctgtatagatataaaaggtttggttaaaatctgatgctacgaaaattggctggtataattattttgtactggattttcccttagaatcaaatatagatggatggctagtgcctggtggtgatgggattcaactgtgttattccaaaaaagtgggggatgggggaaagaaacagagcatcagagcaagcattactgtcttttcctgtattttgtattcatcctggaaagtgtgtaactcaaataaaatttcacaaatacatcatgtaccggcacaatccataattaatgaacatgtggcttctcag

SEQ ID NO: 125935 - DNA, 664 bp, Zea Mays
aactgccccctttggcttcccggacaatccatctacgcgccggcgctctccgcaccgcacccacccatcgaaattccacttcgcctaattccaaatcgccaaggccgagcagcagcaagcaaagccgcgccggtgaggctggctgttggagaggcatgccgcctaaatccgatagcgttgaaggaatcgtcctgggtttcgtaaatgaggtgcggtctctctctcccctgaaccctaccctaaaccctttcttctgcttgcgcgattaggattcggttatccctccgtgtggtacttatgaattgttcaggaaccgttaggattgcatggatgcgacaaagctgactggagtagtagtctaggtgtattgattgtgcttgatggcaacacgctgtttgatgaatactggccattgtcattacttttctttctatatgttcagttggagttaattagtatcatatgaaaaccctggtcccattccgattaatcgtcaaatatctacatcatcaaattaatttcattaaaatccaccgagatatacttgatattgcagttgcttgatttcctagaggttaatacggatatggttttcaataaattaggtcgaaggtagagaagtttgacttgtggcaaaacaaatatattacgttttggaatggag

SEQ ID NO: 125936 - DNA, 1258 bp, Zea Mays
aactgccccctttggcttcccggacaatccatctacgcgccggcgctctccgcaccgcacccacccatcgaaattccacttcgcctaattccaaatcgccaaggccgagcagcagcaagcaaagccgcgccggtgaggctggctgttggagaggcatgccgcctaaatccgatagcgttgaaggaatcgtcctgggtttcgtaaatgagcaaaacaggccattgaattcacagaatgcagctgatgcactgcagaagtttaatcttaagaagactgcggtgcaaaaggcactggatgcattggctgacagtggacagatttccttcaaggagtatggcaagcagaaaatttacattgctcggcaagatcaatttgacattccaaatggtgaggaacttgaggagatgaagaaaacaaatgccaagttacaggaagaacttgcggatcaaaagaaagcaattagtgaggttgaatctgaggtacgaggtctgcagtcaaacttgacactcacagagatcacgtcaaagaagagtgaattgcaaagcgaagtccaagaaatggaagagaaactaaataagttgcggagtggtgttaccttggtgaaacctgaggacaagaagatcattgagaattcctttgctgaaaaagtgagccaatggaaaaggcggaagaggatgttcaaggagctctgggataatattactgagcacagcccaaaagatcagaaggaatttaaggaagaacttggtatcgagtacgacgaagatgttgatgtgaacgtgcagtcttactctgacatgctagcaagtctcaacaaaaggcgaaaaatttcccgctgatgatgtagcataagagcgtcttaagttgaaagtaggctacaaccgttacatgccagcagctatgcattcatggttctaccggttcttaaggttctgtagagattagtttaccctgacagcattgaggccccgtttgtttcaactttttttcagcttctgaccaccagaagctgctgcagactaccaaatgctcatattttcagcctgcttttgttagaatcgctttgataaaaaccgttcaaaatcaacgtaaacatacaatcggtcgagtcgttgtgataatagtaatccatcattttctagatcctaaattctataaacccttttatcttcctcttcatataatttccaagatatttaggttctctacacagctagattctaagaaaagctggtctaaaaaaaatcaaaacaaacaa

SEQ ID NO: 125937 - DNA, 1192 bp, Zea Mays
ggacaatccatctacgcgccggcgctctccgcaccgcacccacccatcgaaattccacttcgcctaattccaaatcgccaaggccgagcagcagcaagcaaagccgcgccggtgaggctggctgttggagaggcatgccgcctaaatccgatagcgttgaaggaatcgtcctgggtttcgtaaatgagaagtttaatcttaagaagactgcggtgcaaaaggcactggatgcattggctgacagtggacagatttccttcaaggagtatggcaagcagaaaatttacattgctcggcaagatcaatttgacattccaaatggtgaggaacttgaggagatgaagaaaacaaatgccaagttacaggaagaacttgcggatcaaaagaaagcaattagtgaggttgaatctgaggtacgaggtctgcagtcaaacttgacactcacagagatcacgtcaaagaagagtgaattgcaaagcgaagtccaagaaatggaagagaaactaaataagttgcggagtggtgttaccttggtgaaacctgaggacaagaagatcattgagaattcctttgctgaaaaagtgagccaatggaaaaggcggaagaggatgttcaaggagctctgggataatattactgagcacagcccaaaagatcagaaggaatttaaggaagaacttggtatcgagtacgacgaagatgttgatgtgaacgtgcagtcttactctgacatgctagcaagtctcaacaaaaggcgaaaaatttcccgctgatgatgtagcataagagcgtcttaagttgaaagtaggctacaaccgttacatgccagcagctatgcattcatggttctaccggttcttaaggttctgtagagattagtttaccctgacagcattgaggccccgtttgtttcaactttttttcagcttctgaccaccagaagctgctgcagactaccaaatgctcatattttcagcctgcttttgttagaatcgctttgataaaaaccgttcaaaatcaacgtaaacatacaatcggtcgagtcgttgtgataatagtaatccatcattttctagatcctaaattctataaacccttttatcttcctcttcatataatttccaagatatttaggttctctacacagctagattctaagaaaagctggtctaaaaaaaatcaaaacaaacaa

SEQ ID NO: 125938 - DNA, 800 bp, Zea Mays
gccatttgaccgtgccatggccactatatacgctagaaacgagagtttggttatcgtcgtgtgcaggggtacttgggttcgcctataaaaagcggttcttggtgcgctctacagctcacttctagagtttagctatagcctcactgctagagcgccgccatggctcaggtaaggggcagtgctcgtggcactggcagtggcagcagcgccgccgcgctggcgctggtcctcctgtgcgcgctcctccgcggcgagttcgccgagtcggcggtgtacacggtcggcgaccgcggcgggtggagcttcaacaccgccagctggcccaacggcaagcgtttccgcgccggcgacgtcctcgtgttcaggtacgacgccagggcgcacaacgtggtgcccgtgagcgcggcggggtacagctcgtgcagcgcgcccgagggcgccagggcgctcgccaccgggaacgaccgcgtcacgctgaggcgcggcgccaactacttcatctgcagcttcccaggccactgccaggccggcatgaaggtcgccgtcaccgccgcctaggcactgcagggcggccaatcagccggcggagagcgccgcgctcacggagtagtaaagcacgtagctaattagacggtgctgcccttgttgttcaataatatcgtctgtcgtcccgtacttcataacctgcgcggcgtgttagtagttgtttggtggtgtttggcgactggcactataaagaagggtcagatcgagtgatgtacttgctaccaataaaggtatacggtttgtgtgttcactcg

SEQ ID NO: 125939 - DNA, 479 bp, Zea Mays
tcattagtaaacaaggaaatgcccatggagtagatagcctacagaagaaacaaaacgtttctctttatggatatctacacggttgttcttccaagacctcaacgcctgaccgtgccatcctcgcccgcgtccgtcctcccctacccacgatcccccagccgcatggtcaccgtctcacaaggttgtcctgggagaagatgcatcagcggattgctcctcaaggaggtaggagcagagagagagagaagagtcaagagggggcggcgtcggttgaggatggcgcggagggaggcgcggtcagcgggcatgcgcgggcgaggatggcgcggtcgcgagggtcacggaggcggcggcggagccacggtatggggcttgaggtggtcgaagacatcggctagggtttccttggaggagcgtagagcgagattgtcataggggcggggcgacgcggggtcacagaggcagggcgtgcgcggagg

SEQ ID NO: 125940 - DNA, 1679 bp, Zea Mays
cggtcgccctccgcccctatcccatcctccatgtcagtatgtcaccacctcccccgtccggccgcgccgcgccgtgcccgacccaaccaccacgccacttccctcccgtcccgtctcgttctcgtcgcacctcgccccgcagggaagggggtgcgcgctcgctcgatccgtgcgcgccagccagcgccatggcctcggaccaacaggccctctcggtcccggtccccgtccccgtcccgtccaaccctaacccgagcgcactagccgacccgaccccgccctcggcctccgccccgcgcaagctccctatcaagcgccggtccccgcggccgtcgtcctcgcccccatcctcctctccggactcctccgacccgctccgcgcgcccgcggccggcggcggtggcggcggatctgacaagcagcagcagccgcccttcaagttccagcgcatctggtccgagtccgacgagctccgcttcctgcagggcctcctcggctgcggcgcgcagggcctcgtcttcccacgcgacctcaacgtcttctacgaccgcttctccgagtccatgccccagccctacacccgcgcccagctctccgagaagctccgccgcctcaagaacaagttccgcagcatgtccgcgcgcgtcgcggagggcctagacccggctcgccttgcgccgcacgaccgcgacgtgctccacctctgctccaggctgtgggaccccgccaacgccgccacgtcgcccttcgtggccagcgccggaacgtccgggaacaagcgccgccgcgccaacctgcagggcacgtcactccctcccccagacgcgtctggggatagcaactcccatgactacaatgggattaactcctctgctccctgtttgtttccggatggttccaatggcgaggatatgttttaccttgagcaagaacctgggcacctgggcgaccatgaaggtgctgctccggtagcagatagcagattcggtgttattgtgcaggagcagggtgttattgtgcatgagcagggtgaggccgtgggtactctccccaaatgggaacaatggaattggcaatgagatgaatgtggagtgtaaaatggtggtgccgtgcagcaacgagcatcgaatggcgaatgctgtcctagatgtgtttgaggaatgcctgagggaggcaaagagtaatggggttatcaatggtggcaatgtggacgggagtggtgaggaaagcgagctctccaagcggtggagagcgcagaggatggatgagcttgatgtcttaagccggaggctgaggttgctggttgagtatgctgcggcggctgggcagtgaagcagagattttggtggttttggtgatgttcctgccacccttttccccttttgtatagaagctaggttcctgtgctatgctttggaatgtattcctcagctggacccttgcctttagaaagcttactatatttaactatgtacccttgagtttaataactcgagcagcataataatctataattttaacgctgttatttgcatgggttcctgctgtttgatatagatgatagccttgttaatgtagcttcaggctttcaaatttcctctttttcaattagaagctgttgtacttgtaacttgtaagctgtgagagagtaatattatgtttccttgttaaccgcttgt

SEQ ID NO: 125941 - DNA, 2892 bp, Zea Mays
atggtgtcgcaggctcccatggcaggggcgggcgcgggcgcgggcgccaacctcaccgcggcgctgtgcaggaagagcaaccgcgtcgcgcgggtgctcgcgtacgcgctgctcgagtgggtcctcatcgcgctgcttctcgccgacggcgtcttctcctacctcatatcccggttcgccgccttcttcgggctcgcgccgccgtgcgcgctctgctcccgcctcggcgtcgacagcctcttcgagacccacccccgccaccgaggcgtcggcgccgagcccctgcgccgcttgctgtgcgacgtgcacgccgccgagctgtcgcgcgtcgggtactgcagcgcgcaccgccggctcgcggacgccggggacatgtgcgaggattgcgccgccgcggcggcggcggcgcccgggaaggcgttgctgtcatggatgggccagagcgagctcggcgagcgggacctcgcctgcgcctgctgcggcgtcgcgctcgagagtggcttctactcgccaccgttcttgctcaccgcgtcggcgccccgtggctcagattgtgggcacaaggaagaggaagaggcagccaggccaaatggagacgtggtcttcgtctccgaggaaggtcctgtgatcgagcttttcgacgagaagccatttgtggagggtgactcaatcggcgtcttggcttgtggtgccgaagttgttgccaatgttgagcggctggtgcctcttgaatcaattgactcgttgcccgtcgccatggccaccatgttatctcaatccggtgttgaaggaaaggaagcagttgatcatgatgatgtaaggcagaataacgtggatatggagcacacagttagtaccgatgaggagacaattgtcatgacatctgatgatgacaaggttgatgatgtggttgatcggctgattgatgaacatattgcagccgtagtctttgtgccagcttgtatagaatctacgcctaacgatgggataaatgcaggcaaaacggtggaggcctttgcctttgctgatcatcagtctgctgaggatgacagtggattgaaagataaggatcagaaaatatctgatatatctgaggatgagcaagccgaacaggctactccacaacaggaattgtgtgctatgccgacaaatcctagtgaccatgaaattgttgagaggttagacagaagtattgacttggagcattttccacaggctaagtcaaagcataaaatgaactctatgccagtggaagcttctgagcatgtcactgtaactcagattgaggagaagcaggttcagcaagctgaggtaactcaggagttggattcactaccaatatgttctagggagcaagctgaggtaactcaggctgggttggaacaagattgtggctctgtgccaattgattctggggaacatggttgcctgacttcatatgctcatactgatgttgagcaagctgaggtgaagcagaaagtcacttctgtaacaagagatgttctcgattatgcagcgggcacttttaatgttaacacaaacacatggaaagaagatattgaagaggatccaactgaagctgctctaacggccatatatcaaatttcttacgaacctttgacaaacttagacaagttctctccggatcatagtgtctccgaagaagacagacagcttaatgcgctgactcatatcgaagatatatgtgattcacaggaaccgctggattctaaagcagctgtttctgatgctaaatctgtagattcaggtgttgctactttgtctactgatcttgaaagcacggaattggtgaatgccgatcaactaaaatctgctttggcttccacacgcaagtcattgaacaccctatattttgaacttgaaaatgagaggaacgctgctgctatagctgctgatgaaaccatggcgatgataaaccgcttgcaagaacagaaagctgcaatgcagatggaggcgatccaataccagcggcttatggaggaacagtcagagtatgaccaagaagcactggagaggctgaacgaactagttgtgaagagagagaaggagaagcaagatctggagagagagctcgagctgtaccgccacaaggttcatctctacgaaataaaggtgaggaaaatgtccaggcacaaggctgatgaccagaacggatcgtcgtcaacttcatcgagcgccgaggatagtgacgacctttcacaaagcttctatgaaggtgatgaatcttcccacggtcttaatggaagcaacgggagtattcccacagatgtcgtgctacaagaaactgccagacatctcgttatcatcgatggctctttagctgattttgaggaagagaggctctccatactggaacagcttaaagtgctagaggataagctttttgatctcgatgatgacgatgaatccgatagcaggaagcatttcccagaagaaaaccacttcagcggtgcctcgaacggtttctctgacgacgatagctgctctaaactccgtgacaaaagaagagttgtaacctacagaggaaaggaactccttccgttgttcgacgatgctacgactgtggaagctggaaatgtccccaatggtgacgaggcacatcatccagcagaggctacactggacctcgctagagagcgacataagcttgtgatcgccaacgaaatcgatcaagtgaatgagaggctacaggcccttgaggcagacagggagtacataaaacagtgcgtgagggccttgaaaaggggaggcgaagggttcgatcttctccaggagatattgcagcatcttcgggacctaagaaggatcgagcagcgcggaaggaactctggggagctttcgcctcattacctacatctttacacggactga

SEQ ID NO: 125942 - DNA, 2625 bp, Zea Mays
aaaccgtcatccgccccacactcagcaaacctttctccccacttgccgcatcggcgccgccgggatgaagcgctccgccgacgcgatgactgagccggtgaagcctgtgttcctcaccaaggcggagcgggagcgcctcgcgcttgagcgccgccaggccgccgtctccgaccagcgccgcaccgcgctcgacctcatccagtccctgccccggccccctccgccgccgacttccggtggtcctcccccgtccggctccaaccccgcacgtcgcgactcctccaactccaaccgcgactccgaccgggacagggaccgggaccaagaccgggaacgccgccgcgacgacgactcccgccgcgaccgatatcgggatcgagatcgagatagggaccgcgaccgagatgactcctcccgccgcgacagggaccgcgaccggcgcgaccgtgatagggaccgggaccgggaccgcgacagggatcgcggggaccgggagagggaccggctggagaagattgcggagcgggagcgtgagaaggagctcgacgcgatcaaggagcagtacctcgggtccaagaagcccaagaagcgggttatcaagccctctgagaagttccgcttctccttcgactgggaaaacaccgaggacaccagccgggacatgaatgcactctaccagtcgccgcacgaggcccggctgctctttggccggggcttccttgccggcattgaccgacgtgagcagaagaaggcggcagctgtgcacgagaaggagacccgtgcagagctgcggcgcaaggctggtgtggaggaccgtccggaggatgatgcggtagataagaagaaggctgctgctgctgaaatttatgatgctttcgatatgcgtgtggacaggcactggtccgaaaagacactcgaggagatgactgagcgggattggcgaattttccgtgaggatttcaatatctcctataagggttctcgcataccccgaccgatgcgaaagtggagtgaaagcaagcttggcaccgagttgcttcgtgctattgacaaggctggatatgaaaaaccgtcaccaatccagatggctgccattccgctaggtctacagcagcgtgatgttattggtattgctgagacaggttctggaaagactgcagcttttgtactccccatgttgtcttacattacccgattgccacccataagcgaggagaatgaggccgagggtccctatgccgttgttatggcacctactcgtgagcttgctcaacagattgaggaggagactgtgaaatttgcaacctatctaggccttaaagttgtctcaattgttggtggccagtcaattgaggagcagggtttcaagattaggcagggctgtgagattgtaattgccacacctggtcggcttcttgattgcttggaaaggaggtatgctgttctcaaccagtgcaactatgttgtgctcgatgaggctgataggatgattgatatgggctttgagccacaagttgttggtgtccttgacgcgatgccatcgagtaacttgaaacctgaaaatgaggatgaggaacttgatgagaaaaggatttacagaactacttatatgttcagtgccaccatgcctcctgctgtggaacgtcttgctaggaagtatctccgaaacccagttgttgtgacaattggtacggctggcaaggccactgatctgatcacccagaatgtgatcatggtgaaggagtctgagaagatgccacggctccagaagatactcacggatcttggagacaagactgccattgtgttctgcaatactaagaagacagcggacatgcgcgccaaggatctggacaaggcaggcttccgcgtcacaaccctacatggtgggaagtcacaagaccagagagagattagccttgatggatttagaaaccgtcggttcaatgttcttgtggctactgatgttgcaggacgtggtattgatattcctgatgttgcacacgtgattaactatgagatgcctagttcaatcgacacatacacacatcgcattggaaggacaggtcgtgctggaaagaagggagtagcaagttcatttttaacttacgagaacactgatattttctttgatctgaaacagatgcttatgcagagcaacagtcccgtaccacctgaacttgcaaggcatgaggcatcaaaatttaagccaggctcaattcctgatagacctccaaggcgaaatgatacagtctttgcaaatcattgaagtaatctaccttagaagagactgaagatctttgaactattatgagctcaacttctaccagatggagggacctagtttagtatttatgaggtacaaaactttgacggttagaaatatgtacttatgaggtccaaaaactatgatgattagatttggttctatttttctgttcggaaactggctttattgtcgtaactttagtatgtttcggtggtgatttagcagtggacatgtgtatcatatcaaaatttttgtgctattcttcaagatttgacatggctggtttctagtatcttgaatatgttctatgaatgctgttttatatttggtagcatattgctctggagtcattagta

SEQ ID NO: 125943 - DNA, 1084 bp, Zea Mays
aaccaacctaaatatccacttccgtcgtcctggactcgtagctcatccacgacgcaccgaacagcaatggccacgttcctgggaagctcaccggcgctcctcgcccgtcccatcgccaagccccacatctcctgcgcgcagacaccgcggccgccaagcgcccagaaccagccgccgtccagcgagcaaccgcaagcacaaacacagcagcagtccgtgcaagcgcagccacagcaggcgacggcgaggccgaagcgcgcgggcggcgcggactccacggactgggtggcctcgtcgctgacgcggcggttcgggatcggcgcggggctggcgtgggccggctttctggccgtcggcgtcgtgtccgagcagctcaagacccgcttcgaggtcgcgcagcagcaggccaacaccaaggacgtggaacaggagcaggaggtcgtcctgcccaacggggtccggtactacgagatgcgcgtcggcggcggcgacgtcccgcggccgggcgacctggtggtgatcgacctgcagggccgggtggccggcagtggcggcggcggggaggcgttcgtggacacgttcgtcgacggcaagcggccgctggcgctggtgatgggctcccggccgtacaccaggggcatgtgcgagggcgtcgagtacgcgctgcgctccatgagggccggcggcaagcggcgggtggtcgtcccgccgggcctcgggttcggcgacgacggcgccgacttcggggaggagcacgtccaggtcccgcccggcgcgacgctcgagtacatcgtgcaggtcgacagggtgtccatcgcgccggcgtgaggcggcagtagatagatcgcagtcctgtggtgttctgatctttattccatggctcggctcggttcttctgtactggcagtctgacactcggtagcgtgaccacaattgttctagacccatgggacaagttcattctcgttttttcaagcaagatctcccaaaagagcagagagatttctggagcttgcaaaccaagctcgttttgagcttccgcactggtaccccgtgaactggtcacattctcggtttgttttta

SEQ ID NO: 125944 - DNA, 1269 bp, Zea Mays
cgtcccatacttcgggacagacggccgttgattcggccggaaggggagaggtcttggacgattttggattatgctgggggtcatcgtcgccccccaacaacatcctcggcctgctgtgcagggaacacttccctggacttgtggagtacgccggagtgacgggcccagccttcaccttcgaccactacgccgtcgcccccgatgcagtagaccgggacggcagggaattcaataacaaggcggagcgggtgaagcaagagctgtgggtaagtcttagtataatataaaatatgtcgcattcgttgcaaattcttgaaataatgtatggatacatcgtttttgtatgcaggatttcttcagatgcgatgctggatacgaggctagggcggatgtggtggccaccacgtgctgtaagaagctcgtcgtggacatgcactatgaggcccgcatccaggccatcatcacctaccacggctccgtccttggggagaaggtgaccaaacctcaagcccgaaccatgtcgttgaccagggagcagtacatgcaggtaaagtcatgcatgtttggtaccagtactccatgcatgaattttattgtatcttctgatatgcactttatgtgtttactttgcaggtgattccacattggtgcgccgcacatcctctctgctgggagcagatggtggataggtggtgttcggctgagtgggacgaggtgcacacagctagccgggaacggcgtttgcagatgcaagggccctcgcaccaccaaggcagccggagcctgggccaatatgccgaagcatggtcggcgtcacatggtggcaggccttgttccaccttctcggcctatgctatggcccataagggtaaggcgacgtccgacgtcacctacaacccggatgacgggcccgaggcctacaccaaccccgccgtctacagccgcctccatgactacaccgccatggcgcaggaggtccatggcccagactatgatccgagcaccgagcctatcgaccccgatgtgctcatgagggtcggaggaggcaagagacatgggcggtactggattgccgacagggcaatcgactcgtcctccactcccactctgtctcaggtgagagcaaggagcactggctcgagcccagccattcgacctcggcacgacagctcacagcatcgcatttcacaactcgagacccaactagaagagatggaggcgaggataatggcggagcgggcggcggctgatcagaggatggcggagatg

SEQ ID NO: 125945 - DNA, 627 bp, Zea Mays
atgaaacttatcaaggatatcttccatcagaatgaggatggaacaaaggtcgaatgcagggtgtggaaccccttccgttccaagctggttgctgctgtgcttggtggtgttgacaacatctggattgctcctggtacccatgtgttgtatgtatctcatgtgtctgatattgtagggccggatggtctagtctacgctgttgagttctctcacaggagtggaagagaccttgtcaacatggcaaagaagaggaccaatgtgatccccattattgaggatgtcaggcatccggcaaggtaccagatgttggttggcatggttgatgttatcttctctgatgttgcacagccataccaggtaccatttccttcgagcctggtgtctgaatcactgggctgccacattgttggattgagtgttgtttaccctcgttctctgcctttatactcttttgattttgatctggcaatattgagcttaacaaatgatgatcatactcggattccccttcaggacatcaattggatgatgcagattcgagtttctgatgccagttgtgctcaatgccaaacttatctttatttgctttgtgctattcccatttctttgtttttctttattggttaa

SEQ ID NO: 125946 - DNA, 246 bp, Zea Mays
atgcggcgagccacactctcggtcgcgctcgggctctccctcatcgccctcctcgctgcccggggcgccgacgcctcaatccacgagtacgccggcggcggcttcgcgccgcgggccaactccttcttcttccacggcgggagcgagggtctctacgcatccgacctctcatccaactcctcatccttcatcagctctagttttgtttgcccagcagcatgtgatgaggctgggattttacagtag

SEQ ID NO: 125947 - DNA, 2089 bp, Zea Mays
agtagccaccattggtgtctcggactctcggctcggtggaacgcaacgcattgcgaccgacccgcccactctctccacgactcaatcgctagactagagagagaaacccttgtacccgtgttccttttcatcccccattttctccgagtttccggcccatcgccgagcatcgagtccaaggaagcggagccggcggagaaggggagatttgactttcccgtcgggtgcctagggagcaggagggatgcagcggcggcggggccacacgtgggcaggggtggggaagacggcccaggcggcggcggcgcacgccgcgctcttctgcttcactctcctcctcgcgctcagggtcgacggacgcaccgcatactcctggtggataatattcagtccactatggctctttcatggtattgttgcacgcggaaggttttcaatgcctgccccttctttgcctcatggccgtcattgggcaccatgtcattcgattgttgcggcgcctttactaattgcgttcgagctgcttctttgtatatatcttgaaagcataagagttagaaatcatccatctgttgatctgaagattgtgttccttcccctgttggcctttgaagcaataatccttattgacaattttagaatgtgtagagctttaatgcctggggatgaagaaagcatgagtgatgaagctatttgggagacacttcctcatttttgggtttcaatttcaatggtgtttcttatagctgctacaacattcacccttctcaagctgtctggtgatgttggtgctttgggatggtgggatttgtttataaattatgggattgcagaatgctttgcatttcttgtctgtacaagatggtttaatcccatgattcacaagtctcccactcatggggaggctagctcatcatcagcgattagataccgtgattgggaaagtggtcttgtcctcccatcactagaagatcatgaacaagagaggctttgtggtctacctgatattgggggtcatgtaatgaaaatacctcttgtggctttccaagtattgctttgtatgcggttggagggtacaccaccaagtgctcgcaacattccaatatttgctcttttctcgccactatttattctgcaaggtgctggtgcctttttctctctagcaagattagtggagaaggttgttctgctattgcgcaatggaccagttagtcctaattaccttacagtctcatcaaaagttcgtgattgctttgcttttcttcatcatggttcaaggcttcttggttggtggtctattgatgaagggagcaaggaggaacaagcccggttgttctatactgaatctactgggtacaatacattttgtggctatccaccagaagtggttaggaaaatgcctaaaaaggaccttgcagaagaggtttggaggctgcaggcagcgttgggagaacaatctgaaatcaccaagtgtaccaaacaggaatatgaaaggcttcaaaatgagaaggttctttgtagggtttgctacgagggagagatatgcatggtgcttcttccctgccggcacagaactttatgcaaatcttgtgctgagaaatgcaagaagtgtcctatctgccgtgtcccaattgaagaacgcatgcctgtatatgatgtttaaacctcactaactcagcttaacattcaaatttgtacatatgggttctgtcatgctgtgcatttagtctcgatcacaactttaagctgattgaggtgtgcgtttcagaaaaaaagtctacaatatgtgtatatcatgccatgtctaaccaaaagcatggaaaggtggctgatgagcattttgccatttcggtccagttatctactgtaagtatgtggtcagtgtattccccttttgtgattggtagatgagtcagtcttgtttgcgtagcagcattttctcagggttatgcagttgttgagaagaaagtagaacaaaaacagactgtaaataaaaaaatactgccttttttaaatgtaatcctcaagtgtaaacctccctgttgtgccattttgtagtagaaaaatgtctgccgaaatttgtgaccgc

SEQ ID NO: 125948 - DNA, 2081 bp, Zea Mays
agtagccaccattggtgtctcggactctcggctcggtggaacgcaacgcattgcgaccgacccgcccactctctccacgactcaatcgctagactagagagagaaacccttgtacccgtgttccttttcatcccccattttctccgagtttccggcccatcgccgagcatcgagtccaaggaagcggagccggcggagaaggggagatttgactttcccgtcgggtgcctagggagcaggagggatgcagcggcggcggggccacacgtgggcaggggtggggaagacggcccaggcggcggcggcgcacgccgcgctcttctgcttcactctcctcctcgcgctcagggtcgacggacgcaccgcatactcctggtggataatattcagtccactatggctctttcatggtattgttgcacgcggaaggttttcaatgcctgccccttctttgcctcatggccgtcattgggcaccatgtcattcgattgttgcggcgcctttactaattgcgttcgagctgcttctttgtatatatcttgaaagcataagagttagaaatcatccatctgttgatctgaagattgtgttccttcccctgttggcctttgaagcaataatccttattgacaattttagaatgtgtagagctttaatgcctggggatgaagaaagcatgagtgatgaagctatttgggagacacttcctcatttttgggtttcaatttcaatggtgtttcttatagctgctacaacattcacccttctcaagctgtctggtgatgttggtgctttgggatggtgggatttgtttataaattatggaatgctttgcatttcttgtctgtacaagatggtttaatcccatgattcacaagtctcccactcatggggaggctagctcatcatcagcgattagataccgtgattgggaaagtggtcttgtcctcccatcactagaagatcatgaacaagagaggctttgtggtctacctgatattgggggtcatgtaatgaaaatacctcttgtggctttccaagtattgctttgtatgcggttggagggtacaccaccaagtgctcgcaacattccaatatttgctcttttctcgccactatttattctgcaaggtgctggtgcctttttctctctagcaagattagtggagaaggttgttctgctattgcgcaatggaccagttagtcctaattaccttacagtctcatcaaaagttcgtgattgctttgcttttcttcatcatggttcaaggcttcttggttggtggtctattgatgaagggagcaaggaggaacaagcccggttgttctatactgaatctactgggtacaatacattttgtggctatccaccagaagtggttaggaaaatgcctaaaaaggaccttgcagaagaggtttggaggctgcaggcagcgttgggagaacaatctgaaatcaccaagtgtaccaaacaggaatatgaaaggcttcaaaatgagaaggttctttgtagggtttgctacgagggagagatatgcatggtgcttcttccctgccggcacagaactttatgcaaatcttgtgctgagaaatgcaagaagtgtcctatctgccgtgtcccaattgaagaacgcatgcctgtatatgatgtttaaacctcactaactcagcttaacattcaaatttgtacatatgggttctgtcatgctgtgcatttagtctcgatcacaactttaagctgattgaggtgtgcgtttcagaaaaaaagtctacaatatgtgtatatcatgccatgtctaaccaaaagcatggaaaggtggctgatgagcattttgccatttcggtccagttatctactgtaagtatgtggtcagtgtattccccttttgtgattggtagatgagtcagtcttgtttgcgtagcagcattttctcagggttatgcagttgttgagaagaaagtagaacaaaaacagactgtaaataaaaaaatactgccttttttaaatgtaatcctcaagtgtaaacctccctgttgtgccattttgtagtagaaaaatgtctgccgaaatttgtgaccgc

SEQ ID NO: 125949 - DNA, 2019 bp, Zea Mays
agtagccaccattggtgtctcggactctcggctcggtggaacgcaacgcattgcgaccgacccgcccactctctccacgactcaatcgctagactagagagagaaacccttgtacccgtgttccttttcatcccccattttctccgagtttccggcccatcgccgagcatcgagtccaaggaagcggagccggcggagaaggggagatttgactttcccgtcgggtgcctagggagcaggagggatgcagcggcggcggggccacacgtgggcaggggtggggaagacggcccaggcggcggcggcgcacgccgcgctcttctgcttcactctcctcctcgcgctcagggtcgacggacgcaccgcatactcctggtggataatattcagtccactatggctctttcatggtattgttgcacgcggaaggttttcaatgcctgccccttctttgcctcatggccgtcattgggcaccatgtcattcgattgttgcggcgcctttactaattgcgttcgagctgcttctttgtatatatcttgaaagcataagagttagaaatcatccatctgttgatctgaagattgtgttccttcccctgttggcctttgaagcaataatccttattgacaattttagcatttttgggtttcaatttcaatggtgtttcttatagctgctacaacattcacccttctcaagctgtctggtgatgttggtgctttgggatggtgggatttgtttataaattatgggattgcagaatgctttgcatttcttgtctgtacaagatggtttaatcccatgattcacaagtctcccactcatggggaggctagctcatcatcagcgattagataccgtgattgggaaagtggtcttgtcctcccatcactagaagatcatgaacaagagaggctttgtggtctacctgatattgggggtcatgtaatgaaaatacctcttgtggctttccaagtattgctttgtatgcggttggagggtacaccaccaagtgctcgcaacattccaatatttgctcttttctcgccactatttattctgcaaggtgctggtgcctttttctctctagcaagattagtggagaaggttgttctgctattgcgcaatggaccagttagtcctaattaccttacagtctcatcaaaagttcgtgattgctttgcttttcttcatcatggttcaaggcttcttggttggtggtctattgatgaagggagcaaggaggaacaagcccggttgttctatactgaatctactgggtacaatacattttgtggctatccaccagaagtggttaggaaaatgcctaaaaaggaccttgcagaagaggtttggaggctgcaggcagcgttgggagaacaatctgaaatcaccaagtgtaccaaacaggaatatgaaaggcttcaaaatgagaaggttctttgtagggtttgctacgagggagagatatgcatggtgcttcttccctgccggcacagaactttatgcaaatcttgtgctgagaaatgcaagaagtgtcctatctgccgtgtcccaattgaagaacgcatgcctgtatatgatgtttaaacctcactaactcagcttaacattcaaatttgtacatatgggttctgtcatgctgtgcatttagtctcgatcacaactttaagctgattgaggtgtgcgtttcagaaaaaaagtctacaatatgtgtatatcatgccatgtctaaccaaaagcatggaaaggtggctgatgagcattttgccatttcggtccagttatctactgtaagtatgtggtcagtgtattccccttttgtgattggtagatgagtcagtcttgtttgcgtagcagcattttctcagggttatgcagttgttgagaagaaagtagaacaaaaacagactgtaaataaaaaaatactgccttttttaaatgtaatcctcaagtgtaaacctccctgttgtgccattttgtagtagaaaaatgtctgccgaaatttgtgaccgc

SEQ ID NO: 125950 - DNA, 2938 bp, Zea Mays
cagatcagcgggagcaggaaaaaaaaatcgaaccaaagagagggggagggaggtgaaaagcttggggagaggagacgagggagcgcagcataaatcccgatccccaaatcgcaaaacctagccgctcccgatctgcaatgccgcaggcttgagtgcgagcgcacggggaatgaggcgggtggcaccggcgatgatcgccgccggcagtgctggcggcgaggatacggcggagggggcggtggtggagaagacgctgctcaacggggacgtctaccgcggcgggttctccgctggatctccgcacgggaagggcaagtacgtctgggctgacggctgcatgtacgagggggagtggcggcggggcaaggcgtccgggaagggccgcttctcgtggccttcgggcgccacattcgagggggagttccgcagcggccggatcgaggggcagggcgtgttcgtcggccccgacggcgccacctaccgcggcgcgtgggtggcggaccgacgccacggcgtgggcgccaagagctacgccaacggggactactacgagggccagtggcggcgcaacttccaggacggccacggacggtacgtctgggccaacggcaaccagtacgtcggggagtggcgcgccggggtgctctcgggccgcggcgtgctcatctgggccaatggcagccgctacgacggggtctgggagaatggcgtgcccagggggactggggtcttcacgtggcccgacggcagccggtacgtcggctcctggcctgggacctgcgtcgacctgccggctataagcggcacgttcttcgcgccggtgggcgctggggctcctgctgctgtgaggaagagatcctccgtggagggtgtgggggagaaggcgaccccgcggatctgcatctgggagtcggagggcgaggctggagacattacttgcgacatcgttgacgcgctcgaggcgtccatgctctacaaggaggccgcggctgttgcgggaggggcaacgtacacgcggaaactgccccagaggaatacccggcgagcagccagcggagtcccacgctgggcgtcgtcggcggccaccacgcctgagagtaagcgacccgggcagaccatctccaagggacacaagaattacgagctcatgctgcagctgcaattgggcatcaggcattccgtgggaaagtcttcggccgtgccgatgcgagcactgcaaccgggcgattttgacccaggggagaagttctggacacggttcccaccagagggttcgaaggttacgctaccacattcatctggagagttccgatggaaggactactgccccatggtgttcaggcatttgaggaagttgtttgctgttgatacagcggattacatgcttgcgatctgtggcaatgatgctctgagggagctgtcttcacccggcaaaagtgggagcttcttttaccttacccaagatgaccgattcatgattaagacagtgaagaaatcagaagtcaagctgctaattcgaatgttaaatagctactacaaccatttcaatcgatacaagaactcattaatcacgaggttctatggtgtacactgtgtgaagccccttaatggacaaaaggtccgatttattgtcatgggtaatctgttctgttcagaataccagatacatcgccgttttgatttgaaaggttcatcctatggacgaacagcagacaagtttgaagatgaaattgatgagacaactacactcaaggatttggacctcaattttgtcttccggttgcagcgatcttggtacaccgatctccatgaacaattgggacgagactgtgattttttggaatcagaagggattatggattacagtttcttggtaggagttcacttttgtgatgacatctctgcctcaaagatgggatcctctacttttactgcctctccaaagcttttaacaaagagtgagtcatttcaaggtggtggcacgccagagctttgcttctcggatgatgattttgatatggtacctgattgccaccggaaacctctgattagacttggtgcacacatgccagcccgggcagagcaagcatccaggaggagtgaattcgacccgcttctcctaacaggtggaggattcctgttcccaaaccagaccggcgaagtgcatgatgtgattttattctttgggataattgacatcctccaggattacagcttaagaaagcgggccgagcatgcttacaagtcattacagacagatcccaactcgatctctgccgtggacccgaagctctactcgaagaggttccaagacttcatcggcagaatttttgtggaagatggctaactggcattggatagagattaaccgcgaattccatgcggaggccagagcacctgtaatgattccgggacagtttttttgcgctcagtaaagaagtctgcataattgccaagaatcatcttcatccatggggatccggtaaagcagcagcccctcggctgggtgtaacctactgtgaagcatcaggtcagcagtgaaggagatctgagttcgaagcaaatttgccgcgaattctccggaaatcattcgagtggctggattttgaagcgcagccatgggatcggaggattttgtctgtaaaatgatgtgattcggcgggtgagagactggttcttccgggtccattgtagcagcagtcctttttttttatctccttagttttgttggagttcttttccccccgctccccttctatatatatcgttccgatgtgaggaatggggcagggagttttgtttccagaaagatgatatttaaggctgcggctggcagtgaacaataagatcatgtacagatacaccttgatcctgggaatgggtggattagaattgaattcagcatcttcatgacccgtgggccccagaccactgcttc

SEQ ID NO: 125951 - DNA, 1745 bp, Zea Mays
gtaaccttgttgcttttcgttctgaaaaaccttcttgaacgtcgcggcgcgggaggaagaatggcgtcgtggttggagcagctgcagcgcgagctcgccgcccgcggcctcacagtcgcctccatccccggcaagggaaggggtctcatcgctacttgcaccttcttcccaggggatgtcattctcaatcaggaaccttacgcttctacacctaacaagattttagttggatcgagctgtgaccattgtttcacctctggcaacctgaggaagtgctctatgtgtcgagttacttggtactgcagcagcaactgtcagaaagaagaatggaaactacatcagctggagtgtagagcaatggcagcacttacagaggatagaaagaagatgcttactcctacaattcggttgatggttcggctggcactcaaaaggaaattacaaaatgagaaggtcattccatcctcaagtatagataactacaatctggttgatggcttggagtctcatatatcgaaggttgatgaaaatcaacttgtgctctatgctcagatggccaatcttgtgagcctgattcttccttttattgagcttgaccttaaggaaattgcacaaactttttctaagtttgcctgcaatgcgcataccatatgtgaccctgaacttaggcctcttgggactggactgtaccctgtcatatccattattaaccacagttgtgtaccaaatgcagttttgatatttgatggtaggacagcatatgttcgtgcattgcaaccgataaataaagatgaagaggtatctataagctacattgagactgcgacagtcaccaagaagagaaacaatgatctgaaacagtacttcttcacctgcacatgtccacgctgtgtaaagggttttgatgaggatgcactacttgaggggttcaggtgcaagaaccaagcatgtgatggctttttgctgcccaactcaggtaaaaaggcttatacatgccaaaaatgtggtgcttctagagatgtggaagagataaaaaatatgagaagcgaaatactacagttatcggataaagcatcttcatttctttcatcaggaaataaggctgaagcaggttctatctacaagataatcgaacagttagagagaaatctgtaccatgctttctcaactactttgctgcacacgtgcgaaacactattgaagatatatctggaattacaagattggtggactgcgttgacatactgtagattgacaattcctgtttatgaaagagtttatccaccttttcatccgatgattggattacaattctatacttgtggaaagcttgaatggttgcttgagttcacagaggatgcactaaaatctttaaccagagcagcagatatacttaaagtaacacatggcgtaaaatcccagttcatgaaagagctctttggcaagttagaggaagcaagagctgaagtttcgtttagactatcctcgagacatggacatgatgagtaattttcataactgcaggccagttatgatggaaaataatatattgaaattatgtttctactgttgagatcatatttcaaggtacaataaaaaatgtggagactttgtaggcaaagaattagcactgttgtaaaacgattatgtgccgacacaaaataggccctaatttgttgtataaaaaatacaattttgaatttaattgtatatcatgtggtaggttgaactccataaactctctt

SEQ ID NO: 125952 - DNA, 1625 bp, Zea Mays
atatttgagaaaggaaacttctggttttctctgcgcgggaggaagaatggcgtcgtggttggagcagctgcagcgcgagctcgccgcccgcggcctcacagtcgcctccatccccggcaagggaaggggtctcatcgctacttgcaccttcttcccaggggatgtcattctcaatcaggaaccttacgcttctacacctaacaagattttagttggatcgagctgtgaccattgtttcacctctggcaacctgaggaagtgctctatgtgtcgagttacttggtactgcagcagcaactgtcagaaagaagaatggaaactacatcagctggagtgtagagcaatggcagcacttacagaggatagaaagaagatgcttactcctacaattcggttgatggttcggctggcactcaaaaggaaattacaaaatgagaaggtcattccatcctcaagtatagataactacaatctggttgatggcttggagtctcatatatcgaaggttgatgaaaatcaacttgtgctctatgctcagatggccaatcttgtgagcctgattcttccttttattgagcttgaccttaaggaaattgcacaaactttttctaagttttgatatttgatggtaggacagcatatgttcgtgcattgcaaccgataaataaagatgaagaggtatctataagctacattgagactgcgacagtcaccaagaagagaaacaatgatctgaaacagtacttcttcacctgcacatgtccacgctgtgtaaagggttttgatgaggatgcactacttgaggggttcaggtgcaagaaccaagcatgtgatggctttttgctgcccaactcaggtaaaaaggcttatacatgccaaaaatgtggtgcttctagagatgtggaagagataaaaaatatgagaagcgaaatactacagttatcggataaagcatcttcatttctttcatcaggaaataaggctgaagcaggttctatctacaagataatcgaacagttagagagaaatctgtaccatgctttctcaactactttgctgcacacgtgcgaaacactattgaagatatatctggaattacaagattggtggactgcgttgacatactgtagattgacaattcctgtttatgaaagagtttatccaccttttcatccgatgattggattacaattctatacttgtggaaagcttgaatggttgcttgagttcacagaggatgcactaaaatctttaaccagagcagcagatatacttaaagtaacacatggcgtaaaatcccagttcatgaaagagctctttggcaagttagaggaagcaagagctgaagtttcgtttagactatcctcgagacatggacatgatgagtaattttcataactgcaggccagttatgatggaaaataatatattgaaattatgtttctactgttgagatcatatttcaaggtacaataaaaaatgtggagactttgtaggcaaagaattagcactgttgtaaaacgattatgtgccgacacaaaataggccctaatttgttgtataaaaaatacaattttgaatttaattgtatatcatgtggtaggttgaactccataaactctctt

SEQ ID NO: 125953 - DNA, 1107 bp, Zea Mays
gttctatggaaagccaaactctgccattgatacacaatgatgaggatccataatagatgaactacgtagatccaattcttaaaccaaacagtgatatcctagatacaaatgaccaactctgaatttatcttttatgcctaatcacctttctatgaagtatgaataatgcttagctctgaatttatgtctaataaatcacccttccatgttcttccgtccagaaccacagtaacacaactccaagtcaagacagactaggtagcaaacaaactcacttaacaaatatcacacgatcttgcacgctgcagacgacgcctcctcgcagtcgcaggtgacctcgatctttgggtactgcctcaacggcagcccttcgtagcacggcgggtggtccacgaactggcaacggcagccgtagccgtagccgtagcctccacacccgcatatgcacataccgcagcagcacggcggagcaggagccggcccgggcggtttcgacggcatggctggtcgttgcggcgtgagcttcagttctgccgccacgagctggatgtccctgatcacacagcccgccttgcgccggagcttgcaggggagcaccagcgggtcgaaggctcccgagatcgtcaccgtcccggacacctcgtcgaaggaaatcgcccggatgtcctcggtttctgccagcacgcgcgcgcgcaagactcaagaggggggagttaaagagcttttcgatcacgattcacaagcacaggacgacgatatagatgctgaatcgaccgggaggcaaggcaagtgattatcaccttgcagcttgcacacggtcttccggatcctggtgaagcagcggcagcagccatggttgagtgtgacgaccagcgtggacacctgcgtgatgatactataatagattactctgcgcgtgttggtgcaagtgatactagctagtagccaaataaaccaaaatcactgcaaacacagatgatcgtcaaatcaagtagataaacaatgcaggagacgctcaacaacaaggaacaacgctgagattgatcggaggtagagaagaaggcagaaccttctctgccatgtgtgctctttctggttctggagaat

SEQ ID NO: 125954 - DNA, 2444 bp, Zea Mays
gcgtaactgcaggcaacctcatgtgtatattgtagcaaagggaattttcacttcccaccactacgccacggcagtacggcacacgccatagcccttcccgcaagcagccgagctcctccccaaatccttccccgatgctgcggcgcaacagcgagtgcgaaatcgagtccgagctctgacgcgctcgcatggagctctggttctaggtgtgggctgcgctcctcgtatggatccagatgttctcgtggaaccgtaagcagtcctcctcctccggctcgccctcgccctcctcctcctccggccgccgccgcggcggggcggacgcctccatggactccagcagccgcggcggcggcgggagcgggagtgggagcgggagccgcggacggagcccgcggttggatcgccgcaacgcggtgaagcgcgtcgactacgaggcgggcgcgggggcgtccgtgtcggtggccgcgtcgtggtcgtcctcgtcctccgcggatcagcagcgttcgccgggcccggggctccagccttcgcgctccctagacgttgcccccggagcggacctccggatcagcgggagcgtagagggggaggtcgacgaactctgccgcagcctggggctctcggggcccgaggatttcgccatccccgtcgcggcctgggaggcgcgcaagtcgcggtctaactccgacctcctcccgcgctcccaccccgacccgtccacacccgccgacgaaccctcgccaattgcgcgtgtggtctcggcgcctgatgttcagccgactcgcttcgtccctgcccccattcctgctactgttgcggcgcccgaggagtcacccaaggctgcccctgccgttgctgttgcggctcccgtcgggggtttgcccctgccttcgccaaggaggggaggcggggaggtagggatacggggtgcacggccgcctttactctccccgcctccgccaattggtgcactcgctcctccgccggtgaggaggtccttcgttgacgatgacatgactaggtccgcttgggacattgtgcagtcgtttgctcccagggaacagggaagtgaaccgggagagcgtttggacactcgttgcaattcggacacagaggaagagagtgaggctgaggatggggtggcagctgtggagggcgagctgaaagagttgaggataggagagaccttcgaggggctcactggaacttcttcattgtcaacgacaaatgatgatgatgcgtccagtacaaccacggaggccatgttcatcatctcaccgaatggcaagttcaagcgtaagattaagtcatggatgcgtggtgctcttctgggaagcggctcatttgggatggtgtacgaggggatcagtgatgagggtgcttttttcgctgtgaaggaagtatctttgcttgaccaaggaagcaacgcacaacaatctattgttgcacttgagcaggaaattgcactcctcggtcagtttgaacatgaaaatatagtccagtattatggaactgacaaggaagaatccaaactctatatttttattgagcttgtcacacaaggatctctttcatccctctatcaaaagtataaactacgagaatcacaagtctctgcatacacaaggcagattcttaacggattggtttacctgcatgagagaaatgtggtccacagagatatcaagtgtgccaatatattggtgcatgcaaatggatctgtaaagcttgcagattttggattggcaaaggagatgtcaaaaatcaatatgctaaggtcatgcaaaggaagtgtttactggatggcacctgaggttattaatcctaaaaagatgtatgggccttcagctgatatatggagccttggctgcaccgtgttggaaatgctaacccggcaaataccatttcctaatattgagtggacaaatgctttcttcatgattggaagaggggaacagcctactattccctgctacctgtcgaaggaggcacaagatttcattggccaatgtgtaagagttgatcctgagagccggccttctgcatcacaacttttggagcacccattcgttaacagaccactgcgggcttcatttgaatcttcatctcccccagccatctgattgtactattgatatagttgatcatcatgatttacgctactggttccagaatagaattatgtgggcgtgttagtttagtatctctgtagtacatagggttggtaggcagcattgctatgtttttgtattctttgggtgttcttcatcaggcatagggttttcttcctggttactacgtagatttgtgtacacttgtaggtaaaagggttgcaaacttgcaattgcctctggtgtagggttaggcagttagctgatgtttgtgaatattagacatcaccattctttacttaatggtttgttgaagcatccgcagcattg

SEQ ID NO: 125955 - DNA, 1311 bp, Zea Mays
atgactgtggacaatgatcttgcactgaaaatatacataaaggctagggcaacccctaaagttgttgctgcttttgctgaaaggagggagtttgacaagacactgatatactcaaagcaggttttggagataaacttagtgacttacccaaatgttgttgatgccattcttgctaatgccctccagcccattaacaacttccttggacaggcacttgttgagttctttggcacattgtcaagagagtgggctttggaatgcatgaaagaccttctactggttaatctgaggggaaatcttcagattgttgtgcaggccacgaaagaatactctgagcagctaggggttgatgcttgcatcaaattatttgagcaattcaaatcttatgaggacctttactttttcttgggatcttatctgagctccagcgaggacccagatatccatttcaagtacatagaagcagcagcaaggactggacaaatcaaagaagttgaacgtgtaaccagagagtcaaacttctatgatgctgagaagataatgaactttttgatggaagcaaaattacctaatgcccgtccactgattaatgtttgtgatcgctttggttttgtgccagatctcactcactatctgtacacaaacaacatgcttcgatatatcgaaggctatgttcagaaggtgaatcccgggaatgctccattggtagtggggcaattacttgatgatgaatgccctaaagattttatcaagggtttgatcctatttgttcgttctctcctccctgttgagcctttggttgatgaatgtgagaagagacgtgggcagtgtgacgatgaacttattaacgtcactaacaagaattcgttattcaagctgcaagctaggtatgtggttgagagaatggatggtgatctatgggataaagttcttcagcccgagaatgaatatagaaggcaactcattgaccaagtggtttcgactgcattacctgagagcaagagccccgagcaagtgtctgctgctgttaaggctttcatgactgctgacctgccacatgaactgattgagcttcttgaaaagattattcttcagaattctgctttcagtggaaatttcaatctgcagaacctgctcatcttgactgccaaagcccagttacgtgaaggtctggtcagtgaagcaattgagtccttcattcgtgtagatgatgctgcacacttccttgatgttatccgtgcagccgaggaagctaatgtgtacaatgatttagtgaagtacctagatcaactcacttgttatgattgttga

SEQ ID NO: 125956 - DNA, 116 bp, Zea Mays
gtgaaataaaatcaaaatgaaattcttgcaaacacttataaacaaaatcagtaacatattgaaatgcatattccaaaaacattattttaacaactcgttattattttaaaatgaga

SEQ ID NO: 125957 - DNA, 527 bp, Zea Mays
atcaactgtaatgctgtagacgtcggagctgagttctccccattctcaagtactggccccgttacgcaaaacggatcgggctccccattctctccctcctccgctcctcgtacttctcgaagctaagctaggttttcgccttccgccggagctgagttcgcctcccttgcgccggctttgtcttcgttgccatcatggattcgtcctatgttttcttggcgtcaggtgttaccgcagctgctcggattggtagcgatgccgccagcaaagctgccctcgctgccggtcaggcttccaacgctgtcaatggccagcgcgacgacgctgcagatgaagcttgaaggagggaaagctgcgacgagaccggctgcacctctacgtgttagcataagttttaattttgtcttcttggcaatattagctataccaatcttgcatacgctttactaaacatctcaactgagtataaatcatcagcgaactcctccatcattatatctctaaattgttgtgtggttattagacac

SEQ ID NO: 125958 - DNA, 1563 bp, Zea Mays
atggcggtggctcagcagcaccacatcaaggcgctgacgccgacgtggttcctcgtcaaggttacgccggccccggcgccgagggagggcggtaagaaagccgcctactcgccgctgctactgtcgccggcggtgtggcagagggcgcagaacgagaaggagagggacgaggacggccccgagcgcgccgccggcggcctgccggtgtcgccgagggtcggctgcatggggcaggtcaaggggaggaggaggataggctgctcgagcgcgcgcggacctgcgcccccgaggggctcgggctcgggctcggggtgccgcggcgccggcggcaaggtggcgagtctcgtgctcgggatgttcgggatgaggcggcggaacgcaaggagggcgtcgcgtgcctgcgccaaggtcagggacgtaccgcgtggcggcggcgcggcctccgcgccggggagcactcgtggtgtccgtcgcggggcggccgtgtcggtggacgtgtttgatccgccgttgccggtgatcgtagggaacttcgcccccatcggtgagcagtcgctgactccatctccaacgaccccagcgaagacaggtgacaccagaggtcctgaccacgccatcaatcaagcaaaaatggaaccaaagctatccacgctgagtgctaacattatctttttattcattgtttggttgactgatgctgggatgatctgcagaccgaacatgattacactgacaggtttcatgtttctactgacatcagcattccttggctttttatattcaccccatctagatacaacaccccccagatgggttcaccttgctcatggactgcttctctttctttatcagactttcgatgccgtggatggaaaacaagcaaggcgtaccaactcatcaagtcctctaggcgagctttttgaccacgaatgtgatgtgcttgtgtgtgctgtaagaccacctgtcaatattttttatttcaagtgcaatgattttcaagtcgttgggtttacaacatccctccctactgccattgaggttgaagggacaacaaggatggtggaagagcaaacggctatgcagatcttgttggtctataggcaaatgagatatccatttgggggcagcaaaactcaagacaacaactacgtagcgcgtcaagatggccatcgggcagcacgcttcattggtccctcttcctccaaggccccgaagatctgcgcgacgatcactattctccgtgctactcgggcggctatgaacatcgagttcagcaaggacatactccttgacaagctcgctaagctcagcaacatgcagatggaggctcaacttttgaatctattgaagcgccatgatcaagaatacaatgttgatgagatcagcatgaatgacaagctcaccaactgtggccatcagataactattatgtgcatatatgtgaatatacttgtacgcttgaggcgtgtgctcattcattctttgacgaattacgagaatcacatgcaagactccctaacggacgcccatttcctccactattcaactttaagcaggaagtaa

SEQ ID NO: 125959 - DNA, 603 bp, Zea Mays
agagcaaaatataatcttgtttgatgcatattatagccataaatttacatgggagatgtgagttgtgacataaccagaaaataggcatgccaagcatgtgtctaagcaacaacacggcaacaggcattattgcattcaaacagggcatgagttggtaaagtttgttaaactgaatgctaaagtttcctccaagagtactcttgtgttttcctttggtgattcaaagctagcatttataggaaaacatgtatgagcctagctacaatagcagatgtcgtccacggcaccaagttcgtccattaaaaagggacctcaactctggtggctaccctaataaaattgtgccccttcctagaacaccaactccaggccatgacaagggttgcggagcagagaccgctgcgtcacatgccatcatgtcatgcagacatgaaagctgtaattggaattttatagttagcacacatattgccattacattacttttccacagaactgtattttcgtggagcatataaaggagaatttagtgtcttaccaagtcatctctcctcctgcagaagcaagacaaaagcctgaacaagggagctctccaacctaact

SEQ ID NO: 125960 - DNA, 338 bp, Zea Mays
cagagtaattatggtactttcaattgaagtcacaggcctgacatgacctgatgaacacgatacagtactcaaccgcttttatagatcatagcagcagtgatgcttcacagtttctctccctccctcccaagaacagaggacagggaacccaaatctgcccagattcctcccgttcccccggctgcggacaactaaaatttttgttctttcgcaggaaaaaaacaaaggaaaaaaattcgacgaaaaaagggaggcgtttctctctctctctcttttcactctctgttccgaggcgccggaaaaccactaaaacacctggagccggccctcggacggat

SEQ ID NO: 125961 - DNA, 1681 bp, Zea Mays
catctctagactagggtacccaaacccgagccgtcgtccccagtgtggcagtgtgccgctcgacgcgcagccaaacccaaacccttcctccctcccgacgggcgacggcgatggccgccgcgacagagaagacggctgaggacatccgccgcgagctccaggagctccagcgccagcaccgcgagatcaccgagcgcctgcgcgacccccgtggccttcgccgcggcgcccccggccctggtcctggacctggccccccccgcccgctccgcggcttcgtgagaccccatgtgggtgcggaagtggcggatcaggctccgcagaagcgtcggctgctatcggccgtagttaaggttgatggcgctgaaaataatgaagaaggcacaaaggatgccaatggggaggggcaagaggcgggttcaggtgccactgaaggcagtgacaggaggactttcaacactggcgggttcagaagggacgggagcctgtggatgcagaggagggtggactataattcgctgccagagccagctccaagggagcttcccaggaatgaggacccgagtttggtgagaaggaataagaggatgctggggcagcttcttgtcggtacattagagaaatttcaacaagaggataaaaagctatccaactctgaggcttttctgcgcagatcagagactcagcgaaaggctgagcaaaaggttcgtgaagaaagtgaaaggctgcgacagcaggaacgtgagcaaattgcagagaagcgtaagcgtgatatgacgctccgcgctcgtgtagctgctaaggcagaagaaaagaggttggagctgttgtacattcagtggactgagcatcataaaaggctgtccaatttcttaaggacaaaagctgagccacctatttattacatgccaactaaaccaattattgatgatccagccattgttgagcagaacaaggaaaaggtatatcatagtgtcctactcaagaattttataacttgtgcatacacatgttcttgctcctgttctatgaacgttgtttgtgggtgaatcaaacttgtgagaaacactacaggtattcgaagaatggaaatctatgcgcagggctgagctgactcggtttcaaaagcaagttgaggagcaatatctctcaaatgtggagaggcaattggagaggatccagaatgcccggaacgctcggaaggcgaatgggcctggtaacatgcaagaaatggacaaggagctggacacccacagggcggagcatggtccaaagcctcggcgagttcccgaggagggcggcaatgatgatgacgaagatgcagaggacatggctgcggaagacgagctgatggatgaagttttgggcatcaacgatgcaatcaatgaggacccatccaagccgtccgaagaagctactactgaaggtcagccagcaaccgaggaagcacaataggattctttgttcacacaaggtaggcgtaccattccggcattccgtatgcttagttgccgtcttgttgggtgctgtctgtgcgtgtatttttgttagacgtcccccaatggttagactgtgttttaatattgttgttttggccttttgatgttgaggccatacaactgtcaattattatcttataattgttgtaagcatactataattgttaccatgatttggtcgt

SEQ ID NO: 125962 - DNA, 1648 bp, Zea Mays
catctctagactagggtacccaaacccgagccgtcgtccccagtgtggcagtgtgccgctcgacgcgcagccaaacccaaacccttcctccctcccgacgggcgacggcgatggccgccgcgacagagaagacggctgaggacatccgccgcgagctccaggagctccagcgccagcaccgcgagatcaccgagcgcctgcgcgacccccgtggccttcgccgcggcgcccccggccctggtcctggacctggccccccccgcccgctccgcggcttcgtgagaccccatgtgggtgcggaagtggcggatcaggctccgcagaagcgtcggctgctatcggccgtagttaaggttgatggcgctgaaaataatgaagaaggcacaaaggatgccaatggggaggggcaagaggcgggttcaggtgccactgaaggcagtgacaggaggactttcaacactggcgggttcagaagggacgggagcctgtggatgcagaggagggtggactataattcgctgccagagccagctccaagggagcttcccaggaatgaggacccgagtttggtgagaaggaataagaggatgctggggcagcttcttgtcggtacattagagaaatttcaacaagaggataaaaagctatccaactctgaggcttttctgcgcagatcagagactcagcgaaaggctgagcaaaaggttcgtgaagaaagtgaaaggctgcgacagcaggaacgtgagcaaattgcagagaagcgtaagcgtgatatgacgctccgcgctcgtgtagctgctaaggcagaagaaaagaggttggagctgttgtacattcagtggactgagcatcataaaaggctgtccaatttcttaaggttatttttatttctggtccaaaagtgtccatattgacaattaaattgagggaagatacattctaattgacaaaagctgagccacctatttattacatgccaactaaaccaattattgatgatccagccattgttgagcagaacaaggaaaaggtattcgaagaatggaaatctatgcgcagggctgagctgactcggtttcaaaagcaagttgaggagcaatatctctcaaatgtggagaggcaattggagaggatccagaatgcccggaacgctcggaaggcgaatgggcctggtaacatgcaagaaatggacaaggagctggacacccacagggcggagcatggtccaaagcctcggcgagttcccgaggagggcggcaatgatgatgacgaagatgcagaggacatggctgcggaagacgagctgatggatgaagttttgggcatcaacgatgcaatcaatgaggacccatccaagccgtccgaagaagctactactgaaggtcagccagcaaccgaggaagcacaataggattctttgttcacacaaggtaggcgtaccattccggcattccgtatgcttagttgccgtcttgttgggtgctgtctgtgcgtgtatttttgttagacgtcccccaatggttagactgtgttttaatattgttgttttggccttttgatgttgaggccatacaactgtcaattattatcttataattgttgtaagcatactataattgttaccatgatttggtcgttttttttgtcg

SEQ ID NO: 125963 - DNA, 1798 bp, Zea Mays
catctctagactagggtacccaaacccgagccgtcgtccccagtgtggcagtgtgccgctcgacgcgcagccaaacccaaacccttcctccctcccgacgggcgacggcgatggccgccgcgacagagaagacggctgaggacatccgccgcgagctccaggagctccagcgccagcaccgcgagatcaccgagcgcctgcgcgacccccgtggccttcgccgcggcgcccccggccctggtcctggacctggccccccccgcccgctccgcggcttcgtgagaccccatgtgggtgcggaagtggcggatcaggctccgcagaagcgtcggctgctatcggccgtagttaaggttgatggcgctgaaaataatgaagaaggcacaaaggatgccaatggggaggggcaagaggcgggttcaggtgccactgaaggcagtgacaggaggactttcaacactggcgggttcagaagggacgggagcctgtggatgcagaggagggtggactataattcgctgccagagccagctccaagggagcttcccaggaatgaggacccgagtttggtgagaaggaataagaggatgctggggcagcttcttgtcggtacattagagaaatttcaacaagaggataaaaagctatccaactctgaggcttttctgcgcagatcagagactcagcgaaaggctgagcaaaaggttcgtgaagaaagtgaaaggctgcgacagcaggaacgtgagcaaattgcagagaagcgtaagcgtgatatgacgctccgcgctcgtgtagctgctaaggcagaagaaaagaggttggagctgttgtacattcagtggactgagcatcataaaaggctgtccaatttcttaaggttatttttatttctggtccaaaagtgtccatattgacaattaaattgagggaagatacattctaattgtatgcagacctgatgtttgataactattagtgtatctgtttacattgtatactaatgaacaatatttgttccatgtttgactcttatctcattacccccttacgtttggcaggacaaaagctgagccacctatttattacatgccaactaaaccaattattgatgatccagccattgttgagcagaacaaggaaaaggtattcgaagaatggaaatctatgcgcagggctgagctgactcggtttcaaaagcaagttgaggagcaatatctctcaaatgtggagaggcaattggagaggatccagaatgcccggaacgctcggaaggcgaatgggcctggtaacatgcaagaaatggacaaggagctggacacccacagggcggagcatggtccaaagcctcggcgagttcccgaggagggcggcaatgatgatgacgaagatgcagaggacatggctgcggaagacgagctgatggatgaagttttgggcatcaacgatgcaatcaatgaggacccatccaagccgtccgaagaagctactactgaaggtcagccagcaaccgaggaagcacaataggattctttgttcacacaaggtaggcgtaccattccggcattccgtatgcttagttgccgtcttgttgggtgctgtctgtgcgtgtatttttgttagacgtcccccaatggttagactgtgttttaatattgttgttttggccttttgatgttgaggccatacaactgtcaattattatcttataattgttgtaagcatactataattgttaccatgatttggtcgttttttttgtcgtcagacgtttattgccagcaggttatgttctttcact

SEQ ID NO: 125964 - DNA, 2507 bp, Zea Mays
aactaccccgtatgaccatatcactgcagaagatagcgttcagatcaagacagaaaacaagcaagacgatcttaaccaaacagccgtccactgccttttctttctcccgttcaccccgccgtgcacgctctttttgtccctcgtgccgacgaccgaccgaccgccgccgcctcaaggtcttcgtaaagccactcgccggcaacgagcagccaccaggaagatgttgtgaggactgatgcaataactaagcttgctggatggacggatgcgattgcatagagccactatggcctaccgatgatcttctcgtcaagtatcagtacatctcagacttcttcatagcccttgcgtacttctcgattccattggagctcatatattttgtgaagaagtcgtccttcttcccatacagatgggtcctgatccagtttggtgcgtttatagttctttgtggggcaacccatctgataaacctgtggacgttcaccacacatacaaagaccgttgcgatggtcatgaccatagcgaagatttctacagcagtcgtgtcctgtgcaactgctttgatgctcgttcatatcattcccgacttgttgagcgtgaaaactagggagttgttcttgaagaataaagctgaggagcttgatagagagatgggacttataaggacgcaagaggagactggtagacatgttaggatgcttacacatgaaatcagaagtactcttgatagacatacaattttgaagactactctcgttgagctaggaaggaccttgggtctggaagaatgtgcattgtggatgccatctcgaagtggctcaagccttcagctttctcatactttgcgccaccagattactgttggatcatcggtgccaatgaatcttcctgtcgtcaatcaagtgttcagtagcaaccgggcaatcataataccccacacatcttctttggcgcgggttcgacctcttgcagggcgatatgttccaccagaagtggccgcagtccgtgtacctcttctacatctttcaaactttcaaataaatgattggcctgagctctcagcaaaaagctttgcaatcatggttttgatgcttccatctgatagtgctagaaaatggcatgtgcatgaattggagctggttgaggtcgttgctgatcaggtagcagttgcactatctcatgcagctattctcgaagagtccatgcgggcacgtgatttactaatggagcagaatgttgccctggatttagctcgaagagaggctgagatggctatccgtgctcgcaatgatttcctagctgttatgaatcacgaaatgagaacacccatgaatgcaataatagccctttcctccttgcttttggaaactgagcttactcctgagcagcgtctaatggtggaaacagtactgaaaagcagcaatttgttagcaacactcatcaatgatgttctggatctttccaaactcgaggatggaagccttgaactggagattaaagcattcaatcttcatgctgttttcaaagaagtgatgggtttcattaaaccaattgcatctatcaagaggctatctgtatcggttatgttggcaccagatctgccgttatgtgcaattggtgatgaaaagagactcatgcaaactattctgaacatctctggcaatgctgtaaagtttaccaaggagggacacatcacgcttgtagcttccattgtgaaggctgactctttgagagagttcagaaccccagaatttcatccaactgcaagtgatgaacatttctatttgaaagttcaggtaaaagatacaggctgtggagttagtcctcaggatctacctcatgtattcacaaagtttgctcatcctcaaagtggaggaaaccgagggtttaatggtagtggtcttggccttgccatatgcaagaggtttgttagtcttatgggagggcacatctggatcgacagcgaaggaaccggaagaggttgcaccgcaacattcgtcatcaagctcggcgtgtgtgacaacacaaacacctaccagcagcagctggttcctctagtctggccaagcagtgcagactccaatttgtctgctccgaaagtgctgcccgacgggagaggatctgtttccctgaaatctcggtaccaaagaagcgtatgagctcagtgtaaatgattgacggcatagtgccaagtaggggatcgattagtgccattgtctaattttgtttgtaacccagtcatagcaacatatagtgtacaaataatgtaaagccaatggagactgcagctgtgtatctgggtagcaacgctgacttgctgcattgagtagtatgtcctaccagcggattgaattgcttgttctggggtgtgcggcgcgcgccccgttgattgttctgttgtaacttgtaatcccatattaatcgtgtaatatgaaattcaatgcaaatacacggtcacaagctgttttcggtgccctcgctccatcagttggttcagatcgtag

SEQ ID NO: 125965 - DNA, 300 bp, Zea Mays
atggattggggtagaaccgaacaagccccaaaggagaagaaacggaagagggggggggggggaggggggagaagaaagttctctgccagctgctacgagctagaagctgctgggcgcccggccggagaaggccatggcgaagaggaggatgacgaggtagaagaggatgacgacgagcttcatctggaacatggcgaagaagagcttcaccatgaacaccagcagcagcgcgtcgaatatgatcgttatggccacctccagaggctccatcgccgccgaccagaccaccagcaaaggtga

SEQ ID NO: 125966 - DNA, 84 bp, Zea Mays
ccgcgcgtacacaccaccgcggatgatggatcacccgtcagcgccaccgactaggctaacctatgttcgtttattataaaattc

SEQ ID NO: 125967 - DNA, 1140 bp, Zea Mays
taatgcaagataaatcagaaactgattattcagcaaagagacgatacataacaattagatgtcacaaattattcagcaagagaatacattgaccaattttccacaacagacgacgatcatacagctgatgcatgcacaacacaaccagtgaccagagtgcccagccacactagcaaagctcaaacattaccttccagacagacttatcacttattcccctagcaaagtatattcacatctacgacctggagcggcgatgaacagacaccggaattcaactggagcggcgatgaacacacacgacgaacaccaggacatacgtaacacacactcggggggagaaagacgaaggacggaaggacggtcacccacacgtacaggaacacagcattccgcgacgaccctgctggctgctgatactgatagacacgcacgcgcgcatctatccataatccatgcatggatgacttgcttacgaggaagccctgccgccgccgccagcgccggcacctgcacctcccccggcgccggcctcctgcgccctgccctggatggcctggcctgcctgcgcggtcttgtggcccgcgtgcgccgcggcctccgccatcctgcggtgcgcctcctccacgtagtccggggtgcgctggaacgcctgccgcgccgtgttggcgaggcacgtgagcgaggacaggcccccgagccccagcgcgcccgacgtgaggaaccccatgacggccgtcccgatgagcagcgcggcggggaccagcacggggctgaagatcaggaacaccggcgtggccacggccagccccaccacggaggccgtcagcgccagccccgacagcaccagcagcagcccgcccagcgggaacagcgtcgccaccgtcagcgcctgcgacgccgtcggccccttgtcgtggagcatgcccttcacctgctcacccatcgggcgcccgcctcctccctgctgctgctgctgcccgtaggtggcgtgggcgccgccgtagatgccgctgcggtcacggtccgccattgctgccgtctcgttggctagcccctgcgagcgcggtgccgccggccggtgcagtgatcgatggatcgaggaggagctttgcaaacaaagtgacggagtagttaagt

SEQ ID NO: 125968 - DNA, 1054 bp, Zea Mays
atccgaaaaccgaaatcccccactcttctcacccgtttccccactcgctcgctgacacatcgcacattcgcaccataccagataccaccgccgctgcacacaaacccagaaaccaccggcaataaacaactcccgctcccagtctccgatccgaggaagccggaagaggggatttcgagccgcggcgatcggggctagagtggccctcgacgcgtccgcgggtggaattgccgagaagccgagagagagggcttggagcggagttgcgggaggtgggagagaaggcggcgatggggcgcctgttcctgatgcacctggacggcaacgtctacagctgcaaacactgcaagacccacctcggcgttgccagcgacatcatctccaaggccttccagtgcaagcacggcaaggcgtacctcttccataaggttgtcaacgtgacttctggagtaaaagaagaccgcatgatgatcacaggaatgcatactgtttctgatatcttctgtgttggctgtggatccatagttgggtggaaatatgatgcggcacatgagaagggccagagatacaaggaaggcaagtttattctggagaggtacaaggtgtcgggccctgacggaagccaatactgggttccacaagatgctcacttgggcggaagcgacgccgatgacatataaaacacgatccaacaagctcaagcctgtcgttgatcccctgtaaataacctgggtggcgttgctctttaggcagccgacagccggggattgctccattgaaataattcgccggcgtaaattgttgctgttccaggtgacatgatcgtatccctccctccctcccgttgtccctggaagtcattagatgttaccgctgtatatgtgcgtaacctgtgttgcttataagtccatctgagttgtatgccaagcactagtgaccaaataagtaaagtaaatttctcaagtgtctggtcgacctgggtgtcaagcgagggcagtatgtacaaatctgcattgtattgtgtgttcggttccaacgtcactcttaaataacc

SEQ ID NO: 125969 - DNA, 2114 bp, Zea Mays
gcctagggttgcgacatcagagaagaaggaatacccagtggatccatcccttccggacatcaagaacagcatctatgcttctgatgagttccgcatgtactcgttcaaggtccgcccttgctcacgggcatactctcatgactggactgagtgcccctttgtccacccaggagagaatgctcggcgccgagacccccgcaagtaccactacagttgtgtgccatgcccagatttcaggaagggtgtgtgccgtcgcggagacatgtgtgaatatgctcatggagtgtttgagtgctggctccatccagcacaataccggacacgcctatgcaaggatggcacaagctgtaaccgccgcgtctgtttctttgcccacacaactgatgaactccgcccattgtatgtctccactggatcagcggtgccatccccaagggcttcagcaacagctgctatggagatggctgcagcaatgggcttaatgcccggttccccatcatcggtttcagcggtgatgtccccatttacccctccaatgtccccttcgggcaatgggatgcccccttcattgggctggcagcagccaaatgttccaacattacaccttcctggcagcagccttcagtcaagcaggctccgaacgtcactcagtgcaagggatatgcctgctgatgactactccctgatgccggacttcgattcccaacttatgaatgatctatgctattcccgtctcggttcatccacagggaaccactctgcacggaccaagtccctgaatccatcaaacctggatgatctcttctctgccgaactggtatcatccccgaggtatagtaatggtgatcagggtgctatgttttcaccttctcacaaggctgctatcctgaatcagttccagcagcagcagcaagcactgctttctccaatcaacacaggagtttactctccaaaggctgtggacaacaagcagttaccttcacacccatctctgctgcatgcatcgcttgggatgccctcccctggccggatgtctccacgatgtgtcgaatcaggctccccgatgaactcccacctagctgctgctcttgcccagcgtgagaagcaacagcagacgatgagaagcctcagttctcgtgaccttgggcccagtgcggcacgagcttcagctctcggctcccctctaagcacatcatggtctaagtggggatctccttcaggggtaccagattggggcgtagatggtgaagaattgggtaagctccgccgctcatcgtcgttcgagctcaggtctggcggcgatgaccctgatctctcctgggtgcatacactggtcaaggaatctccgccagagaagcaagttactacgtccgaatcaattaattccgttggaccctcaccactaatgcctcccagcatgaacaacggcggcgaaggttctggcctgaacacccagctggatgggcgtgaccaagccgcggttttaggggcactgcttgaacagatgcagcttgatcagcagattggtagtctagcaacataggcgtgcaacgagcctggaaggtgtgagggtactatattcttatctactgaattccaagttcttttccccctgtcaattatggtattcaacaaagatggatagctgaaggtggtggctcagagattggtttttctttaattttggaggtaaatcatacgcattattgaggtcccagtaggttaaaagaatgaagttcctcgtctggggttgttccaaggccaacccaggtagaactgcaccccggcagcatcggtctcattgattgaagttctctgttttgttaattaacccctgttaagaaaaaaagaaggcgtgttcgccgtgtcggaattctttccttcctcccctagtgtttatttcaatatgatatcgatacctgatgtactactggtggtgtaagaggttgcttgggatcctatagtagttctgtcgagttccaaaagtttttttttttgcggttccaccctttaccattcgtcgtggattatcttgtggccttgtttttttttgttagaccttgaggcctgcgtaatcctcctggatgatatttgcaataatgtaatattgtttt

SEQ ID NO: 125970 - DNA, 2177 bp, Zea Mays
tttcctttccctccctcagcccgcgcctgtgcccatatctctctgactgtcatggcgacgcggcggcgcctctctccgactttcttcggcgggctccgggcccgtgagctcggcggcgccagtgtctcctcccgcgccacggcggggctcccgtatctcgctgacctctcctccgaccccggcggccgcggcggcggggtcatagccgtcgagcactccggcgatcccgccatccccttcgccatctccttcggcaagactgcacagacctgtaacctcttggcggtcgccgacgaagacgggtacgttggcctctacgacacccgccggcgcctcccttccgcctcctcgtcactagagaagtcagctgaaacgagggtgtgcgactgggttgctcacaacaatgcagtctttgacgtgtgctggatcaaggagggatcccaaatactgactgcatccggcgatcaaactgtcaaaatatggagtgtaggaaacaggaaatgcattggtgtcttgtcagggcatactgggagcgtgaagtcgctgtcttgtcattcttccaatcctgagctcattgtttccggttcaagggatggttcatttgctctttgggatttaagatgtgaccctaaatctccaaacagccatggtgaaacgtgtctcacgtcttctgctgttgtcagagaagcccacagtcccatactaaggagccgaacacggtctcgagcaaaggcggcttcaacaagtatcacatcagttctttatctgaaagatggtgtctccattgctacttctggagctgcagacaatgttgtgaaaatatgggatacacgaaacctgaaagtgccgttctccaacaaaaactctcaagcaggggcccaacctttggagggggtgaaacatggcatctcttgcctgtctcaagattcgtatggtgcatacattgctgcgtcatgtatggataacagaatctacttgtacagtgtgcttcatgtgaacaaaggtcccataaaggtttacactggcagtaaaatagagtctttctttgttaagtctgctatcagtcctgatggaactcacatccttggtggatcaagtgatggaagtgtatacttgtggcaggtggatcaacctgaaagtgctcctatagttctgaaaggccatgaaggcgaagcaacttcggttgactggtgtgcatcagaggttggaaagatagcaacatcttctgatgattccacggtacgtgtgtggagtaccatgaaaatggactgtacaaatgtaagctcgccaacagtgatccgtaagcggataacagcaccaagcaccgagtaccgaaggtccattacccatgagcctgctactacatcaagagacggagttgtctgcactagcggtgatggcgaattgcaaagcggttgccactctccccttcaacctagagcactgcacttcggcactcctgaatcttcaaagaagagggccttggcattgtttgaggaggaggcacttgattcaaggaagagcccggaagcacagacgaacagcccctcttctgttctgagcccgccgccgtcgttgaaacggagaacgattcgagactattttgccagtgccgcatcttgaatcctgactgacaaatagctggtccccataatttttagtggtcctgacccatgagtactacggctctccttaactaatggtgaaacagctgcaatttttgggaaatccttctagctctagttcaaggtcatcgatcttttggaaatgcggctgtacataatttatcattacagaattgggagaaactattatgtaattaaatttctcctataattgccgcataattaagttatcaaaagtcattttaataccgtgtatagcaatttatccatatgttaacctaaaacactgtttgtagtgtagactatattgttcacagagtatgaggttaaatatacatataaggatgagtaaattattggagatattctaagaaaaaagtatagatatattttattatttagtttataatgtatcaaattttatttttttaatttgttctatgctaagcaataaaaaagtgatatttatatttatatgttattgaaagcatatatcatgtattgtagtgcgctgtacgcaccgacaattctacatataataatatgttgaac

SEQ ID NO: 125971 - DNA, 925 bp, Zea Mays
gtagagtaaccaacgtttatatattttaaatactaatattgtaccttgtaaaatgtatgccagtgttgtgaaaatatgggatacacgaaacctgaaagtgccgttctccaacaaaaactctcaagcaggggcccaacctttggagggggtgaaacatggcatctcttgcctgtctcaagattcgtatggtgcatacattgctgcgtcatgtatggataacagaatctacttgtacagtgtgcttcatgtgaacaaaggtcccataaaggtttacactggcagtaaaatagagtctttctttgttaagtctgctatcagtcctgatggaactcacatccttggtggatcaagtgatggaagtgtatacttgtggcaggtggatcaacctgaaagtgctcctatagttctgaaaggccatgaaggcgaagcaacttcggttgactggtgtgcatcagaggttggaaagatagcaacatcttctgatgattccacggtacgtgtgtggagtaccatgaaaatggactgtacaaatgtaagctcgccaacagtgatccgtaagcggataacagcaccaagcaccgagtaccgaaggtccattacccatgagcctgctactacatcaagagacggagttgtctgcactagcggtgatggcgaattgcaaagcggttgccactctccccttcaacctagagcactgcacttcggcactcctgaatcttcaaagaagagggccttggcattgtttgaggaggaggcacttgattcaaggaagagcccggaagcacagacgaacagcccctcttctgttctgagcccgccgccgtcgttgaaacggagaacgattcgagactattttgccagtgccgcatcttgaatcctgactgacaaatagctggtccccataatttttagtggtcctgac

SEQ ID NO: 125972 - DNA, 326 bp, Zea Mays
cgcttttataaaaagaatattttttgtacatcacaaaattgaaatacttattacaatatattttcattttatggagaaattactcatcattcatatatagcaaaacaatgtatcacaaatttgtattatatattttccttcttgtatacgcaaacaaaaaaccgttagtctctaccaaaattaaaaaagtttgactaagctattcgcaactgcattatgcaacaatccagcatcggacaccatttttttaacacaatatgcatgcatgcaacgtgggtaagtcaatcaacattggtcgtcacgtacacaagtgtcaggttgtagcg

SEQ ID NO: 125973 - DNA, 1910 bp, Zea Mays
gtttggatttcggaccggacgcgtttctgaacttcttgcgccggaagaaagagaaaccgagaagaggagtcgcggctcccgacatatgtggcggcgggcggcgacagcggcgctgtcgctgggcgccggtgccggcgcggtctcgatcgccacctccgaggaccccgccgcgacgttcaaggtctgcgcgcacctgcctccgcgcctcctccgcgactctgtcacggccgccaccatcgcgtttgactacaagtggtccctctggggcctcgagccgggcacccccgtgtggcagagcgccaagcaccatgcccacctccgttccgccaaccgactccaggagctctgcttccgcaacggtggcatctacatcaagctcggccagcacatcgctcagctggagtatgtcgtgccggaggagtatgtgcaaacaatgagggaatccatgctgaagaggtgcccggtctcatcgtacgagcaggtccgcggggtgtttaccaaggatctcggtgaatcgccagaaactgtttttgcagaatttgatcctgctccatttgcaagtgcttcccttgcacaagtccatgttgcccgaacgcacgatgggcaaaaagttgctgttaaggttcaacatgaccacctcacaaatactggtgttgtagatatagccactgtggatttgttagtgaatgctctgcattatattttccctacatttgactacaggtggttagttgatgaagttcgagaaagtgcccctaaggaattggatttcttgaatgaagccaaaaacagcgaaagatgtttgaataactttagaaagctgtctcctcagattgctggtagcatatatgcccccaaggtttattggaatctcagcacatctagaattctcaccatggagtttatggatgccaaggaggtaactgatgttagtggcattaaatcaattggagttcaccctgttgatgtttcaaacctagtcagtaaagcatttgctgagatgattttcaagcatggctttgttcattgtgatccccatgctgccaatatgatggtccgaccaatgccacaagacagcagaaaactttttggatggaaaaggccacagctggttcttcttgaccacggcctctacaaagagcttgattataatactaggataagctacgcttctctttggaaggcacttgtttttgctgatgcaaaagcaattaaggagaacagtgccaaactgggtgctggggaggatcttcatgcactctttgctggtgttctcactatgagaccatggaaaagggtgattgacccatctcctgatcatcttgtactaggaaaaaatactgattattcagaattacagaattacgcctccttatattttactgagatctccgagctactgaggagattaccaagggttatattgttgatgcttaaaacaaatgactgtttacgtgcagtcagtcatgccctggttgggggcagttccttggagtcgtttatgattattggacgggtatcttctgaagctgtgctggatgctaaaaggatgaacaggaggtcctttctcgatggattgaagatatggctggaggaagccctgctggaagctcgattctttactttgaagctgatgctatgtgttatgcaacttaggaagttgttgcctggctaaaagcagttaggcgtatcagcagcctttttgaccggtagaactgcggagttgacatctagttccatatattttcttgagggcgaaacttgacattttgcttagaagattgcctttcttttcgtatacataattcttctgtcgatcattttctcaccatgagtggccatttttcatggtcgatacttgataccttcattgggtgaatacaagtatacaaactgctgacgtggacaaa

SEQ ID NO: 125974 - DNA, 878 bp, Zea Mays
actcctcttttgtccgccgcgcgcatggcccctcccctctccgctctctccttataagcagccacataacggcggcgtcggcgagggcgagaagcggcggcaggcagacacagctcttagctctgccctgcagtgcgcgcgagcgcgacgggggtgctgtgctgccgcggtggtgggagaccatggcgacggtgccggtgccgttgccgtggccgagcgtgaggaggtcgctgcaggagggggccgccagcgcggcatcgtacgagcggcgagctccgtggcagggggcggcgcggcccgcggccacggtgaggtcggtggagacgctggtggtgatcgtggccgcgatcgtgctcgccgccgtgctggcgggcgtcctcgcgcgggtctgtggcgggcggcacgtcgtgccgagcgcccagtaccacgacgaggaaggctgggtggagaggcgctgccggagctgcctcgacagcgggctgccgccgccggagcagggggcgtccaagacgagcgaggccaaatagcgtcattgtgcattgtggtagtactaccctagtagcctgctctgcgtactagtactgtgctgtgctgctgtactattatagtaatactactagcgtttgtctaggcaattcattactgcaggcttcttatcagcgtatgcaaagtttgtgtgtaattagaacagccgggtctggctgcattgctacctaattgtacacaggagtggtacgaggctaggacatcaggcattaatcctcgttgcagtatttttattgtacgatatattggtagcaaggaaaatttattaggctccatttagttcgaggaactaaagattagtccttccattttaatcttatttaggtcatgtt

SEQ ID NO: 125975 - DNA, 662 bp, Zea Mays
attctccgttatcacgcttgtagggtttcgtcacctccaagcagccgcctccgttcgttgtccgcaccgccgcctccattccccatccgcaccatcgccgtccacgcatgtcgcctccgttccccatccgcaccatcgccatccacgctggtcgcctccgttccccatccacaccagcgattctgcaccagcgcccaccacccccgcatcgcccccactcccgtctgctgccccgccagtcatcgtgggctcggtcaagcacctcacgcctgcgtgggtcagccgtcgttcccgctaatctccttcgctcaggcaccagagtcacaccatcctcgctgtcaatctcgtcgcaaaccctccgcccctctccggtctggcactaccacgagcttccagaccccccgcccgagaaatgttgtagcgtctcatgctgggatgggcggcgtcagcgccgtctctcgccctgctgtggtcctcctcctctgggtggagtcctgcacttctttattgtctcgtcttgctcgctcgtcccctaaatcatgtctgtgtcgccccctccatttcacgagtttgctcgcgttggccgggggacgggggtccggagcctcgtgccgcactccatcagagaccctgcaacctttccgcgaacgcttttgttcctg

SEQ ID NO: 125976 - DNA, 147 bp, Zea Mays
atgtcaaaggatcacaagccgacatatgacgcagagcgtcaaaggcatcaaagatggctacctcaacggcgtactgcctgtgacctaggctttgggggactgggacctgaaactacatcaaggctcgccatcgcctcttattgctaa

SEQ ID NO: 125977 - DNA, 1079 bp, Zea Mays
attcaaacattattgaagccccctgcaaccaacaccgcaaacagagctgccaggagtccaggacatcaggccccagaaaaaagtccgaacgcatctcttctttctactttcttgtaacccaagacgaactcggtgaactctttctcctcgcgcagcaccggagcacaatcaaggattccagtccagtcctgccaatggagtgcgttttgggcttggttggccgcgacttcgcggtggtggcggccgacacctccgccgtgcagagtatcctcgtccacaagactgacgaggacaaagtaatggtcctcgactcgcacaagctgttgggcgcttcaggggagcctggtgaccgggtgcagtttacggagttcatacagaagaacctccacctgtaccagttccgcaacaccatcccgctgtcaaccgccgctgccgccaacttcacacgcggcgagctcgccacagcccttcgtaagaatccatacatggtcaatgttattctcggtggttacgataaggatgttggcgcctcactgtactacatcgactacattgcgaccttgcacaagatcgacaagggcgcttttgggtacggatcgtatttctgcctgtctctgatggacaagctgtaccgcccggacatgaccgttgaggaagcggtagacctcgttgataagtgcattaaggagatccggctgcggctggttgtggcgccccagaacttcgtgatcaagatcgtcgacaaggacggggccagggagtacgcgaggcgtgaactcgtcggcgacagtgcacctgctgaagctgcagctacggttgccgcctgaggcatgaaacttgtttgtgttagttgtttgtttctcagcgaggctactatgtaatcaaatggatactggtgggggtcccacagctgttttttaatcaattttagcccagacatgtaattctgtttctgcactaattcatgtcttcgccgagtacaagttgacacggagtgtgtggcgcttgacattgctgtgcaccatttctgatcactgaaatgaacataaaatctgtgccaacgtccaacggtgcgcagc

SEQ ID NO: 125978 - DNA, 104 bp, Zea Mays
cgagctggtagatgctgctgaactgccggttcctacttcaacaggaattgatcctgccattgcaacacgtagacgattgattcgttaaggactttgtttaaggg

SEQ ID NO: 125979 - DNA, 860 bp, Zea Mays
caaactgttttgtgtttatattacttaatgaatatatgattagtctaaaacaaattatattttaggactcacggaattatatagcaaattggttctcacgtagccctataaaactacagaaataaaaacgaatggtcacgatagtacctggacggctggacccaacttcccgaatcgaatccgacgccccatcgagtgtgtgcggtggcggcgggaggagacgaaagagaaatatgcaggcggtggcacgggcggcgcgtgggctcgcggctgcggctgcggctgcggctgcgcggccgtcggcgacggaggcagggcaccgcgggcaggtgcagcaagctcggggcatcgtggtgcaggtgagggacgggaatctggagcgggcgctgtcgatcatggagcgcaagatgcggtccagcggcatggagcgcctcatccgggcgcgcacccatcaccacgtcaaggactcggagaagcgcgtgctcgcacgtaaggggcttatgcagcgcgtccgttcccaggagctcggcaagaagctccgcgagatcctcatcaagaagatcaggggccagtgagggcatcagcgcattggccgtttaccggtagcatttgtgtgtgggtgcttcgttttgagcgcgtaacgatgctgggtacttccatcgatggttctgtggcgcagcctgagaataactcaacctaccttgagcaaaaaggcttttgctatattgcatggaggacagattgatggtaaaactattgtttttttattgtacaacttagtatatatatggatttaattactgtttgtgcttgacttgtgtgcatgcaaatgctgtctgagcaatgtgtggcaatgcttc

SEQ ID NO: 125980 - DNA, 107 bp, Zea Mays
ctattatattttaaaattcagtatttcacaattttcacctaaaaatattgtatggatgcaaagtataatttatacatatactaatcattttattcatttgagcgatt

SEQ ID NO: 125981 - DNA, 694 bp, Zea Mays
ggaaactttgttttcccatttacaagtttataagactagaactaacattcaaagttcccttcctctgataaaagatggtgttgtttctctagatggtggtctactgagacccaatggctcattctgccttggccatagcaagaatcttgaagtgaaatttgctgtaaccactgatgtttcaagtttacttgaaaatgtcgttgaaatggaggaacaagttaaacgtaagaattgggagaaggaaatggtttgaaaagggaggaagatctgctgaaacaagttaaggaattatacaggaagcaaaaacaagagctcatggattatgtcactcaaccagcagtgacacatacgtcacgtgattcgccagcaactcattcacccgcaactcctgggagtaatctgtttggagccaagctctccaacaagtggcggtaacattttggtggcgtacgtccctattttgttggggcttattgcttgttctggcatcagcacgacgtaactagcttttgccacaagcttggtgttagtttgtgagggtgataggccagtgaaattgttttgctgcttagcttagttggccctatggataccaattgatctatagacagccgggaacttggctaatttattatgactatggatgagacttttgtgatgtaattgatgagattattgatttaaatattgttat

SEQ ID NO: 125982 - DNA, 869 bp, Zea Mays
ttaattactttctataaactgtaaaactgtactgtcataaaaaagtgtaagaaattgtgtaattacgttttctctttatgaattatctttatgaggtctgaactgttgatctcgtatgttctaaagaagaatgtcatactcagttgtcttacgctggtttatttatttacctcacacagttttcttgctctcgtttggaccattgcgtatgctaaccttttacaccttttattttcctttagaatttatgttcacacacactaatcaagctaatttctttactttaataaataactataattggtttttgcagcaagaatcttgaagtgaaatttgctgtaaccactgatgtttcaagtttacttgaaaatgtcgttgaaatggaggaacaagttaaacgtaagaattgggagaaggaaatggtttgaaaagggaggaagatctgctgaaacaagttaaggaattatacaggaagcaaaaacaagagctcatggattatgtcactcaaccagcagtgacacatacgtcacgtgattcgccagcaactcattcacccgcaactcctgggagtaatctgtttggagccaagctctccaacaagtggcggtaacattttggtggcgtacgtccctattttgttggggcttattgcttgttctggcatcagcacgacgtaactagcttttgccacaagcttggtgttagtttgtgagggtgataggccagtgaaattgttttgctgcttagcttagttggccctatggataccaattgatctatagacagccgggaacttggctaatttattatgactatggatgagacttttgtgatgtaattgatgagattattgatttaaatattgttat

SEQ ID NO: 125983 - DNA, 2413 bp, Zea Mays
aaggaccgcgtccatgcgtgtggcgacgacgcctacccccgcgcaggccgcagccccaccgccgcgttccctcctccccactcgtgtgggaagctcagcacaaagttcgcgttgcgccgggcggctcgtccttcttggaaatcctcccacgcaatcgcctccccgccccgcacccgcgtgcgtgagacgccgcctcgcactgccacagtgccaccgccgccccccaccccggggcgccgatctcgcgtcgcgtcgccctggcgaggtggtggcgggaggatgggggcgtgcgtgtcgcggcccagcgcgtgcgtgggcaagccccacacgccgcggtccggcgacgccagcggccgctcgggcggcgggggtggggcgcggcggaggcgcagccgccgtgtcgggaaggggcggaggacggcgccatcgcgcgccgcgtcgatggagaccatccaggaggccgaggtgcccggttcgacgtccgccgccgcggccgatcaccggacgtacagcaaccccgcgttccaagtgtccgggaacattgaggaggcttggtacgattccttggcgatgagcgagtcggatgccgaagacgatttccacagcgtgcaagatgattctttttcattgaatggcttcgagaacgaagctgcattgagcatgagagatggcaacggtgggagcttcaatggagctgcgcaatcaggcgagcagcaacataaaaagccaaagtccagcgaactgtcaaaggggagcttggagaatggtgtgaggtcgtccatgagcaacgaggatgcggtgagtttttctggtgcggacaacactcacggtggagagaggatactggaagtttgcgggcttctgccaaataattgtctaccctgcattgcctctgctgttggggtaagcgagaagaagagaactctttcctcgagccctactcattcaatgaggatgccttctttgaagctttccttcaagaagaagtcaggggaagctcatccatcttccacactactatctacgaaggatttcctggaaaggcctctagcaggttctcaagtacagttgtgcttgctggaaacaaatatgcccaacagttggactcatattgatcctggtacattccgagtccgtggagcaaactattttagggataagaaaaaagagcttgctccaaattatgctgcatattatccatttggagttgatgtgtacttatcgccacagaaactcaatcatatatctcgatttgttgaacttcctgatattcaactctccagcaagctcccacctcttttggtggtcaatgtacaggtgccattgtatccagcttcattatttcagaatgagactgatggggaagggatgagctttgttttgtactttaggctttctgatggttactcgaaagagcttccaccttcattcattgaaagtattagaaggttgattgacgaccatgtagagaagataaaagcatttccaatggaaacgactataccattccgagagcggctgaagatacttggcagggtggctaatctggaggatcttcctttgagtgcagcggagaggaagctaatgcatgcgtataacgagaagcctgtcctttctagaccacagcatgagttttacctgggtgataactacttcgagatcgacattgacatgcacagatttagctacatctcaaggaaaggttttgcaacatttttggacaggctaaaagcatgtgttctagatgttgggctaactattcagggaaataaagctgaagaactgccggaacaaatcttatgctgtgttaggttgaatgggatagattacaccaaataccagcctcttttgactcacgctgcctgaaataaacgcttacaagaaccagctaaccgtcatttggaattggatgctgagaggtaaccataccaggacccagactcctggagatttcagaccagagccgctgtcgattatcacagcttctgctgaaacgccatcatccgagcttaggtggggcaggtgactcattgacaactggctgctcccgttcgaatccgtggtgctaatgtagtcgtttctttctgaacacggggggaaaaggcggagactgcggtacatgtaaatctgtaaatcattgctggatagctccggttgcctcccttttactacccaacattctagatttagtaaatataactaattctgactatggtcgagtaggtttaggcgttaaagacctctacaacaatttcactatatccgtacaggaacaggatgtcgtcttggcccaaaatatcgtgtacaacttgcatgatgatgtgttgttaactttggaagctctatatggttcagggctatcgtcccaaattatcgtgtacaagtacaatttttatgatgttgagttcgtaac

SEQ ID NO: 125984 - DNA, 2416 bp, Zea Mays
aaggaccgcgtccatgcgtgtggcgacgacgcctacccccgcgcaggccgcagccccaccgccgcgttccctcctccccactcgtgtgggaagctcagcacaaagttcgcgttgcgccgggcggctcgtccttcttggaaatcctcccacgcaatcgcctccccgccccgcacccgcgtgcgtgagacgccgcctcgcactgccacagtgccaccgccgccccccaccccggggcgccgatctcgcgtcgcgtcgccctggcgaggtggtggcgggaggatgggggcgtgcgtgtcgcggcccagcgcgtgcgtgggcaagccccacacgccgcggtccggcgacgccagcggccgctcgggcggcgggggtggggcgcggcggaggcgcagccgccgtgtcgggaaggggcggaggacggcgccatcgcgcgccgcgtcgatggagaccatccaggaggccgaggtgcccggttcgacgtccgccgccgcggccgatcaccggacgtacagcaaccccgcgttccaagtgtccgggaacattgaggaggcttggtacgattccttggcgatgagcgagtcggatgccgaagacgatttccacagcgtgcaagatgattctttttcattgaatggcttcgagaacgaagctgcattgagcatgagagatggcaacggtgggagcttcaatggagctgcgcaatcaggcgagcagcaacataaaaagccaaagtccagcgaactgtcaaaggggagcttggagaatggtgtgaggtcgtccatgagcaacgaggatgcggtgagtttttctggtgcggacaacactcacggtggagagaggatactggaagtttgcgggcttctgccaaataattgtctaccctgcattgcctctgctgttggggtaagcgagaagaagagaactctttcctcgagccctactcattcaatgaggatgccttctttgaagctttccttcaagaagaagtcaggggaagctcatccatcttccacactactatctacgaaggatttcctggaaaggcctctagcaggttctcaagtacagttgtgcttgctggaaacaaatatgcccaacagttggactcatattgatcctggtacattccgagtccgtggagcaaactattttagggataagaaaaaagagcttgctccaaattatgctgcatattatccatttggagttgatgtgtacttatcgccacagaaactcaatcatatatctcgatttgttgaacttcctgatattcaactctccagcaagctcccacctcttttggtggtcaatgtacaggtgccattgtatccagcttcattatttcagaatgagactgatggggaagggatgagctttgttttgtactttaggctttctgatggttactcgaaagagcttccaccttcattcattgaaagtattagaaggttgattgacgaccatgtagagaagataaaagcatttccaatggaaacgactataccattccgagagcggctgaagatacttggcagggtggctaatctggaggatcttcctttgagtgcagcggagaggaagctaatgcatgcgtataacgagaagcctgtcctttctagaccacagcatgagttttacctgggtgataactacttcgagatcgacattgacatgcacagatttagctacatctcaaggaaaggttttgcaacatttttggacaggctaaaagcatgtgttctagatgttgggctaactattcagggaaataaagctgaagaactgccggaacaaatcttatgctgtgttaggttgaatgggatagattacaccaaataccagcctcttttgactcacgctgcctgaaataaacgcttacaagaaccagctaaccgtcatttggaattggatgctgagaggtaaccataccaggacccagactcctggagatttcagaccagagccgctgtcgattatcacagcttctgctgaaacgccatcatccgagcttaggtggggcaggtgactcattgacaactggctgctcccgttcgaatccgtggtgctaatgtagtcgtttctttctgaacacggggggaaaaggcggagactgcggtacatgccctaaatctgtaaatcattgctggatagctccggttgcctcccttttactacccaacattctagatttagtaaatataactaattctgactatggtcgagtaggtttaggcgttaaagacctctacaacaatttcactatatccgtacaggaacaggatgtcgtcttggcccaaaatatcgtgtacaacttgcatgatgatgtgttgttaactttggaagctctatatggttcagggctatcgtcccaaattatcgtgtacaagtacaatttttatgatgttgagttcgtaac

SEQ ID NO: 125985 - DNA, 1711 bp, Zea Mays
attctgatgctggtactaccaatgcatatgccttttatggcacttagatttattatttattcctgtaattacctgagtaccgcttttgtctgtgaaataatttccaaaatatataacaaaaaaagttttagccattctctgttacaagatttatagtaatatacactagtaacttgatttgatgtaagttttcagccacattaaattttgtaccatctgtcaaggttaacataacacatcaattgcttggagtattcatttttcttttagacaaaacttgtcaaggtgacagatatactttattttgtttaagtatctacgaaggatttcctggaaaggcctctagcaggttctcaagtacagttgtgcttgctggaaacaaatatgcccaacagttggactcatattgatcctggtacattccgagtccgtggagcaaactattttagggataagaaaaaagagcttgctccaaattatgctgcatattatccatttggagttgatgtgtacttatcgccacagaaactcaatcatatatctcgatttgttgaacttcctgatattcaactctccagcaagctcccacctcttttggtggtcaatgtacaggtgccattgtatccagcttcattatttcagaatgagactgatggggaagggatgagctttgttttgtactttaggctttctgatggttactcgaaagagcttccaccttcattcattgaaagtattagaaggttgattgacgaccatgtagagaagataaaagcatttccaatggaaacgactataccattccgagagcggctgaagatacttggcagggtggctaatctggaggatcttcctttgagtgcagcggagaggaagctaatgcatgcgtataacgagaagcctgtcctttctagaccacagcatgagttttacctgggtgataactacttcgagatcgacattgacatgcacagatttagctacatctcaaggaaaggttttgcaacatttttggacaggctaaaagcatgtgttctagatgttgggctaactattcagggaaataaagctgaagaactgccggaacaaatcttatgctgtgttaggttgaatgggatagattacaccaaataccagcctcttttgactcacgctgcctgaaataaacgcttacaagaaccagctaaccgtcatttggaattggatgctgagaggtaaccataccaggacccagactcctggagatttcagaccagagccgctgtcgattatcacagcttctgctgaaacgccatcatccgagcttaggtggggcaggtgactcattgacaactggctgctcccgttcgaatccgtggtgctaatgtagtcgtttctttctgaacacggggggaaaaggcggagactgcggtacatgccctaaatctgtaaatcattgctggatagctccggttgcctcccttttactacccaacattctagatttagtaaatataactaattctgactatggtcgagtaggtttaggcgttaaagacctctacaacaatttcactatatccgtacaggaacaggatgtcgtcttggcccaaaatatcgtgtacaacttgcatgatgatgtgttgttaactttggaagctctatatggttcagggctatcgtcccaaattatcgtgtacaagtacaatttttatgatgttgagttcgtaac

SEQ ID NO: 125986 - DNA, 2118 bp, Zea Mays
acgatagtacctggacggctggacccaacataccgaatccgacgctccatcgagtgtgtgcggtggcggcgggaggagacgaaagagaaatatgcaggcggtggcacgggcggcgcgtgggctcgcggctgcggcggtggcacgggcggcgcgtgggctcgcggctgcggctgcggctgcgcggccgtcggtgatggaggcagggcacagcgggcaggtgcagcaagctcggggcatcgtggtgcaggtgagggacgggaatctggagccggcgctgtcgatcatggagcgcaagatgcggtccagcggcacggagcgcctcatccgggcgcacacccttctcgacatcaaggactcggagaaccgcttgctcgcgcttaaggagcttatgcagcgtgtccgttcccaggagctcatgctccgcaagatcgtcatcaagcagatcagaaccatggaggaggataatgcagactggtgcgatgaaaatgttaagatagcttgtgaaatatttgctgaggaagtaagagcaaagaacagatcaggttctcacttaaacaagcttgggtacaacaatgtaatggtcaagttcaaagagaggacagggaaaacttacagcgagctacagttcaaaaataaatgggacaagctgaaaaaagattatagtaattggaaacaattgggaaaagagacaggatgtggttgggaccctaacaagaagttgtatgttgctccagattggtggtgggagaaggcaaacatacaattcaaaggcattagcaagtttaaagacaagtcacttcaaaatgcagaagaattgagtgtcatgtttgaagatcttcggaacaccggtgatgatcactgggtcccaaccagtggtgagctaccccaagacactgaagcacaaatacacgatgccatcaacattgaagatgaaaatgctagtgattgtggggaagacacaccatctagttccacatccaagagacgtcgtgtggttgtgacagataaaggtaaaaaaccgaagactacgggaggacaatggatgcaagaccagatgtctaaactttttgaattgaataagcagacaacaacatcttgtgagtctatggtcctggcaagaacacaagagacacctggatcttctataaaagatgttatgcaattagataaaggtaaaaaaccgaagactacgggaggacaatggatgcaagaccaaatgtctaaacttgttgaattgaataagcagacaacatcttgtgagtctatgttcctggcaagaacacaagagacacctggatcttccataaaagatgttatgcaattggtgaaggcatgtggtgctatagctggcagcaaagagcacttcattgcaactcaagtctttacaaaaaaaaatgaaagagaaatgttcttgactttggatacacccgaggagcgctttcagtggttatcaatgaagtatgaatggatgacaatgaacaagaagggctagttagagctactttgttatgcatttatcgtgtcattttttgtttttaccttaccaaacttatctattagaataaattcaaacattctggggaaacaattagtagaaaatttatggaaattttctgttgtgtggtgggcatgtccaaccaatatacaaggcctaaagatccaaactttcgtaatgtgcacgataggataagaaatgatccaaggatatggccacactttaaagattgcattggagccattgatgggactcatatttgtgcaaatccacctccacaagattttcttaggtacctaggaagatctggtaaagcaacacaaaatgtgatggcagttgttgattttgacatgcgtttcacctttgcctctattggtcaacctggttccatgcatgatacaagtgttctctataatgctctacaaatagatgaagatatcttcccacatccacctctggggaaatattatgttgttgatgctggatattcgaatagacctggatacttatcaccatataaaggtcaaaggtaccacgttccagagtggagaagaggcccggctcctagtggcgagcaagagatgttcaaccatttgcactcaagtcttcgcaatgttgttgag

SEQ ID NO: 125987 - DNA, 2567 bp, Zea Mays
tactacgccatctcttcgtctcccgtcttctagtgtgcaaggtgaagttgcattcctctctccctctaatctgtagccggttgaggtgaggactgaggacgcaagtgttttttccttctgctcaagctcctgcagtctctattggtttcttgatttgaaaatcatttttaagaaaatccttgcacacgagtatagtagctgtgaaaattcaaagctcacacgtccagcccaatagcaccgtttctagaaatgttctgcacgaaaaaataaataaaatcacaagtcgagaagctcatcatcaatctatgcttgctgctttatacctgttgttttccatgttagaagagctagcactttgatttatcttttctttattattcatggttgtggcaataacagaaccatggaggaggataatgcagactggtgcgatgaaaatgttaagatagcttgtgaaatatttgctgaggaagtaagagcaaagaacagatcaggttctcacttaaacaagcttgggtacaacaatgtaatggtcaagttcaaagagaggacagggaaaacttacagcgagctacagttcaaaaataaatgggacaagctgaaaaaagattatagtaattggaaacaattgggaaaagagacaggatgtggttgggaccctaacaagaagttgtatgttgctccagattggtggtgggagaaggcaaacatacaattcaaaggcattagcaagtttaaagacaagtcacttcaaaatgcagaagaattgagtgtcatgtttgaagatcttcggaacaccggtgatgatcactgggtcccaaccagtggtgagctaccccaagacactgaagcacaaatacacgatgccatcaacattgaagatgaaaatgctagtgattgtggggaagacacaccatctagttccacatccaagagacgtcgtgtggttgtgacagataaaggtaaaaaaccgaagactacgggaggacaatggatgcaagaccagatgtctaaactttttgaattgaataagcagacaacaacatcttgtgagtctatggtcctggcaagaacacaagagacacctggatcttctataaaagatgttatgcaattagataaaggtaaaaaaccgaagactacgggaggacaatggatgcaagaccaaatgtctaaacttgttgaattgaataagcagacaacatcttgtgagtctatgttcctggcaagaacacaagagacacctggatcttccataaaagatgttatgcaattggtgaaggcatgtggtgctatagctggcagcaaagagcacttcattgcaactcaagtctttacaaaaaaaaatgaaagagaaatgttcttgactttggatacacccgaggagcgctttcagtggttatcaatgaagtatgaatggatgacaatgaacaagaagggctagttagagctactttgttatgcatttatcgtgtcattttttgtttttaccttaccaaacttatctattagaataaattcaaacattctggggaaacaattagtagaaaatttatggaaattttctgttgtgtggtgggcatgtccaaccaatatacaaggcctaaagatccaaactttcgtaatgtgcacgataggataagaaatgatccaaggatatggccacactttaaagattgcattggagccattgatgggactcatatttgtgcaaatccacctccacaagattttcttaggtacctaggaagatctggtaaagcaacacaaaatgtgatggcagttgttgattttgacatgcgtttcacctttgcctctattggtcaacctggttccatgcatgatacaagtgttctctataatgctctacaaatagatgaagatatcttcccacatccacctctggggaaatattatgttgttgatgctggatattcgaatagacctggatacttatcaccatataaaggtcaaaggtaccacgttccagagtggagaagaggcccggctcctagtggcgagcaagagatgttcaaccatttgcactcaagtcttcgcaatgttgttgagcgtgtatttggtgtatggaagatgaaatggagaattcttctcaacatgccaaaatatccaatggtaaagcaaaagatgattgttgcagctaccatgtgtctccacaactttattcgtcaacatcatgcacttgacaaggattttgagagatgtgaccgagaccaagattatgtgcccactataccagcaaggtataggaaccaagccctttctcaaagtttattggataccacatcacatgctaatgacaggacaatggacagattccgtgatgatcttgctcttgctattagttcatctagggcataagcttaaggatatttggattttattttagcctccttttgggcatgtggttgtattttgttggaccttaatgaacaataatggatgcatcctgccccgttgttccctttcgatcttcaatagaatctagaaattttcttctgcttgcttttgtctggcgcaatgggaaaatatagaaaatataaaaaaaa

SEQ ID NO: 125988 - DNA, 420 bp, Zea Mays
aggttaattgacgatcatgtagagaagataaaagcatttccaatggaaacgactataccattccgagaacggctgaagatacttggcagggtggctaatctggaggatcttcctttgagtgcagcggagaggaagctaatgcatgcgtataacgagaagcctgtcctttctagaccacaacatttgttttacctgggtgataactacttcgagatcgacattgatatgcacagatttagctacatctcgaggaaagggtttgaaacatttttggacaggctaaaagcatgtgttctagatgttgggctaactattcagggaaataaagctgaagagctgccggaacaaatcttatgctgtgttaggttgaatgggatagattacaccaaataccagcctcttttgactcacgctgcctga

SEQ ID NO: 125989 - DNA, 981 bp, Zea Mays
atcccaaaacgcaaaacacgagcgagcacaaaaaaaaaatcccaatatccgcaacggcaatgtctccgctgccccgcatcgtgctcctcgccgtcgccgccgccgccgccgcagcggtcacggcgtcagccacgtcgctcagcggcgcggcgaacgacctactccccaagtacggcctcccgaaggggctcatcccggactccgtcgcctcctacagcttcgacgaggccacgggcgccttcgagatccacctcgccggcacctgctacgtccacttcggctcccacctcgtctactacgagaggaccataaccggcaagctctccaagggcgccatctcggacctctccggcgtccaggccaagaaactcttcctctgggtctacgtcacggggatggtcgcgcaccccgaccagggcaccatcgagttccaggccggcttcatctcggagtcgctatcggcctcgatgtttgacgaggtgcccacctgcggttccagcgttggcgcgcagctgcgcggcgcggctggggtgatcggcgagcttgggctgctccccgttgcacaggcctgaacgtgggttggagagtccacatacagtcccagagaaccgcaggaccttaccgtctgctgtcgcgtgtcgcctgagccctagacagccgtggtgtgttctgcttctgcctgtacgtaccagtgtctggttgttgctcccggtgtcaaatggacatggatgatctgtagaaatgtatgtctataatatgctgttactgaacatgcgtaggatgtaggcaaattaggccttcctcagtctcttgtagtcccggactatcgtgtcatcgtgtgtggcaccatgaacttcccaacaactagctagagtgcccgccttatggtttctgatgatgcaggctatgccgtttttcttcttcttttctgacactgcaaaaacttcgtcgcatctgaaatggaggataatggctgactac

SEQ ID NO: 125990 - DNA, 1899 bp, Zea Mays
atggagagccgaggacggcggctgcggagccccgagcgccagaggccggcgtcgcggaaggtgccggtggtgtactacctcacccggagccgccacctcgagcacccgcacttcgtcgaggtgccgctggcctcgccggagcggctctatctcagagatgtcatcaaccacctcaacgtggtgcgcggcaagggcatggcggcgatgtactcgtggtcctgcaagagttttcttgaggtgatttttattggcgaactttttgggtggttgtttgttcccgtgttgatcggccggtcgaagggttgcaggagctacaagaacgggttcgtgtggcacgacctcgcggaggatgacctcgtcgtcccggcaaccgacggcgagtacgtgctcaagggctccgagctcgtcgaccagtcctcttcaggtccgttttaccctgtcactgtcagtaacggcagccagaagcaacagagcaggccgaaagagggcgcacggcaggcattgccaagagaccattcccacccgtcctgccctcccagtagcgtgacagttagagaagccaaggcccggcggtcaccttgtgtgcctccacaagacgaggacgacgacaccacctctccgcgccgggatcgctccttggagaccatgccgcagcaggagctggagccccagcagaggaacgagagggctcagccgccagccagcgggtctgcgagcccagtggagttcagagttcacaagcagcacgccggttgcatggacgctgcgactcaaaccgatgatcttggtcgcagaacacccgagctgcgcaagaagagtctgaggagcacagaccatgacgccgtcgttcgtgaagtcacagagtgctggcagaggcagagccatccttgcaggtcagcagacctcccaggggtgtccagggaagaactcctgcaccagtctactactccaccgagcacaccgtcgacccgtggcaagtccgcgagcttagagtcgctgatacgagcggacaacgcgacgagcagcttcaggatccttgaggaggaggaggaagaggaggaggaggaggaggaggaggaggaggaggatatcgtcgtgctcagtgcctgcccgaagctgaagccggcgaacgtgctggtgcagctcatcagttgcggctcgctttcggtgaaaggccacgaagacgccgccggacctgttcgggcatacaagcctaggctcccaagcatgaagctcccctccccgtttgtttctcgcgccatggcgatgggcgagcttgactacctgtcagagaaccccagcaggttggtgggagtgaggatggaggagaaggaatacttcagtgggagccttgttgagacgaagacgcaacgagatggtacggctgagaggtactcggcgctcaaacggtcttcttcctacaatgcagaaagagaaagggccagcgacgctctggattgcacaagacgtgaagagggtgaaacagacgacagatcgtcgtcgcgcgcgaggtgcctcccgcggacgccgatgatcctggcatccttcctgcacccgaggggcgacccgctcaagtctcccgtatcggactgccgccggaactcctcggcccgccggcaggactgcgacgcggcctccggcgacggcgggagcaggagtggactaagccaggcggcggtctcgtccgatccttctcgtattgagggctgtgctctgaacccttggtgttctcgtattgagggctgtgctctgaacccttggtgcaggctgtcgtccggagcccgcgtcgtgatccactgcaccatcgcttgcaacgacagcgacgaaggctctgaacgctcagggtcaggggagtcacgatggctgcagggagatcatgctgctgctttggaaaattag

SEQ ID NO: 125991 - DNA, 1312 bp, Zea Mays
cgaggatcacacacactgacacacacacacacacacttccttcagcgcgcgcactactacctgtcagttagtcagtcagtcactcactcgctcgcttcctcagttcgttcctctcgagaaccatatcccttttaattcgcatattctccctgcgtcgaacagcgcctttgcatgcgtctccgatcccttccacaccggcgctagcgctacggagagatagcatcagctattcagctggcagcaacagaagggacgagcgagctaattagcttatactagaaggtagtgtgcgatcactgatcagtgacccaccacctgaacagaagacagaagcagcagagcaccaatggccggcaggctgcatgcctgcttgctcatctgcacggtgctctcgtcagcggccataatggcgagctgtaccaggcctgcagcagggactgttggcggcgctgctcctgttgccgcaacaacgccggctacgtcgtccgctggcagtggagttaggccgccggccccgccgccgccggcgacgcttgctacgaccgctggaactaataaggcgcctccggcggtgcagcagcagcagtcccccctagacagcaagcggaaggtgcccaacggacccgatcctattcataacaggagagccagatggggggaagcaccgtccaagagagtgtagcagggtggcgacgacgccgacgcagcagtgtactccttcctatacagaaggctaaagagcgagcgagcgagagcgaccacgttgatgcgtggcgtggaataatggaacggaagttccgtttccatataggtcccgtcccgctcttttgctagctgatgcatgcgctgatgagctgctatagccatggacaaccatgcatgcatggtggtgggtggtgctgctgctcatgacgacgacgatggtcgatgacgtctcgacgacgacgacgtttgagtgaagacacttatatagttatatacatgtacgcatgtattagagaggggtgagagaaagcagcaggatgcatgcacggtacggtggccttcactttggcggccaaagcggtcggtctggatcttccgatatcgatctctacgacgagcgaggtctttgatgttcttctctttctctttttccttttttttttattctttgggagtgttgacggtgttaaaaggagcactcgaatagagagagtacggaggaaagctcacacgatgctagctagctcgaacattgattgatgatgaaacgaagtatagtgtagtatgaatttaatttggcacaggttttgattttgtttagcagttt

SEQ ID NO: 125992 - DNA, 905 bp, Zea Mays
tgatagatacggcatgcatgaaagaaacaacaaatgattgcacaacgagtacagatcgaccatgcagtgtgtatatctagctagtacgtactcctacttggcaatcgcatgcatgcatgcatgcatatatgggtcccatcatcgaacactgacctcgctagctccgttcggttcaccgccggtgtgcgcccttgcattgctaacccatcattcacttttgcgtcgttgttttcaggagagccagatggggggaagcaccgtccaagagagtgtagcagggtggcgacgacgccgacgcagcagtgtactccttcctatacagaaggctaaagagcgagcgagcgagagcgaccacgttgatgcgtggcgtggaataatggaacggaagttccgtttccatataggtcccgtcccgctcttttgctagctgatgcatgcgctgatgagctgctatagccatggacaaccatgcatgcatggtggtgggtggtgctgctgctcatgacgacgacgatggtcgatgacgtctcgacgacgacgacgtttgagtgaagacacttatatagttatatacatgtacgcatgtattagagaggggtgagagaaagcagcaggatgcatgcacggtacggtggccttcactttggcggccaaagcggtcggtctggatcttccgatatcgatctctacgacgagcgaggtctttgatgttcttctctttctctttttccttttttttttattctttgggagtgttgacggtgttaaaaggagcactcgaatagagagagtacggaggaaagctcacacgatgctagctagctcgaacattgattgatgatgaaacgaagtatagtgtagtatgaatttaatttggcacaggttttgattttgtttagcagttt

SEQ ID NO: 125993 - DNA, 780 bp, Zea Mays
cagataccgaaccgagaccgagagtgcaaaccttccttccaccttccaattccagtagtcccacgcacaaactttccccagctgcctgcgcccgcccaactaccccgcgcgcggcagccggcagcaggtcgtgccatggacgacgacgccacggtcggatcgcggcagcgccagcagcagccggcctcgccggcggcggctgattccagggccatgatggcggagctggacgcgccgctgcacgccctcgggttcgagatggaggagctctccccgtcgcggctcaccggccgcctccccatcactcccatctgctgccagccgttcaaggtgctgcacggcggcgtgtcggcgctggtggcggaggcgctggcgagcatgggcgcgcacatggcgtcggggtaccgccgcgtcgccggcgtgcagctcagcatcaaccacttccgcagcgccgccctcggcgacaccgtcctcgcgcaggccgtccccgtccacgtcggacgctccacacaggtttgggaggtgaagctctggaagatggatccgtccacaggagcgaagggacctcagatcgccgaatccagagtcacgctgctgtctaacctgccgttgccggaggagcacaagagggcaggagacgctctgaagaaatattcatcaaaactgtagagaagaaacttcatgctcatgaaagcccttgcatcttgcaggtttcacggatctgatggatgttgtaattaaaaagcattgcctataataaatatttcttatttaccacca

SEQ ID NO: 125994 - DNA, 3200 bp, Zea Mays
cagataccgaaccgagaccgagagtgcaaaccttccttccaccttccaattccagtagtcccacgcacaaactttccccagctgcctgcgcccgcccaactaccccgcgcgcggcagccggcagcaggtcgtgccatggacgacgacgccacggtcggatcgcggcagcgccagcagcagccggcctcgccggcggcggctgattccagggccatgatggcggagctggacgcgccgctgcacgccctcgggttcgagatggaggagctctccccgtcgcggctcaccggccgcctccccatcactcccatctgctgccagccgttcaaggtgctgcacggcggcgtgtcggcgctggtggcggaggcgctggcgagcatgggcgcgcacatggcgtcggggtaccgccgcgtcgccggcgtgcagctcagcatcaaccacttccgcagcgccgccctcggcgacaccgtcctcgcgcaggccgtccccgtccacgtcggacgctccacacaggtgcgctgcccttggtttttcccttccacggtctatgattgcatcgtcctcgacctcgtcccctttacgaccatcgccagccatctcctcgaccacgcctccgcacgacgatcggcgaacaagctatctggtcaacgacgaccgctagccggctagccctgagtgggtttggtgcgttgaggccttagcatttattaacccatgatcaatctatatttagctcttttagaccttgcttgattattcccacgacagtatgaattggaagggattcggaataattttgatttgctagaaatttaaactctctcaatcttctctaattcattctaatttatatgtgttgagattgaggccctatttagacgcaatcagtttttaagaatccagtttctatctctagtttctagaaatcggtttataaagaaagaaaaaactggtttaggccttgttcgtttgtatcggattgctcccgaaatcgttccagctaatcaaagtttatataaattagagaagcaatccgggtagtaaacgttccgctccaccaatccggcacaaacgaacaagaccttatagtgtttggaaccggctcagtttttataaactagttttatctaggaggcgctagttttttggtttttaaaaaactaaaaattttcataaaccagtttctgtgttttcaaacaggccttaaaacgacacgtaacatgtaaaacgcggaactaatttatctcccgtccttccagcaacaatgcgaccgcaactgaacgtgcacacggcgagcccatcccatgcactggtgtacaggcagtagcggttagctgatctgtttgtgcgtgacgggacgcagcaccaaccaaccgggggctccgagaagatgcatggtccaccacgccaccccggcactaggccattgcccattggcatttggcaaggtctataatgtccgtcactaccagcgacccctcctaggcctagtagcagcaactagcaagctgcttcgtccctccccttgtggcccaggacatggctacgagaacgaactagatggcagccgcggtcccagccattcattcaatccggagtcgagtagcaatgcgccagagcgtcggtgacctggaccatctatttcatttcgggcactatcaggttgattggttgggtggccgagcgtggcctgagcggtgtgagcatggctcactggaaacgtaacaatcatacgtacctgcgcatgcaggctggagagctgattttagcaaacgctgcagctgcgggtgcagccttaacgtcgcatgcgtaggcaagcaaacaggagcggtcccttggtcaatacaactagagagtctggatggatatgtgcagccaaccaatcacaatctatctaaatgcaccaatgcaagaaattcctagcgatcgatccggttatcgtgaaccggctggaaattcggcgtccgtgacaggtaaactgagaggacaaaggagcagtgagctgtctgtctgcggaaccaagccaccaattccgatctgagcatcggtccgtcaggctcaggcccctctggcctccacaccaagtcccagccacccaacccagctacccgtctaccccgcggcgggtgacgctgacgccacggcaacggcacccggctccggcgtgatgctatctccaacaacttgtactcactaacgctgaaacatgttccttccggtcttacggaaagaacatagactccacacgattgcactaagactgtcttcagcttcagcacttcatccatatgatcatccaaaacagtgttttgcactataaattgtattattctttattcatagagtacaatcataagttggctagcataaaaaggatagatagttgaggcttggcatatccgaatcttctcagacagtaacagacaagcttgcccagatggatccttctttctatactctgcaggcctacatagtagtgactcatctctagtttagtgtcctcgaaccgaacaagaaacagtgatgatggctgcggcggctagctaacgaggtggaaccaccgtcccatctttaaaaactagaatgagaccatcctaacttacttagattcccaaaccaaacgttacctaaaagtaaaactatatgatgtgatttttttgcagaccttaaattcatttttatccatgtttttgttgttgttggagttctgctgttcaatttgttgatgctaatatggtcagttaccgcaactcgctccttctctttgaggaccctttctgaaacaaaaaattcgattggaaggtttgggaggtgaagctctggaagatggatccgtccacaggagcgaagggacctcagatcgccgaatccagagtcacgctgctgtctaacctgccgttgccggaggagcacaagagggcaggagacgctctgaagaaatattcatcaaaactgtagagaagaaacttcatgctcatgaaagcccttgcatcttgcaggtttcacggatctgatggatgttgtaattaaaaagcattgcctataataaatatttcttatttaccaccagtttcttctgtacgcctgtaccatgtgtcccgttgagccttcatcacactaaacaaacaaagaaacagaagacctttcctgttgaaaataacgtcaggagcaagagcaagaggcgtgaggctggcactatt

SEQ ID NO: 125995 - DNA, 2189 bp, Zea Mays
gctcttctcattactgacaggcgccagagagagagagagagagaccacaactcctctcgcctcgcctcgcctcgcctcccccggggaagaagaggaggagagggagctgagcagcagccggccgacgcgggaatgctcgtcggcggcgggcgggacgacgaggaggtgctccggaagctcaagagcatggacgtggacaagatggagaacggcggcggcggcggtgaggcggagagcccgcgccccgccgtcaagtaccacggctggaaggccatgcccttcatcatcgggaacgagacgttcgagaagctggggacgctgggcacgtcggccaacctgctggtgtacctgacgcaggtgttccacatgcggagcgtggacgcggccacgctgctcaacgggctcaacggcaccaccagcctcgcccccatcgtcggcgccttcctctccgacgcctacctcggccgctacctcgcgctcgccatcgcttccatagcctccctcatcggcatgttcctgctgacgcttacggccggcgcggacagccttcacccgccggagtgcagcgtgggggagacctgcgagaaggcaacgtcgtaccagttcgcggtgctcttcgtcgccttcgcgttcctggtgctgggctcggcggggatccgcccctgcagcatgcccttcggcgccgaccagttcgacccccacacggagtccggcaagcgcggcatcaacagcttcttcaactggtactacttcacgttcacggcggccatgatgatctccgccaccgtcatcatctacgtgcagagcaacgtgagctggcccatcgggctgggcatccccacggcgctcatgttcctggcctgcgtgctcttcttcatgggcacgcgcctctacgtgcgggtgaagcccgaggggagccccttcaccagcgtcgtgcaggtgctgtcggccgcgctcaagaagcggtcgctgaagcagcccaaggacccgaagcaggacctcttcgacccgccgcacaccagcgccatcgtcacccagctcgcgcacacggaccagttccgctgcctcgacaaggcggccatcgtggcgtcccaggacgagttgcgccccggcggcgccgcgcccgcggacccctggaggctctgcagcgtgcagcaggtggaggaggtcaagtgcctcatccgcatcgtgcccgtctggtccacggggatcatctactacgtcgccgtggtgcagcagtccacgtacgtggtgctctcggcgctgcagtccgaccgccacctcggcggcgccggcttccagatccccgccgcgtccttcaccgtcttcgccatgctcgcgcagacgctgtggatcccgttctacgaccgcctcctgctgcccaagctccggaagataaccggcaaggaagaggggttcacgctgctccagcgccagggcatcggcatcgcgctctccaccgtcgccatggtcatctctgccatcgtcgaggaccggcgccgtgccatcgcgctcagccagccgacgctcggaaccaccatcaccggcggggccatctcggccatgtccagcctgtggatggtgccgcagctcatgatcctgggcctatcggaggcattcaacctcatcagccagattgagttctactacaaggagatcccggagcacatgcggagcgtggcgggggcgctcgcattctgcaacctggcactcggcaactacctcagtggcttcctggtgaccatcgtgcaccggaccacggggtccgggcagaactggctggcgcaggacctcaacaagggccgcctcgacctcttctactggaccatcgcaggcatcggcgtctttaatctcatctacttcgtcatctgcgccaggtggtacaggttcaagggaaccagcaactgatccgccgaggtgaccatatatcgtctctctcatggttggacaggttggtggggttggataattatgttatggcctctctcttttttgtttattactttatacctttgttactggtcctttcatttgaatctataggatgatcaagtggctgatgaaagaggagaaagaaacaaaatagttggttttttgtaatttgtaagtggttaaactgaaatacaaatggatgtaagcttgaatgaaagtttagcacagttaccgaccagcttatgattacaagcatt

SEQ ID NO: 125996 - DNA, 1327 bp, Zea Mays
tacctgtttgtgtccttagggtttagggttctctgctcattcgttcgccacctcgccccaagacgtctcgctagggtttcgccacagccgccgccatgcctcgccgcaagcttaggaaggtccgcggctcacgcccggctccacatgctgctccagtgaggaacccaccacagcctggtaaagtgattcacgcagacaataagtatctttagaactgacattggcatggtaatcatgcctcttttgactctgcagtattctattgtggacatgtgtttcaattatgtaactttagttatatttttgtataactgtttgctcagttgttgagaatgtgttcggtttgttactataacaatgttgatgacataaatatactgttaagtttatattggaatttgtggtacaagtctgaagttgttgattgtgtttgaagcagagtcaatggcatttcggtttatatagagaattacagttccttgttttttggtagaactggaacctgtttcagttctgttcctaatgcttacacatgggtttgtgctacaagtatagtattagtattacagagctcattgttttggaatcttgattgctttggaatcagaatcgtttatgtttagctcatattagtattagtattacagctcattgtgtttatataggagttttaatctgttctatttctgttcctaagtgtcttctgacttttctttttggcagcgcgctaggctcgtcctccagctcctgttcgtgatggtggtggtggctccattcttggaggaattgggtccaccattgcttaaggtatgccatttggtacgagtagtgccatggcacacagggctgttgatgctgtaatgggtctccggactgttcggcatgagattgttatctcagaagctgctgctgctgcccctcctgctccagtgatgaacgctaatgcttgcagcatccattctaaggctttccaagattgtcttaacaactatggcagtgagatcagcaagtgccagttctaccttgacatgttgaacgagtgccgccgtggtgttgtctgcctgagcttttgctccaattgggattattcatggattctcttttcactcccatgtatctcattaataagacaccgtgaaacttttaaccctctccacgaatgcaccatggcatcacgggttcatcttgttgaatctgtggttacgttctctttatcctgtgttgttggaacagacttctgtctcttctggtgatcataaatatttaaatgaaccagttgtgttggaaaatgttgttttcttttgtctctagactggaaagcggagtt

SEQ ID NO: 125997 - DNA, 781 bp, Zea Mays
tacctgtttgtgtccttagggtttagggttctctgctcattcgttcgccacctcgccccaagacgtctcgctagggtttcgccacagccgccgccatgcctcgccgcaagcttaggaaggtccgcggctcacgcccggctccacatgctgctccagtgaggaacccaccacagcctgcgcgctaggctcgtcctccagctcctgttcgtgatggtggtggtggctccattcttggaggaattgggtccaccattgcttaaggtatgccatttggtacgagtagtgccatggcacacagggctgttgatgctgtaatgggtctccggactgttcggcatgagattgttatctcagaagctgctgctgctgcccctcctgctccagtgatgaacgctaatgcttgcagcatccattctaaggctttccaagattgtcttaacaactatggcagtgagatcagcaagtgccagttctaccttgacatgttgaacgagtgccgccgtggtgttgtctgcctgagcttttgctccaattgggattattcatggattctcttttcactcccatgtatctcattaataagacaccgtgaaacttttaaccctctccacgaatgcaccatggcatcacgggttcatcttgttgaatctgtggttacgttctctttatcctgtgttgttggaacagacttctgtctcttctggtgatcataaatatttaaatgaaccagttgtgttggaaaatgttgttttcttttgtctctagactggaaagcggagtt

SEQ ID NO: 125998 - DNA, 719 bp, Zea Mays
tacctgtttgtgtccttagggtttagggttctctgctcattcgttcgccacctcgccccaagacgtctcgctagggtttcgccacagccgccgccatgcctcgccgcaagcttagcgcgctaggctcgtcctccagctcctgttcgtgatggtggtggtggctccattcttggaggaattgggtccaccattgcttaaggtatgccatttggtacgagtagtgccatggcacacagggctgttgatgctgtaatgggtctccggactgttcggcatgagattgttatctcagaagctgctgctgctgcccctcctgctccagtgatgaacgctaatgcttgcagcatccattctaaggctttccaagattgtcttaacaactatggcagtgagatcagcaagtgccagttctaccttgacatgttgaacgagtgccgccgtggtgttgtctgcctgagcttttgctccaattgggattattcatggattctcttttcactcccatgtatctcattaataagacaccgtgaaacttttaaccctctccacgaatgcaccatggcatcacgggttcatcttgttgaatctgtggttacgttctctttatcctgtgttgttggaacagacttctgtctcttctggtgatcataaatatttaaatgaaccagttgtgttggaaaatgttgttttcttttgtctctagactggaaagcggagtt

SEQ ID NO: 125999 - DNA, 945 bp, Zea Mays
ctaactggactacaagtaacaaataatgtgcctcttgtctttattcatcccttcttagattgattcctacagttaactgctattttcatcatttttgctggtggaagatgtggttgagcttgctttacagtattttggttttgttagcttgtgttgcatctctctctctacatttattatgtgttgatttttgagttaaaactttgtttatgataaaccatgttgctttctttggttaattttttttgcttaatgcttattcccccactgtactgtcaggaaggtccgcggctcacgcccggctccacatgctgctccagtgaggaacccaccacagcctgcgcgctaggctcgtcctccagctcctgttcgtgatggtggtggtggctccattcttggaggaattgggtccaccattgcttaaggtatgccatttggtacgagtagtgccatggcacacagggctgttgatgctgtaatgggtctccggactgttcggcatgagattgttatctcagaagctgctgctgctgcccctcctgctccagtgatgaacgctaatgcttgcagcatccattctaaggctttccaagattgtcttaacaactatggcagtgagatcagcaagtgccagttctaccttgacatgttgaacgagtgccgccgtggtgttgtctgcctgagcttttgctccaattgggattattcatggattctcttttcactcccatgtatctcattaataagacaccgtgaaacttttaaccctctccacgaatgcaccatggcatcacgggttcatcttgttgaatctgtggttacgttctctttatcctgtgttgttggaacagacttctgtctcttctggtgatcataaatatttaaatgaaccagttgtgttggaaaatgttgttttcttttgtctctagactggaaagcggagtt

SEQ ID NO: 126000 - DNA, 1354 bp, Zea Mays
agaacagctgcgactctccagtctccacgccaccgaactccgaagaggccacctcccctcatggcctcatcacatcacagcgcctcctcaccttgtctgtcctcttcctctcgccccttatcttactcgtttacgtttcttctcgtggggagagagaaacagcagggctagattagataccacagagagagagagagagagagagagagagagagggagggagggtggagaggatggcttcgctgcagagccagagcctgctcggcattggcagcagcagcatcgtcttggcacgagcgagggtgcagcagtgtctggcagcggcgtctcgctcacacgcgcccctcctgcaggccaatggaggcaggacgggcctcccctcctcctcgatccttaacgctggcaatgcgatcagcttcagccggcggagaaggaaggacctgcgcgtcgtcgcggaggcggccgcggcggggccgaccaaggtcacgccggcctcgtctggcggcgtcagcatcagcgacgtgctctggccttccgccggagcattcttggccatggcggtacttgggaaaatggaccaggtggtggcgttcaagggagtatccttgacgattccgcccctgggagcagtctgctgcgtgcttttcagcgctccagactcgcctgcagccaagaaatataatatgttcgtcgcccagatcggttgtgcggctttgggcgtattagccctctcgttgtttgggcctggctggttagcaagaggtgcagccctttcagcctgtatagcattcatgaccatcacgggtgcctcacatcctccagctgcaagcttgcccctcctatttatcgatggcccgaagtttcacagtttgcaactttggtacgcgcttttccctggagctgtaggttgcatcgtcctttgcttgattcaagaggtggtggtttacctgaagaagaacatcaaattttgactcaagtatcttgactctatggattcttgtggcaatgattctattaattattcaatcatgtaccataaattacattgccaacatttgccaagcatgttcggttgtcctgcagctgtaatccatagagataaaatattgtaaaatacacaaccacagtcggattaaagtcgcagcaagccgtagcgaacatggggaaagttgtgaaaatgaaggcctcctatctcttgtattagttaaagaagaaagaggactttccttgataccttgtgctcgtcaaaatgcagaggacacaaatgtgtatataccattatctctgtcactgtggacgcattaacccttagtgatgttttggtaattaatgacaaatatttgtggactaacaa

SEQ ID NO: 126001 - DNA, 3978 bp, Zea Mays
acgcgtccgtgatccgtccgtcgccctccccttcctgcgcaagcgtgcgcctacctgcatccgctatccgtcggcgatgtcggtgccccccgccggcaagcgccaggtgtccctgcggggctcgagcgcgaaggagatcacacgcgacgcgctgctgcagaaggtttccgaggagcgccagctccgcagccacctccgccgcgccgccgcggccgccttctccatccagcgaatatggagaaggtaccatgtgataagaatggtttcagaacagctccatgaagactgggaactattaatgaaccagcctaacatcgacttgactactcaatggatatccaaaaagatgcttagaccgtttcttttcttcattactcaaccttctagctggtatattggacaatggagcaagactgtggaatctatcttaacatgcttcaagattatcttgaatagtataaattcaatggatgcaaggaaaaacttctgctcctttgctgtgggtataccagaagagagatctatttggctttatcaggccaaaaagctgatttcactgtgctcttccattcttgccaggtacgaccattcctgttgcaaggatggaagcatagtcgacatgactgctattgctatgagattggctgtctctctaactgattgcaaaacatggaaaagtttgaacagtgagaacactagcgctgcagatgcttctgtacagagtttgattgaatttattggtacgtgccagagtggcatgtataattgtgttaggcaatatataaagtctcttggtcctcatgttacttcagcgaagaaaagttctgcaactgcaacagatgatgattttcttattactgctagtgcagtcactttagccttgcgcccattcgattctaagaaagcaaagggcggtgttgatctgaatggtgcttcaaagaaatacttcacacttatacttacaataccagatctgtgcaaacgcatgccacctcttttgttacctgctcttaaacatttttctgtgctgcaaccgagtctcaatattttactgatctccaaggataaaatatttgaagaaataataaaactggaacagtcagaggtttcagctagtattattccttgttctggttgggctcttggaaatatagtgaacttagctaccaatcatgatgacttatccaattcagggtgtttcattcaagagttagatttctgcttatatgttgatgttattaattgtatttctgaaaacttactggaaagttttgagaaaagcaagggaacgtctcaaaatgttggtaatatcactttccatgccgacacatctgttgcagaggaagaggataccaatgacgactgcagaatgagaacattatttatggaccttctgaagccaatttaccagcaatggcaccttagaaaacttttgatgttggcaaaagaggattttccatgccgcagggcaactgattatgatccaaacttgaagaatattcactttcgaatcctaaagttgtcagatgttatatgcttctactatcacatgcttagaattttctcatcacttaacccttctatcggtgcaatgcctattctcaacatgcttgcattctcacctggatttctagttgatttatgggaggcactagaaatgcccatttttggtccacctatccagaattcacaagaaacaggacacgagaaacagttggctacaagtagttcaggtgtgcaagtatcctccatgaggcaaagaaggaatgccaaggacacagcaaacaggtggtcaaatgtgctccagaagattactggaaaatccaatgattcagaggagggcactttatctgatagtattttattttctcatgagtctaatgatgatgcattaacttcatgggatattgaagccatgagacatgcatctgagggtattggaaaggacttaatgtgcattatgtatcttttctgtgctatatatggacacctattacttgtgctagatgatatcgagttttatgaaaagcaggttccttttactttagagcagcagcggaagattgcatcagcacttaatacatttgtatacaattctttcattcaaaatagtggaagctacagcaatcctcttgtggatgtagctgtcagatgtcttaatctactctatgaaagggacagtaggcataagttttgtcctatttccttgtggttggcacctgctagaaatggccgaattccaattgctgctgctgccaggtctcatgaggcagcatttggtatttttccagggattcctcatcggagctctgtacttaccacattaccacatgtatatccatttgaagagagagtgcaaatgtttagagaatttattgagtcagacaaagcatcgagaagggttactggtgaagtttctgggccaggcccgggatcgattgagatagttattcgtcgaggccatataattgatgatggatacaggcagttgaactgcctaagatcaaagttgaaatcttgcattcacgtgtcatttgtgagtgaatgcggtcttcctgaagctggtttggactatggtggtctgtcaaaagagttcctaacagatctctcaaagtccgcttttagtccagagtatggactattttcacaaacatcagcatctgatactagcttaattcccagcaattctgctaagcttctggataacggaattgatatgattgaatttcttggtcgagttgtcggcaaagcactctatgaggggattctgttggactattctttctcaccagtatttgtgcagaaacttcttggacggtataattttctggatgaactatcaactcttgatcccgagctttatagaaatcttatgcaactaaagcactatgatggagatgttgaggatctatttttggattttactgtaactgaagagttgggtggtaaaagaatcgtccatgagcttagacctggtggtaaaaatatatcagtgacgaacgaaaacaagttacactatgttcatgcaatggcagatttcaaacttaaccgacagatacttccatttgcaaacgcattttatagaggactcagcgatctcatttcaccatattggctgagcctgtttaatgcaaatgaatttaatcagttactttcaggcggactacaggattttgacgttgatgatttgcggaacaacaccaagtatactggtggttatactgagtcaagtcgaactgttaaactcttctgggaggtcatcaaagcatttaagccaacagagcgttgtttgctcttaaagtttgtgacaagctgttcacgagctccactgcttggattcaagtacttgcaaccttctttcacaattcataaggttccatgtgatgtaacactttgggcatcaattggaggccaagatgtagatcgtcttccatctgcttccacatgctacaatacgctcaagcttcctacatacaagcggtcaagcacgctaaggagcaagctgctttacgccataagctcaaatactggatttgaactctcgtagaggtatattcagtggttttgtaaccctgctttggttttgctgtgaatagaggtatagcaaaattcgatcggatgtacaattgcatcttgattaatcggagtaacagcttctatgaaggtagcgcaatgcataaaaaatgtttgtttggccggcggggccgtttggatcgatcccaggcaaaatccgacgcctggggagctccgttcaccaggccggtttgcaattcaaacagccatacgtgtgtttctattgattgtgctgagagagagagagagagagagagagagagagagggaggggggagggagagggagatagagagagagtgagggaggagagagagagagagagagagagagagagagagagagagagagagagagagagagaaagagagagagagagagagagagagagagagagagagagag

SEQ ID NO: 126002 - DNA, 3611 bp, Zea Mays
atgtcgacgcgcgacggcggaggcggccggcgtggcggcaatgcagcagcaggccgtggaggtgacggccaagggcggggccgtggagggggcggccgaggtggcgccggcggccgtggcggtggcggccaatggcgggcccaaggcggcgcggagcttggcggtggccgaggtggagccgtcggcgcagcgcgtggcggccgcggaggtgtcgagagagggggtcaccagtccttccacggcgccaggccggtcggtggggaccgaggcggacgcggacactaccaccatggcgtgcctgctcaggtccagccgcagtggcaagtggccgcgccgccttcgacgtcgaggccgacacccgcggaagtcgaggagctgagaggcgaggtggagaggaaggcggcggtggcggtgccagacgcagaggcgcacgaggggccgtcgtcgggcaccgcgcatgagccttccgccgcgccggcgcgggtcgaagcggagcaagggacgtcgctggtggtggaggcagaccaggccgctcaggggaggctgcctccgtcgtcgagcaaggcgctggttttccccgcgcggccggggtacggcacgctcggccggaggtgccgcgtgcgcgccaaccatttcttcgttcaggtggcggacaaggagatctaccactacgacgtcgtgattagtccagaatcgcagtcaaggaaaagaaatcgttggattcttaacgaactcgttaaattgcacaagaattacttgaatgggcgactgcctgtttatgatggtagaaagggccttttcactgctggtccgctaccgttcaaaaccaaagaatttgttctggaactaaccaatcctgagagagcaaaccaggggtatggtgttgtattctgtttttcaagctcacgcttgttctttgtatgtgcttattcacgttgcattaatccttgccttactgcctgcagggcgaaagagtacagcgtgaccataaaagatgctgccaaattagatctttacagccttaggcagttcttggctggtaggcagagggaactgccacaggatactgtccaagccctcgatattgctatgcgagaatgcccaactgaaaagtatgtatccatctcaaggtcatttttctctcagtcatttggacatggtggtgatattggcagtggtgtggaatgctggagggggtactaccaaagtctacgtgctacacaaatgggattgtctttaaatattgatatttcagcaactgcattttacaaggctcaaccgattttggagtttgcattggagtacctcaacatacgtgacacctcaaggcgtttgtctgaccaggatcgcttaaaactgaagaaagtcctcaaaggagtacgtgttgtggcaacacatcgtcgtgatatagccatacattacaagattactgggataacctcacttcccttgaatagtttaacgtttaatcaagatggggcaagtgtttcagttgtccaatactttaaacaccaatataattacagtttgaaacacattcactggccatgccttcaatctggcaatgatagtaggccgacttatttaccaatggaggtttgcagtatacttggcggtcaacgctattctaggaagctaaatgagtaccaagtcacaagcatcctgaagaaggcatgtgagcgaccacctcaaagggagggcagcattttagaggtagttaataggaacgactatggtaatgatcattgtgccaaagaatttggtattaaggtgacaaatgaacttgccttggttgatgcacgggtgctgccagctccgacgcttaagtaccatgactctggacgagaaaaggtgtgtagtccttccgttggtcagtggaacatgaacaacaagagattgatcgatggagtatccattcagtattgggcttgtgtgacttttgcttctcggttgcatccaaatgatgtccgcatgttttgcaacaacttggttggggcgtgcaatgatatgggcatgcaaataaatgggagaccttgtgttgatgttgggcaagcacgcccagataacttagaagctgcactcagaaatactcatagacaatctgcacaaatgcttgcccaacaaggcgtgactagacagcttgatttactaattgttgtattaccagatgcaaatgcaagtgtcttttatggtaggataaagcgtctttgtgaaactgaacttggtttagtaactcaatgttgtcaaccaaagaatgtttttaaaggtggccgacaatatctccaaaacctggctcttaaaattaatgttaaggttggtggccgtaatacagttctcgaagatgctttaaataggagaatacatttgttaacagatttacctacaattatctttggagctgatgttacccacccagctccaggggaagatgcatccccgtctattgcagcggtctgtattttctcttttttcttgttctcaacttgtcagaactttgaagaaacaatttgttactttaccttgacttcttgttgcattggcatgtcctgtttgttggatagaggcctctgtgtgtttctggtttctaataagtcgtgtaaaagtttatgataggttgttgcatcaatggattggccacaagttgcaaagtacaggtgcttggtgtcttctcaaggtcatagggaagagatcataactgatcttttcacacaagtgaaggatccacaaaagggacttattaacggtggaatgatcagggaactactcgtgtcattctataaggcaaacgggagccgcaaaccaagcaggataattttctatcgagatggtgtcagtgaggggcagtttagccaggtcttgctttatgaagtggatgcaattcgaaaggcgtgtgccagcttggaagagggctaccttcctccaattacattcattgtggtgcaaaagcgccatcacacacggcttttccctgaagatcatcatgcacacggacagatggatcgaagtggaaacattttgccaggaactgttgttgacacgaagatatgccatccaagtgaattcgacttctacctttgtagccactctggcatacagggaacgagccggccagcacactaccatgttctgtttgacgaaaacaaattcactgccgatgcactgcaaacgttgacctacaaactgtgctacacgtatgcgcgatgcactcgatcagtctctatagttcccccggcgtactacgcacacctggcggccttccgtgcgcgccactacatggacgatgacctctccgaccaggggtcgtcttcagtggcgagttctcgcatgaaagatggcgctgttccggtgaagcagctgccgaaagtgatggagagcgtcaaacagttcatgttctactgctgaaggtggcctttgcaggaaggaccttcatcgacacttttgttgccatgaaatgaaacgagtaattctgggttggtgtaattatggtgaagtaaccctgaagggtgggccgcacgacctccaaatcatattttgggtctggcgagtcttctatccaaaactcgtcagaaaacgccttttatttttggtggacttcgtataagtccaaggca

SEQ ID NO: 126003 - DNA, 2030 bp, Zea Mays
ttttttaatggcacatgtttaaatattcatgtttgtttatataggtttaatcaagatggggcaagtgtttcagttgtccaatactttaaacaccaatataattacagtttgaaacacattcactggccatgccttcaatctggcaatgatagtaggccgacttatttaccaatggaggtttgcagtatacttggcggtcaacgctattctaggaagctaaatgagtaccaagtcacaagcatcctgaagaaggcatgtgagcgaccacctcaaagggagggcagcattttagaggtagttaataggaacgactatggtaatgatcattgtgccaaagaatttggtattaaggtgacaaatgaacttgccttggttgatgcacgggtgctgccagctccgacgcttaagtaccatgactctggacgagaaaaggtgtgtagtccttccgttggtcagtggaacatgaacaacaagagattgatcgatggagtatccattcagtattgggcttgtgtgacttttgcttctcggttgcatccaaatgatgtccgcatgttttgcaacaacttggttggggcgtgcaatgatatgggcatgcaaataaatgggagaccttgtgttgatgttgggcaagcacgcccagataacttagaagctgcactcagaaatactcatagacaatctgcacaaatgcttgcccaacaaggcgtgactagacagcttgatttactaattgttgtattaccagatgcaaatgcaagtgtcttttatggtaggataaagcgtctttgtgaaactgaacttggtttagtaactcaatgttgtcaaccaaagaatgtttttaaaggtggccgacaatatctccaaaacctggctcttaaaattaatgttaaggttggtggccgtaatacagttctcgaagatgctttaaataggagaatacatttgttaacagatttacctacaattatctttggagctgatgttacccacccagctccaggggaagatgcatccccgtctattgcagcggttgttgcatcaatggattggccacaagttgcaaagtacaggtgcttggtgtcttctcaaggtcatagggaagagatcataactgatcttttcacacaagtgaaggatccacaaaagggacttattaacggtggaatgatcagggaactactcgtgtcattctataaggcaaacgggagccgcaaaccaagcaggataattttctatcgagatggtgtcagtgaggggcagtttagccaggtcttgctttatgaagtggatgcaattcgaaaggcgtgtgccagcttggaagagggctaccttcctccaattacattcattgtggtgcaaaagcgccatcacacacggcttttccctgaagatcatcatgcacacggacagatggatcgaagtggaaacattttgccaggaactgttgttgacacgaagatatgccatccaagtgaattcgacttctacctttgtagccactctggcatacagggaacgagccggccagcacactaccatgttctgtttgacgaaaacaaattcactgccgatgcactgcaaacgttgacctacaaactgtgctacacgtatgcgcgatgcactcgatcagtctctatagttcccccggcgtactacgcacacctggcggccttccgtgcgcgccactacatggacgatgacctctccgaccaggggtcgtcttcagtggcgagttctcgcatgaaagatggcgctgttccggtgaagcagctgccgaaagtgatggagagcgtcaaacagttcatgttctactgctgaaggtggcctttgcaggaaggaccttcatcgacacttttgttgccatgaaatgaaacgagtaattctgggttggtgtaattatggtgaagtaaccctgaagggtgggccgcacgacctccaaatcatattttgggtctggcgagtcttctatccaaaactcgtcagaaaacgccttttatttttggtggacttcgtataagtccaaggca

SEQ ID NO: 126004 - DNA, 2172 bp, Zea Mays
ttttttaatggcacatgtttaaatattcatgtttgtttatataggtttaatcaagatggggcaagtgtttcagttgtccaatactttaaacaccaatataattacagtttgaaacacattcactggccatgccttcaatctggcaatgatagtaggccgacttatttaccaatggaggtttgcagtatacttggcggtcaacgctattctaggaagctaaatgagtaccaagtcacaagcatcctgaagaaggcatgtgagcgaccacctcaaagggagggcagcattttagaggtagttaataggaacgactatggtaatgatcattgtgccaaagaatttggtattaaggtgacaaatgaacttgccttggttgatgcacgggtgctgccagctccgacgcttaagtaccatgactctggacgagaaaaggtgtgtagtccttccgttggtcagtggaacatgaacaacaagagattgatcgatggagtatccattcagtattgggcttgtgtgacttttgcttctcggttgcatccaaatgatgtccgcatgttttgcaacaacttggttggggcgtgcaatgatatgggcatgcaaataaatgggagaccttgtgttgatgttgggcaagcacgcccagataacttagaagctgcactcagaaatactcatagacaatctgcacaaatgcttgcccaacaaggcgtgactagacagcttgatttactaattgttgtattaccagatgcaaatgcaagtgtcttttatggtaggataaagcgtctttgtgaaactgaacttggtttagtaactcaatgttgtcaaccaaagaatgtttttaaaggtggccgacaatatctccaaaacctggctcttaaaattaatgttaaggttggtggccgtaatacagttctcgaagatgctttaaataggagaatacatttgttaacagatttacctacaattatctttggagctgatgttacccacccagctccaggggaagatgcatccccgtctattgcagcggttgttgcatcaatggattggccacaagttgcaaagtacaggtgcttggtgtcttctcaaggtcatagggaagagatcataactgatcttttcacacaagtgaaggatccacaaaagggacttattaacggtggaatgatcaggcatgccgaacatcttagggaactactcgtgtcattctataaggcaaacgggagccgcaaaccaagcaggataattttctatcgagatggtgtcagtgaggggcagtttagccaggtcttgctttatgaagtggatgcaattcgaaaggcgtgtgccagcttggaagagggctaccttcctccaattacattcattgtggtgcaaaagcgccatcacacacggcttttccctgaagatcatcatgcacacggacagatggatcgaagtggaaacattttgccaggaactgttgttgacacgaagatatgccatccaagtgaattcgacttctacctttgtagccactctggcatacagggaacgagccggccagcacactaccatgttctgtttgacgaaaacaaattcactgccgatgcactgcaaacgttgacctacaaactgtgctacacgtatgcgcgatgcactcgatcagtctctatagttcccccggcgtactacgcacacctggcggccttccgtgcgcgccactacatggacgatgacctctccgaccaggggtcgtcttcagtggcgagttctcgcatgaaagatggcgctgttccggtgaagcagctgccgaaagtgatggagagcgtcaaacagttcatgttctactgctgaaggtggcctttgcaggaaggaccttcatcgacacttttgttgccatgaaatgaaacgagtaattctgggttggtgtaattatggtgaagtaaccctgaagggtgggccgcacgacctccaaatcatattttgggtctggcgagtcttctatccaaaactcgtcagaaaacgccttttatttttggtggacttcgtataagtccaaggcattgcctgtgattttggggtttcttttaggttgcaaccttgttttgtttttgaaattttctgctttgaattgatgcattatatatgaagaaatgagcctctcacgctagctccagcaagtgaccc

SEQ ID NO: 126005 - DNA, 1965 bp, Zea Mays
gaaaagaaaaaatcgaaccaagccctgctagcggtgtccggtccggtgcccacctatttcctctcgcagcctcttctccccaaaccctaatcttgctcctgcctatctctgctccaatccgttggtcgagcggcggcgatggaggggaaggaggaaggtcggatcttcgtgggcggcctgtcgtggcaaacggacgagcgcaagcttcaggacgcctttggtcgcttcggcaaggtcgtcgatgttcagatcatgctggagagacacacataccgccacaggggctttggcttcgtgacattcgaagatcgaagggcagttgacagcgctatcaaagagatgcgtggccaagagttagatggtcgtaccatctcagtgaacaaggctgagcctaagatgaatacagatgacacaaggttcgacagtggcggtggacgaggagaatatcgaggtggtagaggtgatggtccaccccctggcaattgctatgagtgtggccgtcctggtcattgggtccgtgactgccctagtgctgctggtggtcgttctggcagattcccatccaagttcagtggtggtggcagaggagaccgcttttctggatcagataggtttaatgatcgttacatggatgatcgttatgatggtggtcgttatgggtaccgtgatcaagttgatgcaagggacaagtatggtgggggccgagatcgttatgccaatgatcgctaccccgctggtggcgatcactttgacggagacaggtatggaggtggcctggatcggtacgcaccgaatggttatgggagggaacgagaaagaagttacgagagagatggagttcgtggcggcggtggctatgataggagtggctcaagaggtggtggaagctatgacagggatggccctagaggcggcaagggtggtggctatgtcagggatggcccacgcggtggtgttgctgatcgttatggtggtggaggacctgcacgctatgatggtggaagttacagggagaggcctgggccatatgatcgccctagcaggggaggaggtcgttttgatgaacgccactgatgaactgcctctagactcgagcccctggtcttgtagtttagccttttgcagttctgcatagcttaatgtttaatgggctatggaagatgcctaatttacccccctctttggcacttcaatgtctgctctgtatttcaaccagtacttgggcgccgttgttgccttctcgataagtttatcaagctgactgtttttgcatgagacgggtcatcctttgggctactactctgcctgttggtccggatgtttcagttgtgcatgccgtgcgtcctgcagttatagtggagtcgaggttctcagtgattgtttgtcattgttgatctgaatatctggtatgcatggactgactatgttttcagtgattgcctgtcaccgttggtctgaatatctggtgaacatatatgctcagtgacggtgcttgtcaatgttgttggtctggatatttgggttcgcaaggatatatttgcagtgctgagatgcaagtgcttaaccgaactgtagccaaagtaaccctatgctagaagtaactggcaaccatgttgaattgttaatctcgttagttttttgtctggggtcttgaaaatgccctccagatctctcacgagaacgtgaacttcacctatcttctctatcgagctgcatcgccctctcttttggcgagcaggtctttggattcaccgtttgcttgtgtgatatctgcttagttgtgtggggatgatcaagtggttggaaagctttgctgtgactgttcgttgatcttctttctgccgctcattggatcggaggaccgtcttgtttttgtgtgaatgttcgaggaacgacactgttaacaactgacctttttatgttgacaaattacagagttgttcaccttggcattagatgttcgtt

SEQ ID NO: 126006 - DNA, 1671 bp, Zea Mays
tgttgttaccattgaaaagctagttgtttgcctttaaatttgtgcattggcttagatggtctggtatgcaagaatatgccagtgggcatatctgctacattgtcctgtcatcagaatatgctgaattttttgagaagttcatggcggtaatgataaaattggttcctgcttggaaacagtccagttctccaaaacatggttcccactcccagagttctatagctttgctccttgtctgtgttaatgagttttgctgtcttggggatagacaatttcatgaaggtagttacagctagatgcatctgtgtcaggattatgatttgttcttgtattaccgagatccaggaataacctagtctcagtgcttctcttctgagatcatgctggagagacacacataccgccacaggggctttggcttcgtgacattcgaagatcgaagggcagttgacagcgctatcaaagagatgcgtggccaagagttagatggtcgtaccatctcagtgaacaaggctgagcctaagatgaatacagatgacacaaggttcgacagtggcggtggacgaggagaatatcgaggtggtagaggtgatggtccaccccctggcaattgctatgagtgtggccgtcctggtcattgggtccgtgactgccctagtgctgctggtggtcgttctggcagattcccatccaagttcagtggtggtggcagaggagaccgcttttctggatcagataggtttaatgatcgttacatggatgatcgttatgatggtggtcgttatgggtaccgtgatcaagttgatgcaagggacaagtatggtgggggccgagatcgttatgccaatgatcgctaccccgctggtggcgatcactttgacggagacaggtatggaggtggcctggatcggtacgcaccgaatggttatgggagggaacgagaaagaagttacgagagagatggagttcgtggcggcggtggctatgataggagtggctcaagaggtggtggaagctatgacagggatggccctagaggcggcaagggtggtggctatgtcagggatggcccacgcggtggtgttgctgatcgttatggtggtggaggacctgcacgctatgatggtggaagttacagggagaggcctgggccatatgatcgccctagcaggggaggaggtcgttttgatgaacgccactgatgaactgcctctagactcgagcccctggtcttgtagtttagccttttgcagttctgcatagcttaatgtttaatgggctatggaagatgcctaatttacccccctctttggcacttcaatgtctgctctgtatttcaaccagtacttgggcgccgttgttgccttctcgataagtttatcaagctgactgtttttgcatgagacgggtcatcctttgggctactactctgcctgttggtccggatgtttcagttgtgcatgccgtgcgtcctgcagttatagtggagtcgaggttctcagtgattgtttgtcattgttgatctgaatatctggtatgcatggactgactatgttttcagtgattgcctgtcaccgttggtctgaatatctggtgaacatatatgctcagtgacggtgcttgtcaatgttgttggtctggatatttgggttcgcaaggatatatttgcag

SEQ ID NO: 126007 - DNA, 2506 bp, Zea Mays
gctttgcttccgtacaaaaaaaagttagaatcactctctcgagagacagagagagtataaactaacgcctaccataaatacaaaataaagaaagacaaaaaaagaaaatccctattcctcctcagcataccccttcttccttcgtccccattgatccccttcccccctccactcgtctcccaaatcgccagcgagcgccatgccgccgcctcccctgccctcgccgcccctgaccggctgacccgacctccccactgtctttcccttccacctgggcgccacagcgtttcccttcccgtcaccacgaaatcccggagggacgaggagggagttcgtcgcctgatcgatcggccgatccacgccgccggcctcccaatccttcgctgccgccatgttcaacaagataatcaagaggggaaaccgcaagggcgcgcgcggggacagtgcggaggtcgccgcgcgccccgcagcgccctcgtcatcctccgggagcggcggcggcggcgcggggggagccgcgcccgtcaccgtcaaccacgcctcccgggccacagcgccttctccgtcgtcgcccacttctccgcacgtcacgccgtccgcgtttgcgaccaacccggcggtgggggcggcgtcaccgccactcctcgagcctctcccgctcctccgcgacgtcgccgccgcagaccgtccgggcctcatcctccgcaagctccgcctcgtcgcggcgctcttcgacctctcggactcgctcaagcacccgcgagagaaggaggccaaacgccaggcgctcctcgagctcgtagattacgtgcaggctccagctcaggccgcgggcgccaacgcgcccacgcgcctcccggaccacgtccaggaggcgctagtccttgccatctctgccaacatcttccgcccgctgccacccgcgctgcacgagtccgccgccgcgatcgaccccggcgccgcgcccgacgacgacgaggagccatacctggacccctcctggccacacctccagctcgtctatgagctccttctccgatacgttgtttcgcctgacacggacaccaaggtcgccaagcggtatgtggaccatgctttcgtcctccgcatcctcgacctctttgactccgaggatccgcgtgagcgggaatacctcaagaccgtgctccaccgcatctatggcaagttcatggtacaccgaccattcatccgtaaggccatcaacaatgtgttctaccggttcatctttgagactcagcgctacaatggcataggggagctccttgagatccttggaagcatcattaatggatttgccttgccaatgaaggaggagcacaagctattccttgcccgtgctctcatccccctgcacaagcccaaatctgttgtgatctaccatcagcagctatcctattgtattgttgagttcgttgagaaggactacaaattagcagatactgtgattaggggtctgctcaagtactggccagtcacaaattgccagaaggaggtgttgtttctgggggagcttgaagaagtgctcgaggcaacacagcctgcagagttccaacggtgcatggtgccactgtttaagcagattgcccgatgccttaacagttctcacttccaggttgctgaacgcgctttgttcttgtggaacaatgatcacattgtaagcttgatagcgcaaaatcgtggtgttatatttccaattatatttgaagcgctcgagaggaatatacatagccactggaatcaagcagttcatggtctcactgcaaatgtgcgcaagatgtttctggacatggacagtgaactatttgaagagtgccagcagcagtatatggataaacaagcaaaagccaaagagatgcaggagcaacgagaatcagcatggagacaattggaagctgttgttgctgccaaggctgctggggatgacatggttttggtcaactaggtaatataaccaacctttccacttcatttatttgttagtgcttgttgtttttagtcttgtaacctaaaactgtactacttttgttctcggctttgttctagcatatctgtgagatgcattgccactttttgtactgctcaccttttgttttgagtcatggcagttcacaaaaagatgggatatatctgtaccaaagtttcaatttattatggacaattgatttttagtaatgtcagtcaaaccaagcatccataagtacgcaaacatcgtttgaaaggatgtttatgctttctcagatgattgctgctcacttatttcttgagcgcggtgctagttgcggtcctcttatatcaactttgttgacttgggactatcagatccatgttccttgcatcagtgaaaaacatgtgggccgagtttgaacacattggtggccgcgacagccaatccacgcagaatttctgtgtctagtgaggtcctgctatggttctgagccgttcctttattcagcccctcctcttctgttgcgttaatttatgaaca

SEQ ID NO: 126008 - DNA, 1159 bp, Zea Mays
gatcttagggcgcgatcatgtgtgatggtgggtcggcgcttccacgagtgacgtcgggcaggtgccgtcggaacgggaaagagggagagcatgaactcagggggcaacggctgatgttgtcctgtttaactgttccctggtacgagagtttgtgttttatcaatctaaacaattgaacttttaatccaggtggtttatctaatgtcggtcagttgccgcggatgtgcacacggcccatgtcccacgacgccgtgcatcacatgtccacagtccttcgtctataccgcatcataatgtaccctttgcctaacaagatatgctttatgttgccacttctgatttctagaaagtattttaccgtgttgttaagttggtagttcctgctttgtaatttctagaaagtatctctgatgtttttgcttgattattgattttgcttgtcaggttgctgaacgcgctttgttcttgtggaacaatgatcacattgtaagcttgatagcgcaaaatcgtggtgttatatttccaattatatttgaagcgctcgagaggaatatacatagccactggaatcaagcagttcatggtctcactgcaaatgtgcgcaagatgtttctggacatggacagtgaactatttgaagagtgccagcagcagtatatggataaacaagcaaaagccaaagagatgcaggagcaacgagaatcagcatggagacaattggaagctgttgttgctgccaaggctgctggggatgacatggttttggtcaactagatccatgttccttgcatcagtgaaaaacatgtgggccgagtttgaacacattggtggccgcgacagccaatccacgcagaatttctgtgtctagtgaggtcctgctatggttctgagccgttcctttattcagcccctcctcttctgttgcgttaatttatgaacaattggactcttgtattaatccttcattgtttgccctagtttcgtacccacaattgggaaaattcaagtagtgaaaatgactcagctagattgtaaggtttcttttatttgtatttacttcttttctccttgggagttatttcagttcatgttgttgtatggaggtaacagtacaaatggcagataaaagcctttttaacctagtgtccggcatggtagc

SEQ ID NO: 126009 - DNA, 1247 bp, Zea Mays
gatcttagggcgcgatcatgtgtgatggtgggtcggcgcttccacgagtgacgtcgggcaggtgccgtcggaacgggaaagagggagagcatgaactcagggggcaacggctgatgttgtcctgtttaactgttccctggtacgagagtttgtgttttatcaatctaaacaattgaacttttaatccaggtggtttatctaatgtcggtcagttgccgcggatgtgcacacggcccatgtcccacgacgccgtgcatcacatgtccacagtccttcgtctataccgcatcataatgtaccctttgcctaacaagatatgctttatgttgccacttctgatttctagaaagtattttaccgtgttgttaagttggtagttcctgctttgtaatttctagaaagtatctctgatgtttttgcttgattattgattttgcttgtcaggttgctgaacgcgctttgttcttgtggaacaatgatcacattgtaagcttgatagcgcaaaatcgtggtgttatatttccaattatatttgaagcgctcgagaggaatatacatagccactggaatcaagcagttcatggtctcactgcaaatgtgcgcaagatgtttctggacatggacagtgaactatttgaagagtgccagcagcagtatatggataaacaagcaaaagccaaagagatgcaggagcaacgagaatcagcatggagacaattggaagctgttgttgctgccaaggctgctggggatgacatggttttggtcaactagatgattgctgctcacttatttcttgagcgcggtgctagttgcggtcctcttatatcaactttgttgacttgggactatcagatccatgttccttgcatcagtgaaaaacatgtgggccgagtttgaacacattggtggccgcgacagccaatccacgcagaatttctgtgtctagtgaggtcctgctatggttctgagccgttcctttattcagcccctcctcttctgttgcgttaatttatgaacaattggactcttgtattaatccttcattgtttgccctagtttcgtacccacaattgggaaaattcaagtagtgaaaatgactcagctagattgtaaggtttcttttatttgtatttacttcttttctccttgggagttatttcagttcatgttgttgtatggaggtaacagtacaaatggcagataaaagcctttttaacctagtgtccggcatggtagcaatacaa

SEQ ID NO: 126010 - DNA, 1501 bp, Zea Mays
taggcggccaattgtccatctatgcctctgtctggccctgccgcgccgtccgcacgcgcgcgcacgacgcacagtcacagatagatacctttcctctcttctcccgtccggccgtcccctcttccgcggcaaccccggcgcggcatggcgagcccgtcctcctcatctttcccgtcccggaaggccctgagcaagatcgcctgcaggcgcctgcagaaggagctaacggagtggcaggtcaacccgcccgccggcttcgagcacagggtcaccgacaacctccagaggtgccgcttccccatcgccgcacttcctatcccctttctcaccaagcagtccctgcggtgaggggtttagattcctttctccgtggctcggtgcttgcctactgttttcttattctcgagtctaggttggtcactacttggtcctgctgaaactgtggataacgttccgcgtcctgtttgatccgagacgcgacgtgttgcgttcgttttgggcttgtaggtgttggtttctctatttctctcgtcgtcttttccaagggattttcagtagatgtttcctagtgtttttatgatcttggacgaaagaaaaacttaatgaatgcaaaaaataatggtggatgaaacaacaacaaaaaggtgggtcgtcgatgtagccggggcaccaggcacgctctacaccggcgagacctacaaactgcaggtggatttctccgagcattatcccatggaggcacctcaggttatatttctgcatccagcaccgatgcatccacacatttacagtaatggacacatctgtttagatatattgtatgactcgtggtccccagcaatgactgtcagttctatctgtatcagcatattatctatgctgtccagctcaccagcaaaggttacatatttcctctacatatccttgttcaatcggtgggtcttgctttctgactgcaatacatacatgtaccgattgcagcaacgcccagccgataacgatcgctatgtcaggaactgtcgcaatgggaggtcaccaaaggagaccacgtggtggttccatgacgacactgtgtgatgggtggttccggctgttgtcctgcccgcattttagttgccagactacatgggagatgatctaggcatatttcaagcgacccatttgaccagaaactaacacgctcttctggtttgtaaatgagtgtgcatcagcgtcaggtctctgtacttgttgatccttacaccgtctatagtatgtagaataatgtttgtatctttgtcaatttacggaacagacatgaaatgcaggtcactgttgacttgcaagatttctgaatccttctagttgaaagttgaaacgagggttatatatgcttggtagtctgctccagatgcagcagctttagctctagttccacttaactctagctcaaactatggcagagctcttttgggagtggctgtgtgatcgtgtaataatatatctgttgtgtgagtattgc

SEQ ID NO: 126011 - DNA, 1549 bp, Zea Mays
taggcggccaattgtccatctatgcctctgtctggccctgccgcgccgtccgcacgcgcgcgcacgacgcacagtcacagatagatacctttcctctcttctcccgtccggccgtcccctcttccgcggcaaccccggcgcggcatggcgagcccgtcctcctcatctttcccgtcccggaaggtaataaaccctaaaccatccagccgcgtgcgaggtcgccgctcgatttgactgatctccatgcttccccttttgtgggttccccctttctctgtgcgcatggttgcgcgcgttcaggccctgagcaagatcgcctgcaggcgcctgcagaaggagctaacggagtggcaggtcaacccgcccgccggcttcgagcacagggtcaccgacaacctccagaggtgccgcttccccatcgccgcacttcctatcccctttctcaccaagcagtccctgcggtgaggggtttagattcctttctccgtggctcggtgcttgcctactgttttcttattctcgagtctaggttggtcactacttggtcctgctgaaactgtggataacgttccgcgtcctgtttgatccgagacgcgacgtgttgcgttcgttttgggcttgtaggtgttggtttctctatttctctcgtcgtcttttccaagggattttcagtagatgtttcctagtgtttttatgatcttggacgaaagaaaaacttaatgaatgcaaaaaataatggtggatgaaacaacaacaaaaaggtgggtcgtcgatgtagccggggcaccaggcacgctctacaccggcgagacctacaaactgcaggtggatttctccgagcattatcccatggaggcacctcaggttatatttctgcatccagcaccgatgcatccacacatttacagtaatggacacatctgtttagatatattgtatgactcgtggtccccagcaatgactgtcagttctatctgtatcagcatattatctatgctgtccagctcaccagcaaagcaacgcccagccgataacgatcgctatgtcaggaactgtcgcaatgggaggtcaccaaaggagaccacgtggtggttccatgacgacactgtgtgatgggtggttccggctgttgtcctgcccgcattttagttgccagactacatgggagatgatctaggcatatttcaagcgacccatttgaccagaaactaacacgctcttctggtttgtaaatgagtgtgcatcagcgtcaggtctctgtacttgttgatccttacaccgtctatagtatgtagaataatgtttgtatctttgtcaatttacggaacagacatgaaatgcaggtcactgttgacttgcaagatttctgaatccttctagttgaaagttgaaacgagggttatatatgcttggtagtctgctccagatgcagcagctttagctctagttccacttaactctagctcaaactatggcagagctcttttgggagtggctgtgtgatcgtgtaataatatatctgttgtgtgagtattgcaaaattctgtaa

SEQ ID NO: 126012 - DNA, 1075 bp, Zea Mays
taggcggccaattgtccatctatgcctctgtctggccctgccgcgccgtccgcacgcgcgcgcacgacgcacagtcacagatagatacctttcctctcttctcccgtccggccgtcccctcttccgcggcaaccccggcgcggcatggcgagcccgtcctcctcatctttcccgtcccggaaggccctgagcaagatcgcctgcaggcgcctgcagaaggagctaacggagtggcaggtcaacccgcccgccggcttcgagcacagggtcaccgacaacctccagaggtgggtcgtcgatgtagccggggcaccaggcacgctctacaccggcgagacctacaaactgcaggtggatttctccgagcattatcccatggaggcacctcaggttatatttctgcatccagcaccgatgcatccacacatttacagtaatggacacatctgtttagatatattgtatgactcgtggtccccagcaatgactgtcagttctatctgtatcagcatattatctatgctgtccagctcaccagcaaagcaacgcccagccgataacgatcgctatgtcaggaactgtcgcaatgggaggtcaccaaaggagaccacgtggtggttccatgacgacactgtgtgatgggtggttccggctgttgtcctgcccgcattttagttgccagactacatgggagatgatctaggcatatttcaagcgacccatttgaccagaaactaacacgctcttctggtttgtaaatgagtgtgcatcagcgtcaggtctctgtacttgttgatccttacaccgtctatagtatgtagaataatgtttgtatctttgtcaatttacggaacagacatgaaatgcaggtcactgttgacttgcaagatttctgaatccttctagttgaaagttgaaacgagggttatatatgcttggtagtctgctccagatgcagcagctttagctctagttccacttaactctagctcaaactatggcagagctcttttgggagtggctgtgtgatcgtgtaataatatatctgttgtgtgagtattgcaaaattctgtaa

SEQ ID NO: 126013 - DNA, 1478 bp, Zea Mays
taggcggccaattgtccatctatgcctctgtctggccctgccgcgccgtccgcacgcgcgcgcacgacgcacagtcacagatagatacctttcctctcttctcccgtccggccgtcccctcttccgcggcaaccccggcgcggcatggcgagcccgtcctcctcatctttcccgtcccggaaggccctgagcaagatcgcctgcaggcgcctgcagaaggagctaacggagtggcaggtcaacccgcccgccggcttcgagcacagggtcaccgacaacctccagaggtgccgcttccccatcgccgcacttcctatcccctttctcaccaagcagtccctgcggtgaggggtttagattcctttctccgtggctcggtgcttgcctactgttttcttattctcgagtctaggttggtcactacttggtcctgctgaaactgtggataacgttccgcgtcctgtttgatccgagacgcgacgtgttgcgttcgttttgggcttgtaggtgttggtttctctatttctctcgtcgtcttttccaagggattttcagtagatgtttcctagtgtttttatgatcttggacgaaagaaaaacttaatgaatgcaaaaaataatggtggatgaaacaacaacaaaaaggtgggtcgtcgatgtagccggggcaccaggcacgctctacaccggcgagacctacaaactgcaggtggatttctccgagcattatcccatggaggcacctcaggttatatttctgcatccagcaccgatgcatccacacatttacagtaatggacacatctgtttagatatattgtatgactcgtggtccccagcaatgactgtcagttctatctgtatcagcatattatctatgctgtccagctcaccagcaaagcaacgcccagccgataacgatcgctatgtcaggaactgtcgcaatgggaggtcaccaaaggagaccacgtggtggttccatgacgacactgtgtgatgggtggttccggctgttgtcctgcccgcattttagttgccagactacatgggagatgatctaggcatatttcaagcgacccatttgaccagaaactaacacgctcttctggtttgtaaatgagtgtgcatcagcgtcaggtctctgtacttgttgatccttacaccgtctatagtatgtagaataatgtttgtatctttgtcaatttacggaacagacatgaaatgcaggtcactgttgacttgcaagatttctgaatccttctagttgaaagttgaaacgagggttatatatgcttggtagtctgctccagatgcagcagctttagctctagttccacttaactctagctcaaactatggcagagctcttttgggagtggctgtgtgatcgtgtaataatatatctgttgtgtgagtattgcaaaattctgtaattgttctattctgctgctctgatgaatctcagtgatctacactacc

SEQ ID NO: 126014 - DNA, 91 bp, Zea Mays
cctcctcgcaaggctggccgtcggctcggctctgttgacagcaatccctgcactgcagtcttgccatgctccccacgaggagcgcaccatc

SEQ ID NO: 126015 - DNA, 2492 bp, Zea Mays
cagagtgattctgcagaaggattcattctactggcgagccgagctggtgaaggagctataataagcctagcgctcacttcagtcatcagccaagtgattgaaaaaggcaagtcgtctgaattattggttccaagggctctgtagttgcttctccacactttcctatgcttttgcattaatcttgacaactgagtactcaaagctgggatatggctacttattattcgagccctgacagtgaaagagattcacaaacaatgtactcaacagagtcaggcaatgcatcatatcccgtgccatcagccctagggaactttctttatctgaacagtgcatcttctggaccttatacagaatttaatggaattgtccagtctcaacagaatttcatggaacttactggtcatccttcagcaatttcacatgattcatcatccaacgaagctactaacattggcacttcactgacagaacagcgctcttttggtcctttgaaagatatgagaaatgagatgttgatgcatttgatggatggagcacacagcagtggcagtgacctcatccacaatgatgaccatagcactgcacagctcgagtttggcatgttaaacaaccacaattcaacaagtcttccatcagcatcaggccaagggctgtctctgagcctcaatacacatatcttggcaccttcctatccatactggtctgcaaagcaggacttattaacaccaaattcttaccagggtgatgacaacagaatgaagaatatgcagtctgaggcttcacaggcaatccgaaactctaagtatctgaaggcagcacaggagttgcttgatgagattgtcagtgtttggaagagtgttaaacagaaaacagataaaggcccttctgaagcaggaaagtcagatggaaaagagactgatggggggactaaaagtgagggagtatcttttgatccacaagagtctggtgccaatacagcagctgagctttcaactgctgagaaacaagagctccagaataagatggtgaaacttatggcaatgttggatgaggtggatcggaagtacaaacactattatcatcggatgcaacttgtaatgtcatcgtttgatatggttgctggttctggagctgccaagccttatactgcagttgccctccagacaatctcacggcatttccgatgtctaaaggatgctatcaatgatcaaattagtgttatcaggaagaaacttggagaggatgacgatgcatctggcaaagagggcaaactaattcgccttcgttatatcgatcagcaaataaggcaacagcgagctttccaacagtatggtatgctacagcaaaatgcttggaggccacagagggggctacctgaaaattcagtctcgattctccgggcttggctttttgaacacttccttcacccgtatccaaaagactctgaaaagctaatgttatcgagacaaactgggttaacaagaagtcagatttcaaattggttcatcaatgcccgtgtccggctgtggaagccaatgatcgaagacatgtacaaagaagagataggtgaggcagagctagactccaactcttcctctgacaatgtgcagccgaacaaggacaagccgccatcttccgaagaaaaggaccataagacctcaacaagccaggtttgccaaaccagccagcttggcgaatccaaagccaacattggtggagtggtgagcttttgtggagcgccagccggcggcttccacaacgatgccaaccccgatgacagcttcatgagcctgatgctgaaggcccagagaccgggcgaaaccgatggcagcggtctcctccatgatgccgtcgctcatcactccgatgagagcgcgcggttcatggcgtaccacctgacagagtttgggaggtatgggaacaacaacgtctcactgactctggggttgcagcacgccgagaacacccagccgggcttccccggcgtcagagaccaagacatctacaactccacagctcctctcaacgtcacctccacatcttcagagtatgattcggcgagccaaatagatcaacaacggcagctgtttgaggtgtcacctctgatgcatgatttcgtggcctgaatttcagctgacgcactggaaaacgtggggaagtgacttgtcatttgtagtgccaggacgaacaatatgcctggactgaattttcaggcgtggaaatgtagctgtagttgtaattggggtacagaatggacgaggtatatagcataaatgttatgtaaatttagtgggggcaggggtgatagtggtaaagaaatcctgtaaagatggaatacattttatacgtgtaaaatacgagtatttaagggccacgctgtaaaaatagatttacctgtaactgtaacgagtgtttgtaatgagtgtaaagaactgccacatgccatattttcgatgggtgagaagatatagaaatcttattttctttgt

SEQ ID NO: 126016 - DNA, 2307 bp, Zea Mays
atggcgctcactacacggggtgccgccggcggtggggatgcggcgaaggcgccgtccgcttccgatcccagcctcggctttctcaccaagtgcgacaccgaggtcaagctaccccgcgccgatacagattacggccgagcagatcctccgggaggctagggagcggcaggagcctgagatccgcccacccaagcagaagataacagacccccaagagctctccgagtaccgcctccgcaagcggaaggagttcgaggatgtcatccgccgagtgcgctggagcgtctcggcctgggtcaagtacgcgcggtgggaggagcagcagctggacttcgcgcgcgcgcggtccgtctacgagcgcacgctcgacgtcgcccaccgtgaccacacgctctggctcaagtatgccgaattcgagatgcggaaccggtttgtcaaccacgcccggaatgtctgggaccgcgcggtgtcgctcctcccccgggtggatcagctatggtacaagtacatacacatggaggagctgcttggtgcagttgccaatgcgcgccaggtgtttgagcgctggatgtcttggcgacccgacacggctggctggaattcttacatcaagtttgagctgcggtatggggaggtcgagcgtgccagagctatctatgagcggtttgtggctgagcacccacggccagataccttcatccgatatgctaagtttgagatgaagcgcggtgaggtcgaacgggcacggcgggtgtatgagcgtgcagcagacctgcttgctgatgatgaagatgcagaagtgttgtttgtggcatttgcagagtttgaggagaggtgccgtgaggtcgagcgtgcacgtgcaatatacaagtatgctctggacagggtgcccaagggtcgtgctgaggaattgtataggaagttcctggcatttgagaagcaatttggtgaccgtgagggaattgaggatgccattgtcggcaagaggagatttcagtacgaggatgaggttaggaaaaacccactaaactatgactcatggtttgattatatcaggctggaggagagtgttgggaataacgataggatcagggaggtgtacgagagggccattgccaatgtgcccccctgcagaagtgcagaggagaagcgatattggcagaggtacatatacctctggattaactatgcactttatgaggagctagatgcacaagacagaacggaccagggaggtttacaaggaatgcctgaggctgattcctcacaagaagttcacatttgcaaagatgtggctcatggcggcccagtttgaaataaggcagaaaaatctaaagcctgcaagacaaattcttggaaatgcaattggaatggccccaaagggcaagatattgaagaaatatatttaaatcgagctttatttaggtaactttgaccgttgtaggactctttatgagaaatatattgaatggtccccagcaaactgttatgcttggaggagatatgctgaattggagaagaaccttagtgatactgatcgtgctcgatcaatatatgaacttgctattgtacagacagcccttgatatgccagagattctgtggaaggagtacttgcagtttgaaattgatgaaaatgaatttgagaggactaggcaactatatgagagactgcttgataggacaaagcatttaaaggtatggaccagttatgcggagtttgaggcctctgctggcttgggcggtgaagacagtgaaggtgaggagaaaaagaatgataaggaacagaagatggagcaagtcaaaaaatgtagagctatctttgaaagggcattcgactacttcagaaccagtgcctccgagttgaaggaggaaagagctatgcttcttgaagaatggcttaataaggaagtgatctttggtgatcttggggatgtcaccttagtgcaaaagaaggcgccaagaaaagtcaagcggaagagaccaattcctacagaagatggctccactatagcgtatgaggagtatatagattacattttccctgatgaagttgctctagcaccaaacctgaagatcctggaagcggcttacaaatggaagaagcagagaaccgacgatgacaatgtgtgatcctggcatcgcagtattggcgttgtcgtgaacattttgctacagccaaaatcaggtgtcttgcaacactggccagagctatcggaatgagaataatcgatttcttcatgtcacagaggatgcagttgctgttgaaaagaattgtcagaaatacttttaacaggtaactgtatgg

SEQ ID NO: 126017 - DNA, 1279 bp, Zea Mays
catgcaaatttattcgtggccagcgtcgctgtcttttttcttcttccgttacctctccaggcagctcctctccctctctgtcgccgacgactacgccaggtcttcttcggggcccaggtcgctgccgcctacatcaggggccccaagttttcctaggacccctcgctggcgacgagcaccaccagtttggttcactcccaacaaaatgtcagccaatgtgggtgaatcaactagcggtgtcagcagcagcgatgcagctggggggagctttgagtgcaacatatgcttcgagctgcctcaggagccaatagtgactctctgtggccacctcttctgctggccgtgcctttaccggtggctgcacattcacgcacactcgccagagtgcccagtgtgcaaggccctcgtggaggaggacaagctcgtccccctttatgggcgtggcaaggatcgcgtcgacccgaggtcgaagaacatgcccgagggcgagattcctcaccgcccaactggccagaggcccgccacagccccccgggccgatgctaacagcaactttgccaatgccaatgccaatccatggttcccgggcccaggagtccctctggcaaatgcgcgatgggggaactacgcattctcagctgccttcgggggactgttccctatgcttagcttccaagtccatgggtttccagatgccgccgcttacgcgcagcctgctgggttccactatggatacgggcatgggcatgggcatgggttccaccatggcgggcatatgggacaagcacaagcccatggcgtccaccgacaggcaccgttggggcaacaacagcagcaggcagatatttatctgaaggccctgctcttcatgattgtaattctagtgctcgcaagcctcctcgcgttttaaagcttgtttggcaacgtctcctcgtcatggtttggaaattgtaattctggggagtgctcctcctggcatttcagtgctgttggcatggcagtttgacattgtgatggcgtattggcctatgagaatcgccagaatatttcactgttggatctgtactatagcctggtgctgaatgtcgtataagggctagttttgcaacaccattttctaagagatctctattttctcaaagaaaattgaactggttttcttttagaaaaatggaaatcacttgacaaactagtcctaagtattgtatttgcatggactgtccatagaatatgcatctgcgtctagctaagtatctgagtttcacaacacaataaaaaa

SEQ ID NO: 126018 - DNA, 669 bp, Zea Mays
gctgggctctcgtgttgtgtctcgtcccggcatcggcgaggacggagcacgaagcacggagcttctacttccacagcatggaccacggcggcaggaggaggagcggcgccggcgcggcggggggcggccagccgccgccgccgcctcccaaggtgtaccgcgtggagcccagggacttccgggagctggtgcagaggctcacgggcgccggcacgcccgccgccgccgccgccgcgacggggccggcgaccctggccgcgcaccagagggtgccggtgacgccggccatggccgcggcgccgcccgcgcccgggacggcagagcagttcgactacgcgccctggttctccgcgccgctgctcagcccggcgtcgtacggcgcgccgggcttcggcgccgccgccggctacccgcaccacgggagcggtggccctttgctctagggccgcctatgtagaaaacagagccctcgtgtcgtgtagatctcgtttttgccttgcgtttcgagcatgaatgaatgactacaactactagttcactacacaaccacaacgcagccagccgccttctttactataccgtgaatgaaattcgaccaacaaacaggctacacggttattgtttgcttgcttgcttgcttgcttctggtattttctgatagaaaggggg

SEQ ID NO: 126019 - DNA, 633 bp, Zea Mays
acggcatcgccattgcagcgctcactttaatttacacagccagcggatgccgaccctcacctccgatgccatcatcgcgtccccgaggtggggcgtcctccccttatgcggcggcggccgctcgggcggaccgcgcactcgccgcccgtcgtcgtccggcggccacggctgcgggtggccgccgctggaccgcgtggccgtctgggtcggcggcggcatcgccgcggtgttcttcgcgtccctggagcggtgctcgtgcgtcaacgtgcgcacgcacgacgacctcctcgacgacgagcggagggactcggaggcgccgctgatgatgttcgacgacggcaacggtaactcctgcgtgcagaggcgcggagccaggtggtgcggcaagggcaagggtactggtagtggagattgttagtgtacgatattaatatgtatatttgttcagaaaacgtcgttcgcccggtttaattttggctgtcgtcgccgtcttaaggcttaagctcctgcgttggtcctatttcgagtaagttttgcccttgtaatgctatttcctgctgcgtttctgtttaaattatcagtgtatggatgtttcactgcatctaagttaattcagagttacatacctctaaa

SEQ ID NO: 126020 - DNA, 1781 bp, Zea Mays
cgctgcattctgcagacgacccgagactccgagagcagcagcaggaggaggccgggggccgttctcctgggctcctctcctccggctccggttctccctccgcacggcgtcgctgtcgccacgggcactgtcctacagtcccactcggccactcctcactcactcccctcccgacccacgtctagtcccactacccaacaaggcaacaaccaccgcggggacccccgaccccgagctcgaaccaccccaggatatgagaagaatacatttccctgtccctcccctactcctcccactgcctttcgtcacatgcgcacaagaaaccgcgccgcccccgaggcctgtgacccccacctctcctccagcgccccgccaagccgtcgctgcgccgcttccatgaccctcgttcccctcgcgacgagcggcatcgtcccgttcccgtccgtggctggtgcctttttgttgttgaccacccgctgagctgctgcgtgcccgcgcgcatggccgccgcgaggaggctctcggagctgctgcaggagcagcaggaaccgttcctcgtcgagaccgccagggcaaggcggccccggcgcgggcgtggcgcggtgggagcaggagtagcaggaggaggactgggctgctgccccgccgccgcgtgccggcggctgttcaggctctgcaaccaagggttcaagaagaggagggccgccgccgccgccggcggcggctctggctcgggcgtcgcgagcggcctgaggttggcgctgagcaaggtgctgtgcggcaggggcatgcgccgggtgctgcgcctggacgacctctgtggcggtggcgggtgcttctccggcgccagcgcctgcggcgcccgcgagttccgccgcctgcgccgctccctcggcgacagcggcgagtgcgacccccgcgccatggtcttgcctggggatgatggggaggaggagcagatgggttggaaggccgacatggacgtcgactcgtcgcgccagcttagcccggtctccgtcctggagctgcactccgacgacgacgacgacgagtcgccggtgcactcgcactggggcgacgagaagccatccacctccgggaccgggagctcacctccgtccgagtctttcctcggtccgactccgacctccccatgcttcagctacgacctccaggacaagttctgcgagatggaggtggacgaggccgaggaggaggagacggtccgaaccggcaggtccatcgaggagcaggtctcgtcgtgggagaagatcgcgggggacatctcgaggatccccgcgatgatggagctggacctgtcgcgttccacgcggcagtggcgggagccggagcccgaggtcagggaggtcggcgccaggatagaggtcctcatcttcgacgacatcaggagggagaccgtgtgcgacatgctcgcctcgcattgtagattggcggcagcagcagcaacatcttgttgatcgagggaggactggactggaggagtggtgttgtgttcgtcagaagtaaggggaaaaaaagagagagtagaaacagtagaggaggaggatgtgtacaatctgaggcttgcttgatgtgaaattctttttgcccaaacgacgaagccttggactctttgccgcatcgagttccacgctgtttatgtgtttgcaaatatgatattggtggcaaaaggacaagcttgtttatcatttgttaaacagagcagcagttgaggccttggactaaacacacccaggatgcatgtgaaagctgaaagcagc

SEQ ID NO: 126021 - DNA, 579 bp, Zea Mays
atggcgtcgccggttgtagtggccgcgacgctgctggtggtagcactggcggcattctgcggcacggacccgctccgaacggacaacatggtggacttcccggggtttgagtcccacctcgtcgacctccctgatcccgccgagatgccgacgcacgcggatgaatgggagcgactctgtggagccgatgtgcggttctgcggcgaggtgcaggggcccgagagcatcgccttcgaccagcagggccatacacgggcgtcgccgacggccgggtcgtcttctgggacagtgagcgaagctccgcggcgggccgaaggcctcgccgctggagtatctcccagcgagcacatctgcaacagcccgctcgggctctgtttcgataagactggggacctgtacatcgccgacgcctacttcggcttgctcaaagtccgccccgagggcgggctggccacgctgctcgcaacggaggccgagggcgtgcgcttcaacttcaccaacgacctcgacctcgacgacgagggcaacatctacttcactgactccagcattcactaccagagacggatgctcacttga

SEQ ID NO: 126022 - DNA, 1569 bp, Zea Mays
aggaagatctcaggaagatagataactggcaatatattagttgtgtcaccctatggtttcggtttctgtgttgtcactataaggattacaatctccatcccttattttctcaagttcttcaagtaataagaggagtggctcacttattcccaggcacaaggtacttaccgttgagactgaagcttgtgcagatgctgaacgagctttccacttgcagtcagatgttctatccaattccatcgttgctctttgactgcctagaattaagagaagtttctcagaaagaacaaacacaaagaacaaagatcaacttttcgtcgttgtagaaggtgccaaagaacctgctgaaatcaagggattttcaagaggagtgtattctttcagcgattctgcccagtggagttaccatgtttccttcccagaagtagccaccattcctcttgtcctcttgaagaggctacatgagcagacaacagttgaatcacttcgccatcctattaagtgtttgatagaccaggtgacggagaacaaggattttatagaaaggaaaagagaggttgtatccttttcaccaaatgataaggcgtcagttgatagcttccttcaggaggagaaggtcagcagaaccgcttcattcactcggttctatgcatccgtagctgaaaaccgtcaaccaaaatgtaatgtcataaatctctactactccttatgtctttagtgtaggcgtccacatctctttgttctaccatcgcgcgctccgcccgcgattcccctccccgcgcccgcagtccccgccgccatcctcgcggccgcagccgagcacagccgccacgcccgcagtccccgcgccagcaacgctcgcagtccccgccgccgtcctcgcggccgcagtccacgcggaatgccggacagggacgtcgtggcccccgcgggcggcggtgaccggaaggcggccaagctcgggagctggagcagcatgagcagcaactgcggcagcaagaagcggaagagcagcagcagcagcttcgggaggagatccacatccacctgcgaggaaaggcagggggtcttccgcatgctcatgagctggaaccaggagagccggttcagcaagaagatcaagacgacgacgagcaaagaaagatgaacgaaacgaagtgttcttagcttggtgtgactattcgggggttgcttgctggagggtttttgttcgtttagtgtctagccttagcttacttattacttttgttagtactctactagcagagtacatgcatagagtcagtggtgtggctgtggcgtggatcagatcattgatttgatcgagctgtacaaatagcgaggcgatacatgtcactgagttgatcagttgacaaggtggtttggaccatgttgaggcacggagaaacttcatccctaagttttagtttgtctggctttgctcgtcattttgtacttgttcttctcacatatttgttgcttagaatttacttcaaactcacgtccttttagcaatataacacacatttgtacatacattatctatactactatatgtttccgttgcaa

SEQ ID NO: 126023 - DNA, 1107 bp, Zea Mays
tatctgagaactcagtctggagacgacccaacgtcccagctgctggccaactttcgcctttcttcgccatcatcgcctcctctcccattcattccttccttccttccacacgagagcctgcctttttcccgatccgcatcgtcatcaaatgggccatcttttcctcctcctggtagccctcctcctactcacctccacgcgtgccgccgccgccgtccacgccaaagcttcggtcattgaggaggcgagtttcgctggcatcagaggcgtgatcggatccaggccgccgacctgcgaggggaggtgcaggtcctgtggccattgcgaggcagtgcaggtgcccgtatctccgcagcagcttcagaggaggaagaaggagggtctcggccttggcagcagcagagctgctgctgctgctgccggtggaagagcaagagcaatgccggcctcctactacgaccactccaactacaagcccctgagctggcgatgcaagtgtgggcggcacatcctggacccttgaaagatgaaacgccagcgctggtcgatcggaaccagtcttctgctgcgcttgtggatataatgtactaatagtacaggatcacttttgggtttggtgattgttttcatctttcctcttatattatgatcaagaaggtgctgctgtcccttttggccgtggtgatcaccggagaaacgtatatggtgacaagcgtatatatgctcctcttgctttacatggacgcttgccgtcagttaactcgacgctgctgctggataatagcattcagtgccagactattatggcatccaagctaggtaattttgttcaagcttggttcgatctatctaagccatcctttattttggcttcacttttgtcagagagcacatccagctaccatctttttggatcagcatcttcagactttctgttcaggctctttgcagccgcctcgcacgcctccacactagaaacacatgaacagacagttccatggcaatgagaagccgcaggaaaggatgttcatctttcttcgtgttaaaacaacgctagaagctagccaggaactaggaaggaactgcccccatctaaaaaaatagaaa

SEQ ID NO: 126024 - DNA, 2645 bp, Zea Mays
atgtcgattgcggcggtcagatcctcgtccccgggcccgtcgccgaggccgtgctgcggcctcaggaggagcgctgattccagccccttcaggcccgccgtgtccccactcgattcgccgcagaggagctcctccgtctgcaagaacagcggccgcgcctcgccgcggacctggggcgcggagaaggagaacgacccgcgcgacgcggcgccggccgcgagcgcgaggacgcacaaggtgcgctccagcggcggcggcggcggcggcgccaaaagcttcatggcgcccactatctcggcctcctccaaggccgtcgcgccggctttcacgccaagaaagaaggtattcggcgagcgcaacaacgatgccgtcccttcgtcgccagtggaccttgcgcacagcagtaagcccagggctgcgcatccgctgctgccagaagaggctctgggcgtgccgaggcgtctgcggctctcactggacggcgcctctgcccttccttccgcggctgggcctgtcgtttcgcgcggcgccccgtcgttcggaggtgacgaggccgccgtgatggttgagaatcccgccgtctccgagagccaccacgacgtggctttggcggacgcggaggtcgtggcagccccgtacgatcccaagacgaactacctctccccgaggcctcggtacctccgctaccagcccaaccgccgcctcgagatttaccgtcatggcggcgggagcgtgcgggggctcgaggacatgttcgcttcccagagcagcagcgaggaggtcgacactgcgaccaccacggaggaggaagtatccggagaagggcagccagatgactcctcggaggaggagacctcggctatggcccctccaccggaggccagagctcagtctactgctccggccctggatcgcctcctgctgccgcagcccgcgctggattcgccactagctcgggtcctgacaccggagccgaaggagtctccgcgagctggtggcgtcttgatacctgagcgggaacgtgcagtgagccccgcgcgagctcgtcccaagaagaagaggtcaccagtgaggttcctgcttgcccctcttgctctggttctgttgatggctgcagcgtttgtctgtgttccaccgccgccgggttatccggtcatgctgaacacctccatgtcaaaggtgtcagtcttactttcagttcaagaattgcatcctgtggagttggctgctaggctgaagcaatggtctagcagttcgttggacttcgtcacgtcctactgggaggctattgcatcttaccaagaacgacctgtccttggtccgcacttggctgccaatgttactgctgctgctgcagaagtagatgcagattacgctgttggtttctactacagtgctgctcagacaagcccaacaagtttggagttggggactcatgatgttgtttcagaaaatgatactgagatgattgctgggcctgatgtggaggatccggtaacctgtgatgaccctgatgcagaacctattgatgatattgaaatggaacaggaagatttatctgaggtaccaagtgccatggaggaggtgaatgttgatgcagtagtagaggagttcgatgatgagatggccgaggaagtgtctggtggtagtagtggagaagagacggcagccttcattcagaattcagatattccttctcaatccactcccgagcctgaacaggcaaagggcattgacgaggtatccttgcagcaagatgttcagactgaggattctgaggatcatgctgatggcaaggaggatcagccagcgcagcatggtcaaaagttgggatcagatatgtggtcaagttacttggacaaagtatcggatcctgctgccattggtgctgctcttgctgccattattgttgcagctgttgtggcattcctttacatgaggcagaagcaaactcgtgttgcctccaatgaaccagctgagcaggtggagcaagttgagcaggttgaacgagttgagcaggttgaacaagttgatcaggttgaaactctttctgactcaggaagtagccaggggcatgttgttgccaagggttcactgtttcacagtcctggcgtagaagcctctggcccctcacagtatagcagcagcttgtcatctgggcttggcaggaggaggaataccaagggtgaaggccttgagccagtagtgtcgaggagagactcgacagctcaatccacatcatcttatggtagtttcaccacataccagaagatccctgccaagaaaggaaacaaggaggacgaagcgatgaccccagtccggcgctccagcaggctgaggaatgtgaaaactcctgaatcttaagattggcgcaagctggcatctgaactgccttttagattattagataattgctattgccactttgtttgctgcttagtgaagcatcatgtgtctaggcaatcaacaggtttgcgtgatgtttgataaacagctctctgctgtttttacttcaaaagatgattaggacttgtgtgttcagtataactgcttaagatttaattgatgttgacttgctcgttgtactgctctctgtttgagatgaatcctctgttttagatgaattctctggattgcatttctcc

SEQ ID NO: 126025 - DNA, 1165 bp, Zea Mays
tatggtgcatcgaagcggcgaattctttggatctgttatcgtgtactttactgtattgtgttctggaagtttgatatttatagggctctcggagtaacagtttgatgatatttgtatagccacacaacaatccagcaacagacaggggaacaatatatcaatatcattggacaaaaatagctgcgaacaaaaaccttgctcattcttctctcgtctcgtttcatagcgggagcaaccaaagcgaacaacagggtaccaacacctaatccaaaggtagaacggacactaacacggtgacagaagcgaacggtaacacgatactatagatagataagataactcggccgaagccaggatgggcccacacatcagtccctccagccgccgccgccaccgccgccgtagccgccaccgccaccctcgcgccgaccgccgtagccgccaccgcctccgtagccgccgccgccaccttcgcgccgaccgccgtagccgccaccgccgccataaccgccgtcacggcgcccgccaccataaccgccgccgccgccgcgaccgccgccgtagccaccgccgccaccgccaccgccacgggactgggcctggttaacggtgatgttacggccgtcgagctccttgccgttcatgttctcgatagcgtcgagcatggagttctcggaggagaaggtaacgaagccgaagccgcgggacctccccgtctcccggacgaagcagaccttggagtcgaggatctcgccgtaggaggcgaaggcattctccagcgactcgttgctggtggcccaggcaagcccgccgacgaagcaacggtactccacatcagccgccgccatcgcccctccacaaaaccctaaggaaccctaacccgaggaggacttggtaagagggggaggagaagccagcccacctctgagagagcacgagggagtgaggaagccctaccccgcagatttatagcgcgacggacgtgacgggcgccgtcatgatcggatcgggcggcgaccgcgcaaacaacggtccgaccggaggataaggatcccgaggtgggcctaccgcgctgggaccgggagggttctcgagagccagatatttttgccgatggcgtgatggatctgtcaagccgaccagaatgctgctcatggaccgagct

SEQ ID NO: 126026 - DNA, 1480 bp, Zea Mays
aattgacttttttcagattttaaagtgcaacgtgggctgcttctttatatgcacatcttaatgcttggacctatagtgactacatagcttgtattcatttcataaatgatggaaataagattcggacgacaattatatttgattcccagaactcttccctttatgcaactgaatgctatgtcctcattctcagctggtcatggacgccgacccaagaagaagccataccaccgtgaacctggtcttgacaaggccatggaccttcaaaagaagcctgcccttctccttcgtctgcgtgacctcattttggcacaaaagacagggtcactacttgtacgtgaccttgaaaaggaggttggctttgtccaaaaatgggattttctttcactcatcggacgccaccccaatatcttccatgtctctggtggaagtgcttcccgaaagccaatttctgttacacttacagagaaggccagaaagatatcctgtgaagatgctgacgcacgagaactaatggagccaatcttggtgagaaaccttaggaaattactgatgatgtcgatggactgccagattccaatggagaagatcgaactaatccaatttgaactgggattacctaagaacttcaagagcaacttgattccaaggtaccctgattttttttcaatccatgatgtgaagggactggaccgtttgtgtatggaacattgggattcttcactagcagtaacaatacgagaaaaaaagagttttgagggtttccagatatgctctagagggattcctaaagatggaaatgtcttgggtccttttgcttttaagttgaagtatccagcaggatttaggccaaactggaagtaccttgaggaggttgtcaggtggcagaagatggcatttccttcaccttatttgaatgttaggcgagtcgaatctgcaacaccacaggctcgaaagcgtgccattgctgttctgcatgagattttgagcctgacaatggagaggcgattgacatctgataagctagacatattttcacaatgagtacaggcttccatgcaagttacttctttgtttggtgaaaaatcatggcatcttctacatcactaacaagagagcaagaagcacagtcttccttaaggaggcttatgaaaacagtgaccttatttataagtgtcctttactgaaattccatgatcagtttgcatctttgattggccgaccgtcagacaccatgttggcaatataattggagtgtggatttacttattaggagacaaactatatttggtgcatctgttttgttgaaactcaggtcagctcattgcacatgcaactacaacttaaatcctgtgtacagttgctgtttctctcatctcagtagctaaagagaaatagataactgaaaaaaccagtgtctcatcttcaaatgtgaagccatctagaaactctgcaaattagacaaaataatgcttgtagc

SEQ ID NO: 126027 - DNA, 299 bp, Zea Mays
ccaattgttaagaagggtctcccaaagaaaatcagagaagtcactgactgctattttctccctcatcggtcctggccttctgcactgacaacctacggtgttgtatgtgctgctagctttggtgcagggatgcttcttgaggtttggataaacaaaagaaaatggagcgtatctgggagatggataagtcattatggacacagccagctctaaagatttctgatggaaattgatacaaccttgtttctggatcttgcatgatggcagaatgatgtcacaaacctttgagcctcattagt

SEQ ID NO: 126028 - DNA, 1460 bp, Zea Mays
cgcccttgcttgtttccaaggctgctgtgacgtccgcaccgccagcgccacccgcgtcgccatctccaccaggcatccacaccaccaccttgggcgccgggcccttccatgctttccttcgctcgtcgacaagaacaagatatactagtgctagctgttctgtgctgcggtcgtcgtcttcttatataagacgccaacgacgcatgtcctcggagcctgccgaggccaggatatagaggcgtcgccgggccgggccactgcacggtcggcggatatggctgtcgaagcgcacagcctcctcttagcaggagggcacaagcaactcaccagcgcgggatggccttggacgaccggcgacgaagctagatgcgcgacggcgcgaccgagccaccagcaggctttccagctccagcaggcctcgtgtgtgggcgtgggcgtgggcctgccggcggcggctccggtctcgtcggccgcggcggcgccaccagcgccgatgatagcgcagcagtacgctgctggcggacggctgttcgtgggagacgcggcggagagcggcgtcacgttcggaggaggaggtgcggtgcagcaggaggcgccccggaagcggaagcgcgccgagcaggggcagacgccgccgccggttcttgggaccggcgcggccgacgtggcggcgcagtttcaacagcagctcgtcgacgtcgaccgtctcgtcctccaacacaccgccaagatgtgggcggggctcaccgagcagcggcggcggcacgcccggcaggtcgtggccaccgtggaggccgccgcggccccgcggctgcgcgcaaaggaggaggagatccggcggatgcggcgcgtcaactgggcgctcgaggagcgggtgaagagcatgtacgtcgaggcgcacatgtggcgtgacttggcgcagtccaacgacgccgcggtcaccgcgctccgcggcgagctgcagcaggcgctcgacgcccagcagacgcgccgccgcgccgacgacgccgactcgtgctgctgcggggagaacgacgtcttcatcaccggagcaggcgcggcggagaacgaagaggaggccgggaccgggacgtcgtcgtcgggccacgtcaggggggcgtgcgccgtgtgcggcgacaacgcggccgacgtgctgctgctgccgtgccgccacctctgcgcgtgcgcgccgtgcgcggccgcggcgagggcgtgcccggcgtgcgggtgcgccaagaatggcagcgtctgcgtcaacttttcgtgatggtcctgaaaccgatagaattactggatagactagaattttttttggagacggatgcatcttttgcacttgccttcccccctcccccccctccaaaaaccctcgagcgagaagaaaaaatatagtcccaaagttcggaaactttcagtgtcatttttgtgttgcttctgtttgttttctaatttagcgtatt

SEQ ID NO: 126029 - DNA, 824 bp, Zea Mays
gtcgtcatcaacgattcaacgtgcactgactgtgactgatggagaggtggcgtgttaattttgcggcggatttgaacaattgcagaccgccaagatgtgggcggggctcaccgagcagcggcggcggcacgcccggcaggtcgtggccaccgtggaggccgccgcggccccgcggctgcgcgcaaaggaggaggagatccggcggatgcggcgcgtcaactgggcgctcgaggagcgggtgaagagcatgtacgtcgaggcgcacatgtggcgtgacttggcgcagtccaacgacgccgcggtcaccgcgctccgcggcgagctgcagcaggcgctcgacgcccagcagacgcgccgccgcgccgacgacgccgactcgtgctgctgcggggagaacgacgtcttcatcaccggagcaggcgcggcggagaacgaagaggaggccgggaccgggacgtcgtcgtcgggccacgtcaggggggcgtgcgccgtgtgcggcgacaacgcggccgacgtgctgctgctgccgtgccgccacctctgcgcgtgcgcgccgtgcgcggccgcggcgagggcgtgcccggcgtgcgggtgcgccaagaatggcagcgtctgcgtcaacttttcgtgatggtcctgaaaccgatagaattactggatagactagaattttttttggagacggatgcatcttttgcacttgccttcccccctcccccccctccaaaaaccctcgagcgagaagaaaaaatatagtcccaaagttcggaaactttcagtgtcatttttgtgttgcttctgtttgttttctaatttagcgtatt

SEQ ID NO: 126030 - DNA, 2477 bp, Zea Mays
atggccgccgcaccctgcacgctcaacatggcctccgtccttgcgctgctgcttgtcttctccgtgcactggacggggcgcagccacgccttcagcctcatgaactacctgtgcaacaacggcagctcctacgccctcaactccacctaccgctccaacgtggtggcgctcctcgggtccctgtccgccaacgcgtccagctccgccgtaggcttcgccaccggcacgctcggccgcggcccagaccagacgtgggggctcgcgctctgccgcggcgacgtcaacggcagcgcctgcgcgtcctgcctcgcgctggcgccggacgtggccttcggcaagtgcaggggcgtcaaggacgcgtccatctactacgaccgctgccttctccggtactcggacacggacttcctggccaccccggacgacgccgcggcgtcggtgcagtacggcgccaacctgcaggtgaacgtcaccgccgatcccggacggttcgcggggctcgcggccgacctcgtgggcgcgctgtccgcctgggcggcgtggaactcgacggcgagatacgccgccggggtggtcacctccgcccaagggttcacgacgacggaccactctctggtgcacgacatctacgggctggtgcagtgcacgcccaaccaggcgcccgaggcgtgcctggcgtgcctcggcaggctcagggacgagattccggacgtgttcaacggctccaccggcggccagttcaacgcggtgtggtgcaacctgaggttcgaggtgttccttttctatgacagcagcccggtagtgaagcttgtcgcgcctccggtgacgccggctccgccgggtgcagcagtccacggcgacgcaaacaggacaaggggagcaggacatgcagcaacagtagtggccattgttttcggggtcctagttatcttcctactctccaccttcaccatctacctctggagaaaagcacaagtaaaacgatatgccgaggaagctgacgattccgggtctctgatcttcgagttggcaacactgagaagggcaaccggagatttcgccgaagagaacaagctcggacatggaggcttcggcgcggtatacaagggtttcttggctgatggccggcgaatcgccgtgaagaggctggacaaggcttcggggcaaggcctgaaagagctgaggaacgagctgctgctggtcgccaagctccggcacaacaacctggcaaagcttctgggcgtttgcgtgaagggacaggagaagctgcttgtctacgagtacatgccgaatcggagcctggacacctacctcttcgcagctgatgagaagcgtgcatcgctagactgggaggcaaggtaccgcatcctctacgggacagcgcggggcctgctgtacctccacgaggactcgcaggtcaggatcgtgcaccgcgacctcaaggccagcaacatcctgctcgacgccgacatgagccccaagatctccgacttcgggctggcgaggctcttcagcgccgacaacaccaccaccgtcacgagccaagttgtcggaacgctaggatacatggcgccggagtacgcggttctggggcacctgtcggtgaagcttgacgtttacagcttcggagtcctgatcctggaggtcgtaactggacggaggaacaccgacatgttcgagtcggcagccggagagtccatcatcctgctgagctacgtgtgggaccactgggtcaggggcaccgcgctggaggccgtcgacccgtccctggcctgccactgccaggcaccggaggcggaggcggaggtggtcaagtgcatccatctggggctgctctgcgtgcaggagaacccggcggaccgccccaacatgctcgacgtcctcgtcatgctccacggccactcgtcaggcttcgcggcaccgtccaagccggctttcgcctttgcctacggggagaccacgagttctgacgagcggggtatcctgtcagtgtctcgtgctgctgctgccttctctctgaacgggatgtccgcgtccgagttccagccaagatagaatggaagaattaattacaatcacggaagacacggtacaaatatagatacggttcgtggctcgtggccatttgtaatggaagtttacgtcaccaaattagcggaaaaaatttttggtgcagcccgctgcaaaacagaatgtttacagtccctcacaaaaaggaagattgactccacctgcaggtccactagataatattttagttgtgttattgctgctgcaggtgaggtcaattcttttttgtgtgagaggcagtaaacatcctggtttgcagtcggctgcaccaatttttttttccaaattatcaccactatttttccccatcgggataaagttgggaagttgtgctgttgttcacggttcactagggtatgtttgggacagtgaatggcttatgaaagttattaatagaaccttttatg

SEQ ID NO: 126031 - DNA, 1103 bp, Zea Mays
accagagcgaaatctgtctgtgtgaagtgtgattgtctggcctcgtcgtcctctggacgacttttcccccgtcttccacaaccccgagtccccaacccaccacggcgttgcggaatccacctgcaactgcaagcccacgaaatcgagccgagccccgacgccaccaaatcgtgtggcctcggagatcgagcagggtctggaagaaccaggggagagaccgtcagaagaggaggaccagcagcaggcaggcggtggtggcgaagtcgtcggcgtcggcggccggggtatctacgatgataacccggtcgaagctggtggagcaactgcgcgactaccagatccgatcccagcacaagcgtgacgttatcggagctatatcatggggcttgttgtgttgttttctgataatatcatcgtacatgacgctatacttcaggcacttttggcttagtgccattattatctcactcggtattcttcttcctgctggcctgtatattttgaggcaaagaaagctggctaagaaacgagagagaagactgttgttgcctctctctgtgtaaggttgttggtaggttccttgtttttgcgcctattcctgtcttgatagaatctgcattcttaacttgctgcttgtctggcgcacatccaacattttatacatctctggaccctaatacatattcttattcttcagtgttttcctaagtgctacaggagaaatgatagttttgcgagtagataccagttgtgttgtcagctacaaaactcatttttgtaaatttgtttggtcgatgacttcagcccaaggaaacaactcaacatgtcataatacattgggcgtcgccatacacgtgtatgcagatactagttcgtacttctgatggattttgttagctgcattccatcctagctcatttgctaagtgagtttttggttaaaatgaggacactggatggttttctgtttcttgtgcccagttgatgtttgtttctgacaaggttgtatatttgatggtttgtattgtgttacggaaaaaatgtatattattggctgaatccagcttggtactgaatgaatttacgttattgccgcgcgagata

SEQ ID NO: 126032 - DNA, 761 bp, Zea Mays
accagagcgaaatctgtctgtgtgaagtgtgattgtctggcctcgtcgtcctctggacgacttttcccccgtcttccacaaccccgagtccccaacccaccacggcgttgcggaatccacctgcaactgcaagcccacgaaatcgagccgagccccgacgccaccaaatcgtgtggcctcggagatcgagcagggtctggaagaaccaggggagagaccgtcagaagaggaggaccagcagcaggcaggcggtggtggcgaagtcgtcggcgtcggcggccggggtatctacgatgataacccggtcgaagctggtggagcaactgcgcgactaccagatccgatcccagcacaatgttttcctaagtgctacaggagaaatgatagttttgcgagtagataccagttgtgttgtcagctacaaaactcatttttgtaaatttgtttggtcgatgacttcagcccaaggaaacaactcaacatgtcataatacattgggcgtcgccatacacgtgtatgcagatactagttcgtacttctgatggattttgttagctgcattccatcctagctcatttgctaagtgagtttttggttaaaatgaggacactggatggttttctgtttcttgtgcccagttgatgtttgtttctgacaaggttgtatatttgatggtttgtattgtgttacggaaaaaatgtatattattggctgaatccagcttggtactgaatgaatttacgttattgccgcgcgagata

SEQ ID NO: 126033 - DNA, 663 bp, Zea Mays
accagagcgaaatctgtctgtgtgaagtgtgattgtctggcctcgtcgtcctctggacgacttttcccccgtcttccacaaccccgagtccccaacccaccacggcgttgcggaatccacctgcaactgcaagcccacgaaatcgagccgagccccgacgccaccaaatcgtgtggcctcggagatcgagcagggtctggaagaaccaggggagagaccgtcagaagaggaggaccagcagcaggcaggcggtggtggcgaagtcgtcggcgtcggcggccggggtatctacgatgataacccggtcgaagctggtggagcaactgcgcgactaccagatccgatcccagcacaatgttgcagatgttctcctgtgatgtgtgatgtatcagcagggtaatacgaaggcaattccacaatgatggtcgcacaaacgaatatcgccatggacctggtcatacgatcatatacggttaagtcagataaacaagaaattatggctttggctaatgtttgcaaggaaatatagtagtttcaaagtagcagcaatggaatgtttcatctgaaaattcatcttacgttagatgggatggttgattataagtctatcgcttaaactttgggggaaatgaccgaatgtgatagtgatatattattatctca

SEQ ID NO: 126034 - DNA, 222 bp, Zea Mays
ctatttgttgtacaggaaaacatagaatagaattcaaatttggtggtcacaaaagtgtggagactttaattcatataaagttaggcttaacattagtgcaaacagttgtattttattttagatttagggtacacttatgtatgcgttgtttgacaatgcttatttatgatatattgaatgatacttatttatattatattaattataatgttgttaaatata

SEQ ID NO: 126035 - DNA, 435 bp, Zea Mays
atggtagaacatatttggaagaatggatttacatcagactatactcggtggatcttctatggtgaagcgcatcgtacgagagaggaggtgttgagacaacgcgttgaggattatgatgctgatgtcggggtagcgaatatgttgaacgactatcacgagtcacaattcacccgaggatgtacggaggacgagctagagccgacaacaaaggtgttctacgacatgtttgacgtggcacaaaagccccttcatggccagacaaaggtttctcaactggatgccattggacgagtaatggtgatcaagtcgcactacatcatgagtcgagacacattcgatggtttgttgacagttattggcagcctgcttccgatggatcatggtctgccaaagagcatgtacgaggcacagaaactcctaacgaatcaagcttga

SEQ ID NO: 126036 - DNA, 114 bp, Zea Mays
atggtgcagtccatcgtctccatcgacaagatttgtgccatgcttgaggtattaggccatacgagaggcgttatccttataccggtactccacatgaaggttcatggagcatga

SEQ ID NO: 126037 - DNA, 1598 bp, Zea Mays
atgtcaaatggcatttctgtccctccctcgctcacctgaattttcagtttgctcaggcaaggcaacgattagcttcctctcgccgaataaaagctgtcttcttggtctgaggagggaaaaaaatctgtgtgtgtgtcttcgcgcaaaaataatttctcagccagcagattaagcatttaatgctggtgtgttaaccaaggcgcaaactttaatcaacggggtggttgcaaatgaggcaaccgcagaggaaaagggtcgggcggatggtggcagtggcacgccgcagctacctctcccctccccatcgccgccaacgccaaggccaacagcacaaccatcgcaccacccaagaaatggagctgagtgtgccccttctcctcctcgcggctccccaagctcctgctccgcgcgcgtagccgcgcggcacctcccagtcccaacacgcccgcaagctccgctcaccgcgaggtgctgtttgaaccgtgaagatggcggcgatgactgcttacaagtatcaagctcaggccttgatgagggactatctgctagctgatccactagttccgtacacctctgtgctcattggcattgtcctctgcaagatggcttacgatttcactcgaatattgagctccttttatttcaagggctacactttactgacaaaaatacagcgcatcgaatggaacaataggggtatgtccagcgctcatgcaatttttatcacggctgtatcattatatcttgtcatgtcaactgatcttttctccgaccgcgtcaagggacctattacattccgttattcgataatatccacctctgcgttgggggtttctgtcggctacttcatcactgatcttgcaatgatcttctggctgtatccttcccttggtggaatggaatatgtcctccaccatactgtttccctggttgcaatagcttacacaatgttgtctggggaagggcagttttacacatacatggttctcatttcagagacaaccacccctgaaatcaacttgcgatggtttcttgacactgctggactgaagaaatcaagtgcttacttggttaatggaattctgatgtttgttgcatggctggtggcaaggatatttttgttcatgtatgtattttaccacatctatttgcattacggtcagataatgcagatgcatgcctttgggtactacctgacatttgttgtgccatcagtgctctttgtaatgaacacaatgtggttcatgaagatcttaaaaggtgtgatgaaaacactggcaaaatggccatgacgtggatgacgccaagaggatctcagaactatcaacaggatttcgtctttctggcatcattacgtgaccttaatctgtgaagttatggatatcagggtaactagagaaacataatatgtaaagtattagcaaacaagctatattaggtgaaattgccctattttcagtcgagctggaagttcataaccggtttggtttgtaccggagatccagcacgctgttctgcttaccccacctgtgccatgtgtatatctgaagagaattttaatgggtggtttgttcaacagtacaatcccagtgctgtgt

SEQ ID NO: 126038 - DNA, 1448 bp, Zea Mays
gtgtgtgtgtcttcgcgcaaaaataatttctcagccagcagattaagcatttaatgctggtgtgttaaccaaggcgcaaactttaatcaacggggtggttgcaaatgaggcaaccgcagaggaaaagggtcgggcggatggtggcagtggcacgccgcagctacctctcccctccccatcgccgccaacgccaaggccaacagcacaaccatcgcaccacccaagaaatggagctgagtgtgccccttctcctcctcgcggctccccaagctcctgctccgcgcgcgtagccgcgcggcacctcccagtcccaacacgcccgcaagctccgctcaccgcgaggtgctgtttgaaccgtgaagatggcggcgatgactgcttacaagtatcaagctcaggccttgatgagggactatctgctagctgatccactagttccgtacacctctgtgctcattggcattgtcctctgcaagatggcttacgatttcactcgaatattgagctccttttatttcaagggctacactttactgacaaaaatacagcgcatcgaatggaacaataggggacctattacattccgttattcgataatatccacctctgcgttgggggtttctgtcggctacttcatcactgatcttgcaatgatcttctggctgtatccttcccttggtggaatggaatatgtcctccaccatactgtttccctggttgcaatagcttacacaatgttgtctggggaagggcagttttacacatacatggttctcatttcagagacaaccacccctgaaatcaacttgcgatggtttcttgacactgctggactgaagaaatcaagtgcttacttggttaatggaattctgatgtttgttgcatggctggtggcaaggatatttttgttcatgtatgtattttaccacatctatttgcattacggtcagataatgcagatgcatgcctttgggtactacctgacatttgttgtgccatcagtgctctttgtaatgaacacaatgtggttcatgaagatcttaaaaggtgtgatgaaaacactggcaaaatggccatgacgtggatgacgccaagaggatctcagaactatcaacaggatttcgtctttctggcatcattacgtgaccttaatctgtgaagttatggatatcagggtaactagagaaacataatatgtaaagtattagcaaacaagctatattaggtgaaattgccctattttcagtcgagctggaagttcataaccggtttggtttgtaccggagatccagcacgctgttctgcttaccccacctgtgccatgtgtatatctgaagagaattttaatgggtggtttgttcaacagtacaatcccagtgctgtgtactccctccgtttctttttacaagtcgtttccaacagccaatctataaatatcggcgacatct

SEQ ID NO: 126039 - DNA, 1374 bp, Zea Mays
ttgaacaatgctgagtccactatgtcctccatttcatgttatttttcaccccaagtcaaaaatgatcatgcaaattaaggatatagatgacaaacagaatgtgtggcgccagttataactcttatccaactctcactatgctttggtaacaacaaaacaagcctttagagtaatttatgtatgcgacagcatatatggcgggccttcacatttctggaccttgtgtgtcacggtaatcagttctgcattattcatagttatgcttctagtttgttgttttgacaaatggcatgctttctccttcaggcttacgatttcactcgaatattgagctccttttatttcaagggctacactttactgacaaaaatacagcgcatcgaatggaacaatagcgctcatgcaatttttatcacggctgtatcattatatcttgtcatgtcaactgatcttttctccgaccgcgtcaagggacctattacattccgttattcgataatatccacctctgcgttgggggtttctgtcggctacttcatcactgatcttgcaatgatcttctggctgtatccttcccttggtggaatggaatatgtcctccaccatactgtttccctggttgcaatagcttacacaatgttgtctggggaagggcagttttacacatacatggttctcatttcagagacaaccacccctgaaatcaacttgcgatggtaagaaactgaaaatgcaaaattgtttgaagttaattcttaatcgtcaacactatttgattctaatgtactttttttctttttaaggtttcttgacactgctggactgaagaaatcaagtgcttacttggttaatggaattctgatgtttgttgcatggctggtggcaaggatatttttgttcatgtatgtattttaccacatctatttgcattacggtcagataatgcagatgcatgcctttgggtactacctgacatttgttgtgccatcagtgctctttgtaatgaacacaatgtggttcatgaagatcttaaaaggtgtgatgaaaacactggcaaaatggccatgacgtggatgacgccaagaggatctcagaactatcaacaggatttcgtctttctggcatcattacgtgaccttaatctgtgaagttatggatatcagggtaactagagaaacataatatgtaaagtattagcaaacaagctatattaggtgaaattgccctattttcagtcgagctggaagttcataaccggtttggtttgtaccggagatccagcacgctgttctgcttaccccacctgtgccatgtgtatatctgaagagaattttaatgggtggtttgttcaacagtacaatcccagtgctgtgt

SEQ ID NO: 126040 - DNA, 1324 bp, Zea Mays
ttgtctagcttcggctgcacgacaagagcatgacttctctccgaagcctatcccttctataaataatcactacttcaacacttcactcacacttcgcatacactcctccacaacaatggaccggttcgtagattccaatatttttcttaggatggcgcaagacatggaagatgaagaccatgagctcgaggttaagacgtaccaacatcgtaggcgtcgttcacttaacgagcgtcggtatgctggttccattcccggtcgtgttcgaatccatcgtgaccatattagtggtgattgaaagggaattaggcttacacatttttcctaattgattttggtagttgaattgcccaacacaaataattggactaactagtttgctctagtctataagttctacaggtgccaaaggttcacaataagccaataaaagaccaagaaaagggttcaaacaaagagagcgaaagacaaccaaaaggcaccctggtctggcgcaccggactgtccggtgcaccagagcacttcagctcaaacttgctaccttcgggaattttaaaggcgctccgctataattcaccggactgtccggtgagtcaccgtccggtgtgcaccggagcaacggctacttcgcgaagcaacggtcgactacaacacattaaatgtgcgtctgcgcgcgcagaggacagagcagcgccagaaggcgcaccggacagtctacaggacctgtccggtgcaccaccagacagcccagaggccccacgagtcagagctccaacggtcgaaccccaacggtctgctgacgtggctggcgcaccggacagtgtccggtggcgcaccggactgtccggtgcgccatgcgacagcacacttccaacggccatcttttttggtggttggggctataaataccccaaccaccccacaatcaatggcatccaagtattcaagttttccactcttctacaacttacaagagctagcattcaatacaagacacaccaaagagatcaaaatcctctcccaactccacacaaagctttagtgattagagatagtgttttgtcgtgttcatttgagctcttgcgcttggatcgcttattttcttccttcattcttgtgatcaaactcaattgtaaccaaggcaagagacaccaattgtgtggtggtccttgcgggaacttcgtgttccgtttgattgagaagagaagctcactcggtctaagtgaccgtttgagagagggaaagggttgaaagagacccggtcttcgtgaccacctcaacggggagtaggtttgcaataaccgaacctcggtaaaacaaatca

SEQ ID NO: 126041 - DNA, 111 bp, Zea Mays
tcttcacctccacctacacctacatatccacctaccgaacatcagacccctccagctaccttgccgactcatcaacgagaagatgtgttagactttgtcgaaaccctcttc

SEQ ID NO: 126042 - DNA, 914 bp, Zea Mays
cccgtcggccgttgcgctgtcaagtgcgacggcgacggaccacgtgccatgccatgccatgccatgccgcgcacgatctcctcgcgcggagacgacgctgcctctccggtacctgatgccatgatgctctcgcaatctatcaattggattggcagatgcatgtgtcgttcactcgatcgtgacgggagctcgccgtatgaaaggctgtgtagactggcggcaggagatgcaggcatccccgggtcacgcgctcccaccaggtgcttgacggattgcgagggcacaggaagacgcacagcgcaggtcccagatagaaacagaattagtatgatctaagcatatcttatcagctcaatgattgtgttgtgagcacagaaagaagaccatatcatcaaaaagccatacagtactagcatctgtttgcatgaatcgtatgtacattccaagaaggcataggcatgataagaagaacatacagcaaactgacaaaaggtggaaggtatttcagcctgagaagagggctagacggtctacaggccttaggatggatgaactcttcaatacagtgtcactgatgattcgtacttcttggccgattctggctttgacatatcaccggaccgcctccggagcatctggcgcatgccgtcggccacgcggacggcggggttcaacttgaacatgttgcagaacgccatgtgagccctcacagcctcctctactccatggtgagccttcctcctgcatgcttcatctctgaccgcctcacagcacagcccacacaaccattggccatggaagcctgatctcacgctggcaatgtagtgcggggtgcagtcctccttcaggccacagcactcgcacttgaccgattctatctccattgcttgcttgcttgtttgctgctactgctt

SEQ ID NO: 126043 - DNA, 798 bp, Zea Mays
cccgtcggccgttgcgctgtcaagtgcgacggcgacggaccacgtgccatgccatgccatgccatgccgcgcacgatctcctcgcgcggagacgacgctgcctctccggtacctgatgccatgatgctctcgcaatctatcaattggattggcagatgcatgtgtcgttcactcgatcgtgacgggagctcgccgtatgaaaggctgtgtagactggcggcaggagatgcaggcatccccgggtcacgcgctcccaccaggtgcttgacggattgcgagggcacaggaagacgcacagcgcaggtcccagatagaaacagaattagtatgatctaagcatatcttatcagctcaatgattgtgttgtgagcacagaaagaagaccatatcatcaaaaagccatacagtactagcatctgtttgcatgaatcgtatgtacattccaagaaggcataggcatgataagaagaacatacagcaaactgacaaaaggtggaaggtatttcagcctgagaagagggctagacggtctacaggccttaggatggatgaactcttcaatacagtgtcactgatgattcgtacttcttggccgattctggctttgacatatcaccggaccgcctccggagcatctggcgcatgccgtcggccacgcggacggcggggttcaacttgaacatgttgcagaacgccatgtgagccctcacagcctcctctactccatggatggaaagatatggctcctgcgctttggactgtcccatggaatcttcctgccgtgctgactgctgagtg

SEQ ID NO: 126044 - DNA, 240 bp, Zea Mays
atggcagagatttgctgtgcgagtgttggagccttcgagggggcatgtgatgtgagcggacgcggcaagttgcaacacgcatctgcgtgcgccgacgcatgtggggctcagtgtttgtacgtgagccgtctaaaggaacaggcaggggcagatggcactgtccgtttgccatgtgaccggactgttgtcgggcaagcggaggacggctgcccgcaggacgcgacggcggttttccggtga

SEQ ID NO: 126045 - DNA, 1137 bp, Zea Mays
tcgtgtctgtctcctggagccgcccgccgctagccgcccccgccacgtcacggccgcccccgcccgcccccggccccgaccccgtccgccgcggccgcccccggcctcgttctcctcctcgcaactctcttgtccatacatcgtagccgccgcctgtctctcaccgccgacatcccgacagctctcagcccagatcgagcttccccgttcccaaatcgggtcctggttgggctcccgccaccgcctccctacaccaggtgccaaggccttcgccgaccacttcgccggcgaagagcgcccaacagatgaatgtagcggtgccaccacaatctccacatcttcgtctatatgactgcgccaagagtgccatcatcaaaatttttgcctttccttatgctacggtatgtgacctgtattgcgatagtggaatggatacagacaagtggtgtgatgcccaggttggccactacataggcatcgatgcctctgcatcgggtgtcaactatgcccgtgagctatgggagaacaggaggaaacctttcactgctgaattcatcgagttggatccttctgatgatggttttgaagctcaagtgcaggaaaagggcatccaagcagatatggtttgttgtatgcagcacttgcagtcatgctttgagaatgaagaacgggcaaagaagcttctgaacaatgtatcatcacttcccaaacctggaggctacttctttggcataactccagattcatctacaatatggacaaaatatcaaaagaatgttgaggctgcacataataagggtttgaagactgttccaaatagcattcgctcagagaactataccattacctttgaagtcgaggaagagaagtatgagttgaaattgtatactaaatacacctagaaacttttgttacactgacttcctgaccatgtatgagatattgtctcttattagtactagatgatgagatgtgtctttttatgactatggatgagacttttgtgatgtaattgatgagactatggatttaaatattgttatgtgattgtgtgtgagatgttttatgtgaaaatatgttgtgctatatagctgttgatatatttgttatattatggaatatggtgtaaaataaaaa

SEQ ID NO: 126046 - DNA, 1896 bp, Zea Mays
cattccccttcacttcaccccccgccgaggggaaagtgtgatgattagcagacttgcagcttgtatctcatttataaatacacaaaccccacccagcaggccagcactcaagaaccgcaaggaggcgcctttccggcgttgcccttgtttttttcccctctccaactcgaggggttttcgatccggggggcggttcccggcgagatttttgacccggcccggtgcttggttccattgatctccgtctgctactccttcctcctacttggttgccttgccttcccggtccctgatcggagcctgtcgccggcgggcgggcgggctgagtttactgcccgttactggggggacaaagagcagaaggaacagagagtaaaaaatcttgggccttgatcggatccgaggacggggcaatgcggtaataaggagcggccatcactgccggagtttgatccatccaaggagaagaaagaggaggggaggccgcgctttcctttctttctgaagcggaggcaactcccgaggcgcccgccatgctgcgcaacagatcgagaagggcggttggtggtggtgccaaccaagcccaaggacgagcgggcggcctcatggccgagctccccgcggccgccgccgcccagtcgccgaggcatccttcgtcgtcctcctcctcctctcccgctgctgctcccgtgttcccttccccgaggccgttcgtggcgatggcggcgctgccccaggccgggctcctgccggacgggtcctccgaggggccccggtcagccgtgagccccacctccatcctcgagaccaagcacttctgctgctccccgctcccgccgttcctgtcggagcggagcctccggagggcggcgcgcgtggacgcggccgcggccgcggagccggccggcgtcggcctcgccgacgtgctccgggaccacggggacgccaaggtcgccgggggcaaggtggtgctagggtcccagctcagagtccaggtcccgtccggcagggccgtcgagctgctctcctccccgatcgagttcggcgccaagaacagggacgcgcagctggcggcgctgtcgcccgccaggaggctcctgccggaggtcgtgagctcgccgtccgcccgggtgttcgccgccggcggcgtggccgtcgtgccccccggcgagatggccatgtcggaggactacacctgcgtcatctcgcgcggccccaacccgaggaccacgcacatcttcgacgactgcatcgttgagagctgcggggatttgctagccgacaagcccgcggccggcggcgcagcagctgctgcctgtggcttcttcagctcttgccatgcatgcaacaagcaacttggacatggcaatgacatcttaatctatcgaggccataaagcgttctgcagcagcgagtgccggtaccaggagacgcttttggacgaagcggtggacggagaatttgcgctaggcgatggaggaaaaggaggagggcgttgttagtggaggagaagagaagccatgaggacgatcctgaacaaccaaccaccggcaccgagacgagatttctttctttctttctttcttcttcttcttcttttctttccttttcgttctgtctcctttgcgggatctgcgtgctgttttcggtcgtcgactcgatgaggagagtggtggtgatcttattagtcttttgcggattaaagaccttttttttttggcgcccgctttcgtaagaggctgaagattggtgacctgggcctgatcttgttcatgcaacttattttcccagctggttccgatgttatgatgcgcttcgatgcttgtccatgtgactcgctcatccagtgtggaccctagcctgaagtaaattgaaagaggggaaaaaatacttgtc

SEQ ID NO: 126047 - DNA, 639 bp, Zea Mays
atggaacgcatattacaggacacacaaccatatgcaggtagcatagcgacaccggtcaccgggtcacgcacgatcatcggacgacaagaagctatagatcaccgcatctctggccccgctgccgcggcgtccagcgatgtagcggcgcagcaccccctccctgtggaagccggccttctccagcactctctgcgaccgcacgttcgccacgtccgtcaccgcctccagccgttccagccccggcaggtcgtcgaacaccgtgcccaccacctgtgcgcgcggccatggaggagatccacgattacgaacaacgccatgtccaagaacgcccatgcgagctggtaatcactgtaccatcctgacggcggcggcggcgatgccccggccccactggtcgtgcgcgagggcgtagccgaggttggccctgcgaccgccctcgtcggcgtacggccacacggacacctgccccacgggcacgtcgccgaagcagacggcgcggaaccacgggtggcccagcacggtgtccctgatctgcgccacggcctgctctcgggtggcgcagagcggccgcttcaggtgccgcatcacgcggtcgtccgacgcccacgccatgaaggcgtccgcgtccgccaggcccag

SEQ ID NO: 126048 - DNA, 1275 bp, Zea Mays
aacgcaggagcaacacagcgtcgccggcggcgatggatcccctctccgtgctccgcgactacgctggccgcaacgagctggacaagatcatcttctccggcgacgagatccacttcggctctgactacaccttcccggcttccacccccaccgccttcgcctccaagcagtcaggtcgcccctacccgctctccgctgccgtcttcctcgcgcagcaccacgacctcaagcacaccgacttcatccaggccgcgcgcctccgccgcatcccgcccgtatcgctccccgaccgcaagaccttcctcgacttcctccgcttcggccacaactccctcccctccgccgacccgctcctcccctccgccttccagccgcaggagccccacctccatccgccctcgcctccgccggaggaccccgcagctaccgaagaggccaccacgggaaagcaaatccgcgcgctcgagcggcccttcaaggaccgcaactcaatcctcgacgcccgcggccgcgactttctcgccgtcttccatgccgccgtgcgccgccaggacgagcagctcaagggcggcggcaaggatgcggcgccctcttcccgccccaactctggctccgtcgctgcagccctggccaagcccaaggtgctggacaggtccctgggcgacggcgtcgtgcccatcatccttgtgcccagcgcctcgcagacgctgattacgatctataacgtcaaggagttcctcgaggacggggtgttcgtgcccagcgaggagaggatgcgggcgaccaagggagggaagccggagagcgtcacggtgcagaagaagctgattcgtacggagagagctggcggcgctgggggtgccgtctccttcgaggttagggacaagccggcttcgctcaagtcagacgattgggggcgggtggtggccgtgtttgtgctcggcaaggagtggcagttcaaagactggcccttcaaggaccatgtagagatcttcaacagagttattggtttctatgtgcgctttgaagatgatagtgtggaagcagccaaggtggtgaaacagtggaatgtgaaaatcatatctataagcaaaaataaaaggcatcaagacagaacagctgctcttgaagtatgggagcgcttggaggaatttatgcgggcacggacataattgatgtgcagtcatgtaagccttatgatttcacttttactgagttcttatatgtcacagcaagttctagtaggattggatatcttgttttgtatgattaaat

SEQ ID NO: 126049 - DNA, 1558 bp, Zea Mays
aacgcaggagcaacacagcgtcgccggcggcgatggatcccctctccgtgctccgcgactacgctggccgcaacgagctggacaagatcatcttctccggcgacgagatccacttcggctctgactacaccttcccggcttccacccccaccgccttcgcctccaagcagtcaggtcgcccctacccgctctccgctgccgtcttcctcgcgcagcaccacgacctcaagcacaccgacttcatccaggccgcgcgcctccgccgcatcccgcccgtatcgctccccgaccgcaagaccttcctcgacttcctccgcttcggccacaactccctcccctccgccgacccgctcctcccctccgccttccagccgcaggagccccacctccatccgccctcgcctccgccggaggaccccgcagctaccgaagaggccaccacgggaaagcaaatccgcgcgctcgagcggcccttcaaggaccgcaactcaatcctcgacgcccgcggccgcgactttctcgccgtcttccatgccgccgtgcgccgccaggacgagcagctcaagggcggcggcaaggatgcggcgccctcttcccgccccaactctggctccgtcgctgcagccctggccaagcccaaggtgctggacaggtccctgggcgacggcgtcgtgcccatcatccttgtgcccagcgcctcgcagacgctgattacgatctataacgtcaaggagttcctcgaggacggggtgttcgtgcccagcgaggagaggatgcgggcgaccaagggagggaagccggagagcgtcacggtgcagaagaagctgattcgtacggagagagctggcggcgctgggggtgccgtctccttcgaggttagggacaagccggcttcgctcaagtcagacgattgggggcgggtggtggccgtgtttgtgctcggcaaggagtggcagttcaaagactggcccttcaaggaccatgtagagatcttcaacagagttattggtttctatgtgcgctttgaagatgatagtgtggaagcagccaaggtggtgaaacagtggaatgtgaaaatcatatctataagcaaaaataaaaggcatcaagacagaacagctgctcttgaagtatgggagcgcttggaggaatttatgcgggcacggacataattgatgtgcagtcatggaaaggataaaagacaaccattttactagattcattcgcaatattggtcggtgactgtagatggcagaatggaatggccgggagcctatgaagactgcaatctttgtacgctaggatgtatttgtaatgttgtacttgcaaactgctaacttatttctagtttaagtatatgagacaattttgcaagttgcgcctgaaagtatattttctttctacgtctctatgttctgggggtcgctggctctcatcctgccattatctgaggtctatgttttaatttgttttttctatataataacctgcttcagtttaacgttatattgtaaaatgaataccctgatgtgtgaataccatgatctgattcgtggca

SEQ ID NO: 126050 - DNA, 457 bp, Zea Mays
cgctgtacaacaagccgccatttcattccgactagtaagaaaaatattttcatggcgcggctctggctgctcttgttacattactattgctacatcaggacgccaaaaagaagaaaaaaaacaaacagaaaggtgaaaccaggacggccttcttccaaggtggtgcctgggacacaaaacactcccttttttctctctcccgaaaaccgggactcgacgtttacattcaaaactgcgcaaaaaaaaaaaaaaaactgtccattcatggtacttaattggtaaagagatcctctacttgtttgaaaatctaacctagcactgatggtctttgccgttcagcggatcatacctaatcttacagtcagaaagcacctcctcgaatatctatctgcacgttgaagacggtaggattaggaatcggggcgtcagtcgcagcaaattttccacacaaaaaaaa

SEQ ID NO: 126051 - DNA, 585 bp, Zea Mays
atggcggaaacagttaagcgctgccgctgctccgggccaataaagaaacgccacagatgcagaacaggagcgagcctaggagctgcccccgggaacacggcggaaggcacggatgcgaccagcgctggggcgcctcgagcaatgcaaggacctgagcagcagctcagcgggtggcgcggccgcggatttgaagccctggggagggagatgaccagatggcgcagagagaagggggctgcaggcagccaggcagtgctgtgcaactgtgcaaggacggacgggactcgctgctcctcccttctcgtctgcgcgggtgcgcgctcgcgctgttcgagaagacgactggcagcagagaagcagggagaggagggtaggccggtaggggagtggggggagagcagcagccagcagcggcagtgggtactggcctactgggagggagcaaagagcgaaggagctgagaaatatgaagggaataaaggcaaaagcgttgggcccctttctttccccttctacggttctatgcctacaactacaatagacgttgggccccctttctttagcttcagtataataaaatggtaa

SEQ ID NO: 126052 - DNA, 2146 bp, Zea Mays
cgcgcgcgcccgccgctacctgccagtcgcgcgcctgccgccagcgccccgccgccaccccacgcgcgccccaccgcccccgcgcgccggctcgtgtactccgctgtccgctcccattccactatggcctagctgcgtgctgctctggcatcggtcggtggataagcccagcaggcaagcaggcaggagactaggagagctcagcactgcacgcacgctcccctccccttactggccaaatcgatcgtccccttcaggttccaggctccggagcttgctttacttcaggttgtctagctgcatgttgaagtataattccggatgtatccttgaagtgtaaacatttaaggattgtgtaattctttgggtaccaaggcccatttttaaattttaaacaatccagtttttgcttgaatgtatcatcagagattcgcagtagggaacatcagagattaatatttcttgtcccttgaatgtatcatggcttgtttagaggcgggggcagcactttctgatctcaaattttgttcttcacttatatttatttcatcagagattcacagtttttatccgctaggaagggtggtaaaaggctaagtttttttttatgaattctctgcgttcttcactaatccccaccctaatcagtaaacacgcttacgaatcgtttcctaatcgtgtgacagggacaacaatgacctcagggacaacaatgacctccaagacgagcggcagcataaccaccaacctgagcaccacggggaagctctcctccgtgggcagcagcttcatggcgtctgccggcagccgcagcaccagcggcggggtttgacaagggggccaagtactccgacgaccagatcctcgaggcgcccaacctccgcaccttcacattcatagagctcaagacggccaccaagaacttccgtccagacagcgtcctcggcgaaggagggttcgggagagtctacaaagggtgggtggatgagaagaccatggcgccgaccaagaacgacaccggcatggttgttgcggtcaagaagctcaactcggagagcatgcatgggtttgaggaatggcagagatcgtgagtcagagcgcaaggatcctgattatgacagaagctatgacagggtttccaggccagttatacatggtcatataccaccccgcgtgccccgcgccgccagcccgcgcctccaccccgtgcgatctctgtttagatcaatcgagttgagtttgttcattccaagtcattattgcatagagatatcaagcctgataattttctcatgggtctcgggaaaagagaaaaccaggtttatgttatcgattttggacttgcaaagaagtacagagatacatcaacacaccagcacattccatacagaacaaagccggagggatgacatggaataaaaaacaaaagtattcgggaaggttggtttaatacactgtcagccttccatggtagggcctgaaagctgggaacaaaaaacaaaagtatgaaaagatcagcgaaaggaaaattgctacttcaactgaggctctctgccgtggatatcctaccaaatttgcttcttacttccattactgtcgctcacagcgtttcgaagatgcaccggactatcagtacctgaagaatttgttcagagacctttttattcgggaaggacatattgctaagaatctgccacattatgtttgcttgaggtattaatttatccaggtgtttaatgctggagtacagttagaagatccctaatcaattgcttctcatttcagtcgtgtaactttattcatgctacaacaacgactttgagcgaacatgagaccactgagctctagagtgaatgaaggacgtcgtctttggaagtcagacatcacctagagctagggtgtccattcttgacatgtttctcttagtgataggtggatactgtctagttaggaacagagtcttgagggattgatggacgcatgcatcttcaattcctgtgtgttgtattactactggtacaatctccaattcttgtgaacttatgtatttggacttgtgtgaatttgtgatatgaacatatatccatgtgtttgaaatctatattgtatgtgatattttgtgttgcatgtgatattatgtttgtct

SEQ ID NO: 126053 - DNA, 1763 bp, Zea Mays
cgcgcgcgcccgccgctacctgccagtcgcgcgcctgccgccagcgccccgccgccaccccacgcgcgccccaccgcccccgcgcgccggctcgtgtactccgctgtccgctcccattccactatggcctagctgcgtgctgctctggcatcggtcggtggataagcccagcaggcaagcaggcaggagactaggagagctcagcactgcacgcacgctcccctccccttactggccaaatcgatcgtccccttcaggttccaggctccggagcttgctttacttcagggacaacaatgacctcagggacaacaatgacctccaagacgagcggcagcataaccaccaacctgagcaccacggggaagctctcctccgtgggcagcagcttcatggcgtctgccggcagccgcagcaccagcggcggggtttgacaagggggccaagtactccgacgaccagatcctcgaggcgcccaacctccgcaccttcacattcatagagctcaagacggccaccaagaacttccgtccagacagcgtcctcggcgaaggagggttcgggagagtctacaaagggtgggtggatgagaagaccatggcgccgaccaagaacgacaccggcatggttgttgcggtcaagaagctcaactcggagagcatgcatgggtttgaggaatggcagggttgcaattttcagagatcgtgagtcagagcgcaaggatcctgattatgacagaagctatgacagggtttccaggccagttatacatggtcatataccaccccgcgtgccccgcgccgccagcccgcgcctccaccccgtgcgatctctgtttagatcaatcgagttgagtttgttcattccaagtcattattgcatagagatatcaagcctgataattttctcatgggtctcgggaaaagagaaaaccaggtttatgttatcgattttggacttgcaaagaagtacagagatacatcaacacaccagcacattccatacagaacaaagccggagggatgacatggaataaaaaacaaaagtattcgggaaggttggtttaatacactgtcagccttccatggtagggcctgaaagctgggaacaaaaaacaaaagtatgaaaagatcagcgaaaggaaaattgctacttcaactgaggctctctgccgtggatatcctaccaaatttgcttcttacttccattactgtcgctcacagcgtttcgaagatgcaccggactatcagtacctgaagaatttgttcagagacctttttattcgggaaggacatattgctaagaatctgccacattatgtttgcttgaggtattaatttatccaggtgtttaatgctggagtacagttagaagatccctaatcaattgcttctcatttcagtcgtgtaactttattcatgctacaacaacgactttgagcgaacatgagaccactgagctctagagtgaatgaaggacgtcgtctttggaagtcagacatcacctagagctagggtgtccattcttgacatgtttctcttagtgataggtggatactgtctagttaggaacagagtcttgagggattgatggacgcatgcatcttcaattcctgtgtgttgtattactactggtacaatctccaattcttgtgaacttatgtatttggacttgtgtgaatttgtgatatgaacatatatccatgtgtttgaaatctatattgtatgtgatattttgtgttgcatgtgatattatgtttgtct

SEQ ID NO: 126054 - DNA, 1681 bp, Zea Mays
gctttgtatagtcattcccttgtgctcaactctttgtgatacaactatgatcagttgataaaagtggcacataacttgagcaagttttatattttgagtacctccctattgtaacatatcttgttacacttctaattttgtggctagaacatgaggtaactggtaagagagttcctttttcatttcatgtggtagggtttccaggccagttatacatggtcatataccaccccgcgtgccccgcgccgccagcccgcgcctccaccccgtgcgatctctgtttaggttcaagtttccacgaagcacatttctgctcaaccatctgctttcatttaactgcattatatattaatgtcctgtatttttctagatcaatcgagttgagtttgttcattccaagtcattattgcatagagatatcaagcctgataattttctcatgggtctcgggaaaagagaaaaccaggtttatgttatcgattttggacttgcaaagaagtacagagatacatcaacacaccagcacattccatacagaacaaagccggagggatgacatggaataaaaaacaaaagtattcgggaaggttggtttaatacactgtcagccttccatggtagggcctgaaagctgggaacaaaaaacaaaagtatgaaaagatcagcgaaaggaaaattgctacttcaactgaggctctctgccgtggatatcctaccaaatttgcttcttacttccattactgtcgctcacagcgtttcgaagatgcaccggactatcagtacctgaagaatttgttcagagacctttttattcgggaaggttttcagtttgattatgtttttgactggaccattctaaagtaccaacaggcatagatgaccactgcaccacctcgtgcaattgtctgtacaaggaataaacttaccctcctaccttaagtagtagtagagattgtattgggtatagaaatgtacttcttttgttatgttatatttcattgccccctctctattttggttcctggccttggtttttgtttcttgtattttttttccatgtcgtctagctactgtagttgcccatcgtcaaagttttgtagagtggttagtgtttttggttgacagacattggtgctagatttgggatcagccttcctaaacagtaccatttactttagctcaatgatatgaataatgcttgtttgcaggacatattgctaagaatctgccacattatgtttgcttgaggtattaatttatccaggtgtttaatgctggagtacagttagaagatccctaatcaattgcttctcatttcagtcgtgtaactttattcatgctacaacaacgactttgagcgaacatgagaccactgagctctagagtgaatgaaggacgtcgtctttggaagtcagacatcacctagagctagggtgtccattcttgacatgtttctcttagtgataggtggatactgtctagttaggaacagagtcttgagggattgatggacgcatgcatcttcaattcctgtgtgttgtattactactggtacaatctccaattcttgtgaacttatgtatttggacttgtgtgaatttgtgatatgaacatatatccatgtgtttgaaatctatattgtatgtgatattttgtgttgcatgtgatattatgtttgtct

SEQ ID NO: 126055 - DNA, 2542 bp, Zea Mays
ctatttcataaaaacctagaggcgaccggctagcgccatatcccgcgccgccgccgccgccgccaacgcttaatgctagtgttcctccggcgaggcctcttgctcgtccggcagcccaccacccgcgtccttgccaaaccgtctctccgccctgcttgtctcttcgtccaccacttcgccgtcgacacgatgggtgagggttctgctgctggtaaggacgcgaaggggaaggggaaggggaagaccaaggccgccgccgcggattcggccctggtcgttcgcgacgactcctacctagaggcggtcactcagaagaggattcgcttcttcgaggagatccaggcaaggcaagccgtcgagcggctgaatatcggcggcgaagttatcaaggtaactttgcctgatggcgctatcaaggagggtaagaaatggataacaaccccaatggatattgctaaggagatatcaagtggatttgcagctagttgtttgatagctcaagtggacgaaacactctgggacatggggaggccactcgaaggtgattgtaaattgcaaatgttcaagtttgataccaatgaaggtcgtgacaccttctggcactcaagtgctcatattcttggagaatctattgagagagcatatggatgcaagctgtgtattgggccttgcaccacaagaggggagggtttctactatgatgcttactacaatgatcagacattgaatgaggagcactttggtatcattgaaaaccaagctaaaaaggctgttgcggaaaagcaaccgtttgaacgcattgaggtcagcagggcagaagctcttgaaatgtttgctgagaatgaattcaaggttgaaatcattaatgagttgcctgaggacaagaccattactgtatacaggtgtggtcctttagttgacctatgccgtgggccacacatcccaaatacttcctttgtcaaagctttcgcttgtctgaaggcttcatcatcatattggagaggaaaagttgaccgcgaaagcctgcagagagtatatggaatttctttccctgattctcgacgtctcacggaatataaacattttctagaggaagctaagaaacgtgatcataggatattagggaaagcacaggaactcttctttttccatgaacttagccctggaagctgcttcttccttccacatggtgctaggatatataacaaactgatggacttcatgcgacaacagtacagagatagaggataccaagaggtgttgagcccaaatatttacaatatgcaactatgggaaacttctggacacgccgcaaactataaggagaacatgtttgtttttgagatcgagaaacaggaatttggacttaagccaatgaattgtccaggacactgtctaatgtttgctaatagggttcggtcgtacagagagttgcctcttcgcatggctgattttggagtgcttcatagaaatgagcttagtggtgctcttacaggtttgacacgtgttagaagattccagcaggatgatgctcatatcttctgcagagaagaccaaatcaaggatgaagttaaggctgttttggaattcatcaattatgtttatgagatatttggcttcaaatatgagttggagttgtctacgagaccagagaagtatctaggtgaagttgaaacttggaacaaagctgagcaacaattgacagaagctttaaatgagtttgggaagccatggaagattaatgaaggggatggtgctttctacggcccaaaaattgatattggtgtgtttgatgcccttaagaggaaatttcagtgtgcaaccctacagctggattttcagctgcccattcggttcaagctggcttattctgctgaggatgaagccaaaattgaaaggcctgtgatgatacacagggcaatcctaggttcggttgaaaggatgcttgccattcttttggagcattacaatggtaaatggcccttatggctaagccctcgccaggccattgtttgctcggtatcttctggttcagtggaatatgcgaaacaggttcttgccactctacatgaagctggttttcatgttgatattgacgcgagtgacaggacaatacaaaagaaggtacgggaagctcaactggcccaattcaactacattcttgtcgtaggtgcacaagaggccgagactggaaatatatgcgttagggtaagagacaatgctgacctggtcacaacgagtgtagatggcttcatcacacgtttgagggaggaaatcgcagccttcaaatgattttgatgctgcataatttcctactactcgtttgtgattttgacgagtttttagtgaccagcatcgagttcctcgtgttactgttcttgtttgtatgaagctaaaaggttgtctttttgttattaattacagatgcgaagttaaatactgccgctagtaaaaaaatatgcttgttgacttccagtgatttacgttactgttggacagtgtcttcagttttcgccctctcttaccacccaccatgttgacc

SEQ ID NO: 126056 - DNA, 441 bp, Zea Mays
atggcgcgcaccgcggcgcagtccatgaatgtttggtttaattcagctcttttcgttcaagctcgtgcaacaggatgtttgatccttatacaatttgctggcgagaggagtggtcgcctactcgcctgttcagccgctgaaaagacaacagaggaggacgagaacgcgctggagggggagggggcctctgcagactacaaccgacgcacgatggagggagcgcaactgctgctcgagcagagggccgccaaagcacaacagggcggcaggagaggagagcggcgacaatggtccattctgtggccatattacctgttcagtagagatgatggaagcagcagaatggtcagcaagccgaagttggacttggttgaggacttgagtagtacatactacagagaagctgcagatggtggtgctgttggaatttctgtttactag

SEQ ID NO: 126057 - DNA, 1612 bp, Zea Mays
cattgcactagtttagaggacattcttgtactgctcatcagcccgccatctgtcggccccacatggcgatccagcctcggcccctccacgtcgccctctccccagctgcttccgccgcccctccccatcgcgtcgcccgtctgcaaactgccgcctttgccgatccgcctccacatctccgcctggaagacgagaaacgaggaagacgatcccacctcgcctggaaaacgcatcccaagacttcaaccttcctttccggccggagatccgcttcgcatctccgcgacagatccgggcaaacgggccgatgcagttcttcggcggctcgtcgctgacgtcggtcgcgccggaggcgaccccagccccggcggcgccccctggtacgggcacgggcgccagcgcgcaggtcctctacgtcttcaaccgcaacggcgtctgcctgctctaccgcgagtggcaccgccccctccgcacgctcgaccccacccaggatcacaagctcatgttcgggctcctcttctcccttcgctccttcaccgccaagatcgacccaaccacggcagaaaagggaaatcttggtgtgccactactgccaggccaaggttgttcgttttatagcttcaagacaaacacatacaaactgaactttacggagagcccttctggtataaagcttatactaattacacatccaaggactggtgatcagcgagactcgctaaagcatatctacaacctatatgtggaatacgttgtaaaaaatcctctgtatgctcctggaacaccaatcaagtgcgaacttttcaacaaacatctcgatcaatacgtgagaacaataatttgatgtcattgagacaatgggttggtgaggcaaaaaaaggtccatttcatgttctttagcgtgatatcaccatttcgtggatggtagacttttctggtggaaaatttgcacagccgcaccatgggagctgcagtattcttgtgtaccgacctcaatttgacagctctactgtgacaacactcctgtagcctgtttgtttgatcgttacggatgcattcgacagggaagctgcattgtgcattgtcgcttctagtgtgacgtgtacatgattaatccatgggttattgcgtcaccgttcaagggggttcatggtcaagtagtaattatttcatatttgaaccggtcgccttgtcagatgactagactgaaacatcatgttttccgcttgagacattgtatgatttgtatggttggctgctaggataaagtcatatcaggaaacgtgatactaaaggtcttcatgctaggcgatttcggtctcggtcgtatccggtagtctccagattatcagaatgttgactgcatgaaatgcatatacaccatcctaactgttctaataagtcaagtttttggcgactcaatcattggctaagagcaacttcaaaagaatatattctttctattctcttagaacagagattttagatttttttagaaaaatgtctttcaacagtttatctaaatggttattcaaatgtaatcatcttctattccgacggtagttaaagatataaaatgtgaatgacgctaaagtgcaaacaagataaaaaa

SEQ ID NO: 126058 - DNA, 2234 bp, Zea Mays
ctgtcggccccacatggcgatccagcctcggcccctccacgtcgccctctccccagctgcttccgccgcccctccccatcgcgtcgcccgtctgcaaactgccgcctttgccgatccgcctccacatctccgcctggaagacgagaaacgaggaagacgatcccacctcgcctggaaaacgcatcccaagacttcaaccttcctttccggccggagatccgcttcgcatctccgcgacagatccgggcaaacgggccgatgcagttcttcggcggctcgtcgctgacgtcggtcgcgccggaggcgaccccagccccggcggcgccccctggtacgggcacgggcgccagcgcgcaggtcctctacgtcttcaaccgcaacggcgtctgcctgctctaccgcgagtggcaccgccccctccgcacgctcgaccccacccaggatcacaagctcatgttcgggctcctcttctcccttcgctccttcaccgccaagatcgacccaaccacggcagaaaagggaaatcttggtgtgccactactgccaggccaaggttgttcgttttatagcttcaagacaaacacatacaaactgaactttacggagagcccttctggtataaagcttatactaattacacatccaaggactggtgatcagcgagactcgctaaagcatatctacaacctatatgtggaatacgttgtaaaaaatcctctgtatgctcctggaacaccaatcaagtgcgaacttttcaacaaacatctcgatcaatacgtgagaacaataatttgatgtcattgaggtaatttctatccttggtgttttgcgcagcacctgaaatactagttctttgaatgcttaacaatcgatcattggtgtgatgtacagtgctgcatgtattttgcatcagtgtttgacaatctttttatgtgattatatactttgggctctttattgctcattcccatttgcttcgtatgaaccttttgtaaagttctatcgagttgacaaaaaatcctgactaaaaaaatttcagatgcttttcttgtgtttccttctatcatctggaaaccgacatttaaaattatgtatcataagaatctcgacagctttacttgctcttaaggatctgtcaataatttaggccgtgcttatgtgagcttctggccatttttgaactgctagcttttggaaggcgcaggcttctggcttctgggagctcctatcttttggacctcttataagttagcagtccaaaagtggctagcagctcaaactaacatgttctcggtgtttatggcagagagccattgactcaccttcgtccttgttcagctgagcattgtgttccagtttcacacaatgcggtcttactgtttatctagaactggcacaaccgagaaggcaggcaggcatagctgctaatatacatgtctttctcatacttatcaccagtgaaatgtttatttgcagacaatgggttggtgaggcaaaaaaaggtccatttcatgttctttagcgtgatatcaccatttcgtggatggtagacttttctggtggaaaatttgcacagccgcaccatgggagctgcagtattcttgtgtaccgacctcaatttgacagctctactgtgacaacactcctgtagcctgtttgtttgatcgttacggatgcattcgacagggaagctgcattgtgcattgtcgcttctagtgtgacgtgtacatgattaatccatgggttattgcgtcaccgttcaagggggttcatggtcaagtagtaattatttcatatttgaaccggtcgccttgtcagatgactagactgaaacatcatgttttccgcttgagacattgtatgatttgtatggttggctgctaggataaagtcatatcaggaaacgtgatactaaaggtcttcatgctaggcgatttcggtctcggtcgtatccggtagtctccagattatcagaatgttgactgcatgaaatgcatatacaccatcctaactgttctaataagtcaagtttttggcgactcaatcattggctaagagcaacttcaaaagaatatattctttctattctcttagaacagagattttagatttttttagaaaaatgtctttcaacagtttatctaaatggttattcaaatgtaatcatcttctattccgacggtagttaaagatataaaatgtgaatgacgctaaagtgcaaacaagataaaaaa

SEQ ID NO: 126059 - DNA, 1558 bp, Zea Mays
ctgtcggccccacatggcgatccagcctcggcccctccacgtcgccctctccccagctgcttccgccgcccctccccatcgcgtcgcccgtctgcaaactgccgcctttgccgatccgcctccacatctccgcctggaagacgagaaacgaggaagacgatcccacctcgcctggaaaacgcatcccaagacttcaaccttcctttccggccggagatccgcttcgcatctccgcgacagatccgggcaaacgggccgatgcagttcttcggcggctcgtcgctgacgtcggtcgcgccggaggcgaccccagccccggcggcgccccctggtacgggcacgggcgccagcgcgcaggtcctctacgtcttcaaccgcaacggcgtctgcctgctctaccgcgagtggcaccgccccctccgcacgctcgaccccacccaggatcacaagctcatgttcgggctcctcttctcccttcgctccttcaccgccaagatcgacccaaccacaaaagggaaatcttggtgtgccactactgccaggccaaggttgttcgttttatagcttcaagacaaacacatacaaactgaactttacggagagcccttctggtataaagcttatactaattacacatccaaggactggtgatcagcgagactcgctaaagcatatctacaacctatatgtggaatacgttgtaaaaaatcctctgtatgctcctggaacaccaatcaagtgcgaacttttcaacaaacatctcgatcaatacgtgagaacaataatttgatgtcattgagacaatgggttggtgaggcaaaaaaaggtccatttcatgttctttagcgtgatatcaccatttcgtggatggtagacttttctggtggaaaatttgcacagccgcaccatgggagctgcagtattcttgtgtaccgacctcaatttgacagctctactgtgacaacactcctgtagcctgtttgtttgatcgttacggatgcattcgacagggaagctgcattgtgcattgtcgcttctagtgtgacgtgtacatgattaatccatgggttattgcgtcaccgttcaagggggttcatggtcaagtagtaattatttcatatttgaaccggtcgccttgtcagatgactagactgaaacatcatgttttccgcttgagacattgtatgatttgtatggttggctgctaggataaagtcatatcaggaaacgtgatactaaaggtcttcatgctaggcgatttcggtctcggtcgtatccggtagtctccagattatcagaatgttgactgcatgaaatgcatatacaccatcctaactgttctaataagtcaagtttttggcgactcaatcattggctaagagcaacttcaaaagaatatattctttctattctcttagaacagagattttagatttttttagaaaaatgtctttcaacagtttatctaaatggttattcaaatgtaatcatcttctattccgacggtagttaaagatataaaatgtgaatgacgctaaagtgcaaacaagataaaaaa

SEQ ID NO: 126060 - DNA, 946 bp, Zea Mays
cggcgtccccgactccgatcctacaaatgcccatgcatgcgagtctcgtccaatccacaaccacacggcccggaaatggcatccgttttgcgcgtactcgctctcctcctcgtggccgccgcggtggcggacgccgcgagcatcgtggtgaccaacaagtgcgcttacaccgtgtggccggcggcgctgccgggcggcggcacggtgctgaacaccggggagtcgtggcccatcgacgtgcccgcggggacgcggagcggccgcgtgtggggccgcacggggtgcggcttcgtcaccaacggcacgctggggcagtgccagacgggcgactgcggcggcacgctggcgtgcagcaaggtcgggttcgagcccatcacgctggccgagtactcgctcggcggcacaggcgccgaccggttcgacatctccctcgtccacggcttcaacgcgcccatgtcgttcctcccggccagcggcggcggcggcggcgccaggtgcggccgcggcgggccgtcgtgccccgtgcaggagatcacgttcgactgcccctccgagcagcggcgggtggccgggtgcggcaacccctgcgacggcaagagcagcagctgcggccccaacaacgggacggagtacttcaagaaggcgtgcccgcagacgatcacgtacccccgggacacgaccaacaccgtcttcacgtgcccggccgggacgagctacgagatcaccttctgcccgtgagaaaccacgagctggcaagcgagctagcgagctgagccaccgacacgtacggataggatcggagctcgtgatggattttggtcctgcatgggctctctctgcagctcgtgtttgcgtacgtatatgtaaacatcggtttatagatcatcatcttatgatgtcatctatatatattatatatttctggatgatatcaggttacttaaaa

SEQ ID NO: 126061 - DNA, 1029 bp, Zea Mays
aggctgacccatccccatcacacagcgggcgacatctgccatcaatgcggccctccacagcctaccccgctcgcattcattgcacatcttgtcctcatacctctcctttccaacacctaattaatggcgcgcccatacgtgcctgatgctggctccaaaccccgacccttttcatccctccctccctccctcgtcgtctcctgactttgctcgccggccgccccgcccacaccctcctcctgcgctaccactgtcagcaagtgcacacccttcgaggacagctgctgtcgccgccaaggccgcaaccggccgtcgctccatgctgcggtagaatttagaaacgagaagggagatggcggccgaggcgctggggttcatggcgcggggagccaacggtgggagggcggcggagctcgtcacaagggactttctcggcgggtgcgccgccaccggcgacgccagggacgcgtccgccaggaatggcaccgtgcccgggagggtggctcagcagaagcacgcgtgcccggcaacgccgatggacctcaacctgttaacaataaaactctttcatacctctcttcattaaattggtatatcatatcatcttggtttgcttacatgtcattgtatttaatgagaatgaaatttaggtgacatacccactaagaatggtcttattcatttccagccagctaaaaaaaacaaatgtacacttaatgcaaattaacgttgtcagcttactactttgaacccaagattaaaaaatgtttttaattgacaagctaagggtccctttggttagatggaataatctttagttcctggtttttagtccagtttaatttctattttgctaaacagaagggctaatatatagactaatgacacttcgctgacattttttgatatttatgccctctttttccatttattgggtagcatttgtaatgttgtcaggaagatatctcttgtgttcttcagcttgagatacatatattgcagtcgtcaatcattgtactagtgatcaaa

SEQ ID NO: 126062 - DNA, 623 bp, Zea Mays
cttttggaccaatagaagtaatagagaaatgaagtctgctcaccttccttggtcaccatccgagtttattggcgctggaggatccatggccgtcattgtcgtcctaggctcctagcagtcggcggtgctcttcgtcgctggtgaagtcgctagtgtgtaataccagcacaactgtctaggtgtgcagtggttgactggctgggcagggcgtagtgtatggctagttattttagggttttgtttttttctagtctgctagttgtcatgccgtgttgccttgttgggctaagacctagggcttggtgcgctggcgtgctgggtttgatggccagctcggcctcaactcattcatataaacaggacaggtgtacatatatgaaatactcatgggtaaacgggttcggattattgtttaccaaacccacactcgtctacgcaatgtgtggagattttatcctttatccatacctatgtagacaatttttatcacataaccgtactctaacaggggaattcgatacgagttagcgaatattagatccccattaacatctctaaattggcgacctattacagtactactctcgagcgagcgagagtgcgagagagaccaaaaataaaaa

SEQ ID NO: 126063 - DNA, 336 bp, Zea Mays
atgaatccctacttagaaaacaattttcttgtgcggttgatggaagaaatggaagaggaagaagaagagttgcagttggcgaggcacatggtcaataggaggcgacgtgcacgcaatgagcgtcgtcatggtggttcgattccagggcgtgttaggattcatcgtgatcacatgagcggcgatgcaagaatccgagcggactactttggagcgaacccggtgtacacggatactcaatttcgtaggaggttccgcatgcgtcgccatgtgtttgagcggcttgttgatgttgtgcaacagtggatccatattttattcagcgtccaaactgtgcgg

SEQ ID NO: 126064 - DNA, 1373 bp, Zea Mays
aggctgacccatccccatcacacagcgggcgacatctgccatcaatgcggccctccacagcctaccccgctcgcattcattgcacatcttgtcctcatacctctcctttccaacacctaattaatggcgcgcccatacgtgcctgatgctggctccaaaccccgacccttttcatccctccctccctccctcgtcgtctcctgactttgctcgccggccgccccgcccacaccctcctcctgcgctaccactgtcagcaagtgcacacccttcgaggacagctgctgtcgccgccaaggccgcaaccggccgtcgctccatgctgcggtagaatttagaaacgagaagggagatggcggccgaggcgctggggttcatggcgcggggagccaacggtgggagggcggcggagctcgtcacaagggactttctcggcgggtgcgccgccaccggcgacgccagggacgcgtccgccaggaatggcaccgtgcccgggagggtgcctcagcagaagcacgcgtgcccgccaacgccgatggacctcaacctgttcccgatcgcggcggcgacgaagccctgcgccctgacgccgtcgccgtcgccgtcgccagcgccagcgccagcctccgcgggcggcgccggcgccggcgccacgacgacgtaccgcagcgtgtgcaccatcgagaaggtgaagacggccctggagcggttcgagcgcggcaggcagcaacagccctcccatccgcaccacaaccacccccagcagcagcagcagcacagcggcgcgggcgcctccccgtcgtcgtcgaccgtgaccacgtcctccgtgaagcggcgcggcggcggcgtggagcagggcgacgactgcgactcgccctccggcggcggcgggatggtggccgcggcgtgccccaggtgcttcctgtacgtgctcatctcccggagcgacccgcggtgcccgcggtgcgagtcccacgtcccggcgccggccgtgagcaagaagccgcggatcgacctcaacgtcggctacctcggcacctaatttcttgtttgccatggcgtagcgccgtagcctagagccctagacggatcggccgccgtctcgtaccgtacggacgtacgtacgtacgtcctaaattataggctcgtgtaacgtgacgatccatccacgaaccgagttgggggaccatatataggagttgtcaggaaatttatgaccgatcagactcccactcccctcccggttgtttgccatggcgtagcatagaacatgaatgatggttgatactgctgctgctcctgtagaaccaatcaatcctactaccacaattgatcgaggctataagtacgcgctacttcttgatcgatctatc

SEQ ID NO: 126065 - DNA, 1215 bp, Zea Mays
atggccgcacgcgcaccgctcatcatgtcgcgggccgcctccagcgccggcccgctcccggctgcggcgacgaccgtggccaggcaccagcccgcgcaatgtctccacgtgtgtgctatgccggaagagggtagaccttctcgccgcgaaacagattgcaagaacgggactgctaagcaagctaagatttcattttttctggatcaagaacaggtggggaggatggctagccagtttgccaagccaaggtctgaaccgttggaggagagggacgacgtcaagctgccaagctacaggggcgacaacgtcaacggcgacgacttcaccgagaagagtcgtgtgccagacccgcagaggatgatccgcgcctactcgcagtcggtggcgacgctcaacctgctccgcgtgttggcgaccggagcttacgctgccatgcaacgcgtcacacagtggaacctcgatttcatggatcccagcgagcaaggtgataggtaccgcgaattggcccatagggtggatgaggctcttgggttcatgactgcagcagggcttacagttgaccacccaataatgacgactactgacttctggacctcgcatgagtgccttctcttaccctacgagcagtctcttacccgtaaagactccaccagtggccttttctacgattgttcggcccacatgttgtgggtgagcgacaaaatgaaccccagtgacttggtgaagctgattgagattctgaacccttcaaacaaacctggaaggatcatcataattacaaggatgggggcagagaacatgagagtgaagttgcctcatctcatccgtgttgttcgcaatgctggattgattgtaacatggattactgatcctatgcatggaaacaccatcaaggccccttgtggcctgaagactcgtccattcgactcaattctggctgaagtgcgcgcattcttcgacatgcatgatcaagaaggaagtcacccaggaggcatccaccttgaaatgactgggcagaacgtgaccgagtgcattggtggatcaaggactgtgaccttcgatgacctgagcgaccgctaccacacccactgtgacccaaggttgaatgcctcccaatccctggagctcgccttcatcattgcagagaggcttaggaagaggaggatgcggtcggggctcaacaatagcctgcctctgccaccactggctttctaa

SEQ ID NO: 126066 - DNA, 1036 bp, Zea Mays
cgccgcctacacacgcctagcccgctccccaagaaagagcccccgcacacaggctgggaggggagcgaaagcgaaacgtattaaactcgcgtacatcatcaaccgcatgcgctgatgcgcactgccactgccccggagaaattcaaatcccaagccccacaagcaaattaccccagcatcaaatcagcggccggccggccggcagctctcggtcgatccactgcggtttccagtcccgaataatcccaattcccaatcgattcgaagcttccttccttcgaggagagggggaggtggaaggcgcgggggaagctctgcttagggttcggaggtggccggcgccgccgcggggcggggacggcagggggatggatccggagcagacgttcctgcgggtgcacgcgcgcttatcggggacgctttcccagctgctcacgccgcggatccgcctcgtcctcgagtacctctacctcgccggcgccgtcgcgctcttctgcctgctcgtcgtcatgcacacgaacttcgtgcagcagcctggttgctcaagtgaattttctggaattgaatttggagaagcacaacttgtccaaatcaaggtagtattaatgacaggttgctctttgcttttgttcttaatcttgaatttgttgctactctgaaactccattatgtatgttttattcttcttgcttttgtttgatgattcctgtttctattctattggcatcaattttaaaccttgctatgagttgtagattatcagtgggggattatggtccagcagaggtgcttcttacatcatggatctccagaacctgggacgttcagctgagaaaattttagaggttaatggtgataagttcaacattttggcatctaaattttggtcaacctgggttggccctggagctaggaggagcttaccagatttgaaggcagccggagagggttctgtacaccaccctttatctgctaaggagtcatttaaagcagcagtgacatttttgttcagaaaatggtaccttcgtgctgtttc

SEQ ID NO: 126067 - DNA, 877 bp, Zea Mays
cgccgcctacacacgcctagcccgctccccaagaaagagcccccgcacacaggctgggaggggagcgaaagcgaaacgtattaaactcgcgtacatcatcaaccgcatgcgctgatgcgcactgccactgccccggagaaattcaaatcccaagccccacaagcaaattaccccagcatcaaatcagcggccggccggccggcagctctcggtcgatccactgcggtttccagtcccgaataatcccaattcccaatcgattcgaagcttccttccttcgaggagagggggaggtggaaggcgcgggggaagctctgcttagggttcggaggtggccggcgccgccgcggggcggggacggcagggggatggatccggagcagacgttcctgcgggtgcacgcgcgcttatcggggacgctttcccagctgctcacgccgcggatccgcctcgtcctcgagtacctctacctcgccggcgccgtcgcgctcttctgcctgctcgtcgtcatgcacacgaacttcgtgcagcagcctggttgctcaagtgaattttctggaattgaatttggagaagcacaacttgtccaaatcaagattatcagtgggggattatggtccagcagaggtgcttcttacatcatggatctccagaacctgggacgttcagctgagaaaattttagaggttaatggtgataagttcaacattttggcatctaaattttggtcaacctgggttggccctggagctaggaggagcttaccagatttgaaggcagccggagagggttctgtacaccaccctttatctgctaaggagtcatttaaagcagcagtgacatttttgttcagaaaatggtaccttcgtgctgtttc

SEQ ID NO: 126068 - DNA, 1232 bp, Zea Mays
cacgccaccacctgccaacctttcagttgatattcgtgcatgtcatcgaatcattggtttttgtgccgattatgattgggattctcttttttctatttgagttctatgatgatcaattgcttgcgtttcttgttttgactcttgtatggttatgcgagctattcacgatgatcagtgtgcggacatccatatcgatgcagttctttccacgcttcttcttgctgtattttttggttttccatatctacttcttctcatatacctatggcttctcatatctggctttctctgctacggcagcattcatgcagcacctgattttatatttttggaaccgttttgaggtgccagctctccagagattcatgcgaagtcgagcacacattcaccagcaaacaggtgtccacattacatcctcaactatctacacttctaccttacacattgctagggtaaatgtgagggaccctggtacaataaacgatggcctcggtgctgctcgtgaagcagatgccctattggttcaggatgagtctaccaggagccagcaagagggtcaacagaatggaatttctgagccagctgccaacaatgctctccagtatcaagagcaaaaccctcagcgagctggaagtacccctgcaggctcaggctccctcaacccatttgggtcccttttgctgtggttgctgggaggcggtgcttctgatggcatagtttctttcttctctatgttcagagatgttcgtgatcatggtcaagattacaccgatccacctcgaaatggaaatgatcaggtgacatagaatcacggggatgaaagtgggccaattactgaactcgagtgcttgggcggcagtagtctctttctaatatgatataatgccagcacctcccgtcaaaaggataatgacgaatattggtggcaactatacagactggtgtcgctggagatgccatgttagtgttatctgtttctcacttttttagttagtaggtaagggtgaaggttgtatctatattcattacatgtgcacattccctaccgtctgaatgggagcgcccgtcccagtcctgtacagaaatgtcaactcacagcagattgtgcacattctttttgtactcccatgggcgggtgctggcctggaacatgcagtgtgtgcaccactgtcactgaattggacagttaatggtttggatacatcgttgcatgtactgttccaacttccaaa

SEQ ID NO: 126069 - DNA, 1321 bp, Zea Mays
cacgccaccacctgccaacctttcagttgatattcgtgcatgtcatcgaatcattggtttttgtgccgattatgattgggattctcttttttctatttgagttctatgatgatcaattgcttgcgtttcttgttttgactcttgtatggttatgcgagctattcacgatgatcagtgtgcggacatccatatcgatgcagttctttccacgcttcttcttgctgtattttttggttttccatatctacttcttctcatatacctatggtatgtgtgtatcaaacttcttttttctgactgaactattgattaactaatgacacatttctggcgctttatgacttatgctttaccaggcttctcatatctggctttctctgctacggcagcattcatgcagcacctgattttatatttttggaaccgttttgaggtgccagctctccagagattcatgcgaagtcgagcacacattcaccagcaaacaggtgtccacattacatcctcaactatctacacttctaccttacacattgctagggtaaatgtgagggaccctggtacaataaacgatggcctcggtgctgctcgtgaagcagatgccctattggttcaggatgagtctaccaggagccagcaagagggtcaacagaatggaatttctgagccagctgccaacaatgctctccagtatcaagagcaaaaccctcagcgagctggaagtacccctgcaggctcaggctccctcaacccatttgggtcccttttgctgtggttgctgggaggcggtgcttctgatggcatagtttctttcttctctatgttcagagatgttcgtgatcatggtcaagattacaccgatccacctcgaaatggaaatgatcaggtgacatagaatcacggggatgaaagtgggccaattactgaactcgagtgcttgggcggcagtagtctctttctaatatgatataatgccagcacctcccgtcaaaaggataatgacgaatattggtggcaactatacagactggtgtcgctggagatgccatgttagtgttatctgtttctcacttttttagttagtaggtaagggtgaaggttgtatctatattcattacatgtgcacattccctaccgtctgaatgggagcgcccgtcccagtcctgtacagaaatgtcaactcacagcagattgtgcacattctttttgtactcccatgggcgggtgctggcctggaacatgcagtgtgtgcaccactgtcactgaattggacagttaatggtttggatacatcgttgcatgtactgttccaacttccaaa

SEQ ID NO: 126070 - DNA, 1703 bp, Zea Mays
cagagtccagacctccactgtccactccaaagccgcagcagcgggcaaaaccaggcacccgcacgatccgattcggcttccgtctcactcatctcgcccggcctccgcggagagatctggcggcggaggcgatgccactgggcgacggcgcggaggcggcggacttcgtgctgccggacgagctcctggcggcgctgccgcgggacccctacgagcagctggatctggcacgccgcatcaccgcgctggcggtgtccgggcgggtgtccggcctggagcgggaggcggggcgcctgcgggcggaggccgcggggaaggaccgcgagaacgccgagctccgggagcgagtggtgctgctcgacaccgcgctgcaggagaccaacgccaggctccgcgccgcgctcgaggacaatattaagctcagcaaggagcgagactcgctggcgcagacgtccaagaagctggcgcgcgacctgcagaagctggagtcattcaagaggcatctgatgcagtcgttgcgtgatgatagttcatcagtatgttcatctattacccaacatgctatttgtgtgtgtttgctaatttatttacccagatcatcagtatgttcatttattttacgactgttcacccctactttttgcttatgagtctcaagcagccacaggaaacagttgacattacaacatgtgaccagccagtagcaacaaaagcatcgtttagtggagatggtggatctggcagccaccctacaacaaatatatttagtgaatctttggatgctggaagtacgaaccgagacggtaccgcctcaaggcctccgatccaaaaatatgccctctcatcgcacatcactccttggcttacccccaaggccactcctaaaataatgtccacttctgcttctccaaggcaaatatctaccacagcaacaccgaagctgatgtctggtgctacctcgccaacaaaatctcgaattgaagctcacatgtcaatgacaccatggtatccatcaagcaagcagtcctcggcagctagctcacctccacgaggaggttcaaacccaggtcggactcctcgtgttgatggaaaggaattttttcgccaagccaggagtcgtctatcctatgaacaatttggagcattcttagccaacatcaaagaactcaatgcccataagcagtcccgtgaggaaactctcaagaaagctgaggagatctttggtccagaaaacaaagatctatatctgtctttccgaggcttgctaaatcgtagcatgccgtaggctccgtatgtctcttttttgttgttgggtttgcaggtaatgaagttgccgcattggcaacttattgccatctaagttgtggatttgaagatctagttggaagttttgccccccataatccacactaggtttaacgagcgtcgagcggacctctctgaacaactgagtgcgcaaaccagagttgctcctgtaagtgttgcacctgtcgagtgctaaactataggatgcatcctgtcatggtgcctacattcttcgtaaaaccatgaaacagaatcttgggagtaaaattccatctcgtccccaactcaatcatcaattgcaatcggtagctgcatcttgttctgttaacctcgaactaactttttcgttttgctctgtttgtactgaggtttctctgtgaaaagttgatttcgcagct

SEQ ID NO: 126071 - DNA, 1559 bp, Zea Mays
cagagtccagacctccactgtccactccaaagccgcagcagcgggcaaaaccaggcacccgcacgatccgattcggcttccgtctcactcatctcgcccggcctccgcggagagatctggcggcggaggcgatgccactgggcgacggcgcggaggcggcggacttcgtgctgccggacgagctcctggcggcgctgccgcgggacccctacgagcagctggatctggcacgccgcatcaccgcgctggcggtgtccgggcgggtgtccggcctggagcgggaggcggggcgcctgcgggcggaggccgcggggaaggaccgcgagaacgccgagctccgggagcgagtggtgctgctcgacaccgcgctgcaggagaccaacgccaggctccgcgccgcgctcgaggacaatattaagctcagcaaggagcgagactcgctggcgcagacgtccaagaagctggcgcgcgacctgcagaagctggagtcattcaagaggcatctgatgcagtcgttgcgtgatgatagttcatcaccacaggaaacagttgacattacaacatgtgaccagccagtagcaacaaaagcatcgtttagtggagatggtggatctggcagccaccctacaacaaatatatttagtgaatctttggatgctggaagtacgaaccgagacggtaccgcctcaaggcctccgatccaaaaatatgccctctcatcgcacatcactccttggcttacccccaaggccactcctaaaataatgtccacttctgcttctccaaggcaaatatctaccacagcaacaccgaagctgatgtctggtgctacctcgccaacaaaatctcgaattgaagctcacatgtcaatgacaccatggtatccatcaagcaagcagtcctcggcagctagctcacctccacgaggaggttcaaacccaggtcggactcctcgtgttgatggaaaggaattttttcgccaagccaggagtcgtctatcctatgaacaatttggagcattcttagccaacatcaaagaactcaatgcccataagcagtcccgtgaggaaactctcaagaaagctgaggagatctttggtccagaaaacaaagatctatatctgtctttccgaggcttgctaaatcgtagcatgccgtaggctccgtatgtctctttgtaatgaagttgccgcattggcaacttattgccatctaagttgtggatttgaagatctagttggaagttttgccccccataatccacactaggtttaacgagcgtcgagcggacctctctgaacaactgagtgcgcaaaccagagttgctcctgtaagtgttgcacctgtcgagtgctaaactataggatgcatcctgtcatggtgcctacattcttcgtaaaaccatgaaacagaatcttgggagtaaaattccatctcgtccccaactcaatcatcaattgcaatcggtagctgcatcttgttctgttaacctcgaactaactttttcgttttgctctgtttgtactgaggtttctctgtgaaaagttgatttcgcagct

SEQ ID NO: 126072 - DNA, 1578 bp, Zea Mays
cagagtccagacctccactgtccactccaaagccgcagcagcgggcaaaaccaggcacccgcacgatccgattcggcttccgtctcactcatctcgcccggcctccgcggagagatctggcggcggaggcgatgccactgggcgacggcgcggaggcggcggacttcgtgctgccggacgagctcctggcggcgctgccgcgggacccctacgagcagctggatctggcacgccgcatcaccgcgctggcggtgtccgggcgggtgtccggcctggagcgggaggcggggcgcctgcgggcggaggccgcggggaaggaccgcgagaacgccgagctccgggagcgagtggtgctgctcgacaccgcgctgcaggagaccaacgccaggctccgcgccgcgctcgaggacaatattaagctcagcaaggagcgagactcgctggcgcagacgtccaagaagctggcgcgcgacctgcagaagctggagtcattcaagaggcatctgatgcagtcgttgcgtgatgatagttcatcaccacaggaaacagttgacattacaacatgtgaccagccagtagcaacaaaagcatcgtttagtggagatggtggatctggcagccaccctacaacaaatatatttagtgaatctttggatgctggaagtacgaaccgagacggtaccgcctcaaggcctccgatccaaaaatatgccctctcatcgcacatcactccttggcttacccccaaggccactcctaaaataatgtccacttctgcttctccaaggcaaatatctaccacagcaacaccgaagctgatgtctggtgctacctcgccaacaaaatctcgaattgaagctcacatgtcaatgacaccatggtatccatcaagcaagcagtcctcggcagctagctcacctccacgaggaggttcaaacccaggtcggactcctcgtgttgatggaaaggaattttttcgccaagccaggagtcgtctatcctatgaacaatttggagcattcttagccaacatcaaagaactcaatgcccataagcagtcccgtgaggaaactctcaagaaagctgaggagatctttggtccagaaaacaaagatctatatctgtctttccgaggcttgctaaatcgtagcatgccgtaggctccgtatgtctcttttttgttgttgggtttgcaggtaatgaagttgccgcattggcaacttattgccatctaagttgtggatttgaagatctagttggaagttttgccccccataatccacactaggtttaacgagcgtcgagcggacctctctgaacaactgagtgcgcaaaccagagttgctcctgtaagtgttgcacctgtcgagtgctaaactataggatgcatcctgtcatggtgcctacattcttcgtaaaaccatgaaacagaatcttgggagtaaaattccatctcgtccccaactcaatcatcaattgcaatcggtagctgcatcttgttctgttaacctcgaactaactttttcgttttgctctgtttgtactgaggtttctctgtgaaaagttgatttcgcagct

SEQ ID NO: 126073 - DNA, 1565 bp, Zea Mays
cgcgttcgtgggccgcctctctctcataaaatccaccgccctcgtcgccaaaatccccccaatcccaccgccagtctccgcccgcgcctcagaagtcagaaccctagccccggcgacgccttcagatccggcgcccttatccggcggaatcgctcgctcctaccaccggttgccgcgtcccggcatctcggctacccggcgtcctgtacccgacttctacgccctcgatctcccccagccgtcgtcacgaggaatcgtttgctccacaggctacgtctccaccaagcctgcatcgacgactcgaaggatccgtgccgtcgtcgatcgccgatcgcctcttcgtagatcgaatctgttcagtgttctgctattcgttgtatttcatctgagatctgaaaaaagtattcgggccatctcgagatagagaggccttcataggcggagaaaaagaaacaggactcgccatccatcatgggtgttgtctattaccaatataagagtgaaaaggaaatctgttctatgcccgtgccccatgcttttatttctgtgtctgaactcaagcagcttatcatgacgagcggtaggcacggccgtggtcgaacccgcggtcgtgccacagaggatattgtcatctccaacgcccaaactggcgaagaatatgcagatgaaagagcatccataccacagaacacaactgtgttggtccgcagaatttccattcctgggcaactgtcagagaagattgttttgtcccctaggccggaagtcacagaagaatgttctgtaccttgcaagtcggtggttactgactcaagctcaaagtcatgttcttccacagtagtgcaagatgaagatgctgtaattgcagcagtaattgatgctgctgaactcaaatgggaacagctcccctctaaaagaggacaagacagtggaaggtttacatcaagacgtaactatgggccgttggaaggggaaacacctccacccggctatgtctgccgctcttgtggtgttccaggccatttcattcaacactgctcacaggaaaacaagatgcctccacctggatacatttgctacagatgccgaattccagggcattttatccaccattgtccaagcattggcgatcccaagttcgacaacaataaaatgagtcggtctcttgtcccagtagttacacctgtcgatggcattttggattcacttgtcccgtctgccccagccggggctgttgatgacttgccagcagagctccactgccgactatgtaaaaaagtgatgagagatgcagtattgacaagcaagtgctgttttgacagtttttgtgatagatgtaagtggttttcatatactccatttgtatgtgccttcgaagtctgtgttttggtgtcagtgagtgcattatctaaaaatacccaaattttgttttacaccaaatttgtttttatagcagtatctagctgtttgtgtcaagtatttatgattcgaacaatataaggaacagttttctggtgtatcttttatcaggcattcgggattatattattaaagagtcgaagtgc

SEQ ID NO: 126074 - DNA, 1361 bp, Zea Mays
tgtggagtggagacactagcagatgacctcattccaaatcaaacacttcggagcacaatcagcaatatgttgggaacacagacaagcagtggtggtagtggtacaacaagacacagaagttcgtcaggcagcaaccctaacccaaaaatacagagccacactgcttctgttgcgtcagcaagggaggtgaagcagtctatagaccatcagctaccagcggtatctgcacctgattatgtgctccaggttgccacagaaggtgacctggtgaaccagcctctagagaaattagcagccactgctgaaatccttagcaaatatgaaggcaattctgcagaagtgtcagtagagaaggcggtagcaaatgctgaagccctcaaagtgaaggatggaagtgaaacgacttcgaatgccaccactgtttcagggtcccgagaacatgatgtcacaaggacagatcaagcaaagaagaagcggaagaaggcagacttaaccaagaacgttcagcctaacaatgttggctatggttacaatgtttcttttgaccctgcatattacaatcccttcatcaatggacatccttgggcaactgaaccctacatgtatagctcaatggggatgccgtacgctggttatccgatggatccatattgtgcaaatccaatggatccatattgtgagtatccaatggatccatattgtgtgaatccaatgcaaggctatccagcaagctaccaaaggcctgaaactgagcccatgcgtcgtgggagcactgcggctgccagagcacctttaaagcaccgtgagaggagtgaccggcaccggcccaaggacactcgtcttcagccccaatcaacagagcacaagcgacggctggtctcctctcatggaacaaggtcaaactcagatagaagggaccatgggcattcttatggggcatcctgagtagacttatttgaggatcattctactaggaagcggatgcccgttttctcccggagtagtatgatggtagacaaatcggtggagatcgagacggttccaggagtatgatgactcgtgagtcgtgaagaggacgcaagctacgaggaacgtaatttcaagacgagatggggtcatagatcatcaggaggcgtggacacaaggcactgtcctaaacttggcagaccaagtgcagcaatatattgctggtcaccagtgctcacctattgatcttcttatactcgtaattgtatgtatgcccctgaaagcagaagaaagattgtcacaaagcagagggaactttcggttccctagcgaaatgtattgatattaaacattttttttgtattaatgctaagagtgttgccagctctctctat

SEQ ID NO: 126075 - DNA, 501 bp, Zea Mays
atgtcaaacagtggaggcaagggatgtcgtccccgtgccaaatccatgccacccaagaagcaactaggtatttctagtttcttgcctgaacctccatcgctgccatcttcttggaaagatagcaccagtggtgccaatttcatttcagggacaaagaggacattatgtgcaagagacagtcaggggattccagggtcttcgtctgtaggagcaaagagtgttactgctggtgatgctactgctcgtttaccacttgaaccagggattgatggtactagcacacaggtaatagcgcctgctattggtattgtgagtatcgatgatgacaaggaggacgatgagggacatgtaggtgattcagtaactattcattctattttgactgatctaaaaccttcggaaacaattcatatcactcctaatcctcagccctgcatggattttgaggaacaagatgctgatagtgatcccgatgtcatgaatgattatggtgagctttaa

SEQ ID NO: 126076 - DNA, 1463 bp, Zea Mays
atgtcgatgcattacttggccgctctgtcggcggtggctctgggagctatcttgcttctccgttcggccttcaaatggatgaacggcgcccggacgggtaaagacgaagggcggatgctgccgccggggtcgaggggcctgccgctcctcggcgagacgctcgagttcttcgcggcgtcgccgacccttgagctagtgcccttcttcaagcggcggctggagaggttcgggcccatcttccggacgaacatagttggcgaggacctgatcgtgtcgctggacccggagctgaacgcgcgcgtgctgcagcaggaggagcgcggcttccagatctggtacccctcctctttcatgcgcgtgttcggcgacgacaacatcatctccgcgctcggcccgctccaccgccacatcaggaacctcgtgctccgcctcttcggccccgaggccctccgcctggtgctgctccgtgacgtgcagcggagcgcgcgcgacgagctgcgctcatggctcgaccacccggacgtcgaggtcaggacggccacctccaggatgatattcgccgtcacggcgaagaagctgatcagccacgacgacgcggcgtcgggaggaagcctgtggaaatgcttcgacgcctggaccaaggggctgctgtcgttcccgctctgcgttccggggacagccttctacaagtgcatgcagggacgcaagaacgtcatgaagatactgaagcagcagctcgacgagcgcaggaacacggccgagcgcaggaccgtggatttcttcgacctcgtgatcgacgagctcaacaagcccgaccctataatgaacgagaacatcgcgttggacctgttgttcctgctcctcttcgcgagccacgagacgacgtcgatgggactgaccgcgatactcaagttcctcacggacaacccaaaggccctgcaagaattgaccgaggagcatgaaaaaatcgtggaaacaagggtggatccggactctgatatcacctgggaggagtacaagtctatgagattcacatctcatgttatacatgaatctcttaggctagcaaacatcgctccggtggtgttcagacaggcaaaccaagacgtatacataaaggggtacactatcccagaaggatcaaagatcatgatctgtccatctgcagctcacctgaactcaaaggtttacgaggaccccacggcgttcaatccatggagatggaaggatactcccgaaccagttggtggttcaaaggattttatggcctttgggggtggtttgcggttatgtgttggagctgactttgccaagctgcaaatggctatgttcatccactgcttggttaccaagtacagttggaagcccatcagcaaaggaacgatggtgttttatcccggtctacgatttccggaaggctttcacatccagcttcttgcaaaagcatgaaattttattgctgg

SEQ ID NO: 126077 - DNA, 727 bp, Zea Mays
ccctctctagtctcaacgtttcattccttgagctttgcgatgacatgggagcagcgttagggcgcaggacgtagacgacgacgtacggtcaccggccggcatccatggacgattcaagctcacagccagccacaatagtgagcggaggagaagagagaaaccaaaggagggaggaggacgacgacgaggagacggcggcggcggaggcagaggccggcaacggcagccagctgatggtggtgcccgaggacgggtacgagtggaagaagtacggccagaagttcatcaagaacatccagaaaatcaggagctacttccggtgccggcacaggctgtgcggcgccaagaagaaggtggagtggcacccgcgcgaccccagcgcggccctccgcgtcgtctacgatggcgcgcaccagcacggcgccgcgccgccggcggctccggagcagggcggcggcggcggcgcctccaacagatacgagctgggcgcgcagtacttcggcgccgggccggccgggtcagggtgacacctgacaacgcgaggaggaaggccggccggcgtcgcgccacgcatgcatcagttctggctgccgctgcttccaggttccatctctttcgctgcgcaacggacgacggcggcggcaggtggctggtgctgccggtgccggttgacgccttgcgccggcgcaacgtgatgttgagtgcggattggctgttgctgcacgct

SEQ ID NO: 126078 - DNA, 387 bp, Zea Mays
ttcgactgcccgatgaagacctatggcttcctcacgcctgaattctggagccataccaagttttccatgactctgttccagcaatacacggacctgctggcgaaggctaccaagggtcttgtgctttaggcctgaactgagacagtagagccttatgatggtttgatgtgtctaaatgcactttcttatatattaagaactgtgggagtcaactttggaccctgtttgctggccgcttcgatgattttgccttttggtaagcaacatccactagagaatggccttttttgttttcttccctctatctctttcttgcaagggaatcttctatgcttagaactgaatgcagtgatcagtacatgtatttgttttgaagcttgtatttac

SEQ ID NO: 126079 - DNA, 1029 bp, Zea Mays
atgcacggccgcaagaagaaccacgaggagcagagctgtcgcggcggcggcgcgtcgtctccccgctgccgacggagtgatctgtatggtgaagttgcaggcgtccgtggacgggttctgcgacgtgggcacggcgaggccctggaagtagcagctgccctccacctggttctgcacctggaagtacatgttgaaggcgtaggacgcgttgccggcggcgtccaggccgttgcacgaggagccgtagccgagcgaggtgcagtcggagaaggtgcaggcgtaggtgacgctgtcgccgatcttgctcgtgtcctgcgcgttggggttgacgacgcaccactggcggggcaggtactggaccccccgcgccgccacgagcgccgtgttccggccctgcccagacaggtccatggcgtacttgggctggccgtcgtagcgcatgatgccccagtggcgctcgaagttgcccggcgccacgctcttggcgtcctcgtcgatgaggctgaacaggtagacctcgatgtactggcccgggcgcagcggcgtgccggcgctggccgccagcttccgcagcaggcccgcgtagaacttctgcgcgaacgcggccgtggcgtgcttgtcgccgtcggtcggccacccgacctcgccgaccacgacggggaggccgccgacgcccgccgcggccagcgcggacacgagcgtgtcgaagttggcgtcgaacacgttggtgtactggatgccgttgtccacgacggggctgcccgtgccgtcgaagaaggcgtagtccagcgggaagtcgtcgttgtcgtagaggctcaggaacgggtagatgttgacggtgaagggcgcgccgctctggttcaggaactgcacgatctccgtcatgaggccggcgatgtcgggccggaaccgccccgccgacggcaccaggttgtccttgggcgagttgtacacgtcggcgttcagcggcaccgtcgccttgatggtgtcgccgaagccggcgtcgttcagcgcgcgctggatgttctg

SEQ ID NO: 126080 - DNA, 87 bp, Zea Mays
aaaaaaagtagcaacagacgcctcacttcccactgtacgaatttgtcgtctgttctatcgatctgatgctatacaaatacatttaat

SEQ ID NO: 126081 - DNA, 2657 bp, Zea Mays
agattataatttagattatataatttacagattatataatctataagctgaaacaaacaggctctacctctccatcttccggcccatagccgcatctctgcaagtgggccctctcccgcggggagggcgatggacccgaagctgctgcggcatggaaatctgagaagtattgtcctccccccagtccccagacttgcgcgcgcctccgctgctgcgactgcgagcccaagaaaaattttcctctacgagcgcatggaggtgtccgctgggctccggctgccgcccgtcgctgcggcagcgtcgctccttggctgtcggtccgcgtcggtgccgccgcgcgcggcggcttcccattctgtgcggtccgtgtcccgcgcggttaagatcagagcagctgcaattaacggcctccaaagaaacagaagtaatctcgaatcattattctgctacgacaaatctgtccccgagcaggacattggagaaccatctggtctaaatctggaaaagaagaatgtcggggacaagcctccctgctcaagctgtgaagctaaaggtgccttgctgtgtgcaacgtgcgctggttcaggcttgtacgtcgactcgatactagagagccagggaatcatcgtgaaagtcagatgcctaggttgcggtggaactgggaacatcatgtgctccaaatgtggaggccgtgggcatacataacatgaacgctaaagcttgcaccttgcagatcaaaggagttgactctatggagaattttctctgtgttacatgttacggtgtgctgagctagctgctgtagctacatcgagacatgctttagaaggctaagttaatgaactatcctcttttactttttttttgttccccacttcccctcattccgtgcttaaaagcatgatgcgtcatgggatttcatgtgatgttgtaatcgtaaaggtgtaatggtatgtgaaagacacacttcgtacatggaggagaatgagagattaaattcagttgtgctagtactcctgtgcattaaatttttactcaaacgctctgcttcacagtgcttgtggatatgggctttcgctctcctccacaaatcacaatgctcgtgcatacggaatttcctgacggaccacgcagccgcaggagcagtccgccgccacacatagcgctcgacaaaatactcgtggctgataagctcattgttgactcgactcgttttcaattttatcgcgagctaaactaccatcttagctcggtttgttaaggagccagctcgttagctcgaactagcaactatttgttagaaaagcaaagcctacacttgtattggatgaactaataaatgatgagctttgttaatttgatgttggattcatgcgatatgtgaaactataagtattattacactttttttagttttaaattatctaggattaactagaaattgattatattgttttaataatatgtatattgttttttaccgtggctcgcgacctaaagaagctagctcaagattgaactgagccgagctggctcgatatgcagccctagccacataattcattagcttgcacaaacctcatgggcatgtgttacagttttttttcctgaagattttttctgagaatctgactgtaaagagaatcttagtatcataaaaaaagattacatgtggaggaacatgaataaatttatagagtttaggatctttaatgtgactgattcctactattacgatgactcgatcgatcatgcgttcacgttaatttttgacggttttcaataaaagcgattctcacaaaagtgcttgaaaatctaggtgtttgatagttcgcaatatcttctagtagttaaaagctgaaaaagttaaaagaaacggcccgctcgtgcgccgccgctgcccgtgcaaccgtccaccaccgcgacgcaagctgctcccacttatagatgtccaaacgggcggcacggcccgacccaactcggcccggcccgtttgagcccgacacggttaagcccgaccacttaaccgtaccgtgtcgtgccgcccgacgggctcatacctcttcctgagcacggcacggtggaggcccgaccgtgccgggcggcccgaatagcacgacccatttagtagcccgtgccggctcgagcccgcaaaacacaaaactatatttagcaaaaaaaaccctaaaaccgacaacacaaaaaacctaaaacttacagcacaaaaaccctaaaacaaagaactgtccacataatcaaatttgctccactcggtaagaaaatttagcaaagaagaaccgatgcaactcacctacaggcgcggtgctcgcccggcgccgtcggaaccgctccagcacgccgcgcagcaccacatcgagggtgtcctccatgccgtcgccgaacccatcggacgatgacgcgtacaccagccgcgggatcatcttcaccacgcgctcctgcatccgttgcacccgccgctcactgagccccttaagaacataggaggagggaggaggtgccgagtgtgcaccgtgccgtcgtagggaggagggagccaggagcgagagggaggaagagtgggagagtgggttagggattgcattaggagcagacgcggcagccctcggggacttgtgggctagcggcgggggtgggtg

SEQ ID NO: 126082 - DNA, 926 bp, Zea Mays
atggacccgaagctgctgcggcatggaaatctgagaagtattgtcctccccccagtccccagacttgcgcgcgcctccgctgctgcgactgcgagcccaagaaaaattttcctctacgagcgcatggaggtgtccgctgggctccggctgccgcccgtcgctgcggcagcgtcgctccttggctgtcggtccgcgtcggtgccgccgcgcgcggcggcttcccattctgtgcggtccgtgtcccgcgcggttaaggtgggcctcctttcgctctcccctcttgtcgcaccccctcgcgagatcagagcagctgcaattaacggcctccaaagaaacagaagtaatctcgaatcattattctgctacgacaaatctgtccccgagcaggacattggagaaccatctggtctaaatctggaaaagaagaatgtcggggacaagcctccctgctcaagctgtgaagctaaaggtgccttgctgtgtgcaacgtgcgctggttcaggcttgtacgtcgactcgatactagagagccagggaatcatcgtgaaagtcagatgcctaggttgcggtggaactgggaacatcatgtgctccaaatgtggaggccgtgggcatacataacatgaacgctaaagcttgcaccttgcagatcaaaggagttgactctatggagaattttctctgtgttacatgttacggtgtgctgagctagctgctgtagctacatcgagacatgctttagaaggctaagttaatgaactatcctcttttactttttttttgttccccacttcccctcattccgtgcttaaaagcatgatgcgtcatgggatttcatgtgatgttgtaatcgtaaaggtgtaatggtatgtgaaagacacacttcgtacatggaggagaatgagagattaaattcagttgtgcta

SEQ ID NO: 126083 - DNA, 822 bp, Zea Mays
cagacttgcgcgcgcctccgctgctgcgactgcgagcccaagaaaaattttcctctacgagcgcatggaggtgtccgctgggctccggctgccgcccgtcgctgcggcagcgtcgctccttggctgtcggtccgcgtcggtgccgccgcgcgcggcggcttcccattctgtgcggtccgtgtcccgcgcggttaagatcagagcagctgcaattaacggcctccaaagaaacagaagtaatctcgaatcattattctgctacgacaaatctgtccccgagcaggacattggagaaccatctggtctaaatctggaaaagaagaatgtcggggacaagcctccctgctcaagctgtgaagctaaaggtgccttgctgtgtgcaacgtgcgctggttcaggcttgtacgtcgactcgatactagagagccagggaatcatcgtgaaagtcagatgcctaggttgcggtggaactgggaacatcatgtgctccaaatgtggaggccgtgggcatacataacatgaacgctaaagcttgcaccttgcagatcaaaggagttgactctatggagaattttctctgtgttacatgttacggtgtgctgagctagctgctgtagctacatcgagacatgctttagaaggctaagttaatgaactatcctcttttactttttttttgttccccacttcccctcattccgtgcttaaaagcatgatgcgtcatgggatttcatgtgatgttgtaatcgtaaaggtgtaatggtatgtgaaagacacacttcgtacatggaggagaatgagagattaaattcagttgtgcta

SEQ ID NO: 126084 - DNA, 1514 bp, Zea Mays
tgtatatatacatccaccacgaacatccaattgccatcaacacaccaccaccagcagcagcagcacatcaatttagctagttccaggaacacgcgaggaaaccgcaggcatggccaacaaccgcatcttcgacgagtacaaccccgccgtcgaatggagccgctccgacgaggccgatgccgtcaggatctcgctcccagggttcaagagggaggacatacgcgtgctggtggacagccacggccacctgcggacgcgcggcgagcggcacatcgccggcaacaggtggagccgcttccagacggacgtcgacctccccgccaactgcaacgccgacggcatccgcgccaagttcgagaacgacaggctcaccatcacgctgcccaagagcacctcctcggcgcccattccggcgccgccgcagaggccgcacgtgaaggcgccgtcgacgtcgtcggagaggcttccgccggtgattgctaagccagtggcgaggcctgccgcgccgcggcccctggtgccgccagcggcgccgctggctcctcctccttccgtgaagccgcccgccgagcccaggccgtcgatgccgaagaacccgtacgcttccgtgccggcaccggcaccagcgccggcgccggcgccgcaagtggaacaacctgcaaccaccaccaagcccgccgagcccaggccgtcgatgccgaagaacccgtacgcttccgtgccggcaccggcaccagcgccggcgccggcgccgcaagtggaacagcctgcaaccaccaccaagcccgccgagtcgtcgctgggggctgttcagaggccgaaggagcaggaggacaggcagaggaagagggaggaagaggggaagatggctgaggacaggaaggagacggtgcaggagaaggacacggtcacggagcagcaccagcagcaggaggagaaggcaatgctggcagagaaagagatggcgttcgcgaaccagcccgggccggccttcgcgagccgcggcctgctgatgaacgtggcgatcgccgtggtggtgctcctcggggtcaccgtccacttgtggcttagcctgaggaacgccactggaggcgccggcgagcacggccacggcccacgggcagatgggggccggtagacatacgaccacgcgatgtgaacagggctgactcgagctggggcgtgagtacactgtacacactacacaatacacgtacacagtacactaaactgaaaggggaaatgggaaataatccaagtacatacaaaagaggcgcggtacagtacatactcgtatatgcatgctgtttgtttatcatctggttccaattctattatcggccttgtttatctagcgctttagtgtacggcctagagtttacagaatattagttgacatagtacatattatttataaaaacttaaaatacatctgactgcatagttaaacgaaaaaaatcatgtaataaaataaataaaattacaaaattcataaaaaaacaaattcaaattac

SEQ ID NO: 126085 - DNA, 808 bp, Zea Mays
acgacggcccggacccaggaggcccagatcctggtatgcgcttacctgcccctcctctctctgtctctctcgtggttctactgaacgagcactcgcctgcgctcttctctctctcgtggcgacgactgggtgactgccggcgccccaggcctgaggctccatcttcgggcccttcactggctacgagcaccacctgaggattatggattggctggggcagaagcgcgcggagatgctgatgcaggtgctgctggtggcgtctgctgtggcggcgttcctggtgggctacgtgcgcgcggacttccagctcatgctgctcgtctacgccggcggcgtcgtgctcacagcgctcgtcaccgtccccaactggcccttcttcaaccgtaacccgcttaagtggctcgacgctgccgaggccgagcgccacccgcgcccccaggtcagcgccggtgcggcagcagggggaaagaagaagtccgggaagaacaagtaatcgatctttcggagcgatatgtgttctttgtcgatttgactcaaacctatttaaagttttatttcgcagaactaatcaatgataaaagagctagaggtgttcgacagttttggttggtacttaaaaatatgcagttgtagctgaaatttagcttgcaatcttgcacgctacttatcagttatatctgcaatgatgatctaactaaaaggatggcgatatgcctggttacactcttagattgacttcgtctgtagctttattagcattttgtggatgggtttttgctgtcttcttatgcatatctgaagatgtagt

SEQ ID NO: 126086 - DNA, 1270 bp, Zea Mays
acgacggcccggacccaggaggcccagatcctggtatgcgcttacctgcccctcctctctctgtctctctcgtggttctactgaacgagcactcgcctgcgctcttctctctctcgtggcgacgactgggtgactgccggcgccccaggcctgaggctccatcttcgggcccttcactggctacgagcaccacctggtgtactgggtccgatccatctgagtctgatcttttgtttctcgggttcctggcagaggattatggattggctggggcagaagcgcgcggagatgctgatgcaggtgctgctggtggcgtctgctgtggcggcgttcctggtgggctacgtgcgcgcggacttccagctcatgctgctcgtctacgccggcggcgtcgtgctcacagcgctcgtcaccgtccccaactggcccttcttcaaccgtaacccgcttaagtggctcgacgctgccgaggccgagcgccacccgcgcccccaggtcagcgccggtgcggcagcagggggaaagaagaagtccgggaagaacaagtaatcgatctttcggagcgatatgtgttctttgtcgatttgactcaaacctatttaaagttttatttcgcagaactaatcaatgataaaagagctagaggtgttcgacagttttggttggtacttaaaaatatgcagttgtagctgaaatttagcttgcaatcttgcacgctacttatcagttatatctgcaatgatgatctaactaaaaggatggcgatatgcctggttacactcttagattgacttcgtctgtagctttattagcattttgtggatgggtttttgctgtcttcttatgcatatctgaagatgtagtgagttttttttagcagagattgcatagtttcagtttggtcccttgattacgttgcctccttgaccatttttaggtggagtgttcatatcagtgtcagccctttgttggaatttaactattaaattcattcgtaattctcttgtagtgttataatcaaatgtgtaggttgcatgtaaccataggtatcctaccaaattttgtgtttgtggacggatgttctgcggggtttttttttgtgtgtcgatgctatttggcattgcttatatcggtttcttgtgttgatgaacgccgatgattgtttccacttagttgtctgatttacaatagttaacacgacacgacatccattctacacattattaccttaaacgtaggaatctgatgtaaacaaaaaaaaaaattgcag

SEQ ID NO: 126087 - DNA, 783 bp, Zea Mays
atgcaggcagcagccgcgccgccgcttccaccgccgcgccgccgcgtgtacacggcggtggacccgcggtgcgagtggaggagcacggaggatgcggacaccctcgtcgtcgacgtgtcagggttcaagaaggacgagctgaaggtcgtgtacagcgtccggcggaagaagctgaaggccaccggcgggcgccagcccgacggcgcgcccaggctgaaggtcaccggggagcgcagggccgacggcggccggtgggcgcgcttcctcaaggtggtcccggtgcccaggagctgcgacgccggcaccatccaggccaggctagacaccgagagggcccagctctccgtcgtcctgcccaagcccaagggatcgtcatcgtcgtccaaggacagtcagaaggagcgtcaccctgcggagcgcgcacattctcttgaagagctgatgagggcggacactgcgggtggatcatcgggccgcagcgacggtagcatgcggagcgcccaggaagatgcagggaacggcaaggtcgaagacaaggagcagaaacaggatcgtcatcaggctatggaggaaccgagacatgatcaagcgatgaacgtacaagatttaccgggaggagacggtggtgcaactgaaaatgcagccaggaacaacgatggtgatggcaagggtgaggacgggaggtggtggaggaagatcagaaatctgcgtgttcttagcttcctcctggtccttgcattggtgggggttggtgccactgtcctgtatatagcgttactgtga

SEQ ID NO: 126088 - DNA, 613 bp, Zea Mays
caatcttttttttcacaaatgaaccaaccactcttccaagccaagtcaatggacaaagggtctgtgagctcagttccaacaaatccctttccagcaagagaaaaacagggtacaaaactttggactgttgaaagcagttcaccagcatacaactcatgctgtacacaacatagctaaccagctacacacgtgaactgaccatcagatcgaccaacctcaccaggagacaacaaaaaagggaagaagattaagtaagttcgatgtttgtcattaggttaaataagtggggcttctaagcatgctaagtgagagagagagagatcaaagaagaattcttggctcatggaggcgacagctgggacctgggaccttaaatacaggctataaacacgtatacaactatgctctaagagattccattggtgaagaggttgttaaagatcagcatctcacaagccattgggagaggttagtgcagggagagaagatcactcatgttctgcatcgtcgccagtcagctcttcgtcgtcatccgtgtcttcgtcatcgtcagtgtcttcctcatcgtcgtcagtgccatcccaggaaccgaagattgcgtccttggcggctg

SEQ ID NO: 126089 - DNA, 629 bp, Zea Mays
tttttgatcatcacatcagcaccgatatccggtgagtatcctccaagcaatgcatacatgtgaatccaacatcgacttcgttcttcagatccatccagcaaagatgaaaaccacagacaaacgaaaacaaaaaaagaacctttttatccagaagattgcagaacaacaatcttggcgagtactgtataatatatgcgcatggtgttcggcggacagcccgtattataacctgcgcggcgcatatgtgcgcacggcgctcggcgaggcgagatcagtcgctgtcgctgctgctgctgctgtgtccgtcaccatcaccatggtcatggccctccccgtgcttcttctctttcttcttcttcttatctttcttctccttatggtctttgtccttgtggtcgccggacttgtcgccgtgctcgccggtgatcttgtccttgatcttctccacgatgccctccttgtgctccccgtcgtccttcttgtggtgctccccgtcgtccttcttgtggtgctcctcgcccttcttgtgctcgtgctcctccttgtggtcgcccccgatgtggagcgtctcctggatcttgtcgatgatgccagacatgcttgtggctacttctctttgctcagggaag

SEQ ID NO: 126090 - DNA, 125 bp, Zea Mays
ttctttttttataaccctttattcatactgaattcaggatgcttcaagaccaaaaaacaattgcttatacctggggatgtatatcttttttttgaaaggaagcggcaaaagacttgcctcttcaa

SEQ ID NO: 126091 - DNA, 341 bp, Zea Mays
ccagactcttcatcctcatcacatcatttgttccagtcaacttggatgtatggattcttttcctctgacttcaacgagtgtttccaccaatcattattttctttctggattgaacagattatgtttcataggcccgtctttgtattcgttttgcttccctctagcagtactgatttaaaaagctccaaactggagctaaaaggttccccaagggcaacaatagagaagttaaagagccccttaggaccagtctttaacacaacatctttcgcatctggtaatgagatagtcaagtaaatcttctaggagcgctgagcccacaaaacctcaggttggtggct

SEQ ID NO: 126092 - DNA, 1118 bp, Zea Mays
ttatatataaatatgttatattgttatgagaaaagttttttgtaatccattggtgatcctgtctatacatataaattttgttatgagaaaagtataattgctatccttgacaaatatatgtattatgcagacatgcggagagatgttcaggagatcttcaaaatgactcctcatgataagcaagtcatgatgttttcagcaacgctcagcaaggagatccgtcctgtatgcaagaaatttatgcaagatgtaatgccctgcagccttctccagctctcctttccaaagtcgtcgtattttattcccattgctcctgtggtggtcctcctgtagctgttagtcatctaccagctttggagttgtagttgtgtcttctgctctttctaggtgggaggattctattcctcagtgtctccatttgtagtacataagtaagttctctttgcttttttcgttatcccacacatgtacagtagaaaatggagagtaaggggtgtgtccaaatggtgattttttggcgatgtgttggtaactgggggcagatgaagggttaccttctgtcctgaagatgcggtctccgagctcctggtcgacatctccagtttgctgcacactcaatgttcacttggtttcacttaattggacttcactggtgttggttctccaactatctcgtgcgggtggagaaagaattcttctgctggagttgtatttggaagcactgttgcaaaacttaagcatatttggagagaatctagtgttgaacagtgcataactgaacttctgtatggaggctgcatgtactgacagagggggtctattggtatatatactgcaagactgacgctggaatgctaatttgtttcatgtatcatttgttcccttacatccgatggaaatatatgttgatgatgaggcaaagttgaccctccatggtcttgtacagcactatataaaacttagcgaggtagagaagaactggaaactgaatgatctcttggacgctcttgatttcaaccaagttgtgatattcgtgaagagtgttagcagagctgccgaactgaataagttactttgtgaatgcaacttcccatcaatctgcattcattctggaatga

SEQ ID NO: 126093 - DNA, 291 bp, Zea Mays
atggccatgcttaccagtcttggaggtagaaacctccacaacctgcgcgccatggaggggagtagtaggagcgccgggatgaggaggagaacgagacaggtgtgggcacgtctcggggcgggggcgtccatggattgcggaggcgagggcaggggcggtagtgacccttccaccgacggagagcggagcggggggcgaagatggtggggcgggagcgggatcacggcgggagacatggccgtggcgcgggtgggagctgagggtttaggatttttagggtgctcttcatga

SEQ ID NO: 126094 - DNA, 1352 bp, Zea Mays
ttccttatctatacaaaccaaactcgcgctccagaccacagctcaccctcacctgcgacctgcgcgcattcacagccgccggcgccacacgtgcccgcgcgccgggcgccacctctctcccatccaccagccttcctctcccgggccaggcggcgcccctcaatggccgccaccttcaccgtcgccgcccgcctcccgctgcggggccccgcgcgcgctccgtcccggccggccgtcgctgctgtaacccggcttcgaagccggcaggagcggcgcggcctagcagcgacaggcgggaggggacctgcccgggttcgggccgagactttctccggtggtggaggcgtggggcggagggaccccatggcgccgccttacaatgtcctcatcaccggctctacgaaaggtataggatatgcattggcaaggaaatttctggaggctggtgataacgttataatctgctcgagatcagctcaaaaggtagaatctgtggtcggtgacttgaaggaggagtacggagagcaacatgtgtggggaactgtctgtgatgttagaaatggaaaggatgtaaaggcacttgtggagtttgcacgtgacaaacttaagcatattgatatatggatcaacaatgctggatcaaatgcatatacatacaaaccactagtggagacctctgatgaggctctcatggaaatcatcaccactaacacccttggattgatgatatgttgtcgtgaggcaataaatatgatgaggaaccaacctcgaggtggtcacatattcaaccttgatggtgctggttctgatggaaggccaactccaagatttgctgcatatggtgcaacaaagagaagtgttgtgcatcttacgaagtcacttcaggctgaattgcagatgaatgaagtgaataatgtgatggtgcacaatctatcgcctggcatggtcacaacagatcttcttatgtctggtgcaactacaaaacaagcaaaaattttcatcaatatattagctgaacctcctgatgtggttgcagactaccttgttccaaacgtcagagaaatccctaccaagcaatccatgaagccaacctacattcgtttcctcacaggcttgaaggcctactcaagaattttttctagacttgcttttggtgctaggagaaacaagtatgttactgaagattagttatgctgccagcttccaactgaagagattaggaacaattcttttcattaagcgtcacttacttttctcataagatgggatgtattacagatgtcatctcatgagaacagtgatatactcttctgtacagtagtagcaatttttttagtaaatgcataggaaaa

SEQ ID NO: 126095 - DNA, 2601 bp, Zea Mays
agataccataagaacgcacgcgagtggccagtgggaaccaggaaacaagtgagagggggaagctgcggccgacggccgagctcttgccgtccctatccacccctctcggctctcgccctcctctctgtctttcgctccgtccagccgccgcgtaaaatccgcggaaccagatgcccttatccgccctctgatcgaatccggccagaaaggccggttctttgtcgtcgtcctcggcatcgccggcgaccttgatggcactggaggcgggtagcagcggcggcggcgggaggggatggggtggcaggttccgaagcctgatgcggcggaagcaggtggactccgatcgggtccgcgccgagggccagccgcagctcgccaaggagctcaacgtgccggagctggtcgcgatcggggttggttccacagttggagcaggagtatatgttcttgttggaacagttgctagggagcacgctggtccagcattgacaatttcatttctgatagctggaatagcagccgcgctttcagctttctgttatgctgagcttgctagtcgttgcccctcagctggaagtgcttaccattattcatacatctgtgttggagaaggtgttgcctggttgattggctgggctctagtgctggaatatactattggtgggtctgctgttgcccgtggtatatctccaaatttagccttgttttttggaggacaggatagtgtgccatggattttagcacgccatcagcttccatggtttgatatcattgttgatccctgtgcagccgctcttgtttttgttgtcactgttttactatgcgtgggaattaaagagagttcatttgcacaaggagtcgtaacagttctcaatgcctgtgtaatgatatttgttattgtagctgggagttatattggcttccaaataggatgggtgggctacaaggtttctgacgggtatttcccacatggagtaaatggaatgcttgctggatcagcaactgtcttctttgcatacataggctttgatacagtcgctagtacagctgaagaggtaaagaatccacagagagatttgccattgggaattggagttgcattggctatttgttgtgcgttgtatatggctgtttctgttgttattgttgggctggtgccatattttgccatggatccagatactcctatttcatctgcctttgcaaggcatggaatgcaatgggctatgtacgttgtgacaagtggtgctgttcttgcactctgctcgaccttgatgggctcacttcttccacagcctagaatacttatggccatggcacgagatggtctgttgccatccttcttctctgatgttaacaagcaaactcaagtacctgttaagagcacaattgtgactggcatctgtgcagctgctctggcttttgcaatggatgtttcacagttagcaggaatggtcagtgtaggcacactccttgcattcaccatagttgctgtctcgatcttgatactcagatatgtccctccagatgaggtccctttgccgccttctatgcaagaatcattttgtttgaaccaggaatgtgatgaggaaagggataggggtcttcttggagttgggaactgtaacttatctcagacaaaggatgtgattgtggtagtagaatcagtgaaggatcctctcattgataaaagactgcataaaggcaagatggatgagacgaagcgccgaaagatagcctctttaagcatagggtctgtgtgtgtaggggttctgatccttgcttcttcagcctctgccacatggttgccttttctcccgatatgtattggctgcaccattggagttgtgctccttctggctggcctcagcttgctctcctggatcgaccaagatgctggcaggcactcttttggtcattccggaggattcacatgcccttttgttccagtgctaccagttttgtgtatcctgataaatacgtatctgttaataaacctgagtggtgacacatggatgagagttggcatatggctgctgctgggtgttcttgtgtacgctttctacggccgaacccacagctccctaatagatgttgtctacgttccggcagcgcaagctgatgagatatacaggagttcatcaggatatgtatcatagaaaagaacagctgcagtcatgtgacacgatagagccacagaaagaccgagcggatgacagttactcaaaaggtggttgtccatcagctgtagaaaattggttatcagccggggaagacggaactgactgttatttctttcatgctcggctagcatgatctcgtggatgcaactttgcaagatatgtatgctgctcacgagccaggtcaatttatacattgttggagtgtgtagatatggtgtatataaaaccaactgggtggagtatgtgatgtcatacataataatttgtctaattcatgtaaaagccctttgtgcagttgtgctgaaatgtgagggcatttaaaggacctattgaaacagtacacggacggcaaaagaagccacctttttttatatcatgtatatgtcgtcaacaaacattctcttcaagatctttgcat

SEQ ID NO: 126096 - DNA, 2612 bp, Zea Mays
agataccataagaacgcacgcgagtggccagtgggaaccaggaaacaagtgagagggggaagctgcggccgacggccgagctcttgccgtccctatccacccctctcggctctcgccctcctctctgtctttcgctccgtccagccgccgcgtaaaatccgcggaaccagatgcccttatccgccctctgatcgaatccggccagaaaggccggttctttgtcgtcgtcctcggcatcgccggcgaccttgatggcactggaggcgggtagcagcggcggcggcgggaggggatggggtggcaggttccgaagcctgatgcggcggaagcaggtggactccgatcgggtccgcgccgagggccagccgcagctcgccaaggagctcaacgtgccggagctggtcgcgatcggggttggttccacagttggagcaggagtatatgttcttgttggaacagttgctagggagcacgctggtccagcattgacaatttcatttctgatagctggaatagcagccgcgctttcagctttctgttatgctgagcttgctagtcgttgcccctcagctggaagtgcttaccattattcatacatctgtgttggagaaggtgttgcctggttgattggctgggctctagtgctggaatatactattggtgggtctgctgttgcccgtggtatatctccaaatttagccttgttttttggaggacaggatagtgtgccatggattttagcacgccatcagcttccatggtttgatatcattgttgatccctgtgcagccgctcttgtttttgttgtcactgttttactatgcgtgggaattaaagagagttcatttgcacaaggagtcgtaacagttctcaatgcctgtgtaatgatatttgttattgtagctgggagttatattggcttccaaataggatgggtgggctacaaggtttctgacgggtatttcccacatggagtaaatggaatgcttgctggatcagcaactgtcttctttgcatacataggctttgatacagtcgctagtacagctgaagaggtaaagaatccacagagagatttgccattgggaattggagttgcattggctatttgttgtgcgttgtatatggctgtttctgttgttattgttgggctggtgccatattttgccatggatccagatactcctatttcatctgcctttgcaaggcatggaatgcaatgggctatgtacgttgtgacaagtggtgctgttcttgcactctgctcgaccttgatgggctcacttcttccacagcctagaatacttatggccatggcacgagatggtctgttgccatccttcttctctgatgttaacaagcaaactcaagtacctgttaagagcacaattgtgactggcatctgtgcagctgctctggcttttgcaatggatgtttcacagttagcaggaatggtcagtgtaggcacactccttgcattcaccatagttgctgtctcgatcttgatactcagatatgtccctccagatgaggtccctttgccgccttctatgcaagaatcattttgtttgaaccaggaatgtgatgaggaaagggataggggtcttcttggagttgggaactgtaacttatctcagacaaaggatgtgattgtggtagtagaatcagtgaaggatcctctcattgataaaagactgcataaaggcaagatggatgagacgaagcgccgaaagatagcctctttaagcatagggtctgtgtgtgtaggggttctgatccttgcttcttcagcctctgccacatggttgccttttctcccgatatgtattggctgcaccattggagttgtgctccttctggctggcctcagcttgctctcctggatcgaccaagatgctggcaggcactcttttggtcattccggaggattcacatgcccttttgttccagtgctaccagttttgtgtatcctgataaatacgtatctgttaataaacctgagtggtgacacatggatgagagttggcatatggctgctgctgggtgttcttgtgtacgctttctacggccgaacccacagctccctaatagatgttgtctacgttccggcagcgcaagctgatgagatatacaggagttcatcaggatatgtatcatagaaaagaacagctgcagtcatgtgacacgatagagccacagaaagaccgagcggatgacagttactcaaaaggtggttgtccatcagctgtagaaaattggttatcagccggggaagacggaactgactgttatttctttcatgctcggctagcatgatctcgtggatgcaactttgcaagatatgtatgctgctcacgagccaggtcaatttacacattgttggaatgtgtgtagatgtggtgtatataaaaccaactgggtggagtatgtgatgtgatacataataatttgtctaattcatgtaaaagccctttgtgcggaaatgtgagggcatttaaaggacctattgaaaacagtacatggacggcaaaagaagccaccttttttatatcatgtatatgtcgtccacaaacattctcttcatgtatcatgtatatttgaccttggtcagg

SEQ ID NO: 126097 - DNA, 1934 bp, Zea Mays
ctattaagttccatgcaccaacaaatccaacccaaacgcttaagctaataggaggggtggacaactcacttatattatattccaacactccccctcacgtcgagcctctctaaggtctcagacgtggaataggagcgagcaacgattattttatttaattgcgctaaccaggattcgaactcgagacctctagctttgataccatattaagttgcatgcatcaaccaatccaacccaaaagtttaagctgataggaggggtggacaattcacttatattatattccaacattttcatcagtctatattgcaaactccactttgaaaagtgtaggtttgtgaaatgggatgaaatgtaagtataggtttggatataaattctttaaaaggtccaattttatgatataaaatgacaatggaagtagtttagataatttgaaatatagttgtgatacagaagagcaaaaaaaatgtgtagtcctgtgagataagtttccaaatgtgtatgtttgtcatagttttcactattgtagaatagttctgtaaaaaaatactcgtttgttttagccaaatgcctatttttttcttgcttctacttgtagccttcttttgcacactgatcggtttatttatgcagtttaattcacagagttcctctatatcttcccaagtgaatcttgggcttggagttcaaggatcagacgcggggcatataaaaagtgaagatcaacaaattttggctgaagatgttggtgtggaatcttccgcaacaacaggagcaaataaacaaacaagtgaagatgacacaaagattccatattcgaatccttcagcacctgcagcagaaaacactcagctgcctagggatactgatctatcacctggacagcctttgcaacctggaatgccatcatctggtgttggtgttatcggccgaagaagtgtatctgatcttggtacaatcggagataaccttactggaacttctggtagttctggtcatgatcagaattattatctgcaaatgcttgaagctgcattccacaagcttccacagcccaaggactctgagcgtgctaaaacttacattccgcggcaccctgcagttacccctgctagctacccccaagttcaggcatcaattgtatcgaatcccaccttttgggaaagaattggtagcgacacattagctaccgacatgctgttctttgcgttctactaccaacagaacacatatcaacaatacttggctgctagagaactgaagaagcaatcatggagatttcaccggaggtacaatacctggttccagcggcatgtggagccacaggtcacgactgatgagtatgagcggggatcatatgtatactttgatttccatgtcactgaggatggctcaggatggtgccaaagaatcaagaatgacttcacatttgagtacaactacctggaggatgagctatcagtacaaacaaactaaagtgccatggcagtaggtctggtcaaacctttatgtccaatttgaattttgtagttctcataagagcttgttcggttgcttctggatcaaagaaggttggaggggattaaattccttctagtcaaaattgaatagaaattgatttaacccccctcaatctcctttatccagacgcaaccgaacaatgcctaaggtgactgactgactgttataatctggacccttgacaaaatctccagctgtaaactaatgtgtgaagttggatgcaccgaacatgctgaaattataatcgtgttatgccagccgaatctgtttgacgcagctgtacattgtcgttattatctggatgcgcctgaaaaatattttggatctttcttggcgcctacctgtttatttttagctaactcctggctggcgctttcgatctttctggttcgtttttttatcaaaaaaaa

SEQ ID NO: 126098 - DNA, 3555 bp, Zea Mays
tctctcagtccactctctagtctctactctctatccccgctcttgccctccaacggtcatctcatctctcgctctcgcacgcacacaaaagagcagaaccttccaaggatcggatccaatcgattagccacctttttcccggcggcgccgcgatggtggcggagggcgcgcggcggcgggtggtggtggaggtgtgcaacgcgcggaacctgatgcccaaggacggccagggcacggcgtgcgcctacgccgtcgtggacttcgacggccagcgccggcgcaccgccacgcgaccgcgggacctcaacccgcagtggggggagcgcctcgagttcctcgtccacgacccgggcgccatggcctccgaaacgctcgagctcaacctctacaacgacaagaaggccatcaccgccgccggcagcggccgccggggcggcaccttcctcggcaaggtcaaggtggccggcgcctccttcgctaaggccggggacgagacgctcgtctattacccgctcgagaagcggagcgtcttctcgcagatcaagggggagatcgggctcaagatctggttcgtcgatgacccgccgccgccccctgcaccggctgcggcggaagagaaggaagctgcggcagcggcggcgggcgaagggaaggatgtcaaggacaaggctccagacgctgccgccgcaccggctgctgaggagaagaagccggagacggcgccctccgaggagaagaaaccagcggaggccaaagcagaggagaagaaacccgagtccgcggagaagaaggacgacaagaagaagtcgccggagaaggggaagaaagacggcgacaagcccaaggaggaaggcaaggctgagaaagacaagaaggacgcggccgcgccgccgccctctccatccaagctggcgccgccgcgctcgccgtccaagaaggacctggcgatcgccggggtggctggcgacctggagatccgcccccagagcgccgccgagaagagcatggccgcgtcgggcgccagcgcctcgtacgatctggtggatcgcgtgccttacctgttcgtccgcctcctcaaggccaagcgccacggcggtggcgacggccagccactctacgcgcagctgtccatcggcacccacgccgtgcgcacgcgcgccgccacggccgccggcgagtgggacctggtgttcgccttccacaaggacagcctcaccgacacctcgctcgaggtcaccgtcctcgaggaggccaagaagccggccaaggagggggacccggttccgccggaggccaacctgggtttcgtctccttcgacctccaggaggtcccgaagcggtcgcctccggacagcgcgctcgcgccgcagtggtataccctcgagggacacggatccgaggacggcgccgcggtctgcgacgtcatgctctccgtgtgggtcggcacgcaggtcgacgaggcgttccaggaggcgtggcagtcagactccggagggtacctggtgcacacccgctccaaggcctacctctccccaaagctctggtacctccgtctcagcgtcatccaggcgcaggacctacgcttgccgtccccgccggacgccaaggcgaagcagtgcggtcccatcttcccggagctgtacgtcaaggcgcagcttggcgcccaggtgttcaagaccggccgcgtccagctcggcagcgcggcggccgggacggccaacccaagctggaacgaggacctgctgttcgtcgccgcggagccgttcgacccgttcctgaccgttgtcgtggaagacgtgttctccgggcaggcggtgggccaatcccgcgttcccctgtccacggtgcacaggcgatccgacgaccgggtggagccaccgtcccggtggctgaacctgtgcggcggcgaggcccggccgtacgccgggcgggtgcacgtgcgcgtgtgcctggagggcgggtaccacgtgctggacgaggcggcgaacgtggccagcgacgtgcgcgcggcgtcgaagcagctgtcgaagccgccggtggggatgctggaggtgggcgtccgcggcgcggccaacctggtgccgatgaagatcgccaaggacggcgcgagcgggtcgacggacgcgtacgtggtgctcaagtacgggcccaagtgggcgcgcacgcgcaccatcctggaccagttcaaccctcggtggaacgagcagtacgcgtgggacgtgttcgacccctgcaccgtgctcaccatcgccgtcttcgacaacgtccggtacaaggccgccgcagccgacgatccggggaagctgcccagggactcccgcatcgggaagctccggatccggctgtcgacgctggacaccaaccgggtgtacgccaacaccttcgcgctgacggcggtgcacccggtgggcgtgcgcaagatgggcgagctggagctggcgatccggttcacctgcccgtcgtggctgacgctgatgcaggcgtacggcagcccgctgctgccgcggatgcactacgtgaagccgctgggcgcggcgcagcaggacgtgctgcggcacacggcgatgcgcacagtgtcggggcggctggcgcggtcggagccgccgctggggccggaggtggtgcagtacctgctggacacggacacgcagtcgtggagcatgcggcggagcaaggccaactggttccgcgtggtggggtgcctgtcccacgtggcgacggcggtgcggtgggcgcaccgggtccgcacctgggcgcacccgccgacgaccgtgctggtgcacctgctgctggtggccgtggtgctgtgcccggagatgatcctgcccaccgtgtgcctgtacctgttcctggtgctgctgtggcggtaccgcgcgcgggcgcggcagccggcgggcatggacccgcggctgtcccacgtggacagcgtgagccccgacgagctggacgaggagttcgacgggctcccatcggggcgccccgccgacgtggtccggatgcggtacgaccggctgcgcgccgtggccgcgcgcgcgcagacgctgctgggggacgtggcggcgcagggggagcgcgtggaggcgctgctgtcgtggcgggacccgcgcgcgacggcggtgttcgcggtggtgtgcctgctggcggcgctggtgctgtacgcggtgccgttcaaggtgctgctgctggggatggggttctactacctccgccaccccaggttccgcggcgacatgccctccgccggcttcaacttcttccgccgcctgccgtcgctctccgaccgggtcttctagactctctctctctctctctctctctctctctctctctctctctctcgcatgctcagatcgcggtctctgcctctgctactgatctctgatcagtctagttcgtttcttgatcgtttcatcttcacttctccgtgtaatctgcctttgtcaggttgccttgttttttttatcggttgcagtcagcagcaagcctcggttgatgaggcttgttggcaacatcaataacagcagcaataataatatctattgtattcgttcgttc

SEQ ID NO: 126099 - DNA, 946 bp, Zea Mays
cccacccatccaccttgggcgggcgccgcgccgtcgagggccatccagagctcgccatggcggccgtccggtccaacagggcccacgcccaccagcactgccgctccgaggcgtcgtgcccgacgacctccgtggccgtggcggcggcgaggggccggcgacgccccacgccaccgttcgcaggctccggtgcaggtctcgaaagggcatcaccagatgcggcggtcagcggcgttcccaccgcgccgcccggggccagggcgtcgccctcctcagcgttgtgacagcgacatcaacatccggcagcaccgcacctgcagcgaggtggccggcggcaccgcggcgggctgtgcggccgtgtgctgctgcttcccctgtgtcatggtggaggtcgtggtgctcgccacggtgcgcgcgcccgcagcgctgtgccgcaaggcggcccgcgtgagcaagggcgggcggcggcgctccgcctccgtggggcaggccacggagatctacgagctcccggtggacaacgccggcgtcgtcgtcaaggtggacgccagcgccgtcgaggcggtggcgctgccggtgaagcccgccttgcagctggaggagacgggggagcttgagaaggaggtgtgggccaggttctacggcacgggcttctggaggagcgtgtctcagctcgacgacgacgacaggtgaccggaacaatcaggcccgtgagtgagcgagcgatcgaccagctcctccggcgatgcttaagcaatagcatgcgtttccttggttgggtttccttcgttgttttccgcggaaataagagaagatcgaggaaaaggaaatgtgatgcatggtcgtcgatcgactatacgagtttcttttgttttgctttttggaagggaaaaccattctcttctacgatgccctgcatgtttaataaaatgtatgtctattgaac

SEQ ID NO: 126100 - DNA, 632 bp, Zea Mays
atgcgggcgggcgggccattcccggtgcaggccagggtgagtgcccctgcgcggactgccccgcggccttgcgcggatggcctgccggccgccggcctcggcggaccacagcggtcctcctcgggcgcggctcctcggctggagcgcttctggcggctcggccacggcccagccggcgtggatagggtgcgagcgctcctcggcgcgagcaccctcggcggtggcgcggtgaaggcgcaggtccggcggcggctggggcgctccctggaagacgacggctggggcggttagggtttggaaaacctaaccgcccctatttctaatgggcctcgtggcctcagttgggccgcttaggccggccagccaggctgggccggcgtgctggccaccaggccgctgcctggcccgcctggcaggccgcctgggctgtttctgaggatctaaaatggcctattttaccatttttaaattctaaatttaagtataagtctctgttttatatgtaatttcagttcaaaattatcttaggcatctagattcgttatttagattgctaaagatatatgtaactgtacatatttgtccattttattatggaaattacagacttgttagtgaattatctttgtttt

SEQ ID NO: 126101 - DNA, 818 bp, Zea Mays
cccccccaattcagcaccagcctttgcgcatcgcgacagcgatatcgggaagaggaaactcgaaagcccggcgagcggtatggcaacccgcgaggagcacgtggcggcgccggcgccggcggtcgaggagacgccggagaagaagcaggccagcacaaccgagctccccgcaccctcaggctggacgaagaaggttcgcccttactgcccgcttggccgtcccctttcaatttcctcgcacgctcctccctgcacgccgtttgcttcggtcccgagggctgcgggggcctgctagcgttcggatccggggggttcgggctccgtctctgcgaattccgctgctgttctccgtaaccgagcggtcggggggctgtggcgtcgggttctagggtttccgagctcgattgagtcgtgtcgttcgtgagggcgtgcgtttgtaattttgcttggtcttaagtccatgcgagcatggctataaggtttaggagcttgatttgagctcgctgttcgtgctcgcgattgacttgcaacatccgagtccaacagcgatggagcctgaaaaaattaggaccaaaccgttacagtaacaaaatctcactaaaaactcacagtagacgaatataattgtttaaagtagttctatattgagacgtccatgaacaatgaaaatcatgaatacataataagaaatataagatttaactttatagggagctctatgggctcgtgagcggtatggggctcgagctgccccaccggaccgcgatgtgggagtgagtattgtggacttcacttttatagctctccctattgcaaca

SEQ ID NO: 126102 - DNA, 1454 bp, Zea Mays
aataatctggctcctccccacgtcagggtatctcgttccaatagagaaaataatgcacagagaagtagtccgagtggcgatcacaccacagagcgagagtgaggagagaaccacagtgagaggggaggggatggtcggacggatgacaggagaaatgggagggctcagatcgaggatcctcaggaccttgcagtccttccccaccgccgctcccgcgcagtcgcccaacctcctcctcgcgccgctccctcccggcgcaggcccctcgcctcagccgcccgcggcgccatgcgtccgcctccaggaaccggcgccgcaggagccgccgctgggcgatgaagcgcgggccgcgcccggcggcggaggcgatgacgacaaggagaacgtctcgccaggcgccaccccgcgcaaggccaagaagatgaagctcagctcgtaccaccacgacagaagcccgggcctcggggaggagcagcgcgccgatggcgccacgcgctaccgccggccggacctcgcctcggcgacgctcttcgacccggacctcctcgccgccttccgccgcgccgtcgacgcctacgcgcaggccctggacgcggccaggcgccgcgacgtcgacgtcgacgtcgacgacggggacggcgtccctggcggcggcggcggcggaggaggaggtgggccgggcgtcacggaccccctggatgcgttcgagcggcggtgcccgcccggcggcgagcgcgcggtggtgctgtacaccacgtcgatccgcggcgtgcgcaggacgttcgaggactgcgcccgcgtgcgccgcctgctcggcggcctccgcgtggcgttcctggagcgcgacgtctccatgcacgctccctacagggaggagctccgggcgctgcttcgctgcgggcggggggagggcggcggcggcgcgttccccgtgccgccgcggctgttcgtggacggtaggtacctcggcggcgccgacgaggtcgtggcgctgcacgagcggtcccagctccggcccgtgctctggcgcgccgcgcggcgcggcgcggcggaggtcccgtgcgcggtctgcggcggcgcgtggttcgtggtgtgcggcgcgtgcggcggcagtcattggctccatgacgccagcgccggcgccggccgcgtgccgtgctccgcgtgcaacgagaacggactcgtgccctgccctctctgcagctaagatcgaacgcgcggggaccgggatggttttggtttgggaggcgttctcttgattatttatttggtcatgtcatcgctacgatccttcccattcccatggtcgctcttgcagccaggggaacgaaggattgatctctgtccgtccatcaaattgaacagactgtatttattaagatcattgtatgtccccttctgtttaagctcagctctcgatgagacgatttttactatttccagccaattctcca

SEQ ID NO: 126103 - DNA, 674 bp, Zea Mays
tcttgattatttatttgcacaagcacatgcgttacattaaaataaaatgcaccaatgtgcaacggcaacgtccattgagacatgatgttatgcctagccttacacaaacattaagtccacctacaaattaaaatcgtcactctagcaaatctcacaagcaaaagttataaggtagccagctattgcctgggtagcatttttcagttgcagcaaaaaaggatacattcccccgcttgcagagccaggggcgcatcagcttcctactttgtagctcagcgacagcaaaaccatagaaccatacagtccacaggcgcactcgcataattgaagagcaaccaaagtgccttgaatcccattttggtagtctgcttactgttgagcgcactgcactctttgggctccgccaggcatctcgtcgtcctcctcgtacgcctcctgagcagcatgagcctgcttcctgcgcatctcttcctcgatgttgttcacatcatgcatggttgtctcctcgcattcatctatctccatgtctgtcagcttggacgaaggctttggcggaagtaccgactcgagagccttgcactgctctggtgccagcgagtcggggaactccaccgtgaaatgaatgtagagcttccccttcatgaagggcctctggtaaataggcatcccctcgt

SEQ ID NO: 126104 - DNA, 1083 bp, Zea Mays
atgacgtcgccgtacgcgtcgccgttcctgctctccctgctcctgctcatctccatcccggtcgtcttcctccttgccccgcgcctgctcccgcccaagacgctcccggccatcccggacgccgacgagtccgacgacctcgcgctcttccgccgagccatcctctcctcctcttcggccactcccacgcccacctccgcggcctcctacttcttccgccgccgtccggcgcccaaggtcgctttcctcttcctcaccaactcggacctcgtcttctccccgctctgggagaagttcttccgcggccacacccacctcttcaacctctacgtccacgccgacccctactccgtcctcgagctgccgcccacgccatccttccgcggccgcttcgtccccgccaaggccacgcagcgcgcctcccctacactcatctccgccgcgcgccgcctcctcgccaccgcgctccttgacgaccccaacaaccagttcttcgcgctcctgtcgcagtcctgcatcccgctccacccgttccccaccctctacaacgcactcctctccgacaatgctggccctcatagccaccaccgcagcttcatagagataatggacaacatggacaacgacaccaagctgctgcatgacaggtactatgcccgaggtgacgatgtcatgctcccggaggttccatatgatcagttccgggctgggtcgcagttctttgtgctcacgagaaggcacgccatcatggtcgtgagggatatgcgactttggaagaagttcaagttgccctgtctgatcgagcgcagggattcatgctacccggaggagcattacttccccacactgctggatatgcaggatcctgagggttgtactaagtatacccttacaagggtaaattggacggattcagttgcaggccacccacacatgtatgagcctggagaggtatccgcaagcttgatcagggagctgaggaagtcgaacacgacacacccttacatgttcgcccgcaagttttctcctgagtgccttgagccgctgatggagattgtggactcggttatcctacgtgactag

SEQ ID NO: 126105 - DNA, 540 bp, Zea Mays
atatctattttaaaatattaaatttgttctaacagttcggattaccactttcatccctaattgtcaatagactgcaggaaagcatgcaaaatctctctcacagattggacacagatgtgtagtgcctgtttgtcctgtcgcctgtcagaaaccaggggctattctctgtaatatctcgtattagcattagcactagcatcttgaattttttttggtagatttgcttgcaaaactgtgagggaacgtgtggcgtatgaatgcagagcagagggtaggaaggcggcgtgccagaaacaccaactattctgcaggcttgggtggtttccttttcctgtttgctctcgaccagtttcagcagttgtcactttggggcttctggttgctcttaagaaaaaaaatcctgatgatcctttttcttcagaatggttggtgttaacaggtggcctggccgacagtaatattctcaggaaatcaccaaacttccaactctataaacaacacgagatcctgtgctatcattttgtttttatgctacaattc

SEQ ID NO: 126106 - DNA, 1156 bp, Zea Mays
cacctagtcacctttctccctcacacccacctctaccgctgtcgctcacgagctctccgctcaacagaaacggcggtggttactggaagccagcttggccggttcggttgccaccaacgcgccccgcaaaatctcgtcgccgaccgccatggcagccgccgacgcgtcgcgtacgctgcttgctgcagtatctctcgccttagctgcctgctgcctcgcgcagctggcggcgggggatacgaacggcgtctacgagccgtgcagcgacggacggatcccagcgcggggacggcttcaccttcggggtcgtcttcgcgggatacaacgccttcttttccggcaacacacagctctccccctgcgaccgccgcctcaacctcgctgcctccgggcagctcgccgtcttccgccccaaggtcgatgagatctctctcctcaccatcaacaccaccactggattcaacccagcttcagctggtggatttatggtagcatttgctggtaggaagtatgcagctagatcaatcccgatattcgtatccaacacctcagttacagtgtccagcttcaccctggtgctcgagttcaacaaaggcagacttgaaaacctgcactggaagaaggacggctgcggtgcctgctccggcaaatcaaacttcgtctgccttggcaaacagacatgcgccatccggacgcagagctgcaagagccaagggcctgtcgactgcagcgtcggcatccagctggctttctccggcacggacaagcacgagtcggttctgaactcgtggtacgaggtgtccaacctgaggcagtactccctctacgggctctactcaaacctcaagggcaccctgagcggccagttcaacaagatcttctaggctgttttggcgctgccattgtttattctcccccctgctccctcctcttctttctgtccgttgctccggttcctcatgctgtgcttgcttcacattcttttagttgccgcccgcccaggttgcttgtatccagacctgttttaacgctgtctgaactctaccgttgcccgttggtgtcattttagcgccctttttttggtcaccacttgagctttaactttagttttgtgatgagctgtctgccgtcctgctgatgactgttgtgtttggcc

SEQ ID NO: 126107 - DNA, 1048 bp, Zea Mays
cacctagtcacctttctccctcacacccacctctaccgctgtcgctcacgagctctccgctcaacagaaacggcggtggttactggaagccagcttggccggttcggttgccaccaacgcgccccgcaaaatctcgtcgccgaccgccatggcagccgccgacgcgtcgcgtacgctgcttgctgcagtatctctcgccttagctgcctgctgcctcgcgcagctggcggcgggggatacgaacggcgtctacgagccgtgcagcgacggacggatcccagcgcggggacggcttcaccttcggggtcgtcttcgcgggatacaacgccttcttttccggcaacacacagctctccccctgcgaccgccgcctcaacctcgctgcctccgggcagctcgccgtcttccgccccaaggtcgatgagatctctctcctcaccatcaacaccaccactggattcaacccagtgctcgagttcaacaaaggcagacttgaaaacctgcactggaagaaggacggctgcggtgcctgctccggcaaatcaaacttcgtctgccttggcaaacagacatgcgccatccggacgcagagctgcaagagccaagggcctgtcgactgcagcgtcggcatccagctggctttctccggcacggacaagcacgagtcggttctgaactcgtggtacgaggtgtccaacctgaggcagtactccctctacgggctctactcaaacctcaagggcaccctgagcggccagttcaacaagatcttctaggctgttttggcgctgccattgtttattctcccccctgctccctcctcttctttctgtccgttgctccggttcctcatgctgtgcttgcttcacattcttttagttgccgcccgcccaggttgcttgtatccagacctgttttaacgctgtctgaactctaccgttgcccgttggtgtcattttagcgccctttttttggtcaccacttgagctttaactttagttttgtgatgagctgtctgccgtcctgctgatgactgttgtgtttggcc

SEQ ID NO: 126108 - DNA, 1023 bp, Zea Mays
ctggaagccagcttggccggttcggttgccaccaacgcgccccgcaaaatctcgtcgccgaccgccatggcagccgccgacgcgtcgcgtacgctgcttgctgcagtatctctcgccttagctgcctgctgcctcgcgcagctggcggcgggggatacgaacggcgtctacgagccgtgcagcgacggacggatcccagcgcggggacggcttcaccttcggggtcgtcttcgcgggatacaacgccttcttttccggcaacacacagctctccccctgcgaccgccgcctcaacctcgctgcctccgggcagctcgccgtcttccgccccaaggcttcagctggtggatttatggtagcatttgctggtaggaagtatgcagctagatcaatcccgatattcgtatccaacacctcagttacagtgtccagcttcaccctggtgctcgagttcaacaaaggcagacttgaaaacctgcactggaagaaggacggctgcggtgcctgctccggcaaatcaaacttcgtctgccttggcaaacagacatgcgccatccggacgcagagctgcaagagccaagggcctgtcgactgcagcgtcggcatccagctggctttctccggcacggacaagcacgagtcggttctgaactcgtggtacgaggtgtccaacctgaggcagtactccctctacgggctctactcaaacctcaagggcaccctgagcggccagttcaacaagatcttctaggctgttttggcgctgccattgtttattctcccccctgctccctcctcttctttctgtccgttgctccggttcctcatgctgtgcttgcttcacattcttttagttgccgcccgcccaggttgcttgtatccagacctgttttaacgctgtctgaactctaccgttgcccgttggtgtcattttagcgccctttttttggtcaccacttgagctttaactttagttttgtgatgagctgtctgccgtcctgctgatgactgttgtgtttggcc

SEQ ID NO: 126109 - DNA, 957 bp, Zea Mays
atggcagccgccgacgcgtcgcgtacgctgcttgctgcagtatctctcgccttagctgcctgctgcctcgcgcagctggcggcgggggatacgaacggcgtctacgagccgtgcagcgacggacggatcccagcgcggggacggcttcaccttcggggtcgtcttcgcgggatacaacgccttcttttccggcaacacacagctctccccctgcgaccgccgcctcaacctcgctgcctccgggcagctcgccgtcttccgccccaaggcttcagctggtggatttatggtagcatttgctggtaggaagtatgcagctagatcaatcccgatattcgtatccaacacctcagttacagtgtccagcttcaccctggtgctcgagttcaacaaaggcagacttgaaaacctgcactggaagaaggacggctgcggtgcctgctccggcaaatcaaacttcgtctgccttggcaaacagacatgcgccatccggacgcagagctgcaagagccaagggcctgtcgactgcagcgtcggcatccagctggctttctccggcacggacaagcacgagtcggttctgaactcgtggtacgaggtgtccaacctgaggcagtactccctctacgggctctactcaaacctcaagggcaccctgagcggccagttcaacaagatcttctaggctgttttggcgctgccattgtttattctcccccctgctccctcctcttctttctgtccgttgctccggttcctcatgctgtgcttgcttcacattcttttagttgccgcccgcccaggttgcttgtatccagacctgttttaacgctgtctgaactctaccgttgcccgttggtgtcattttagcgccctttttttggtcaccacttgagctttaactttagttttgtgatgagctgtctgccgtcctgctgatgactgttgtgtttggcc

SEQ ID NO: 126110 - DNA, 110 bp, Zea Mays
ttgcgtatttgagggccacctggaataggaatttcgtgggaatcgtatatgaattgtacagaaaaatttcctgtgttacaagcagggtcccttctatctgggattctgag

SEQ ID NO: 126111 - DNA, 2613 bp, Zea Mays
taaccttctcccatttttgcattgatcttatctgcgcattctaattctatatttttcctattccaatattttgagaatcatatatatatatatatttaaaaagttctccgtcaatttatacatcttcatcctcgtattcgaacccacacggtgaccagtctacttggtaggagggagaggcggcctgagtcctggactcctggtccctcccgctggggctgggctacctcgttcgcttcgctgcctctgcctactcctctctcccctctttctccgctcatgtgctggtccatcgtctgcctcctcggtttgtcctgaatccttggacagacgcacacaggctcagctcaggtaaggtacaggcgtacagccgctgcctttcccgttgcaaatcttttcgccccccctgcaccatcctggtctcaccgtcactacgactcgatcttgctcgccactcgcctccctggctctctccctacttcccatgctgatctcggcgtgcttcgcttcctcctgccccagagcccggcctcgttggaaactcgactgatttcccttggtacttgctgttcctatccaatcactctaaattatttctcttttctttgttgattgctttccttggtttttgtttctcatggcgtctatattttcttggcatggtgcgtgtttctctcccttttttcccatccggttcatgcatgttctgcggttgttgtttacttataccctttgaggttccgctcttgcggattctccaacctgtgtttatgtccccctgcatttctttgtccggtgccacctcacgtctcctcacctagcaaagtagcagtcattttaatagtagcatttccacatcaagctctctaatctgcgcttctcttaattaatttattcgcccacaggcggttgctggatcctttggcgttccccatccggccaagaatcctgcaagagcctgcttggagttggagccggccaaacctgctgccgtcgacgtctcgggcgaggcagccttgagcatcagtctccttgacgaggcaagcaggccatgatgagcttcaagggacacgaggggttcggtcaggtgtccggagccgggatgagccaggcctcccatggcgccgcgcctgccggagccccgctgccgtggtgggctggggcccagctgctgtccggcgagccggcgcccctgtccccggaggaggcgccccgggacacccagttccaggtcgtgccgggggcctctcagggcacgccggatccagcgccgcccaagggagggacacctaaggtcctcaagttctctgtgttccaagggaatttggagtcgggtggtaaaggagagaaaaccccaaagaactctaccgctgtcgttctgcagtcgccattcgcggaatacaatggtcgtttcgagatcggtctcggtcaatctatgctggtcccttccagttattcttgtgctgaccagtgctatggcatgcttacgacttatggaatgagatccatgtctggtgggagaatgctgttgccactaattgcgccagccgatgcacccgtttatgtgaacccgaaacagtacgaaggcatcctccgtcgtcgccgtgctcgcgctaaggcggagagcgagaacaggctcaccaaaggcagaaagccttatctccatgagtcgcgccacctccacgcgatgcgccgggtgagaggctccggcgggcgcttcctcaacacgaataaaggagggcacggcacggacgttgctgcaaacgggggcagcaagatggcggcggcggcggcaccatcccgtctcgccatgccccctagcgctgagcctccatggctgtcagggctcagcgacggcagcaacccgtgctgccactcccggagtagtgtctccagcttgtccgggtcctacgtggcgagcatctacggtggcttggagcagcacctccgggcgccgcccttcttcaccccgctgccgcccgtcatggacggcgaccacggcggccccacggccgccaccatctcctccttcaagtgggcggccagcgacggctgctgcgagctcctcagggcgtgaaccgaggagggaggggatggctactcagacgaacggccttctccccgatggctggttgtctgtaggcaaatcattcttggctgttctgcattggggtgcgacctacacatcatccgcctaccgtacctaccccacccgtgtccctgaaattccagggtgcttgggttacttacaggggtcttgtgtggtgatgtggctcccccatatgcatttgctgtaacatagcgtacccaaaccactgttgcttggtacttctcgctatcactgcctcatcagtatggattctgcatttctgcgttgtcacagtgtatgaataattgaggcgtcagacttcagggttgctccagttcttggagataggtctgggtttgtttgaagcttgcctggaggtctgaaactttgtgtttggtgaagatgctacgttattgcagtttgaatctgtaagtttgggatcagcattcagttgttgcatcgtctgtgctctggtgccgaggtgttcgttctgaatatttgattcaattcaaaatcttcagcta

SEQ ID NO: 126112 - DNA, 2072 bp, Zea Mays
taaccttctcccatttttgcattgatcttatctgcgcattctaattctatatttttcctattccaatattttgagaatcatatatatatatatatttaaaaagttctccgtcaatttatacatcttcatcctcgtattcgaacccacacggtgaccagtctacttggtaggagggagaggcggcctgagtcctggactcctggtccctcccgctggggctgggctacctcgttcgcttcgctgcctctgcctactcctctctcccctctttctccgctcatgtgctggtccatcgtctgcctcctcggtttgtcctgaatccttggacagacgcacacaggctcagctcaggcggttgctggatcctttggcgttccccatccggccaagaatcctgcaagagcctgcttggagttggagccggccaaacctgctgccgtcgacgtctcgggcgaggcagccttgagcatcagtctccttgacgaggcaagcaggccatgatgagcttcaagggacacgaggggttcggtcaggtgtccggagccgggatgagccaggcctcccatggcgccgcgcctgccggagccccgctgccgtggtgggctggggcccagctgctgtccggcgagccggcgcccctgtccccggaggaggcgccccgggacacccagttccaggtcgtgccgggggcctctcagggcacgccggatccagcgccgcccaagggagggacacctaaggtcctcaagttctctgtgttccaagggaatttggagtcgggtggtaaaggagagaaaaccccaaagaactctaccgctgtcgttctgcagtcgccattcgcggaatacaatggtcgtttcgagatcggtctcggtcaatctatgctggtcccttccagttattcttgtgctgaccagtgctatggcatgcttacgacttatggaatgagatccatgtctggtgggagaatgctgttgccactaattgcgccagccgatgcacccgtttatgtgaacccgaaacagtacgaaggcatcctccgtcgtcgccgtgctcgcgctaaggcggagagcgagaacaggctcaccaaaggcagaaagccttatctccatgagtcgcgccacctccacgcgatgcgccgggtgagaggctccggcgggcgcttcctcaacacgaataaaggagggcacggcacggacgttgctgcaaacgggggcagcaagatggcggcggcggcggcaccatcccgtctcgccatgccccctagcgctgagcctccatggctgtcagggctcagcgacggcagcaacccgtgctgccactcccggagtagtgtctccagcttgtccgggtcctacgtggcgagcatctacggtggcttggagcagcacctccgggcgccgcccttcttcaccccgctgccgcccgtcatggacggcgaccacggcggccccacggccgccaccatctcctccttcaagtgggcggccagcgacggctgctgcgagctcctcagggcgtgaaccgaggagggaggggatggctactcagacgaacggccttctccccgatggctggttgtctgtaggcaaatcattcttggctgttctgcattggggtgcgacctacacatcatccgcctaccgtacctaccccacccgtgtccctgaaattccagggtgcttgggttacttacaggggtcttgtgtggtgatgtggctcccccatatgcatttgctgtaacatagcgtacccaaaccactgttgcttggtacttctcgctatcactgcctcatcagtatggattctgcatttctgcgttgtcacagtgtatgaataattgaggcgtcagacttcagggttgctccagttcttggagataggtctgggtttgtttgaagcttgcctggaggtctgaaactttgtgtttggtgaagatgctacgttattgcagtttgaatctgtaagtttgggatcagcattcagttgttgcatcgtctgtgctctggtgccgaggtgttcgttctgaatatttgattcaattcaaaatcttcagctaagttactactggg

SEQ ID NO: 126113 - DNA, 1953 bp, Zea Mays
cgccccccctgcaccatcctggtctcaccgtcactacgactcgatcttgctcgccactcgcctccctggctctctccctacttcccatgctgatctcggcgtgcttcgcttcctcctgccccagagcccggcctcgttggaaactcgactgatttcccttggcggttgctggatcctttggcgttccccatccggccaagaatcctgcaagagcctgcttggagttggagccggccaaacctgctgccgtcgacgtctcgggcgaggcagccttgagcatcagtctccttgacgaggcaagcaggccatgatgagcttcaagggacacgaggggttcggtcaggtgtccggagccgggatgagccaggcctcccatggcgccgcgcctgccggagccccgctgccgtggtgggctggggcccagctgctgtccggcgagccggcgcccctgtccccggaggaggcgccccgggacacccagttccaggtcgtgccgggggcctctcagggcacgccggatccagcgccgcccaagggagggacacctaaggtcctcaagttctctgtgttccaagggaatttggagtcgggtggtaaaggagagaaaaccccaaagaactctaccgctgtcgttctgcagtcgccattcgcggaatacaatggtcgtttcgagatcggtctcggtcaatctatgctggtcccttccagttattcttgtgctgaccagtgctatggcatgcttacgacttatggaatgagatccatgtctggtgggagaatgctgttgccactaattgcgccagccgatgcacccgtttatgtgaacccgaaacagtacgaaggcatcctccgtcgtcgccgtgctcgcgctaaggcggagagcgagaacaggctcaccaaaggcagaaaggtgtgagaagactcttcttgtagctgggtgacccccttgacccttcctacttccatgacagttgacagcgagctaccatcgcaagcagcatttgcgatgctcccatgctttacagtcaccacgttgactggtgatcagtgatcgctgtgtgcctgttcatgctgcagccttatctccatgagtcgcgccacctccacgcgatgcgccgggtgagaggctccggcgggcgcttcctcaacacgaataaaggagggcacggcacggacgttgctgcaaacgggggcagcaagatggcggcggcggcggcaccatcccgtctcgccatgccccctagcgctgagcctccatggctgtcagggctcagcgacggcagcaacccgtgctgccactcccggagtagtgtctccagcttgtccgggtcctacgtggcgagcatctacggtggcttggagcagcacctccgggcgccgcccttcttcaccccgctgccgcccgtcatggacggcgaccacggcggccccacggccgccaccatctcctccttcaagtgggcggccagcgacggctgctgcgagctcctcagggcgtgaaccgaggagggaggggatggctactcagacgaacggccttctccccgatggctggttgtctgtaggcaaatcattcttggctgttctgcattggggtgcgacctacacatcatccgcctaccgtacctaccccacccgtgtccctgaaattccagggtgcttgggttacttacaggggtcttgtgtggtgatgtggctcccccatatgcatttgctgtaacatagcgtacccaaaccactgttgcttggtacttctcgctatcactgcctcatcagtatggattctgcatttctgcgttgtcacagtgtatgaataattgaggcgtcagacttcagggttgctccagttcttggagataggtctgggtttgtttgaagcttgcctggaggtctgaaactttgtgtttggtgaagatgctacgttattgcagtttgaatctgtaagtttgggat

SEQ ID NO: 126114 - DNA, 1830 bp, Zea Mays
ctcgatcttgctcgccactcgcctccctggctctctccctacttcccatgctgatctcggcgtgcttcgcttcctcctgccccagagcccggcctcgttggaaactcgactgatttcccttggcggttgctggatcctttggcgttccccatccggccaagaatcctgcaagagcctgcttggagttggagccggccaaacctgctgccgtcgacgtctcgggcgaggcagccttgagcatcagtctccttgacgaggcaagcaggccatgatgagcttcaagggacacgaggggttcggtcaggtgtccggagccgggatgagccaggcctcccatggcgccgcgcctgccggagccccgctgccgtggtgggctggggcccagctgctgtccggcgagccggcgcccctgtccccggaggaggcgccccgggacacccagttccaggtcgtgccgggggcctctcagggcacgccggatccagcgccgcccaagggagggacacctaaggtcctcaagttctctgtgttccaagggaatttggagtcgggtggtaaaggagagaaaaccccaaagaactctaccgctgtcgttctgcagtcgccattcgcggaatacaatggtcgtttcgagatcggtctcggtcaatctatgctggtcccttccagttattcttgtgctgaccagtgctatggcatgcttacgacttatggaatgagatccatgtctggtgggagaatgctgttgccactaattgcgccagccgatgcacccgtttatgtgaacccgaaacagtacgaaggcatcctccgtcgtcgccgtgctcgcgctaaggcggagagcgagaacaggctcaccaaaggcagaaagccttatctccatgagtcgcgccacctccacgcgatgcgccgggtgagaggctccggcgggcgcttcctcaacacgaataaaggagggcacggcacggacgttgctgcaaacgggggcagcaagatggcggcggcggcggcaccatcccgtctcgccatgccccctagcgctgagcctccatggctgtcagggctcagcgacggcagcaacccgtgctgccactcccggagtagtgtctccagcttgtccgggtcctacgtggcgagcatctacggtggcttggagcagcacctccgggcgccgcccttcttcaccccgctgccgcccgtcatggacggcgaccacggcggccccacggccgccaccatctcctccttcaagtgggcggccagcgacggctgctgcgagctcctcagggcgtgaaccgaggagggaggggatggctactcagacgaacggccttctccccgatggctggttgtctgtaggcaaatcattcttggctgttctgcattggggtgcgacctacacatcatccgcctaccgtacctaccccacccgtgtccctgaaattccagggtgcttgggttacttacaggggtcttgtgtggtgatgtggctcccccatatgcatttgctgtaacatagcgtacccaaaccactgttgcttggtacttctcgctatcactgcctcatcagtatggattctgcatttctgcgttgtcacagtgtatgaataattgaggcgtcagacttcagggttgctccagttcttggagataggtctgggtttgtttgaagcttgcctggaggtctgaaactttgtgtttggtgaagatgctacgttattgcagtttgaatctgtaagtttgggatcagcattcagttgttgcatcgtctgtgctctggtgccgaggtgttcgttctgaatatttgattcaattcaaaatcttcagcta

SEQ ID NO: 126115 - DNA, 922 bp, Zea Mays
ggccgctcgcccctgcggcttgggcgctcggccacagccagtgcgggccgtgcggcagtgtccactcgggcctcggccagctgctagctaatcctaatcagtaattactgtaagcgtttctcattttctcagttttttttgtcactactcactggtgaacagcctttagtgcccaagaacagccttcagtgcccaagctcgtgttggaaaccagctgcggcatgatgctttggtgatttggttgcttaataattaactcagttcattggataatttattggtttgtctctccatgttcagtttgcactttgtggacaagaagttgtgaatgccttcagtgctgcagtgttgggcctatcttcaggttgtgtttcttctcaagtcaaccaagagcagcctcatgatggttcccctcctctgagagaagatgacaagaatgggcattatgtttttgctgttggagataatctcacatctcgttataagatcaatgcaaaaatgggagaagtctacaggaatcagtggtcttctccgctacgctcctgaaatatttgagcagtctggagtggctagtttgttttcagacattggactttctcctcattcaacatcaattctcatgagtacccttaatgctttgctgatactcccttgtataactgccgcaatgctgctgatggatgtctgcgggagaaggtagaatctgagacaccatgaaaattagtgatgcagttgtggacttttgaacaatagctggagtgatatgaaacattagtgatgtagttgtgggcttttgaactgcttcaagctggagtgatgtcgctgtggtgcttttgtgactgatctagctagctatctgtaaatgatctagttgtgaatgatattataattgtgatgtttttgtgaatatataattgtggtg

SEQ ID NO: 126116 - DNA, 1292 bp, Zea Mays
ggccgctcgcccctgcggcttgggcgctcggccacagccagtgcgggccgtgcggcagtgtccactcgggcctcggccagctgctagctaatcctaatcagtaattactgtaagcgtttctcattttctcagttttttttgtcactactcactggtgaacagcctttagtgcccaagaacagccttcagtgcccaagctcgtgttggaaaccagctgcggcatgatgctttggtgatttggttgcttaataattaactcagttcattggataatttattggtttgtctctccatgttcagtttgcactttgtggacaagaagttgtgaatgccttcagtgctgcagtgttgggcctatcttcaggttgtgtttcttctcaagtcaaccaagagcagcctcatgatggttcccctcctctgagagaagatgacaagaatgggcattatgtttttgctgttggagataatctcacatctcgttataagatcaatgcaaaaatgggagaaggttagtttggatgaccatatattctgaaatagttgatttaactcgattgggcatgccaatacattcaacaaattttgtctataactgaatgtagctgggactacttggtgtaacctgttagcccctttgatcttattgtgcacacagaaaaaagataactaattttatgagataattccttgcctttgtttgcaaaagtactttggccgataagctggtgttgactaatcattgtatgttgattatgtattcaattcagcatggagttcagtttacttgcatactggctaccatgtatacagaatgctagtgtctgctgacacgttcttttttgcttgttttttgtttgctcttctcaaaaatatagtctacaggaatcagtggtcttctccgctacgctcctgaaatatttgagcagtctggagtggctagtttgttttcagacattggactttctcctcattcaacatcaattctcatgagtacccttaatgctttgctgatactcccttgtataactgccgcaatgctgctgatggatgtctgcgggagaaggtagaatctgagacaccatgaaaattagtgatgcagttgtggacttttgaacaatagctggagtgatatgaaacattagtgatgtagttgtgggcttttgaactgcttcaagctggagtgatgtcgctgtggtgcttttgtgactgatctagctagctatctgtaaatgatctagttgtgaatgatattataattgtgatgtttttgtgaatatataattgtggtgctt

SEQ ID NO: 126117 - DNA, 977 bp, Zea Mays
ctcccgtcgcggcccgcctcctccactccaaccaagtcaggccaacgtggagccccgtccccccccccccccccccactcctcccagatttgcagctcgcaccccgggaatccccagaattccatcgccacgccgcgcgctgcccgtggcacccggagcggagcgcaccctccccctctccaccgcaattcccgaggcggggacgcttcctgccttggcgctcgctccctccctcgtgatcggcgccgcgggcgaggcggaactcgggcgaatcgcgctgtccggaggggggagtctagggttctggccatgccggccgcgtcgtagggcgggggtccctgcctgcgtcgccggcgcgtgtggagatctcggggcctccgaaccctaacgggggacgggagcccggcagctgctgaggcatggacgtggactcgcgcatgacgacggagtccgactccgactccgacgcggcggccgccgcggccgctcacgggggcagcgccggaggctcggggtccgggagcgagacctcctcgtcgtccgcgccatcgacgcccgggacacctgggacgcccggcgctgcgggaccgaggccagcgcccgggtacacggtggtgaacgcggtgatcgataagaaggaggacggaccagggtgccgatgcgggcacacgctgacggcggtgccggctgtcggggaggacggcacgcccggatacatcggaccgcggttgatcctgtttggtggggccaccgcgctcgaagggaactctgccaccccaccctcttcggccgggagcgcggggatccgtcttgctggtgccacagcagatgtccattgttatgacgtgtcatcgaacaagtggagcaggcttaccccacttggcgagcctccttcaccaagagctgcacatgtagcaactgcggttggaaccatggtggtcattcaggaggactgcacccctaagcttatccactaa

SEQ ID NO: 126118 - DNA, 741 bp, Zea Mays
cgtgtgtctgcacttgttactgatgtcctagtagaagttatttgcacaatgacatctcactttggttttaccttttcgccttgcaggttgtggtggctgctgaaactggaggtgccctaggtggcatggtcaggcagctatcaattgaccaatttgaaaatgaagggagaagagtcagctatggaaccccagagaacgcaactgcagcaagaaagctactagatagacaaatgtctattaatagtattcctaaaaaggtaattgcatctctgttgaaacctcgtggctggaaaccccctgtccggaggcagttcttcttggattgcaatgaaattgcagacctatgtgacagtgctgagcgaatattttcaagtgaaccaagtgttttgcagcttaaagctcctgttaagatatttggagatttacacggacaatttggagatctgatgaggttatttgatgaatatggtgctccttcgactgcaggtgacattgcttacattgattatctattcttgggggattatgtagatcgcggccagcatagtttagaaactatcactcttcttcttgcattgaaggttgaatatcctcaaaatgtacatttgattcgaggaaatcacgaagctgcagatatcaatgctttgtttggtttccgaatagagtgtatagaacgaatggtaattgccttttcgtctactgcattactttatagaatcacctagaatcttttgcttatgg

SEQ ID NO: 126119 - DNA, 1899 bp, Zea Mays
cgtgtgtctgcacttgttactgatgtcctagtagaagttatttgcacaatgacatctcactttggttttaccttttcgccttgcaggttgtggtggctgctgaaactggaggtgccctaggtggcatggtcaggcagctatcaattgaccaatttgaaaatgaagggagaagagtcagctatggaaccccagagaacgcaactgcagcaagaaagctactagatagacaaatgtctattaatagtattcctaaaaaggtaattgcatctctgttgaaacctcgtggctggaaaccccctgtccggaggcagttcttcttggattgcaatgaaattgcagacctatgtgacagtgctgagcgaatattttcaagtgaaccaagtgttttgcagcttaaagctcctgttaagatatttggagatttacacggacaatttggagatctgatgaggttatttgatgaatatggtgctccttcgactgcaggtgacattgcttacattgattatctattcttgggggattatgtagatcgcggccagcatagtttagaaactatcactcttcttcttgcattgaaggttgaatatcctcaaaatgtacatttgattcgaggaaatcacgaagctgcagatatcaatgctttgtttggtttccgaatagagtgtatagaacgaatgggcgaaagagatggtatctggacatggcatcgaatgaataggctatttaattggcttcctttggctgcgcttatagaaaagaaaatcatctgtatgcatggtggcatcggtcggtcaatcaaccatgtcgagcaaattgagaatcttcaaaggccaattacaatggaagctggctcggttgttctcatggatcttctatggtctgatccaacagagaatgacagtgttgaaggactgaggcccaatgcccggggtcctggtcttgttacatttgggcctgatcgggttatggagttctgcaacaacaatgatcttcagttaattgtacgagcacatgagtgtgtgatggatggctttgaacgctttgcccaaggtcatctgatcactcttttctccgcaacaaattattgtggtactgcaaataatgcaggtgcgatcttggttttgggtagagatcttgtggttgtgccaaaactaatccatcctttgccccctgcaattacatcacctgaagcgtcgccggatcatattgaggacacatggatgcaggagctaaatgctaacagaccaccaactccgaccagggggcgtccccaagcagtagctaatgaacggggctctctcgcctggatatagtagattcattacacattggttggtatgatccatatgaagcctgagtgatcaggatcttgttatttcatttgtgttcgggagaggggttggtccacagccatacggaaacgaaaggttgatgtacagggagcagagaggactaaagtcggtagaagtgagcttgatctaggacagtgctctccaattcgttccattgaacacaagtagcagtacaaatagaactcatcctaagatccttggaggcttcacttgtatatactcagctgggtggataggtggtgggtgtatggtgtgattttggcatccaattggaatggcaaaggtaatagtgttattgtactaggaattctttccctttttttttctttctcggggcctagaattctcatgttgcaaattatttttgagttgccacagggatttgccaggagggctcgaagtcctgttgttttgtataatagtgctctcagcctcattgtaatttcagacacatgctgatgtgtacaattttgtgttaaagtgagaattttttgggggtggagaatggacggcttgatttatagtggaggtaaagagctgttat

SEQ ID NO: 126120 - DNA, 492 bp, Zea Mays
atggatcctgcgtcgccgccgaggggtgaaaatacgacgccaaaagaacttccgattgacgtgctgctggccggtctacacaaagcggtggagggcctcaacgaagcagctgcggatggactccaagcagcagttgtcgatggcttgcttgcggcggcggatgccctatcccagacgcggaatcgtctgcatggtgaagtcgcgtccgggataggtgtcgccgctacaggtcttcgacatgcagctaaattcctacgcgcggtgacctgttctcgttgcggacttgtccacaaagactacgactccattgcttgggatgagggtcacaataagtttgattgtcatgtcctcttccatgactcgtcatctcgtcagaagtggcttctgaagaatgctagagtggatggctccgatggtaacgacgacgtctcaagctttgtggcagactccatcaccgaagaggctgattccatcgccaagacgacaaagtga

SEQ ID NO: 126121 - DNA, 2506 bp, Zea Mays
gcccggtgtgatgcaaagctctggtcggcccaattacccccttcggccacttcgggcaccaacacctctgcggctctgccgtcctatcgaaaaagaaaaaaaaaacaaaatgaataaacctccgcagaccacgcccaccaacgcccatggcccaggctctcgggcacgtcagaggcgatcacgacgcctgcacccagttcagtggtccaccatcatcgctcgtgtcgtgtgctcagccgcagccgtgaggatccccagttccccaacctctcttgctcgctcccctcccaggctcccacagtcacacactcgtctcgagcgccgccccaaacccccaaccaaaccctcgccgccgtcagcggccatggatcttcgccgcccgccgcgctcctcgtcgggcggcgtggagcccaagatccgccaggtcggcttcttcaccccggatgcctccgcgccgtccgagcccatgccccccgccgcggtggtccaggcaccatcggcgcagcagaggccggtcacggcgtcgcctccggcgtcagacgacttctcccaggggcgcctttcccctgtcatgatccctcccccgcgccatgccgaccacctcgccctgggcccacaccccccggcggcggccgacgtcgtcctcgccacttctgcgcccgtgcgttcgtccccgcgcctcgacatcgtgtccgagatcggcgacgacgactcctggtcacgcgctccttctgctgtggagctagaagaaaacaagtgtggtttggctgaaatacggaatgagggtgctccagcttccattccacaaaagcagaaaacctcgaaggcagagagacgtgcaattcaggaggcccaacgtgctgctaaagctgcagcgaaggaggcagataaatcaggaaaatctgctggtgctgcgatgtccaagcaagccaagccagcaaaaactgctcagaagaaagatgtgccccaagctgcaagtacacttgcttctgagaagaaggctactgaacgtcctccagaaagagaaaaaaaattagatgctccccatccccgcatgcagtttgatgatgtgcataaggtggagaaagcaaaaaaacgtgcggtagtcaaccaatcagaagctcaaaacagagttgaactgttcaggcatcttcctcagtatgtgcatggcactcagcttcctgacctcgagtcaaaattctttcaattagaaccaatgcatccttctgtatacaaggttgggctccaatatttgtctggtgaagtatctggtggtaatgatcgttgtgtagcaatgcttcttgcattcaaagaggcaataaaagattacactacacctacaaataaaacactcagcagagatcttactgcaaaaatcagcagttatgtgtcatttcttatcgagtgtaggcctctttcaatcagcatgggcaatgctattaggtttctgaagagcaggatagcaaagctaccacatgcattgtcagagtctgaagccaaaactagtcttcagtctgatattgatcgttttataaatgagaagatagttcttgcagataaagttattgtcagccatgccatcacaaaggtcagagacaacgatgtcttactgacatatggatcatcaacagttgttgaaatgattttggattatgctcatgaacttgggaggaactttcgagttgtagtggtagattctcgcccaaagcttgagggacagggattgctgcggagattagtggcaaagggcattaattgcacatatacacacataaatgccatctcatacatcatgcatgaagtaactcgagttttgttgggtgcctcatcaatattatcaaatgggacagtttattctcgagttgggacagcatctgtggctatggttgcgcatgcatttggagttccagttctggtttgttgtgaggcatacaagtttcacgagagagtgcaacttgattctatatgtgctaatgagcttggcgatccagatgtcattttgaaaattcctgggaaggcagaggaccatcttaagaactgggcagacagtgcaaatctccaattgctaaatttaacgtacgatgccaccccacctgattatgtgtcgatgatcataactgactacggaatgcttccgccaactagtgtaccggtcattgtgagagagtaccgcaaggagcaactatggatatgactcactgccctactggcgtatggtagcatttttggtgacctttgcctgagtgcaacatgataaatgattgcactgctggcctgagtttttttttttgtctgtccttgttgcctttttaccaaaagacggtccgtcgtgttttgcgatcacctgtataacttgcaactctgaatggtgcactcgtgtgccctcggacatcgttgagtcgatggatcagtgatgagtaccatccttgggctctaaatatttcaatggaatgccacctccaaccacagagaaggttgaatatttgatatggtttttgatactcta

SEQ ID NO: 126122 - DNA, 2503 bp, Zea Mays
gcccggtgtgatgcaaagctctggtcggcccaattacccccttcggccacttcgggcaccaacacctctgcggctctgccgtcctatcgaaaaagaaaaaaaaaacaaaatgaataaacctccgcagaccacgcccaccaacgcccatggcccaggctctcgggcacgtcagaggcgatcacgacgcctgcacccagttcagtggtccaccatcatcgctcgtgtcgtgtgctcagccgcagccgtgaggatccccagttccccaacctctcttgctcgctcccctcccaggctcccacagtcacacactcgtctcgagcgccgccccaaacccccaaccaaaccctcgccgccgtcagcggccatggatcttcgccgcccgccgcgctcctcgtcgggcggcgtggagcccaagatccgccaggtcggcttcttcaccccggatgcctccgcgccgtccgagcccatgccccccgccgcggtggtccaggcaccatcggcgcagcagaggccggtcacggcgtcgcctccggcgtcagacgacttctcccaggggcgcctttcccctgtcatgatccctcccccgcgccatgccgaccacctcgccctgggcccacaccccccggcggcggccgacgtcgtcctcgccacttctgcgcccgtgcgttcgtccccgcgcctcgacatcgtgtccgagatcggcgacgacgactcctggtcacgcgctccttctgctgtggagctagaaaacaagtgtggtttggctgaaatacggaatgagggtgctccagcttccattccacaaaagcagaaaacctcgaaggcagagagacgtgcaattcaggaggcccaacgtgctgctaaagctgcagcgaaggaggcagataaatcaggaaaatctgctggtgctgcgatgtccaagcaagccaagccagcaaaaactgctcagaagaaagatgtgccccaagctgcaagtacacttgcttctgagaagaaggctactgaacgtcctccagaaagagaaaaaaaattagatgctccccatccccgcatgcagtttgatgatgtgcataaggtggagaaagcaaaaaaacgtgcggtagtcaaccaatcagaagctcaaaacagagttgaactgttcaggcatcttcctcagtatgtgcatggcactcagcttcctgacctcgagtcaaaattctttcaattagaaccaatgcatccttctgtatacaaggttgggctccaatatttgtctggtgaagtatctggtggtaatgatcgttgtgtagcaatgcttcttgcattcaaagaggcaataaaagattacactacacctacaaataaaacactcagcagagatcttactgcaaaaatcagcagttatgtgtcatttcttatcgagtgtaggcctctttcaatcagcatgggcaatgctattaggtttctgaagagcaggatagcaaagctaccacatgcattgtcagagtctgaagccaaaactagtcttcagtctgatattgatcgttttataaatgagaagatagttcttgcagataaagttattgtcagccatgccatcacaaaggtcagagacaacgatgtcttactgacatatggatcatcaacagttgttgaaatgattttggattatgctcatgaacttgggaggaactttcgagttgtagtggtagattctcgcccaaagcttgagggacagggattgctgcggagattagtggcaaagggcattaattgcacatatacacacataaatgccatctcatacatcatgcatgaagtaactcgagttttgttgggtgcctcatcaatattatcaaatgggacagtttattctcgagttgggacagcatctgtggctatggttgcgcatgcatttggagttccagttctggtttgttgtgaggcatacaagtttcacgagagagtgcaacttgattctatatgtgctaatgagcttggcgatccagatgtcattttgaaaattcctgggaaggcagaggaccatcttaagaactgggcagacagtgcaaatctccaattgctaaatttaacgtacgatgccaccccacctgattatgtgtcgatgatcataactgactacggaatgcttccgccaactagtgtaccggtcattgtgagagagtaccgcaaggagcaactatggatatgactcactgccctactggcgtatggtagcatttttggtgacctttgcctgagtgcaacatgataaatgattgcactgctggcctgagtttttttttttgtctgtccttgttgcctttttaccaaaagacggtccgtcgtgttttgcgatcacctgtataacttgcaactctgaatggtgcactcgtgtgccctcggacatcgttgagtcgatggatcagtgatgagtaccatccttgggctctaaatatttcaatggaatgccacctccaaccacagagaaggttgaatatttgatatggtttttgatactcta

SEQ ID NO: 126123 - DNA, 681 bp, Zea Mays
atggagggaggcgtggtgctgctcaactgctccgtgagccccttcggcaaccgcgtgcgcatcgcgctgaagctcaagggcgtggtgtacgaggagaaggccgagaacctggcggccaagagcccgctgctgctgtcctccaaccccgtccacgccaaggtccccgtcctcatcgtcgggggcaagcccgtgtgcgagtccctcgtcatcctcgaattcatcgacgacgccttctcttctaccgccggcgagctgcggctcctccccgccgacccctacgcacgcgcccacgcccgtttctgggcctcttacgtcgacaccaagctcaacgattgcgcgatgcgcgtgtggcggcagcccaagggcgcggcggcggcggtggaggcggcggcgaaggacacggtggccgcgctcaagacgctggaggccgagctgggcgggaagccgtacttcggcggggacgccctcggctacattgacgtcgcgctggtgcccttcgcgccgtggttcctgacctacgagcggtttggcggcttcggcgtcgccgccgagtgcccggcgctggcggcgtgggcagagcgctgcgtccgggagaaccagtgcgtggccgagtcgctgccggaggccgagcacgtgttccagttcgtgtgcggcatgaggaaggcgttcggcctcgactag

SEQ ID NO: 126124 - DNA, 1931 bp, Zea Mays
ttcacgattcagccttgtgaactacccactttccaattcgacatcttcgccctcgaatcgagcttccctccaccgaatcgagttcctccatccaaatcgagctcattgccgccggatcgaggtctgcgtggatcgagctcgagctttggagaaggagaggaaacgggggacgggcacggggggagcaaggcaaccaaacgggtggagggaaacacgccaaacaggctcctcgatcgttccgggctcgggctgccacccgccattcggtgtcccctccttgacaggtgcccgagccgcgccgagctccagcctcatttccacggtccgcgccggcactcttccctctcccgatcgtcctcctcgtcgcctgccgcctcttccttcttcccactccactagcttcaggttggactgcacaacgtggagcggagatctatccgaacacgggattgattcatctggtggtgttacaacatagggtttttgatatagcaatgggattactcatgtataaatgaacaaagtttggagacagttggacctgacaattgccactttttacatgttttaactcattttttttctgggaaacaagtaattctgaagttaccttggaagtcctttgcgcttttgactggtcgggttgcataggccattgttgagaggtgatttggcctaagaatgggggctccaaaacaaaggtggacttctgaggaagaggctgctcttagagctggaatagcaaggcatggagttggaaaatggcgcacaatattgaaagatccagaatttagttccaccttatgctaccgctcaaatgttgatctcaaggacaagtggcgaaacatgaatgtgattgtcagtacatcgagttctcgtgacaaggcgaagtctgcattgaagagaatacgaactattcccaagaataatgagcacaccatggcaattaccagagttacttctgatattgatgatgagattgttgacgaaaagcctatagtatcattgcctagtgaagcaaagaacacatcaagttcgaagaaatctcacaggctagataatattataatggaggctataaagaacttaaatgagcctacgggatcacacagaactactattgctaattacatagaggagcaatattggccacctagtgattttgatcacttactatctgcaaaactgaaggacttgtccaccagtggcaaattgataaaggtgaaccggaagtacagaatagcacctagttcacccaattcagagcgccgaagccccaaaatgccactgttggaagatgtccaaagagagcctgtcaagatatggagtgatgatactaaaacccttaccagatctcaagttgatgctgaattggcacgtatggcaaccatgactgctgaggaagcttcagtggcagcggctcgagcagttgctgaagcagaggccatcatggcagaagctgaagctgcagcgaaagaggcagaggctgcagaagcagaagcccaagccgcacaagcatttgctgaagcagcgtttttgacattgaagaacagaaatgctggaaaattggtaatagctctaattcatgcatccctttgttacatactaccatgttttatatcctatcacatttagaaccaggttttataaccccttatgcaactgattggttagttttgtatactgcaaaaacaaaatcccatcatgagcacgtttgcttagtctatccccccacccccatgaaggtagtgatttccaaaggcacccttatgccaacaatagcgtctgctgcaacagcaaagcttttagtcccaagaaactatagagtaggaaactcagtgagagccacagataaagttgatagaatagtaataagtagcaggtatcataatagtaaaggtcattatgacaagttgtgaaaagaattatac

SEQ ID NO: 126125 - DNA, 1906 bp, Zea Mays
ttcacgattcagccttgtgaactacccactttccaattcgacatcttcgccctcgaatcgagcttccctccaccgaatcgagttcctccatccaaatcgagctcattgccgccggatcgaggtctgcgtggatcgagctcgagctttggagaaggagaggaaacgggggacgggcacggggggagcaaggcaaccaaacgggtggagggaaacacgccaaacaggctcctcgatcgttccgggctcgggctgccacccgccattcggtgtcccctccttgacaggtgcccgagccgcgccgagctccagcctcatttccacggtccgcgccggcactcttccctctcccgatcgtcctcctcgtcgcctgccgcctcttccttcttcccactccactagcttcaggttggactgcacaacgtggagcggagatctatccgaacacgggattgattcatctggtggtgttacaacatagggtttttgatatagcaatgggattactcatgtataaatgaacaaagtttggagacagttggacctgacaattgccactttttacatgttttaactcattttttttctgggaaacaagtaattctgaagttaccttggaagtcctttgcgcttttgactggtcgggttgcataggccattgttgagaggtgatttggcctaagaatgggggctccaaaacaaaggtggacttctgaggaagaggctgctcttagagctggaatagcaaggcatggagttggaaaatggcgcacaatattgaaagatccagaatttagttccaccttatgctaccgctcaaatgttgatctcaaggacaagtggcgaaacatgaatgtgattgtcagtacatcgagttctcgtgacaaggcgaagtctgcattgaagagaatacgaactattcccaagaataatgagcacaccatggcaattaccagagttacttctgatattgatgatgagattgttgacgaaaagcctatagtatcattgcctagtgaagcaaagaacacatcaagttcgaagaaatctcacaggagcaatattggccacctagtgattttgatcacttactatctgcaaaactgaaggacttgtccaccagtggcaaattgataaaggtgaaccggaagtacagaatagcacctagttcacccaattcagagcgccgaagccccaaaatgccactgttggaagatgtccaaagagagcctgtcaagatatggagtgatgatactaaaacccttaccagatctcaagttgatgctgaattggcacgtatggcaaccatgactgctgaggaagcttcagtggcagcggctcgagcagttgctgaagcagaggccatcatggcagaagctgaagctgcagcgaaagaggcagaggctgcagaagcagaagcccaagccgcacaagcatttgctgaagcagcgtttttgacattgaagaacagaaatgctggaaaattgatggcctaaggttgatcctacttggactctcggcctcgcggctgttctgaaacggcttttctgtgccatgtagatttgtacaacagtacgtgtttactacacttcggtttaaagcagctgccccggtgagtgtatcaccttatgttagtgggagccatgtgaaaactccagcctccagcgcactagtagcaacaatagcagcttgccacaacgccattcagaaaactgggtggcataaactcttccagtgtcaaatgtttcgctaacgatttgcagtattgcattgtgcatgaacagcctttgcattagtgcattattgcgctgcctgccaacagtcggcccgtttgctgaaaacgtttgtccggtggtgcactggcgctgataactacatattctcacaatattaaattaccagtttcaac

SEQ ID NO: 126126 - DNA, 1991 bp, Zea Mays
ttcacgattcagccttgtgaactacccactttccaattcgacatcttcgccctcgaatcgagcttccctccaccgaatcgagttcctccatccaaatcgagctcattgccgccggatcgaggtctgcgtggatcgagctcgagctttggagaaggagaggaaacgggggacgggcacggggggagcaaggcaaccaaacgggtggagggaaacacgccaaacaggctcctcgatcgttccgggctcgggctgccacccgccattcggtgtcccctccttgacaggtgcccgagccgcgccgagctccagcctcatttccacggtccgcgccggcactcttccctctcccgatcgtcctcctcgtcgcctgccgcctcttccttcttcccactccactagcttcaggttggactgcacaacgtggagcggagatctatccgaacacgggattgattcatctggtggtgttacaacatagggtttttgatatagcaatgggattactcatgtataaatgaacaaagtttggagacagttggacctgacaattgccactttttacatgttttaactcattttttttctgggaaacaagtaattctgaagttaccttggaagtcctttgcgcttttgactggtcgggttgcataggccattgttgagaggtgatttggcctaagaatgggggctccaaaacaaaggtggacttctgaggaagaggctgctcttagagctggaatagcaaggcatggagttggaaaatggcgcacaatattgaaagatccagaatttagttccaccttatgctaccgctcaaatgttgatctcaaggacaagtggcgaaacatgaatgtgattgtcagtacatcgagttctcgtgacaaggcgaagtctgcattgaagagaatacgaactattcccaagaataatgagcacaccatggcaattaccagagttacttctgatattgatgatgagattgttgacgaaaagcctatagtatcattgcctagtgaagcaaagaacacatcaagttcgaagaaatctcacaggctagataatattataatggaggctataaagaacttaaatgagcctacgggatcacacagaactactattgctaattacatagaggagcaatattggccacctagtgattttgatcacttactatctgcaaaactgaaggacttgtccaccagtggcaaattgataaaggtgaaccggaagtacagaatagcacctagttcacccaattcagagcgccgaagccccaaaatgccactgttggaagatgtccaaagagagcctgtcaagatatggagtgatgatactaaaacccttaccagatctcaagttgatgctgaattggcacgtatggcaaccatgactgctgaggaagcttcagtggcagcggctcgagcagttgctgaagcagaggccatcatggcagaagctgaagctgcagcgaaagaggcagaggctgcagaagcagaagcccaagccgcacaagcatttgctgaagcagcgtttttgacattgaagaacagaaatgctggaaaattgatggcctaaggttgatcctacttggactctcggcctcgcggctgttctgaaacggcttttctgtgccatgtagatttgtacaacagtacgtgtttactacacttcggtttaaagcagctgccccggtgagtgtatcaccttatgttagtgggagccatgtgaaaactccagcctccagcgcactagtagcaacaatagcagcttgccacaacgccattcagaaaactgggtggcataaactcttccagtgtcaaatgtttcgctaacgatttgcagtattgcattgtgcatgaacagcctttgcattagtgcattattgcgctgcctgccaacagtcggcccgtttgctgaaaacgtttgtccggtggtgcactggcgctgataactacatattctcacaatattaaattaccagtttcaac

SEQ ID NO: 126127 - DNA, 309 bp, Zea Mays
atgaagaaatccaggcgtattgggagctcgtgcagctgcgaaggtctgccactgtccctcgctgttgcagtggccaaatgttacagctctgccgtgaagggaggcacctcgatcgctggcgtatgtgacatcattgctgtcgcatctgggaaaggcggcgtaggcaagtccaccactgcagttaacattgctgtagcacttgcaaaggagtttaagcttcaggttggtttgctagatgctgacatctatggaccatccattcccacaatgatgaatctccatgccaagcctgaattaagtgaagtgtaa

SEQ ID NO: 126128 - DNA, 721 bp, Zea Mays
gttcgagttcacgctaagcatcgtcatcgccccatcggtccgtcgttagtgcccctcgctccctcggaaaaccctctcctctcccctatcctctcgtctccccccaccccgccgcgatcaaccgagacccaccgccatgacgagcgacgacgaggaggcgtgcgactacttctacgacgacgacgacgacgccgaggaagacgccgccgccggactggaggaggactcttcgcttccaacgccggagggccgcgcggactactgggtgagtgatctctgatccgaaccccggggcgccccggctagtcgcggggatgataattgtgtgtgtttgccgggttgggatttccgcgccggcgagatctgggaggacctcgccgatcgattcgagaatcgccctgcctgccccgattcaccaaacctttatataagttcatcgttgtaagaaataaaataacggggtgtcacgaggaaccggtgctggatgtcttcagatcctcaccagattgggttgttatattttaattcggtgggatgtatccgtgtgtacttggaatttgagagcagtgaacaaacaaattcctgtctacttgtcttagctgtataagataagaattgctagagtccatcagagtacttgtcttttcactgtaaagtgtaaagtgtagtatttaattttgcccaaagtagtggccattggtcaacaaaatcttacctttgc

SEQ ID NO: 126129 - DNA, 2152 bp, Zea Mays
gttcgagttcacgctaagcatcgtcatcgccccatcggtccgtcgttagtgcccctcgctccctcggaaaaccctctcctctcccctatcctctcgtctccccccaccccgccgcgatcaaccgagacccaccgccatgacgagcgacgacgaggaggcgtgcgactacttctacgacgacgacgacgacgccgaggaagacgccgccgccggactggaggaggactcttcgcttccaacgccggagggccgcgcggactactgggctatcacacaagataccgttttcgctgcacagaaacaagatctgtctacggtgatgaacttgctcaatataaatcaacatcaagcacgagccctcctcattcaccaccgatggagtatggatggcatctatgattctctagacatggggcgagaacgcatgctcagaaattcagggatcgtgctgcaggaggtcaacagcattgcagcagctggctcaatgacaccatggagaacagtgacctgcaaagtgtgttttgaggacttctccatggatgctgtttcgaccatggactgtgggcactgcttctgcaatgactgttggacggagtatttccacgctgcggtagagagcgggaaaaagcaaattcggtgcatggaggtcaagtgctcggctttctgcgatgaggacctcgtgcggtttctccttgtccaaaagtatccagacatggccaagaacttcaatcgcttcctgcttgggtcctaccttgaggacaatgcctctgtgaagtggtgccctagcaccccgaactgtggccatgccattcgcgtgggcactgatgagcgctgctgtgaggtggaatgcccctgcggcttaagcttctgctttaactgcatggggcatgcgcactcgccttgcccgtgcaccatatgggagaaatggaatgccagccggtccgagggagagaacatcaagtggatcctcgctaacaccaagagctgccccaaatgcttcaaggccatcgagaagaacggcggctgcaaccttgtccgctgcaagtgcggacagtgtatgtgttggctctgcggcggaggtaccggccaagatcacacgtggaacagcattaccggccacagctgcaaccgctacgaggaggagatctgtgtagagaccgtgcacaccggcaggcagcagatgcagcggtacaagcactaccacgaccggttcaagatccacggcgactcgtcgtacggcgtggagaagcagaagcttggggcggccatcgaggagcgggtgcggcttcttgagtcggaccgcgagcgcccgctcgccatccgcgacggcgactggctgacccgggcgcaccggcggctgctggtttctcggcaggtgctgtcgcggtcgtacgtgttcgcatactacatgttcggcggccacgagctgcggacgcgcccggccgagcgggcgaacctgggcgtggcgcgtaacctgttcgagcaccagcaggagcagctggagcggcacgtagagcacctgtccaggtcgctcgcggagtcggccgacctggcgggggctccggacgcggagatcgtgaagcagaagcagacggcgatcacgctcaccaagaccgtggagcggctgtgcggggagatgtacaagtgcatccaggacgagctgctgacgctgctcgtggagcccatgagcatcgcggcgtacaggccggacggccccgacagagcgaagcccgcgatctgatggggtggggccgtggggggctgtcttttttactcgctgccacattttgccattagggctaggcgtaggattttgatcgccttggtttgataaaaagctgcctgtcaggcagcaaccaacacgccatatacagcgtgaacgtgccgtgaaatgattttaggctgttagcacacaagggttaggtactgactgaaagttaaaaaaaggctggacatgtttatttttttaaaaaaagctgattcatccgtccatttgaactccattctttttttttggagaccacaagatgaatccttgtgtctggtagttcgcctctattgtcttgatcttagcttaaccgtttaagcttctgctttgaacttgatttgtatggtatccaccttttctaaattagaagcatcttaagtttgg

SEQ ID NO: 126130 - DNA, 976 bp, Zea Mays
aaaaggactaggatccataagggctggtgtatgtgaacccttttattttatatttttactccatccaggtgctggtacaattgaatcttatagatgatgaagtggctaatattaaaattactgttagaagaagacgatgtgctgttgcagttgattgaaatatgtaatgatggttaattgtcttttgctatattagaattagttgctatattggtaatcctttacatggatataatgttgttgcttcatatttacaatttgtgttcttctgtctagttcgatgttggtaatactacttttctcttggtatcaggtaatgagtgctcttgagaagatgacaaggggagttgcttggggggaccttgatattcttgttgttgatatgcccccaggcactggtgatgctcaactatcaatgtcccaaaggcttcggttatctggtgctttaattgtttcaactcctcaagatattgctcttatcgatgctagaagaggagccaacatgttccgcaaagttcaagttccaattctgggattggtagagaatatgagttgctttaaatgctcaaaatgtggtgagaaatcttacatctttggggaaggtggagcacagaggactgcagaggaaatggacatgaaattacttggtgatgtacctcttgaaatcagtatcagaacaggttcagatgaaggcaaccctattgttgtatcatcacccaactcagcatctgcgcaagcgtacgtaaatgttgcggagaaggtgactcaaaggctcaaggagttagcagaggagcgacggatgggcccagaaatcttactttgagaaattcaggctgcttttctcacacctttccctgtttgacgctacggcgccaaaacaatgtactgataagtagattgctgttggaagtaaactttaaatttcgtcactctgtctgaaaatttactcaaacaaacttctgctgcttctatggtc

SEQ ID NO: 126131 - DNA, 2094 bp, Zea Mays
atgactcactgcagcgtatggattccaacggtcacgcccaaaccttctatattccttccagaccataaggaccaggcaccacaaaaaatcatcgttttaactgagtcagtgaagtggtcgtcagccataaataccctattggatatcgggtcccgttgcaagtccacctacctcttcgagtcgggagtccggtgcggtctccacgagcgctccagctccactcctcgcacccgaatcagccgctcagatccccaggcccgcctctccctccggcggcagttcctcgccggggtcctgcccgcctctcccttcatcccctcctcagaacttatggatggacaggtggagacctttgtcggagatgaggaaggcgggtcgcctcaagttccttacgatggggagcagccaacgctgtatgatagtgtcgcgaagcagtacagtgaagagctaggtgaccagtacaacgagcaacctcgtgcccaatatgatgaagggtctgggaatccgtataatgattatgaagagcaagcaaacctgtacagtgaggaaactgggaatcggtacaacgaggacccagcagattcttaccaggaagagcaggagaatgcattcagtgggggcataaaccaacaggacaacttgcaggtcaacaatgttgacgataacaaatggcctggatggcctggagagagtgttttccgcatactcgttccagctcagaaggttggagctatcattggccgcaaaggggagtttatcaagaagatgtgcgaggagactaaagcgcgcatcaaaatacttgatggcccacctggtgtaccagaaagagcagtaatgatttcagcaaaggatgaaccagatgcacctctctctccagctatggatggcttacttagagttcataaaagaataactgatagttcagatggtgaatctagtcaacctcaacgaagtgctggtaatataggaccaacacgacttctagtgccatcttcgcaagctggcagccttattggcaagcagggagcaactattaaatcaatacaagattcttcaaaatctattgtccgtattgttgagaatgtgcctcctgttgcactaaatgatgatagagttgtggagatacaaggcgagcctcttggtgtccaggaagcagtggaattaatatcgagtcacctgagaaaatttcttgttgaccgcagtgttctaccattgtttgaagcgcatatgaaaatgcatggtatgccgagggagcaaccagtgccacctccccagcattggggccctcctcaaacctggatccgccctccaaacattcctccaggtggtcctggttttggaggaaatccacagttcatgcatccaaggccgcaagacagttactatccttctcctgatgtcccccatatggaaaagcagccgcactacggtatttctgcatacggccgggaggccccaccaagtggtgcttctgctacagggaatcaaccaccctctcatgcaggttctcaggtggctcatgacatgcacattccccttgcctacgctgatgctgtgattggggcagctggtgctagtatcagttatatccgtagacacagcggcgcaacagtaactattcaagagagcagaggtgcacccggagagatgaccgtggagataactgggactgcagcccaagttcaaactgcgcagcagctgatccagaatttcatggcagaagctgccccaccaccaccaggcccggcgccagcttccaaccctcccgcaccaccagttgatccaagctatggctcttacccaccaccatatggagcagctccttcttatggttcttccgcagctgctgggcctccgcagtacaatggtgggaactacggtggcccgacctaccctcccagctatggctattagtagacaagtgtagcataccaaggatttgccccccccccccccctctttttttccgaataacgacagtgttgggcttgacatccccctgcccctggttgggagtgcagtttttaaaaccacaatttttcaataccagtctgataattgctatgatataactatggtctttttatattcgtc

SEQ ID NO: 126132 - DNA, 324 bp, Zea Mays
atggagcacggcatcttcgtcagcgccacggccggcaacgacggtcccgccgcagggtccatcaccaacggcgcgccgtggatgctcacggtcgcggcaggcaccaccgaccgcgcgatacgcaccaccgtgaggctcggcaacgggcaggagttccacggggagtcgctgttccagccccggaacacactgcggggcgcccgctgcgcgctggtggaggccgaggtgagggcaggtggtgctgtgcgagagccgctccatcagcgagcacgtcgagcaggtacagacggtggccgcataccgcgggcgccagcatggtcctga

SEQ ID NO: 126133 - DNA, 309 bp, Zea Mays
atgccgcgcatgccgttgcgtcgtgccgagttcgctgtcgatgtcttgttcctcctctggcttggacctgacatcttctcgtcgcgcgggcccaacagggcgagcccgggcatcctgaagccggacatcacggagcccggcatgaacatcctggcggcgtgggtgcccagcgagatgcacccggagttcgcggacgacgtgagcctgccgttcttggtggagtccgggacgtccatgtcgacgccgcacctgagcggcatcgcggccgtcatcaagagccttcacccgagctggtccccgcggcggtga

SEQ ID NO: 126134 - DNA, 1144 bp, Zea Mays
caaacacacacaacaccagctcatcacatccatctcattctactactgcctcagagaccaagctgctgcaaccggagaaggagatctattctacaaagtgaagtacttagcttgggacatggaaaccgtcgtgggagacctcatggcgaccgagctgaggcttggcctgccgggcaccgtggacgactgcagccagcaccagcagcagacccagctgaaggtggccgcgccgccgtccaaccctactaggggcaagaagcgccccgccgccgaggaggaggaggcaaacaagcgcgacgcggaggcagcacccccggcggccaaggcgcccgtggtcggatggccaccggtgaggtcgtaccggaagagctgcttccagcaggcaaagcagcaggccgtcagcagcagcagcaaggcggccgacaaagaggatgctgcggcgccggcgcccagctgcacggcgtccgcagccgcctcaaacgccaccgccagcgccggggccggctcattcgtcaaggtgagcatggacggcgccccgtacctgcggaagctcgacctgaggatgtacaaggggtaccgggagctccgggaggccctggaggccatgttcgtctcctccggcagcgccaacaacaacaacaacctgtcggagttcgccgtcacctaccaggacaaggacggcgacctcatgctcgtcggagacgtgccgttcgagatgttcgctagcacctgcaggaagctgaggatcatgaagagatctgaagccacaggcctgggatcggcgagacaatgaagaaggtctgacgacgaccgagggcccgacaacgttcatgtcgatctcttctttttttttctttttgccccattattttattttgttcttcttgtccgagagaccccaagccaaaaggatgagcttggtgggtggcgcatcaatctacaaagcgcatgcatatacgcggatgtgtgtgcggctttggttctgtaagacgacgactagtagctaggtcttttttagcagcagcacagaagctaaggagatgcatgctgatgacgagcggttgtttcggcttagctctccgtatgctgtgtttgtacaaaccaaacaatacagttatcttcaccgtcgttgatcccttactaa

SEQ ID NO: 126135 - DNA, 1433 bp, Zea Mays
aaacacacacaacaccagctcatcacatccatctcattctactactgcctcagagaccaagctgctgcaaccggagaaggagatctattctacaaagtgaagtacttagcttgggacatggaaaccgtcgtgggagacctcatggcgaccgagctgaggcttggcctgccgggcaccgtggacgactgcagccagcaccagcagcagacccagctgaaggtggccgcgccgccgtccaaccctactaggggcaagaagcgccccgccgccgaggaggaggaggcaaacaagcgcgacgcggaggcagcacccccggcggccaagtgagtagctaatagatctgagcaccgaaacgttcagagtgaaccgaacgtgtgtctctcgtacgtacgttacgtgtacgtacgtagcatatctatctcttctgtgcgcatatgctgccggtggtgctcacgcgcgccagctacttgtcaccaactcttgcagggcgcccgtggtcggatggccaccggtgaggtcgtaccggaagagctgcttccagcaggcaaagcagcaggccgtcagcagcagcagcaaggcggccgacaaagaggatgctgcggcgccggcgcccagctgcacggcgtccgcagccgcctcaaacgccaccgccagcgccggggccggctcattcgtcaaggtgagcatggacggcgccccgtacctgcggaagctcgacctgaggatgtacaaggggtaccgggagctccgggaggccctggaggccatgttcgtctcctccggcagcgccaacaacaacaacaacctgtcggagttcgccgtcacctaccaggacaaggacggcgacctcatgctcgtcggagacgtgccgttcgagtacgtacagcgttttccatctctcttcttccgttcttgttcattttctttatacgttacgtaccagcagcaagattaatcgcgctgacgacacgatggtgtgttctttaatttgattgatctgcaggatgttcgctagcacctgcaggaagctgaggatcatgaagagatctgaagccacaggcctgggatcggcgagacaatgaagaaggtctgacgacgaccgagggcccgacaacgttcatgtcgatctcttctttttttttctttttgccccattattttattttgttcttcttgtccgagagaccccaagccaaaaggatgagcttggtgggtggcgcatcaatctacaaagcgcatgcatatacgcggatgtgtgtgcggctttggttctgtaagacgacgactagtagctaggtcttttttagcagcagcacagaagctaaggagatgcatgctgatgacgagcggttgtttcggcttagctctccgtatgctgtgtttgtacaaaccaaacaatacagttatcttcaccgtcgttgatcccttactaa

SEQ ID NO: 126136 - DNA, 681 bp, Zea Mays
atggaaaccgtcgtgggagacctcatggcgaccgagctgaggcttggcctgccgggcaccaagcgccccgccgccgaggaggaggaggcaaacaagcgcgacgcggaggcagcacccccggcggccaaatgctgccggtggtgctcacgcgcgccagctacttgtcaccaactcttgcagggcgcccgtggtcggatggccaccggtgaggtcgtaccggaagagctgcttccagcaggcaaagcagcaggccgtcagcagcagcagcaaggcggccgacaaagaggatgctgcggcgccggcgcccagctgcacggcgtccgcagccgcctcaaacgccaccgccagcgccggggccggctcattcgtcaaggtgagcatggacggcgccccgtacctgcggaagctcgacctgaggatgtacaaggggtaccgggagctccgggaggccctggaggccatgttcgtctcctccggcagcgccaacaacaacaacaacctgtcggagttcgccgtcacctaccaggacaaggacggcgacctcatgctcgtcggagacgtgccgttcgagtacgtacagcgttttccatctctcttcttccgttcttgttcattttctttatacgttacgtaccagcagcaagattaatcgcgctgacgacacgatggtgtgttctttaa

SEQ ID NO: 126137 - DNA, 513 bp, Zea Mays
atggcgaccaacccctccaacggcgccggcgccgacgtccctgcagccccggcggcggctaagttcagcgtggaggtgcctacttccatcattcacgagtgctaccaatccacgctacaggagtacgacaaacgtgttaaggtatcactttctgcgcaaactggctgcaaacacgtggacgagcacacccatatgaaatttcgaaacgcattattggttcctttatatgacagcgaggttggatatgatgttgcccctgaagtccgatggttatctgaagacaaatataagaacctcaaagttgttgttgaaatagatgaagttgttgatgcagaaaaggcggcagagaaagagcttcagcgtcgtcataaagctctgggcttacttagaattgtggctgacagagtcatcctatcatcatctcatgttgttgcttctcgccacaaactcccgacctcttgtgattctgatctcctatgcctcacctcctctcgcaacgcgcagctccactga

SEQ ID NO: 126138 - DNA, 1821 bp, Zea Mays
atggatcagtacgaggtgctggagcagatcggcaaaggagcatttggctctgccctgctggtcaggcacaagctggagaggaagaagtatgtgttgaaaaagatccgtcttgcgcgtcagacagaccgcactcgccggtccgcccaccaagagatgcagctcattgctaatgtgaggaatccattcattgtggagcacaaggattcatgggtggataagggttgctacgtctgcattgttatagggtactgcgagggaggagacatggctgaagctattaaaagggctaatgatacccacttttctgaggagaagctttgccagtggctagtgcagcttctcatggcccttgactatttgcatgcacatcacattcttcaccgtgatgtgaagtgctcgaatatatttctcactagggaccaaaacataagactcggtgactttggtctcgcaaaaatattgaccgccgatgatttggcattctcgattgtaggaacaccaagttacatgtgcccagaactcctcgccgatataccttatggtaccaaatctgacatttggtcactaggatgctgcatgtatgaaatggctgcgctcaaacctgcttttagagcttttgtgagttctgaaaatgcttttattgactgcttatctgctgtctgtgcacgatatttgattaaatggttaagtactaaagtaacttcacgatatgcaaaaccttatcaacaagattaccaagtcgatagtatcacctttgccaacaagatattctggtgcattccgtacgtcctgcaactccatctgaagtcacacctttctcgcagcatagttcctgttcaccagtctccaagcgagaagaggatgacattcgccgcagagcccgtttgcagaagcaagggcaggaggaactctttaggcagcgaaaggatgatagcagcctttagcaaaccttctcctgatagaagttctgtcagctctattcggagtgtcaaggacgactacaccgccacacagagtgtcagagagctatcggttgatgaaagcatggtcgaggttgctagtaaacccgtggcatcaaggacctcagatgtcatgaggactccgaaggcgactccgtggaagatgatgacgactctgaggaatcggctagaagctccacaagcatcatatgacagaacgagtcatacagagttttcaagaacaccggttgacaagaggaacagccgcgtggcccgcagagcatcgcttcctctgcccgtatttgagaccccgaagcagcgcagcagcatgagcgtcctggagcggctggagtcccccgacgtctccgtgaactcgcctcgcatcgacagaatcgccgagtttccgctagcttcgtgcgaggaccccttgttctcgaccgtgaagccaccgacacccgccagcgccagcgccagcgccacgcctccgttcgtggaccggtccatcaccaaggacaagtgcacggcccagacgctccggtccgcggcccacgacggtggcaacggcagaagcgaggacggcggcggtttgtcctcgggtcgcaccaccaccacggcagcgtcaagcggtgggacgtcggggtcgttgcagccgaaggggcggttcgacacgacgtcgtaccagcagcgcgcggaggcgctggagggcctgctggagttcagcgcgcagctgctgcagcaggagcggtacgaggagctcggggtcctgctgaggccgttcggccccgacgagatggtgtcccccagggagacggccatctggctcaccaagagcttcaaggaggcgatggccacgggcttgtag

SEQ ID NO: 126139 - DNA, 594 bp, Zea Mays
atgggcaacccggccgacgcggccatcacccacgtgctacacaacaagcaggagttaacgctcgccaacggcgtccacgacatcctcgtgctctccatcggcgccggcgcctcctcggccgcagtgtgcgacgggtccagtacgcccgtgcccgcgcgttccccgtcgccgcgggagctggcgcgcgtgaccgccgagggtgtcgcggatatggtggacgagtcggtggccacggcgttcgggaacgcgtgcggacgcagctacgtacgcgtccaggccggcaaggcgccggcgccgctccacgcggccaccgcgtccacggcagcggcggcgatgctcgcgcagcggaacgtggagtcggtgctgttccgggggcgaaggctgtcggagcggactaacgccgagaaggtggacgcgctggccgtggagcttgttaaggagcaggagcgccggcggcgcagcccgcttccgaacgtggccatcaagcaggtgcccacgccgcggctgtcgtcggcgaccgcgacgtcaggcaccgcgacggcaaggaccgcgtcggcgatgccgtcgccggcgtcgtgcgattctcgccgatag

SEQ ID NO: 126140 - DNA, 116 bp, Zea Mays
cttttattaaatgtttattagtattaatttacttgcaatttcgtggtcgaacaagaatattttatgataaccaattaatgcattatccgacaagtatccgatatccgatcaaataa

SEQ ID NO: 126141 - DNA, 432 bp, Zea Mays
atagtaaagttagcaatgtcgatggattacttggctgctgctgtacccgtgaccttggctctgggagtgggatctatcttgttggtcttacgatggacgtactgccgccgccgaacaagcgccgaacaagtgagactgccgccggggtcaaggggcctcctgttcctaggggagacgctccactacctggcagcgtcctccaccccgggggtattgccaccattcttccagcgacggttggaaaggtatggccccatcttccggacgaacctggtcggggaggatctcgtcgtgtcgctggacgcggagctgaacgcgcacgtgctgaagcaggaggagcgcggcttccagatctggtacccgccctccttcatgcgcgtcttcggcgccgacaacatcaccgccaagctcggcgtgctccaccaccacatg

SEQ ID NO: 126142 - DNA, 1014 bp, Zea Mays
atgcagatgatatttggcgtcactgccaagaagctgatcagccatgacgacgcagcatctggagaaacgttgtggagatgcttccacgactggacttcggggctgctctcgtttccggtttccattcccggcacaaccttctacagatgcatgcagggacgtaagaaggttatgacgatgctgaaacagcagctcgttgagcgtcgacggaacgcagcggagcgcgagacgacagaggatttcttcgatctcgtgatcgatgaactgaacaagccagaccctatgatggacgagagcaccgcgttggacttgctgttcaccatgttgtttgcgagccatgagacgacgtccatggtattaaccgtcatactcaagtatctaacggacaaccccaaagctttgcaagaactgacagaggagcacgaaagaatcctggaaagtagggccaatccaggctctgacctcacgtgggaggagtacaagtctatgaaattcacatctcatgttatacatgagtcgctaaggctcgcaaacatcgcactggccatgttcaggaaagcaaatcaggatgtgcacataaatgggtacacaattccaaaaggatcaaagatcatgatgtgtgcactagcatcgcacttgaatacggaggtctacgaggacccctcagtgttcaatccatggagatggaaggatattcctgaaccagtcggcacctctaaggactttatggccttcgggggtggtttgcgcctatgcgctggtgccgagttttccaagatgcagatggctatgttcctccattacttggtcacaaattacagctggaaacccgtcagcggtgggacaatgttattctatccaggactgcaatttccagaaggcttccacatccagcttcttccaaaaatcccaaacgtggttccataaaccctatgaagaaatatgaatacgaataatttaagcaaatattctaaatgtaccctggggaattgaagttcgataacgatgtggtac

SEQ ID NO: 126143 - DNA, 1450 bp, Zea Mays
ctgccagccttccgtcaccatccgtacccatcagtcttttctccttctgtttgtgtctgcgtttgcagcgcatagctagcatgcacgcgcgtatatatacaccacccttggtccgtccggcgtcccggcccaaacagcaggaacgaagaagcacactacgccggtacacacagatcatcttcaccatcggccgatcaactggcggtccagtctccagctagagcatcatatccaatggcaagccaagctcaggcggcgcggctgcagcctcccacgatggcgccgttcgcgccgctgccgcacaacgcctgcaagcacgacgccgtccgccaccacctcaacacgatggccgccacttggtgcggcagcaccaacaacaacgtcaccgccacgggtgcgatggccgcagcaacttccggcagcaccagcaacagcaacgccgccccgggcggtggtgcgaccgacatggccgcctacctccagcagctgcaggacgccgcggccgccaagagtagcggcggcggcggtgctacgcgtggggagcagtgcccgcggtgcgcgtcgcacgacaccaagttctgctactacaacaactacaacacgtcgcagccgcggcacttctgccgcgcgtgccggcgctactggacgctgggcgggtccctccgcaacgtgcccatcggcgggtccacgcgcaagcgcccgcgcctggcgcacccgcacccgcagcagcacgccaggcgcgctccggcggcgcacgtattcggcctcggcctcggcatcggcggcgtggcgccgccgccgccgccgccgatgatgctgccctcttcgtcgacgtcgtcgccaccttcgcagggacagggcggcggcggcctcctcggctcgctgttcgcgctcggcgccgcggggccgctgctcgaaggccgcggcgcggggtcgtccttcgacttcgacttcgacctcgggctcgggctcccgaccgggcccttgcacctgggcgccggcgaggcggcggccgcgcaaatgcaaggactcgggctcaggggaggtggacccgcagccgggtcgtcggccttcctctggcccgccggggccgggatgctggtggacaacgacagcgtggacacgtggaagttgccgggcaccagtgctggttcaatgtggccggacttctcttctctggcggcagcggcgccacaaaccggcgggctgatgcatggaggggctcacgctcacctgatgtgagacggggcgtgcttccttcaattcgtaccatgggccatggccccgtatactacagtatcatcagtttaagaggcatgcatattcctggacggcttgcatagttgcattgcatagcagacgtgtatgtctcatttttccctcagcatttgtagcagtattggtctgtgtcgtgtcttgagtacgtacgccgtgcttcaggttcttgcct

SEQ ID NO: 126144 - DNA, 1413 bp, Zea Mays
taatcacctcatcacaggtccccccagcctcactctcgcgccggctcaaggtacattgcgtgtcctagccaagacacgcagctcatctcagcctcacacgcacagcaagagcgaggcgtgattcgccatgggcggcctcactatggaccaggccttcgtgcaggcccccgagcaccgccccaagcccatcgtcaccgaggccaccggcatccctctcatcgacctctcgcctctggccgccagcggcggcgccgtggacgcgctggccgccgaggtgggcgcggcgagccgggactggggcttcttcgtggtcgtgggccacggcgtgcccgcagagaccgtggcgcgcgcgacggaggcgcagcgagcgttcttcgcgctgccggcagagcggaaggccgccgtgcggaggaacgaggcggagccgctcgggtactacgagtcggagcacaccaagaacgtgagggactggaaggaggtgtacgacctcgtgccgcgcgagccgccgccgccggcagccgtggccgacggcgagcttgtgttcgataacaagtggccccaggatctaccgggcttcagtttccgcagagaggcgctggaggagtacgcgaaagcgatggaagagctggcgttcaagctgctggagctgatcgcccggagcctgaagctgaggcccgaccggctgcacggcttcttcaaggaccagacgaccttcatccggctgaaccactaccctccttgcccgagccccgacctggccctcggcgtggggcggcacaaggacgccggcgccctgaccatcctgtaccaggacgacgtcggggggctcgacgtccggcggcgctccgacggcgagtgggtccgcgtcaggcccgtgcccgactcgttcatcatcaacgtcggcgacctcatccaggtgtggagcaacgacaggtacgagagcgcggagcaccgggtgtcggtgaactcggcgagggagaggttctccatgccctacttcttcaacccggcgacctacaccatggtggagccggtggaggagctggtgagcaaggacgatccgcccaggtacgacgcctacaactggggcgacttcttcagcaccaggaagaacagcaacttcaagaagctcaacgtggagaacattcagatcgcgcatttcaagaagagcctcgtcctcgcctaactactgctactgctaggatccatgccattgccatgtcgtcttcagattcagagcacgccatgtcgtcgctagcttcgtggtagaacaaataatgatgtgcgtgctgtgtgtaagcatggatatggatgtgaatatgtaatatgatgagcactcctactttggtatgtttgggaataacagacttgtgttggtctggttcattatttgtaagaaaatcaaaaagagtt

SEQ ID NO: 126145 - DNA, 1404 bp, Zea Mays
taatcacctcatcacaggtccccccagcctcactctcgcgccggctcaaggtacattgcgtgtcctagccaagacacgcagctcatctcagcctcacacgcacagcaagagcgaggcgtgattcgccatgggcggcctcactatggaccaggccttcgtgcaggcccccgagcaccgccccaagcccatcgtcaccgaggccaccggcatccctctcatcgacctctcgcctctggccgccagcggcggcgccgtggacgcgctggccgccgaggtgggcgcggcgagccgggactggggcttcttcgtggtcgtgggccacggcgtgcccgcagagaccgtggcgcgcgcgacggaggcgcagcgagcgttcttcgcgctgccggcagagcggaaggccgccgtgcggaggaacgaggcggagccgctcgggtactacgagtcggagcacaccaagaacgtgagggactggaaggaggtgtacgacctcgtgccgcgcgagccgccgccgccggcagccgtggccgacggcgagcttgtgttcgataacaagtggccccaggatctaccgggcttcagagaggcgctggaggagtacgcgaaagcgatggaagagctggcgttcaagctgctggagctgatcgcccggagcctgaagctgaggcccgaccggctgcacggcttcttcaaggaccagacgaccttcatccggctgaaccactaccctccttgcccgagccccgacctggccctcggcgtggggcggcacaaggacgccggcgccctgaccatcctgtaccaggacgacgtcggggggctcgacgtccggcggcgctccgacggcgagtgggtccgcgtcaggcccgtgcccgactcgttcatcatcaacgtcggcgacctcatccaggtgtggagcaacgacaggtacgagagcgcggagcaccgggtgtcggtgaactcggcgagggagaggttctccatgccctacttcttcaacccggcgacctacaccatggtggagccggtggaggagctggtgagcaaggacgatccgcccaggtacgacgcctacaactggggcgacttcttcagcaccaggaagaacagcaacttcaagaagctcaacgtggagaacattcagatcgcgcatttcaagaagagcctcgtcctcgcctaactactgctactgctaggatccatgccattgccatgtcgtcttcagattcagagcacgccatgtcgtcgctagcttcgtggtagaacaaataatgatgtgcgtgctgtgtgtaagcatggatatggatgtgaatatgtaatatgatgagcactcctactttggtatgtttgggaataacagacttgtgttggtctggttcattatttgtaagaaaatcaaaaagagtt

SEQ ID NO: 126146 - DNA, 1034 bp, Zea Mays
actatggaccaggccttcgtgcaggcccccgagcaccgccccaagcccatcgtcaccgaggccaccggcatccctctcatcgacctctcgcctctggccgccagcggcggcgccgtggacgcgctggccgccgaggtgggcgcggcgagccgccgccgccggcagccgtggccgacggcgagcttgtgttcgataacaagtggccccaggatctaccgggcttcagagaggcgctggaggagtacgcgaaagcgatggaagagctggcgttcaagctgctggagctgatcgcccggagcctgaagctgaggcccgaccggctgcacggcttcttcaaggaccagacgaccttcatccggctgaaccactaccctccttgcccgagccccgacctggccctcggcgtggggcggcacaaggacgccggcgccctgaccatcctgtaccaggacgacgtcggggggctcgacgtccggcggcgctccgacggcgagtgggtccgcgtcaggcccgtgcccgactcgttcatcatcaacgtcggcgacctcatccaggtacgagagcgcggagcaccgggtgtcggtgaactcggcgagggagaggttctccatgccctacttcttcaacccggcgacctacaccatggtggagccggtggaggagctggtgagcaaggacgatccgcccaggtacgacgcctacaactggggcgacttcttcagcaccaggaagaacagcaacttcaagaagctcaacgtggagaacattcagatcgcgcatttcaagaagagcctcgtcctcgcctaactactgctactgctaggatccatgccattgccatgtcgtcttcagattcagagcacgccatgtcgtcgctagcttcgtggtagaacaaataatgatgtgcgtgctgtgtgtaagcatggatatggatgtgaatatgtaatatgatgagcactcctactttggtatgtttgggaataacagacttgtgttggtctggttcattatttgtaagaaaatcaaaaagagtt

SEQ ID NO: 126147 - DNA, 671 bp, Zea Mays
aattgccatttccaatccctccaggctccagccaaagcccagcacgaccaaaacccagaacctgagaatggcgcagttccttcgcggcaaggccgccgccgccgccggggcggcggtgctgcgcgcgtcgtctccggcgccatggcggcggacggcctccgcgtcgtaccaccacacgatccaggctgtaccgcgggagacagccggcccgcgcgccgcggcacgcgagcgccgccacggccgcgtcccggcggtcctgctcacgctcgcgggcgccgcgccagggaacggaattgcccaccggcacctccttaccgccgacaggaggcagctcgcggagatgctcaagcagtcgccctacttcctctccacccccgtccgcctccaggtccgcgcgggcgagcgatccaacgccatcctccacgccggcaccgtcctccccatcaaggtgcatagagatgaaaattctgggaatatactgaatttggtaatggtgaaggcagatgaaggaacaatgctgaaggtggatttgcctgtagagttcaagggaaaggatgcttgccctgggttgaagaaaggagagctacgcatcattaaattaagagaagaaacagtcccaaatggaccaaagtacaatggcacaaaaaggccaaacacaagaccaccaaatc

SEQ ID NO: 126148 - DNA, 1223 bp, Zea Mays
aattgccatttccaatccctccaggctccagccaaagcccagcacgaccaaaacccagaacctgagaatggcgcagttccttcgcggcaaggccgccgccgccgccggggcggcggtgctgcgcgcgtcgtctccggcgccatggcggcggacggcctccgcgtcgtaccaccacacgatccaggctgtaccgcgggagacagccggcccgcgcgccgcggcacgcgagcgccgccacggccgcgtcccggcggtcctgctcacgctcgcgggcgccgcgccagggaacggaattgcccaccggcacctccttaccgccgacaggaggcagctcgcggagatgctcaagcagtcgccctacttcctctccacccccgtccgcctccaggtccgcgcgggcgagcgatccaacgccatcctccacgccggcaccgtcctccccatcaaggtgcatagagatgaaaattctgggaatatactgaatttggtaatggtgaaggcagatgaaggaacaatgctgaaggtggatttgcctgtagagttcaagggaaaggatgcttgccctgggttgaagaaaggaggctttttgcagaaaataaggaccagcctggtgtatctctgcccagctgagcacatccctccaaaaattgaggtggacctgacaaatcttgatgtcggagatagggtattgatgcatgacattcccgtccatccatcgctcaagttgctgagtaaaaacgagaccatgcccgtctgcaagatcttggcctcaaagccagacgagtaggaggcgctgcaaatacttcagagctgataacattgtacctttaggtggtacagccctccagcagctccgtccctagttcttggcttgctttttggtcatctgccccctaggtttcaatgtgatagtggattcagacaagctatgggcttcaagtaaagatacgaaggaacaaaatgaagaaatatcactggagagacattgtctgtaccaaccgctatagaataacatcctttctcattcagtttgggttcagggacacatgacatgtaagacgactatcctttgctgtggcctgggtgaattcattctctaagctactcttgcagcggctcacaattcatcgtcctgactgcatgcattgtactgtcatgattctacgtattgaatgttgtattcatgcaaacgatccggtagatgagtgttgccctgtacgggc

SEQ ID NO: 126149 - DNA, 107 bp, Zea Mays
aattctttctcatatcactgaaaaagatagtttttttattttaccatgaaaaaatagcttttctattctacttattcatttacattcacgtttaacatgtcatcaac

SEQ ID NO: 126150 - DNA, 681 bp, Zea Mays
gtttagagaagagattcctattgaaggagcatatcatcctttattatccaatattatacaacattaagagcacatagagtatgcaaatacggacatagcaaaacatactctctccataccaattatacaacaagacgccacagtacatctctcatgcacatcacaaatggtaatggtctccagctcagagtggctcagacacgaagacaaacgctgatgtcgacgaccacgctcgcgcgtcacggcctacaccacaatctccagtgtccaccggtaccgctcctgctctagtacgggcaggtcgacgaacacgaggtcgatgtcaacatcataactgaactccacttccaccatgtccagtaggcacctcaccggctcgtgcgaatagtaggcgctgaacaggccgcacccacgacccatggacctgagtgccatggccttgccgccagcaccgctggtcacgacacactccttcacgacgttgtcggcgttgaacatgtcgagcagccctacggacgcgaacaagacctctggcgcggtaacgtggagcggacaaacagggaaaaccctagagtgggaccaacatcacgagcaacgtggcgccccggggcaacggcaccagctctcgcgcatagtgcggatacaccacaacctcgtcgccccacctgccgctgtcaccgc

SEQ ID NO: 126151 - DNA, 1094 bp, Zea Mays
tcgtcgtcttcggttcgtctcttctgttgctgggctcgtcgcgagggtagcagaggccagatgagggacagagcaagcgagagaagctgaagaaacaatttgttttttttctttcttatcgaaacagcacagaccagtgaaagagggagcgaattagcgaaaagaagaagacaatataaaaaataaataaataaataactacaccgaatgcagcgagcgaggtggaggtgggggaaaaagggcgaggtgacaccgtgacagagagaaggcgagggagggatcacgaggtgtgcttcctcctccgcccaatcctgcccaaccaaatccgccagcgccgcctcctttacactcccacctctgtcccggagcaaaaaaaggagggagaggctcgcttcttggatcgcggggtcacgggacgcgcgccgcgggccggtacgctgctgctggcggactgctcgacccttgcctaccagctgctgcctgctgctgcttccttggctggcgccggcgagagacggaggcgaggcgaggcgaggcgacgacgatggaccgggcggcgctcaccgtgggcccggggatggacatgcccataatgcacgacggcgaccgctacgagctcgtccgcgacatcggctccggcaacttcggcgtcgcgcgcctcatgcgcaaccgcgccgacggccagctcgtcgccgtcaagtacatcgagcgaggcgagaagattgacgagaacgtgcagcgggagatcatcaaccaccgctccctgcgccaccccaacatcatccgcttcaaggaggtcatcctcaccccgacgcacctcgccatcgtcatggagtacgcctccggcggggagctcttcgagcgcatctgcaacgctggcaggttcagcgaggacgaggtccattccttttctttcgtcttctctcgctttcatcaacgctgcttgctcgtgctgcctttcctctgtacttgtgatgacactcctgccctgtacaactacaaacatggtacactaatcaaactgtcaaagcttctttcaggcgcgtttctttttccagcaactcatatcaggggtcagctactgccattccatg

SEQ ID NO: 126152 - DNA, 2056 bp, Zea Mays
tcgtcgtcttcggttcgtctcttctgttgctgggctcgtcgcgagggtagcagaggccagatgagggacagagcaagcgagagaagctgaagaaacaatttgttttttttctttcttatcgaaacagcacagaccagtgaaagagggagcgaattagcgaaaagaagaagacaatataaaaaataaataaataaataactacaccgaatgcagcgagcgaggtggaggtgggggaaaaagggcgaggtgacaccgtgacagagagaaggcgagggagggatcacgaggtgtgcttcctcctccgcccaatcctgcccaaccaaatccgccagcgccgcctcctttacactcccacctctgtcccggagcaaaaaaaggagggagaggctcgcttcttggatcgcggggtcacgggacgcgcgccgcgggccggtacgctgctgctggcggactgctcgacccttgcctaccagctgctgcctgctgctgcttccttggctggcgccggcgagagacggaggcgaggcgaggcgaggcgacgacgatggaccgggcggcgctcaccgtgggcccggggatggacatgcccataatgcacgacggcgaccgctacgagctcgtccgcgacatcggctccggcaacttcggcgtcgcgcgcctcatgcgcaaccgcgccgacggccagctcgtcgccgtcaagtacatcgagcgaggcgagaagattgacgagaacgtgcagcgggagatcatcaaccaccgctccctgcgccaccccaacatcatccgcttcaaggaggtcatcctcaccccgacgcacctcgccatcgtcatggagtacgcctccggcggggagctcttcgagcgcatctgcaacgctggcaggttcagcgaggacgaggcgcgtttctttttccagcaactcatatcaggggtcagctactgccattccatgcaagtatgccatcgcgacttgaagctagagaacaccctgttggacgggagcaccgcgcctcgcctcaagatatgtgattttggctactcaaagtcatcagttctacactcgcagccgaaatctacagtgggaactcctgcatacattgctcctgaggttcttctgaagaaggaatacgatggaaaggtcgctgatgtgtggtcatgtggagtaacgctgtacgtgatgctggtcggtgcatatccatttgaggacccagatgagcctaagaatttcaggaagacaattcagagaatattgggtgtgcagtactcaattccagactatgtccacatatctccagagtgccaaaatcttgtctctaggattttcgtcgccgacccagccaccaggatcaccatccctgagataaggaaccatccatggttcttgaagaacctgccagctgacctaatggatgacagcacgatgagcaagcagtacgaggagcctgagcaaccgatgcagagcatggatgagatcatgcagatcctggctgaggcgaccattccagcagctggtccccatggactcaatcagttcctgaacgacggccttgacctcgacgatgacatggacgacctggactcagataccgatcttgacctggaaagcagtggggaaatcgtgtatgctatttgacagcagcgaggcaatgcgtatcatcagtcgtgctcagatcgtttgttgcgccgcaggttaccgagataattagagagacaggggggaggtatctgctggagatgctgctcgtgtctgatgccgtgatgcccccctttttttcatcctgttatgtttggctgttgtttggttgtggtgcacctccagtgttttacaacagtttggcccttcggaattggttgtgctagaacctcgtccatctgagaagaccctttgtttttgcatccccagctaagagagtgaagtacttgtataattatactgtttgtgtcatatgtatttggtgtaggaaaataaagaaactccattgcccgttcttgttccttccgtgtctcacgaattttttcagaaccctctcaattttagtgtctttttggctgctgt

SEQ ID NO: 126153 - DNA, 630 bp, Zea Mays
atggatcctaacgacaccgaggatagcctttatgaagcttgggagcaccgaaatttgttgttgcggcgcgagctcatcttcgatttgagaaatggagaccatgtcaacacggaggaggaaggagacgcctgcagccttgacgtgggtgacggcttggggcgtggcgttggacgcggcggcggtgtatcacgggggcgcagaactaccggcgttgggcgtgcatcaaccagcttggggcgtggtgttgggcgcggaagtacttgtagcctggcgcgaggcaccgcgggagccaccggcgttggatgcagctccgtctccctcgagtccagcactggcgcacctacaggtgttcctgcagatggactaccaccattagggatagggcgtggctgtggaaagcgagcatcacaaggttcacagggatctattcgttcagttcgtggacgtgggcgtggccatgcttcgagctcacaatcctacaaccctccacgctctacttcgctcgatgtggatctgaaccttaactccgagcccaccgctgatgatgatgttgaagaaatgattcataacaccacgttactatttagtattctaaatcattatttacatatatcttatatgaatgaatag

SEQ ID NO: 126154 - DNA, 1093 bp, Zea Mays
cccctcccaacggcgcccttcctccccgcacgctacgacggccgagacgaacgcgcggcttcctccccaccaacggcgccctttccaaaagcctcgacccgctgctctcgccgagatcccgcgcgtagcacgcgcggcttccttcccaggctggcgagatgcctccttctacgctcgcgcatgcactatgcccctgtcgttgtccacctcccacgcccacgcatgcacccatcccctcgtcacgcaaaccatagtctcctccgcccccgtgctcgccaccgcgtcgacttcggtggagtccagcgatagggcgaggtcgtaccccgacgactcccccccccccgacgtgtcgtcctagcccgcacgctccgcctctggcaccgttgcacaccacgccatcctcacccttcaactcctaaactgtccagtgggagacgatgccgccctcggttcgcgatgccgcccactcccacacgtcgtcgcgcgaagccggcgctcacttcgggccagatctacctgcccgtgtggtgttgtgcgtacgaccacctcgtgaagatgctgcaacaggcgtacgcgcaggtcgaggagctctccgtcgagcgcgagcacctcgtcaatgagctctagcttctacagagccgcttccacaagcgcaagatctgccaggcctgcctccagaaggacgaggagatcaggaagagagtcgtaaaggctgagacggcgatgcgtcttggcggcaaggagcttcagattcactgctgcgaggctgttccttagccccagcttcaattgttcctcatttagtttattgaaatctgaattatttggagctaatttgtacagtttatacatagagcacccttgaaagccacattcacatgaaagcagtatacacagagcacttcaattgaaagctgctgcattgtacagggaatatggaattctggattcctatatatcgtaactcctttgctgttgcatatgcattccagtttcagtttggagttacaaaacgaattcaattacaggtgtgcttgttcagttatatagggggggaaactgtttgtgccagaagtaatatactgaattttgt

SEQ ID NO: 126155 - DNA, 1744 bp, Zea Mays
cccctcccaacggcgcccttcctccccgcacgctacgacggccgagacgaacgcgcggcttcctccccaccaacggcgccctttccaaaagcctcgacccgctgctctcgccgagatcccgcgcgtagcacgcgcggcttccttcccaggctggcgagatgcctccttctacgctcgcgcatgcactatgcccctgtcgttgtccacctcccacgcccacgcatgcacccatcccctcgtcacgcaaaccatagtctcctccgcccccgtgctcgccaccgcgtcgacttcggtggagtccagcgatagggcgaggtcgtaccccgacgactcccccccccccgacgtgtcgtcctagcccgcacgctccgcctctggcaccgttgcacaccacgccatcctcacccttcaactcctaaactgtccagtgggagacgatgccgccctcggttcgcgatgccgcccactcccacacgtcgtcgcgcgaagccggcgctcacttcgggccagatctacctgcccgtgtggtgttgtgcgtacgaccacctcgtgaagatgctgcaacaggcgtacgcgcaggtcgaggagctctccgtcgagcgcgagcacctcgtcaatgagctctagcttctacagagccgcttccacaagcgcaagatctgccaggcctgcctccagaagatggatggatttgatcaaacagtgaatgtgaaggttgtaatggcaactaatagggcacatactctagattctactttgttgcggccaggtagacttgacaggaaagttgagttctctcttcctgattggcggtagaagaggcctgtgttccaagtatgtactactaagatgaatttgagtgacgaggctgatttggaagattatgtttgcagactggataagatcagtgatgctgatgttgagttggtttcatggcacagaccaaaaattttatgcatttgttgttttctaacaattgtattgctagggacttttgtcctgcgctggccaaagctgtcaaaactatgaaaaaggcagagaagctgctccttatatatagtaaagccattggtagaccaacagttggagaggaaggtgttctgatgagcatcatcttgttctgcatcatcactaatcaacttgttatgcacagtgtccgatgtgcctgtctcaactcgattgctaaggcatataattgacctaaaaaggcacttcaagcgggtaggaaaattcaaggtcgttctcaagtacttccaagtcggtacggtcgttgagcctgcatctgagttctactcaagtaggctgaaaaatagggaacgcaaggcaacattggttgacgagctgttatcagatcaatctctgaagagctacagagtcattcatgttggtgggcgtcttggatgaactacattttcttcaacaaagatggagctcatgcagattgatttagtccctttttgcaatgcagctacgtgcccacgtttggcgaggcgccatttccggccaccggccacgtcgccgcgcgcaggagagaagctaggcactacatgatgtcagccgaccaagatttttaaaaaaagatacgaaagcttgctacaaaataaaccggtccagtcacaagctagctagctagccagattaagtcgatgccgcactgcttgtatatgcattggattccatattgttctcttcagatggacatcaaatgttctgttcattaattaaggttaatcagtggcatcct

SEQ ID NO: 126156 - DNA, 1662 bp, Zea Mays
gcatcgcagttcgctgcaacttttgctcacaggacacaggcacagctttgatgagcagcggccaaaacagaaagagcgattcgatcgtttcctgctccactaccactagctagtctgccgccgcacgccgtgccgcgcgagctacgactgccggcgccggaggcaggagaggaaggtgctgctgctccccctgccgcccgcgtcctgtgactgagatccatccagctcggaggaggaggaagaggaggcgctcctggtcctggcttctagacgttgtaacccagatcttgacgcagctgcccaagtagtttactcatctagaggagaggaggggttggatccttgacccgatttggtgggggctttgccactgggatagggggacagtttggcctgctggatctttatcgccagttgttggtcctgtcctttccgttgggctgggacgcattcacatgccagtggctgccggtttggtacttactcgacggattggttaagctctgtctgtggggttgttgtgctgctccttctttcatcttattttgtggtgattggtgggcggaggaggaagagctaggaagattgtctctcttattcttcttgcgtcatttttcggtgcggcaagatgaagtatatgaagcttggatcaaagcctgatgtctttcagacagagggcagcaatatcaggtttgttgcaacagaactggcaacagacattgttatatccgttggggatgccaagttttatcttcataagttccctcttctatcaaagagttcactcctgcaaaggttagttgcttcaagcaatgatgagaaaaatgatgaagtggatatctctgacatccctggtggaccttcagcatttgaaatatgtgctaagttctgctatggcgtgattgtaacactcaatgcatataacgtcctcgctgcccgctgtgcagctgagtacctagaaatgtttgagagcatcgacaaaggaaacctcatatacaagatcgatgtgtttctgacatcaagcgtatttcgcacctggaaggactcgatcatagttttacagagcacaaagtcactgcaaccttggtgtgaaaatctgaaggtaatcaaccactgcattgactgtatcgcgtcgaaggcgaaggggacgatgctgatgccgaagaagatgctgagcaagctctggtccgggaaaacgaacgccggcgagagcagcagctcggacacgtcggatagccctgggtccgccaacccggaggaggcgaagtccacgcagtcgcggatcacatggcgctcggtatcctagtcgcgcgcgcgcggcgggggttcagcggggtcacaagctcacagccttagttttgttcttggtcttgattttgccttcgcctagcgagtacagcagtagcgatctcataacatatggagttactgctactggtttcacttgtcatgtcgccgatgacgttttctttttggcatgggattgcttgtagctggagtggagtaggtttggtcattggtgatgtttccagcgaagttccatgggatatttattatgtgacctttttttcatggtaggaatacaaagaaagtagtacagtccgttataattgatgtattttttgcaggcaaaaataatcatagtgttttagtttgcttctt

SEQ ID NO: 126157 - DNA, 2788 bp, Zea Mays
attattcccgctgtcccctcaccacgagatgctgcccttgtgctctgcaggtgctgctgctccccctgccgcccgcgtcctgtgactgagatccatccagctcggaggaggaggaagaggaggcgctcctggtcctggcttctagacgttgtaacccagatcttgacgcagctgcccaagtagtttactcatctagaggagaggaggggttggatccttgacccgatttggtgggggctttgccactgggatagggggacagtttggcctgctggatctttatcgccagttgttggtcctgtcctttccgttgggctgggacgcattcacatgccagtggctgccggtttggtacttactcgacggattggttaagctctgtctgtggggttgttgtgctgctccttctttcatcttattttgtggtgattggtgggcggaggaggaagagctaggaagattgtctctcttattcttcttgcgtcatttttcggtgcggcaagatgaagtatatgaagcttggatcaaagcctgatgtctttcagacagagggcagcaatatcaggtttgttgcaacagaactggcaacagacattgttatatccgttggggatgccaagttttatcttcataagttccctcttctatcaaagagttcactcctgcaaaggttagttgcttcaagcaatgatgagaaaaatgatgaagtggatatctctgacatccctggtggaccttcagcatttgaaatatgtgctaagttctgctatggcgtgattgtaacactcaatgcatataacgtcctcgctgcccgctgtgcagctgagtacctagaaatgtttgagagcatcgacaaaggaaacctcatatacaagatcgatgtgtttctgacatcaagcgtatttcgcacctggaaggactcgatcatagttttacagagcacaaagtcactgcaaccttggtgtgaaaatctgaaggtaatcaaccactgcattgactgtatcgcgtcgaaggcgtcaattgatccatcagaggttgaatggtcatacacttacaacagaaaaaagctcccatctgagaatggtatcgattcacattggaacggtgtcaggaagcaacctatggtccctagtgactggtgggttgaggacctttgtgagctcgaagtggatttgtacaagcgtgtgatcatgaccatcaaggcaaagggaagcacaccagctgctgtcattggagaagcattgagggcctacgcataccgacggctgcttggctcccttgaagatgctgtgagcaatggagtcgattgcacaaaacgccgtgcagctcttgatgccattgtatttctgttgccagctgaggaaggctcggtgtcatgtggttttcttcttaagctgctaggggctgcatgtttgcttgaatctggggagtcccatcgcgttaacttgatcaagagaataggcacgcagttggatggtgcttcagttccagaccttcttataccgctaaatactaatgaagacaatatatccagcatagatctgatcatggcaatagtggaagagttcatgtcacggaatggtgatagtggtacggagaaatttcaagacgatgaaggaatcgtggacatcgagaagtcgacatctgtttccagcgcgtcaaagcttgcagttgcaaagctgatcgatggatatcttgccgagatcgccaaagatcccaaccttcctcttccaaagttgatcgcactcgccgaaatggtgtcttctctaccccggccaacgcatgacgggctctatcgtgccattgacatgtatctgaaggagcaccccagcctatcaaagagcgagaagaagaaactgtgcgggctgatggactgcaagcagctgtcgcaggacgcgtgcatgcacgccgtgcagaacgagcgtctccccctacgcgtggtcgtgcaggttctcttcttcgagcaagtccgggcatcgtcgtcggttgcttctgcaaggagcgacgctaattcgacgtcggggctcccgtctgccgttcgctcgcttcttcccagagagaacggcaactccattggcagctccaggtcagccgcgacgacgatgacgacggaggaagaggagagtggggtcccgacgtcgagcgacatcaactctctgaggtcgatgaggctggccaacaacagcggtgggagcgagaggagcagcggcagcagtgacgtgaacaacaagagcagcgacgacaggagcgccgccgccacggggaaggcgaaggggacgatgctgatgccgaagaagatgctgagcaagctctggtccgggaaaacgaacgccggcgagagcagcagctcggacacgtcggatagccctgggtccgccaacccggaggaggcgaagtccacgcagtcgcggatcacatggcgctcggtatcctagtcgcgcgcgcgcggcgggggttcagcggggtcacaagctcacagccttagttttgttcttggtcttgattttgccttcgcctagcgagtacagcagtagcgatctcataacatatggagttactgctactggtttcacttgtcatgtcgccgatgacgttttctttttggcatgggattgcttgtagctggagtggagtaggtttggtcattggtgatgtttccagcgaagttccatgggatatttattatgtgacctttttttcatggtaggaatacaaagaaagtagtacagtccgttataattgatgtattttttgcaggcaaaaataatcatagtgttttagtttgctt

SEQ ID NO: 126158 - DNA, 2450 bp, Zea Mays
ctgaaccgcgcaacttactaccagcatgttagtgtatagtctttctattttctttcttctctctcctcagtctgttcttcctactcccgatccattcgcagagggcagcagccacctcctctccccgcggccgagctcgcgcctcgcccgccgcctgaactcgtcttgcctgcggccgatctcccccctccgttcgccgcgccgcaacccggagaggagaccgcgctcggtcgagcaccccctggggcagcgtcctcgcgaccagctccggcgcggcgtccgccctcagcagcccgggtgtccccgggaacgtctccggcgcggccggcacacagctcgacaggcttttcagttcagtgcagtgtaccaagattctctgttaatttgtgtatgagatcagttaactgataaagacatgtgaagaaccagtgatcagtaatctgtacgcttcagattgtagtatccttgagatggatggaagagaatcaggcttatggtaaatcctggtgaatattcatgggaggtcagcaagttctggcctgactaagactagtaaaaatacggtgcttcatctcagatcatcaatggtgagaatgaggttcccgaaacgttatataatagtattgttgacattcatctgcacaaatgtttgctacattgagcgtgtgggtttctcaattacctatactgttgcagctgatgccatcggtgtgaatcaagccaacaagggcatgatactctctatgttctattatggttatgttttatcacagattcctggtggatgggcagcacagagaataggaggtagacgtgtcctgctactgtcatttgtattgtggtcaatgatatgtggtttaattccacttgatcccaacagagtaaccattctggtcctttctcgcctattcgttggtgtagcacaaggtttcatatttcctgccattcacactgtcctggcacaatgggtgccgccgcaggagcgctctcgctcagtatctcttactacctcagggatgtatcttggtgcagcctgtggcatgcttttcttcccaagtctggtgaagcacatgggaccccagtcagttttttttgttgaagcagtgttgggagcagcatggtctgtaatatggctgaaattttccagtgacccaccccgtactgatcttccaaaggtatcaatgccaaaagtgccatctcgagacatgattaaggcacaagcaggaggggttgtggcacctcgcacggtaaagatcccgtggcgaaggataatattcagcctacctgtttgggcaatagttgtgaacaacttcacgttccactatgccctctatgttcttatgaactggctccctacctattttgagctaggccttaagcttagcctccaggatatgggttcctcaaagatgcttccctatttcaacatgttcattttctccaatatcggcggtgtggttgctgatcacttgattacaaggaggattctatctgttaccaagacaaggaagcttctgaacaccatcgggttcatcgtctcagcgtttgcactcatggcccttcctttgttcagcacaccgtcaggcactgtaatgtgttcagcgatatccctcggttttcttgctctaggaagagcagggtttgccgtgaaccatatggatgttgctccgaagtttgcagggatagtgatgggagtctcaaacacggcggggacactggctggaatcgtcggtgtcggcctcacgggcaatattctggaggcggcaaaggcttctaacaaggatctaacggactcggaaacctggaaaacagtcttcttcgttccagcatacctttgtattttcagttccgtcatttttttgatcttttcgacaggcgaaaagatcttcgaataaagggtggctattactttttttgccaattcttttcttacttacggtgaggcaggattgtgaaacgggtatcttacatgtatctgtagcatttgttacaaaattttcagattttagactgcatcacatacacgatcagaggctatgtcaggagatcttgcattttcgttatgatgaagactcggttcattggcagtcacactcacactccaatgcagctaacagaatttgcttctctcccaggttaacttcttggttttggtacatagtcccaccacaaagtttgtcaagttcccttacctttgccatgcaatgtaaacatatatggtgccaatgagaataaacggcattgctattttcttatctgcatggcccttgttgaggcaaattcacttccttcgagtctctcaaccatttttctggatcttttttttagttgtggtcaactggttatatagttggtctttccagcgttgacaggatttatgatttttttgttgctcttcaacgagacaaggcttaacattcatagatatgactccattattactggtcttt

SEQ ID NO: 126159 - DNA, 926 bp, Zea Mays
gtagttgctagcatagctgctggttcatcacctgcaacaacttcaagcggccaagaaacattaccagcagctagcttcggtttactggggcatggagcaaacggacgaggcgtcgtcggtgaacgagcagagcgcggagcggcactccacggcgtggctcgacctcacgctggccgtgagcgcctctctcccggcgccggacgacggggactcctcgtccgccggcggctccgacgacggcgacccggccaataataagcccgcgtctccgcctcctgaccctgctcccgctcccgcgccgcccaaggtgttctcgtgcaacttctgcatgcgcaagttcttcagctcgcaggcgctgggcgggcaccagaacgcgcacaagcgggagcgcagcgcggccaagcgctccgccaccacgccgtcgtccgcgtcggcgtaccggtaccaccacctccaccacgcgcagcggatggccatagcgggcctgccgctcgaggcgcacgccgccctggtgcgcgccgcgctgcgggtcagcccggccagcgcggccatccacaaggacgccagccaggagctcgccgccgccaccacgagcacggcccccaggttccacgacggcgacgtctccgccacggctgccgcccagtgggcgccggcgcaactctgcgaggagccggtcagctcgacgtggccagggagcttccggacgaggacgcaggctgagccgccgagcccggagcagagccagaagatggacttggatctcaggctgtgaaacggagacatcctcaatcctcgtagttacatcacaatcaatcacatatatacgtgtagaggacctagccacctgtactttgactttttttaaatttgttaattttcatcagtgtatagcagtttttttaataactgtgtttaattcctcg

SEQ ID NO: 126160 - DNA, 252 bp, Zea Mays
ccgctctacaaaccgtcagcccgatcgccgctgtccgcgccttcgtcctcgcctccgccgtcctcgcctccggatttcttcaggtgcgatgctggatatgaggccagggcggatgtggtgtctacgacatgctgtaagaagctcgtcgtggacatgcactacgaggcgcgcatccaggccatcgtcacttaccacggctccgtccttggggagaaggtgaacaagaaggatgcccccgaaccatgtcgttga

SEQ ID NO: 126161 - DNA, 2289 bp, Zea Mays
tctcggccacaacactgcgcgctccgcagacgcccaccaagcttccgctattcgccaaaaggtccccttctgccctccgccctatctatccatggaaaggcggcacggcttcttcgcggcgctgcgggaggaggtggcgcgcgggctgtcgccggcgcgggcgcgccgcaagccggacgccacggacctggccgccgcgctcagcttcaccggagtggcaggcgccggcgagatgctggcgccgctcatggaggggcccgatccggagcccagcgacgacggggacggcagcggccgccgaggtgccgcgcgcgggaggaaggaaggctggggccactgggtgcgcgtgcagttcgcgcgggccccgtcctcggcggtcgcgctgcgcagcgacatcaggatgctcctcggcgttatggctgcgccgctcgcgccggtccgcgtctgcgccgccgagccactcccgcacctcagcgtcaaggacactcccatcgaaacctcgtccgcgcagtacatcctgcagcagtacctcgcggcttccggagggcacaagctcctggcctccctgcgcagcacctacgccatgggcaaggtacgcatggtggccaccgagttcgagaccgccggccgtctcactaagaaccgcagcgctggacgcggcggcgagcctggccgcttcgtgctgtggcagatggcccctgagatgtggtacatcgagctggctgtccgcgggagcaaggtgcacgcgggatgcaacggcaagctcgtgtggcggcacacaccatggctcggtgcccattctgccaagggccctgttcgtccgcttcgccgtgcccttcagggcctggatccgctgacggcggcaagcatgtttgctcgtgcgcggtgcatcggcgagaggaaggtgaacggggaggattgcttcatcctgaagctgagcacggatcctgagatcctcaaggcacgcagcgagggccatgcagagattatcaggcacgtcacgttcgggtacttcagccagaggactggtcttcttgtccacattgaggattcacatctgacccgaattcagtcggccgcgggaggggacgcggtctactgggagaccaccatcagctcgtccatggaggactaccgcccagtggacggtatagtggtggcgcattctgggcgctcggccgtgaccctgttccggtttggtgaggttgccatgagccacaccaagacccggatggaggaggtgtggagcattgaagaggtagcattcaacgttcctgggctgtccatggactgtttcatcccgcccaccgacatcaagtctggatctgttggcgaggccatggagcttgctcatggcgagagaagccgggccggtcctcctccccctcccccaggctgccgcgctaaagttgccgcgctggggaaggcagaagaaggtaaagtggcatggggcggtggaaccgtactcgagaatcaaaactgatccgcagactgtccataaacttggttctcacagccgcgcggctgctgaccctgtttggagtctagtgtaggagagaaacaaacgagtgaaggctgagagaggatttggaagtttggtaaatccaaatgcctcctctgtataggaagaagcatgggggcattcacatggtcttgcatatgattgaagcggatctgtgtgaaacatcctctctctctctctctctctgatcccatccagagagacatggtatggtagtaggtaggtagccttgtttcctgcttcaggcttttctttcttctttgtctgttcctagtgaaaggaaacttagggcatgtttctgcactccagccgcatgagaaagtcgttgtggttggttctcttttagcttatactcctaatttggtcgctgccaccagcgaggaagaagggtttcctcaccagcaaggcaggtgttttggccgtcatggctgggcatccgattggcggcgttcagtgtgtttggcttgctgacggattgagccgaagctaacctctcagtgaagagagagagagagagagagagagagagagagagagagagagagagagagagagagagtagaacatctgaatggtttttacttgtgttttagtactgggtagaacctgttagatgtttgttagtaattagcagtgtttttatttagcaagttgttttttttgttcctgaacctcctttgcatctctctatattttaatcatgagatgaaggatgtactgttattaaacagatggtggatgtaatctaatccaagacatcttttttg

SEQ ID NO: 126162 - DNA, 955 bp, Zea Mays
accaaccaccgtggccccgtcaaatttgccattcctgtctcggttccctcttcccggcgcaccagcctacctcgccgacgccaggccgccaggccgccggagacatgaaccagcccgtgcagaagaacaccctctacgtcggtgggctggcggaggaggtggacgagaaaatcctgcacgccgcgttcgtgcccttcggtgaggtcaaggacgtcaagacgccgctcgaccagtccacgcagaagcaccgctccttcggtttcgtcaccttcctggagcgcgaggacgccgccgctgccatggacaacatggacggcgccgagctcttcggccgcgtgcttaccgtcaactacgccttccccgagcgcatcaagggaggggagcagggatgggctgcccagccaatctgggccgatgcggacacttggttcgagaggcagcagcaggaagaggagatgcagcggctgcaggcagagcaccgcgcagcgatgcaggcagcagagaagctgcacagggagaaactggccgctgaaagggaaggcgagaaagaagaagatcccatggctgccgcagaggctcaggctgtgaaacaaagttcttaagaaccggatattaactcataactcatgtgctacgttgctgcctgtttgtcagatatgactaaacgaatcttgtgaatgctgtttgttttgctgaaagaaccctatttctcacctgacgtgggattcttattggtttcccttttccctgtctgtcttagtatatatatgcacactggcgcaaagaacaattcttgtattatctgcgacactcatacagaagacctggagatgcacgcagcatttaccaaactggactagtggagcaggagatgcgttctgatcgtggccacacagtcaagcagagcttactaaaatgttgtggttcccaacgtgtgttgtttgggcttactcaa

SEQ ID NO: 126163 - DNA, 1493 bp, Zea Mays
gatctctccccacctcccggtccgctagcagatagcgggggccagagagatcgagatccggaggcgctagcgccacccatcagcgtctgcggcaatggcgggcacggtgacggtcccggggtcgtcgaaaccctccacgccgctgctcaaggacgagctcgacatcgtgatcccgacgatccgcaacctcgacttcctcgagatgtggaggcccttcttccagccctaccacctcatcatcgtgcaggacggcgacccgaccaagaccatcaaggtccccgagggcttcgactacgagctctacaaccgcaacgacatcaaccgcatcctcgggcccaaggcctcctgcatatccttcaaggactccgcctgccgctgcttcggctacatggtctccaagaagaagtacatctacaccatcgacgacgactgcttcgttgccaaggacccatcaggcaaggatatcaatgctcttgagcagcacatcaagaacctcctcagcccgtccacaccgttcttcttcaacaccctgtacgacccctaccgtgagggtgctgactttgtgcgtggataccccttcagcctcagggagggtgcccacactgctgtctcccacggcctgtggctgaacatccctgactatgatgcacccacccagctggtcaagcctaaggagaggaacgaaaggtacgttgatgctgtcatgacaatccccaagggaaccttgttccccatgtgcggcatgaaccttgccttcgacagggatctcattggccctgccatgtacttcggtctcatgggtgatggccagcccattggtcgctacgacgacatgtgggccggatggtgtgtgaaggtcatctgcgaccacttgagcctgggagtcaagactggcttgccatacatctggcacagcaaggctagcaaccccttcgttaacttgaagaaggaatacaagggcatcttctggcaggaggacatcatccccttcttccagaacgtgaccattcccaaggattgcgacaccgtccagaagtgctacatctacctctctggacaggtgaaggagaagcttggcaagatcgacccctactttgccaagctcggtgacgccatggtcacctggatcgaggcctgggatgagctgaacccggctggccccgcggctgggaaagacaaggccaagtagatgggagtccctgggggtgcattcacttccctgctgaagtgaaaagaaagtatgattgggtccagcctaggctcccccatagatatagctctttttgagagggaagagggattaattcagcagcaggttctttttataaattctttgttgttatgaagcaggcggtacttttgtagttgatgaaggggatttgtcgccactgtcatttacataattcggataataatttatattgtgtaatcttgagaatcaaagcactgtttgtgttatagcatgtctatgaatgcgcactgttgctttttcc

SEQ ID NO: 126164 - DNA, 2031 bp, Zea Mays
atgcagctggtttgccacagaatttcacgccacagccggggcgctggaatcggccgccacaacacctccaacacgccgcatttctctcctactgcacttctctccaagaacacgaagccgactaccaccctctccccagtcctcacatgccggcggagcatctggacccccactccaaattcatgctccgctagaagatcctcatgtgaagtcatcggatctgctcgtcggatctccaagcacggtccatttgcaagtaagagactttcatttggtactgcttcaaggttatgtagccatttaaggtctcgtaagctgttagaggatactgtcaatgtctctgttgaagaacaggttgctatgttcttaaagtttgttggccatagatggacaaataggtcagttgggtttgaattcctacggtctggagaaacagttagcaggtacttcaaccttgttttagatgctctatgtgtcatgtcacgtgacctcattactatgagaaccacagagacacatccaaagatatctagtagcccgggaagatttcacccttactttgagcaagttctcatgaatccagatactcagatcatcttggacgagatcgctcgccgattcgctgatcatgatgccaaatgggatcggcgcgcgtcggagcaagaatctcgctgggaggcggtgttctctgattttgccaaaaaccagagcgatcgtgtcggggcgctcgagaaagcctccggtgcgttcgacgaatggcgtgtggggatggaaggtgccgtggatgatctgcgcttggaggtgggcaagattgcgcgtcattgggagcgggctgtcgtggataaaccgacctcgatggttgggatcctgatgtaccagctttgcaacagcgtggccttcgtccacgaccccaaggtgctgcaccgggagctcaagttgcacatccttctcaaggaccacaagaccatggtgctcaagatcgccgacctcagccttagccacgccatcaggccagaaatggttgtaggttggtatcactcacatcctggcttcggatgctggctatcaggcgtcgatatcaatactcagcagagttttgaagctttgaaccccagagccgttgctgttgtgatagaccccatccagagtgtgaaggggaaggtggttattgatgcattccgcctcattaatcctcagaccatgatgcttggccaggagccacgtcagacaacatcaaatgttgggcacctaaataagccatctattcatgctcttatccatgggctgaatagacactactactcaattgcaatcaattaccagaaaaatgagcttgaggagaaaatgctattgaacttgcacaaaaagaaatggaccgatggactaattttgaagaggtttgacactcactcgaaaaccaacaagcagactgtccaggaaatgctaaacctagccatcaagtacaacaaggcagtgcaggaggaggatgaactgccacctgagaaacttgcgatagcaaatgtgggtctgcaagatgcaaaaaagcatttggaagagcatgtgtcgaatttgatatgtctttcactgcctaaactaatgaataagctcatcggaaattctaagcgctgtcagtacaagaaactactcctgaagcattgttctatcaattccatgtgtttatatcttcctgcgcaattgcacctagcagttgaggagtgcctctttggctcttttcgtattatagtagagacttgtatttctcatattgccgcaagtgctcccatgaagaggacattccgcaagtacagctatcgtgacatcgacctcgatactctgcttaacatgtccaccgacgaccttgtccaactctttctggttgacgcctggagaagcgtccattacaaggaagatctacctgaggcaaggaattggtgtggatggctttcagaagatttatggtggctgcacctcaaacgcttcggcaaggtggacaacgccaacaagtacgggaccttgctggaggttgtttag

SEQ ID NO: 126165 - DNA, 2506 bp, Zea Mays
caaaaaatcaccagaaataaaataaataaaaatcccacagaagaaaaaaaacaccccgaaaattctccctcgctctctctcagtctctctctccgtgagggaggaagttgggcttcgttctcgagtactcttcgttctcaggcggcccccggctgcttctgctggtcgccgcccagctccagttattagagaaataagggccagcctggttgcccgaggctgacccagcacctgcgatggaggagaaggctgtcacaaatggagcggcagctgctgatgttgctgctcctgataataaggataacaccaaggaagaggttagcaagagcaaggagccagtagcgaataaggatgctgaagagcagaacaaaggctcggaaaatggtgctgagggccattcaggtggagatgtcaatatggcagaggctgagatcactgaggaaggtggtggtggtgatgctggtgcggcaaagcaggtggattctggagatgtcaaaacggatgccgatacaaaggaagatgccaatgcgagaacagaagaaggtgaagatgccaagatgactgaggctgacgtaggaagtacagaggtcaaagataaagaagagaaggaagatgaagttgagaacacaaatgagcaggatgaatcgaaggagcaagagaaaggtgcttcggctgagcaagaggaaaacgaaggaaaagaaacggatgctgatgagaaccaagaagaagaggaagcagaagaaaagggttctgctgataagaaagatgaagctgaagctgaaggtgacaagaagacggaagagaataaggagactccgaagaacaagaaagcaaggagtgccagggatagaagccagggaaaagataaggagcaggatggatccaaatccaaggaagccaaaagtttgctgaacactccaagcccatatggtaccaatcgccctcaacgtgagaggaaaatagtggagaggttggttgaggtgattgataaagagccaaacaagaatttcgtggttgagaagggacaggggactcctctgaaggatataccaagtgtggcacacagaatatcaaggaagaagccttctgatcttaaatttcttcacagtattctttttgggaggaaaggcaaggctgtcgattttaaaggacatatactccaattctctggatttgtttggcatgagagtgatgaaaagcagagagccaaggcaaaagagaagcttgataagtgtgtaaaagacactctgctggacctctgttggacccttggtattccaactccgaaagcaaacattagaaaggaagatattgtgtcaaagctgttggacttcattgctgaacctcactctgcagctgaatcttggggctctgatgatcagggatcaaattctaaaaaacgcaagagaggaggtgaaagtgcaagtaagacgcctgatggcacacctagtaggtcgaggaagaaatttgtcgatgacggtacttctagtaaaaggcagaataaagcgctccagtatgatactgaggaggatgaatccatgaagtctgacagtgaggaaaacatagatgaagattcagatgaagctgctgacaaacaggaagttgactatggatctgggaaagaaaaggcagggaagaagttatcggaggtaaaagaatcttcaggtaaaaagaagtcaaacacagggagtggccacaaatcaggtcctccaaataaaattataaaaaatctggtaaaaaaagtatcatccaagattcacgaggaaaaagaaagccccaatggtagtgccaaggttttttcgagaaagaagaaacccacagcagaaaaggagatcaaagagaaaaagtcgtcaggaaaaaaggtgacaaaaggtaaaggagaatcagctgaagcagttcttcccagcaaggacgatctgaggaagaccattactgaaatcctcaagaaagttgacttcaacacggcaactttcagtgacattctgaagaagctcgacaatcactacaaaatggatctgaccccaaagaaagaagccatcaaagttatgatccaagacgagttgaccaagctatcagaggaggatgaagaaggagagggagacgaagacgccgggaagaaacagcagcagcctcaggcgcaggagatcgaggcatgagggatccgcggaaccccgtagctgtagtagccactgttaattatcctgtacttagtgcgtatgtgtcgcatgtacaggcatcctttgttgatttcagccaccaacttgagaacctcaccccctgattgtgtatgctaaaagacatgatgtgtaggcagcctccacaccttttagctgactgatcggagagttactcttaggcaacaacttgtgtttctagatttgcaaatggtgtctgaaagactgaaactctgcattcgctgtggcagggcgtgtacttaattgttcgtgataggtctgaataacacatggatggaccctagttgttcgtgttgccttgagcttttact

SEQ ID NO: 126166 - DNA, 1088 bp, Zea Mays
gcgggttaaaattacgaggatgataatttaaatattttttgagttttggacaatagttcatgaaggtagaatgacttattcctattgtaaaaaaaatcatgggttaattgttatgcataaagcccacgatgggattttaggcccaaaagcggccacttcgcagcttatccgaacccagtcagccagcccacgcatgagctatataagacggccatataagaaaccctagcggagccaccagcacactcgtctttttcctctacggccgccaccatcgcctcgcggccgcctgccgctccgctcgaaagtttttagtgaagattttttgaagccgagaagatggtgctgaagacggaactctgccgcttcagtggccagaagatctatcctgggaaaggcatccggtttattcgtgctgattctcaggttttcctttttgccaactcgaaatgcaagcgctacttccacaaccgcctgaagcctgcaaagcttacctggacagcaatgtacaggaagcagcacaagaaggacatccatgctgaagctgtcaagaagaggcgccgcgccaccaagaagccatactcgaggtccattgtgggtgcttccttggaagtgatccagaagaagagagctgagaagcctgaagtccgagatgctgctagagaagctgctcttcggtaatgtttacatcctccatttatatgcctatgacagcagctaaccatctgtttggtgttgccaataaaatctgttttgctctcgagtgttactgtacacaaacgtgcaatacatttgaactgccgctgaccttacagtgagatcaaggagcgcatcaagaagaccaaggatgagaagaaggcgaagaaggctgaggtgtccaagtcccagaaggcgcagacgaagggtgctgttcagaagggttccaaaggccccaagttgggtggcggcggtggcaaacgctgaaaaggaactaagtgtcattccgagacctcatcaaagccacctttgtagtaccttggttaattttgtattttctttcagagttacttgtgactcttaattttgcatctttatatattgggagaaat

SEQ ID NO: 126167 - DNA, 1026 bp, Zea Mays
gcgggttaaaattacgaggatgataatttaaatattttttgagttttggacaatagttcatgaaggtagaatgacttattcctattgtaaaaaaaatcatgggttaattgttatgcataaagcccacgatgggattttaggcccaaaagcggccacttcgcagcttatccgaacccagtcagccagcccacgcatgagctatataagacggccatataagaaaccctagcggagccaccagcacactcgtctttttcctctacggccgccaccatcgcctcgcggccgcctgccgctccgctcgaaagtttttagtgaagattttttgaagccgagaagatggtgctgaagacggaactctgccgcttcagtggccagaagatctatcctgggaaaggcatccggtttattcgtgctgattctcaggttttcctttttgccaactcgaaatgcaagcgctacttccacaaccgcctgaagcctgcaaagcttacctggacagcaatgtacaggaagcagcacaagaaggacatccatgctgaagctgtcaagaagaggcgccgcgccaccaagaagccatactcgaggtccattgtgggtgcttccttggaagtgatccagaagaagagagctgagaagcctgaagtccgagatgctgctagagaagctgctcttcgtgagatcaaggagcgcatcaagaagaccaaggatgagaagaaggcgaagaaggctgaggtgtccaagtcccagaaggcgcagacgaagggtgctgttcagaagggttccaaaggccccaagttgggtggcggcggtggcaaacgctgaaaaggaactaagtgtcattccgagacctcatcaaagccacctttgtagtaccttggttaattttgtattttctttcagagttacttgtgactcttaattttgcatctttatatattgggagaaatgatcgccgttcgttcatatgatttcctcatctttgtttctcaaccgaataatgtgactggatgtttctttgttggg

SEQ ID NO: 126168 - DNA, 768 bp, Zea Mays
actcgtctttttcctctacggccgccaccatcgcctcgcggccgcctgccgctccgctcgaaaggttttttagtgaagattttttgaagccgagaagatggtgctgaagacggaactctgccgcttcagtggccagaagatctatcctgggaaaggcatccggtttattcgtgctgattctcaggttttcctttttgccaactcgaaatgcaagcgctacttccacaaccgcctgaagcctgcaaagcttacctggacagcaatgtacaggaagcagcacaagaaggacatccatgctgaagctgtcaagaagaggcgccgcgccaccaagaagccatactcgaggtccattgtgggtgcttccttggaagtgatccagaagaagagagctgagaagcctgaagtccgagatgctgctagagaagctgctcttcgtgagatcaaggagcgcatcaagaagaccaaggatgagaagaaggcgaagaaggctgaggtgtccaagtcccagaaggcgcagacgaagggtgctgttcagaagggttccaaaggccccaagttgggtggcggcggtggcaaacgctgaaaaggaactaagtgtcattccgagacctcatcaaagccacctttgtagtaccttggttaattttgtattttctttcagagttacttgtgactcttaattttgcatctttatatattgggagaaatgatcgccgttcgttcatatgatttcctcatctttgtttctcaaccgaataatgtgactgg

SEQ ID NO: 126169 - DNA, 2898 bp, Zea Mays
cctcccagtcaccgcaggttgaccaccgaacagcgcggttggattacgcggtcccaagacccaagctttctgtctggctttctgtctggggtcggcccgcttcgctccatgggctcatttgagcagcggagccctttttaggtctatccagtatcgacgcccttctaaaaaacctaactccctctctccttgaattcactgcggccgaagtcgctgccctgccgactcccgaccgactctccacctcagccctcagggccgccggctccttcctccggtcctcccctctcctccgcctcgacaagcgtcggcgagatggtgaagaggagcaagaagagcaagagcaagcgagtcacgctgcggcagaagcacaaggtgcagcgcaaggtgaaggagcaccaccgcaagaagcgcaaggaggccaagaaggcgggcaaggccggccagcggaggaaggtcgagaaggaccccgggatccccaacgagtggcccttcaaggagcaggagctcaaggcgctcgaggcccgacgcgcgcaggcgctccaggagctcgagctcaagaagcaggcgcgcaaggagagggctcagaagaggaaggcaggattgcttgaggacgaggacattgctagtttggcatctgcagcttccgcacagggcagtgagtttgcagcaaaggagaatgctcctttattagtggcaaagatcaacgatcattcagagaggtctttctacaaggagcttgttaaagtaattgaagcttccgatgtgattgtggaggttcttgatgcaagggatccgctgggcacccgttgcattgacatggaaaagatggttaggaaggctgatccaagtaaacggattgtactacttctcaacaagatagatcttgttcccaaggaggcggcagagaaatggcttacatatctaagagaagaattgccaacagttgcttttaagtgcaatacccaggagcagaggaccaagctgggatggaaatcttcaaaattagataaaacaagcaacatcccacaaagcagtgattgtcttggtgccgagaatctaatcaaattgcttaagaattattccagaagccatgagctgaaactggcaattacggtgggtattgttggacttcctaatgttggcaagagcagtctgatcaacagcctgaagaggtcccgagtggtcaatgtcggttctactccagggattactagatcaatgcaagaagttcaattagacaagaaggtaaagttgttggattgtcctggtgttgttatgctcaaatcttccaacagtggtgtgtctgtagcccttcgaaactgcaaaaaggttgagaaaatagaagatccagtcgctcctgttaaggagatcctaagtatttgcccacatgagaagttgctgtctctatacaaggttccaaactttggttcagttgatgatttccttcagaaagtagcaactgtacgtgggaaattgaaaaagggtggtgtagtggatgttgaagctgcagcgagaattgtgcttcatgactggaatgaaggtaaaataccatattttacactgccgcctaaaagagatgctggggaggactcagatgcagtgattatatccgaggatgggaaagaatttaatatcgatgatatttacaaagctgaatcttcatatattggtggtttgaagtccattgaggagttccatcatattgagattcctcctaatgctccaccggcgatcgatgaagagatgctagaggatggtggcaagaaaccaagcgaagccatccaggaaagccgggacagggaggagcaaatgcccgacgtgaaggactcaggaggaagcaaggcagccagcgccagcacgcagaacgacaagttgtacaccgccgagggcgtactcgaccctcgcaagagcaaagcagagaagaaacggcgcaaggcgagcaggcccagcgcgctgaacgacatggacgcggactacgatttcaaggtggattatcggatggaggacggtgggagcgagggtgcacacgcggatgatgaagatggcggagatggatccgaggataatgaaccaatgaccggtgtcgatgatgcatgaattgtcatgtcgagtgccactttgccagaaatgatttgtcccaatgggggttgggaaattaacccacgacagttttgtgcttagtttgtttcttcaatgaaagatgacagttgcgttttacctgtcacagtacctacttttcgttgcaatcttcagaacaacctgatggaagagtacagaccacacaactaagtcttcggttattcacgtagactttgttcatttattactataccatatacattaaaaaatgagactaaataaaccacctcgacatggaaaaattacaactctggtgcgttcagtggtgcacgcaaatttttaatcggaacttccattgagaaccgaataatgcaggtgtctcgtgatgcttttgttctcagggattaatgtttaccgttcgggctagtttggaaactcaaatccccttcgagattagagaggaaattagttcatttccacatcaatcccatccaattctaaaaggatccttcaggtatttcgaaatgccattatgtaattgattgaaaagtactacaattcttgttaccgtgcgtacatttcagattgcaagcaccaagcattccaccacttggctgaacaacaaatcaatgcaaagtgatcaatcaccatgtcgcgaaaaggaaccatcagacagcataacaaacgaacacaaaaccagttaaccgataccggtctgtttcatataacttgtacgcttcaccacagtttcactcagcaaatggacgcggaacgccagaactctctacgctatctgcgtctgggatagcaagtagg

SEQ ID NO: 126170 - DNA, 604 bp, Zea Mays
cccagaccttgtagcacctgaagttcttgttggatacgagtagcttgaccacttgaaggacaagtgccgccggatctggggcatggtgcattgcggacagcaacttcttactagagatgctgaaacagatcacgaactcgaccagcgtctctgcatccattctcttgcatgcctctacaaattcctttctcccatctgcaggaagccctctaagctgtttcttagtcgtctcttcgaccatctcctcctcttcagtaccctgctcctctccatccccctgtgcatacccatcaagctcctcctcaccttcagtctctttgccttgccctgcagagaccttgcctcgagcgcccgcagctggctgaaccggcgcgagatggaggattggacggaggacacgtgggcatcgaggtcctcccaggtgaaggggagcgggtagggcgagcaggcggcgagggtgtggaaggcctcgcgcaggacgcccttcttggcagggagctcggcgatggctgcctcaaggtcctccgtcggcatcatcgccggcgccgccgtccccatgggctgggtcagaaacgtcggtcacgggagcgagtaaatttacaat

SEQ ID NO: 126171 - DNA, 216 bp, Zea Mays
atggaggaaccatctgtagttgggtcctactataacaagcggatagtcggctgccctggtggtgagggagaggatgaacactatgttgtatggttctggttgaaaaaagatgagccgcatgagtgtccagtctgctcgcaatactttgtgcttaaggtcattggtgatggtggtgatctagatgttcatgacgatgaagatgatggacatcactaa

SEQ ID NO: 126172 - DNA, 3487 bp, Zea Mays
atctggcgatagcatctagcaggccctaagcaaagtttcagaaacataaagctcaattttatcaacagcataatagcaatgcactgcagtgataaaattattcagtgcaaacagatataaatcattgaattgatgcaaaacagagcattattttctacaaaatatacaacagtgcttttattaagcaggcagaatgagcaaatgaagtgtagacagattggtcctatagtgttgattcatggcatacaaacgaatactaatactaaatgcgttattcacaatgccatggaatatgactaatactccccttttttgacagataaaggtctacacggattctaaattatgagcgtgttgactttatacacaggaaatgtgaatatatggtaccaaatcccccaggtcccagccattctcttctttatacgataatacgtaacaactttgcgagttccacaaatcatcaactcagcaaacaaacatcaaatattaagcccgtggacagtaagaaccccgggatcatcaaaagcatatacccgatttcgtgtggatctagtcgaaatttgcgccggactaaaagaaagtaccctatggactgcaacaatcaacgcagtagaagcgtacgaaggaggttaatcaaaaaggcgaacttacttctgcccatggcgacggcagctgaggtaggcagtcggtgtcggcggaggcggcgaaacgaggaaggggtgcgtctagggcttggagggaagagagggacactttatatagagagtgcggacgcggaatggagccgtgccgccgtgggttttgtgcgtcacggcatgcgactggcagatgctgggccttgggaggaatggaccgaaaaacacaacaggagcccactaaaattggcgactcctttctctcaaggccagagaacacaactcctgcaggctgcagcgacatcatcctcccccgtcgcgcccttgccgccgccgcctcctctccccgccactcgcccactcgagctggacactgaaaaaaatcagtagcagggccgtgttgggctgagcccacgttgtccacatcaaaacactcaaacagggttgttagttctcacgggccaaaaaggtcagcccatgttgatgccgtggccgtggggatcagatggcttggcggctacgacggttttcctttcctccgcgccaccacgagctgccctaaaaccctaccactctactaccatcacacctgcgcctccacagtccacactcaccgcgctcgccccctcacaacgaaacctagagagtcccgcgcgtgacatggcggacggcgcgggctcggcgtctggtctggtggagaagctcgcggagctttcaacgggcggcgccgggcagaatcctccgccggcgggtgaaggcggagaggagctgcagctctcgaagaacgcgaagaagagagaggagaagaggaagaagctggaagaggagcggaggctcaaggaggaagagaaaaagaacaaggcggcggcggctgctgctgctagtggaaagcctcagaaggcatctgctgctgacgatgatgacatggatcccactcaatactacgagaataggctcaagactcttgattcactcaaggccgcaggtgtaaacccctatccacataagtttccggttggcatctctgtagtggaatacattgagaagtacaagaccttgaacaatggggagaagcttacagatgcgacagaatgtttagctgggaggatcatgaacaagagaacatcatcatctaagctattcttttatgatctttatggtggcggcatgaaggttcaagtgatggctgatgccaggacctcagagttggatgaagcagaattctctaagtaccactcgagtgtgaagcgaggtgatattgttggcatatgtggttatccaggaaaaagcaaccgtggggagcttagcctgttcccgaagaaatttgtcgtgctctctccatgtcttcatatgatgcctcgacagaaaggtgaaggaagttcggtgcctgtatcgtggactccaggaatgggtaggaatatcgaaaattatgttttgagggatcaggaaactcggtatcgtcagagatatcttgatataatggtaaaccatgaagtgaggcatatcttcaagacacgatctaaagttgtctcatttatccggaagtttcttgatgaccgcgaatttttggaggtggagactccgatgatgaacatgattgctggtggagcagctgcaaggccttttattacacaccacaatgaattaaacatgaggctttttatgcgcattgctcctgaattatatctgaaggaattggttgttggtggattggaccgtgtttatgaaattggaaaacaattcaggaatgaaggaattgatttaacacacaatcctgaattcacaacttgtgagttttatatggcttatgccgattataatgatttgatggagcttactgaaaccatgttgtcagggatggttaaggagctgacaggtggctataagataaaatatcatgcaaatggagttacgaactcaccaatagaaattgatttcacacctcccttcagaaggattgatatgattaaagatttggaggctatggccaatctcaatataccaaaagatctagcaagtgatgaagcgaatcgttacttgatagaagcatgtgctaagtatgatgtgaaatgtccacctccccaaacgacatcacggttgcttgacaagttagttgggcatttcttggaggagacatgtgtgaatccaacatttatcatcaatcatccagagataatgagtccattggcaaagtggcataggtctcgacctggattgactgagaggtttgagctatttgttaacaaacatgaggtgtgcaatgcatacacagagttaaacgatcctgttgtgcagagacaacggtttgaggagcaactaaaggatcgtcaatctggtgatgatgaagctatggccttggacgaaacattctgtgctgcccttgagtatggtctaccaccaacaggtggttggggcttgggaattgatcgcctcacgatgttgcttacagattctcagaacattaaggaagttcttctatttccggctatgaagcctcaagagtagctatccgcatagccaaaagcaacaaaatggcctcagccaaaggccacaaaaggttcaaagcaaacataggcgctggagggtatatcttagctcttggatctgtattgaacgatacatccttttgcccctgtgctcgggagctttccatttttttcattattttttgtaaactaccgcgtatttgctggcagcaggttattaaccagaaactgtaacgtcacagaaagttcagtttaacttcgaatggagttttttggaggttgcaaatactctgggtctgggtctatccaatgtgtacgctcaagcctcaaaggcccaccctaaattgttgaaaaagcatgtgc

SEQ ID NO: 126173 - DNA, 910 bp, Zea Mays
tataaatatacaattgtctccgtggtctggttccctttcctcgagtttcctattttcgtctcctccccacagcagcccggcgaaaaccctagtaagcaaaccaccggagcagcggcgcttgcgcgggcggagccatggcggacgacgattacaacgaaattgacatggggtatgaggatgagcccccagaaccggagattgaggaaggagctgaagaagagcctgagaacaacgaagatgcccctgatgacgtcataggtggtgagggtgaagataaggaacaggaaaagaccaagcgtgaacgcaaaacaacaaaatacatgacgaagtacgaacgtgcgcgcatcctgggtacacgagccttgcagataagcatgaatgctccagtcatggttgagcttgagggtgaaactgaccctcttgagattgcaatgaaggagctgagagcgcgcaagatacccttcacgatcagacggtacttacctgatggaagctatgaagactggggagtagacgagctcattgtggaggactcctggaaacgccaggttggtggagactgaagacgcggatctacttggcatggaaagggtatgtggtgcagtgggtctttcctgtagttacaagtcttcgttgccactatgagtggatactgtagcgaatgaaccaagacgaaatgatgctatgttaacttaacgtctgtggttgccttgaactctggaaccgtaatgctagcatggttgttggttgcgctatgcttgtttttgtttgtttcagtttcagacatgcagttgcagcgtagccaaatgcgtgctttgtgtgcctaatatctgacactggatgtgatcagtgttgtttatgccaatggttgagagctgtgctccgatgattcatgaaccgattgctcttc

SEQ ID NO: 126174 - DNA, 891 bp, Zea Mays
atgtatggaccacgtttccttgccccccacaaaaaaaaggatcgaactgaagctccttcattcctcggaatcagactcgagtgggcaggagccgtcgtcgacggtggccagcgggtcgaacatgtcggagctggggtccgtgcacccgctcacgatatccagcttgcaccgatcccccccctcgtcgaggtagccgtccatggcgcagctggtgatggcgatgttctcgtccgggtagatggccaggtcgcaggcgccctccctgttgagctcgtccgccaggccctcgttgaagaagctcagcggcttcttctgccatggcttcgggaccctgaacttgagggtgtacggcccgtcccactcggccccgttggtgaaggagaagatcaagcttgtggcgtgctgcggcacgcgtatcctgatggtgtagatgggcgggtcggctttcccgcggacctgcagcgtcatctgcctcggctcgccgccgcacatgatgggctggttgaagccgccgttgaacgccacgccgaacacgtcgttcggggccatcttgctcgccgccgggttgtagaacagggtcagcccctcgcccggggaggacggcaggccgttgctggtcttccagtacaccggcgcccgcccgagctcgaactccgcccacgtcggcagcgacaccgacacccccgtgttctgctgctctacggcggccggcgccgcagtggcagcggcggcggccgtgcgaacgctcgcggaggagccccgccggctggtgaacaggactcctgcacgggtcggcttcggctgccggcggatagccgcggcgccggtgccgctactcaggcggctgcaggaggagagcgtggccatcgatccgtgcgtcgtcgtccttga

SEQ ID NO: 126175 - DNA, 3560 bp, Zea Mays
ccgggcatggcgatcactccacagaccatggtcctcctctccctgctgctgtccttgtcgtccctgcccattgccctggcgctcgcggaagcgggagccgagagcgaggacaccgcggctctgctcgccttcaaggccgcggccgtcggcagcagcagcggcactagtggcgccgtgctcgcgtcgtggaacggcagcggcgccggcccgtgcacctgggatggcgtcaagtgcagccgcatcggacgtgtggtggcgctgaggctgcgctccctcgggctctccgggacgctctcgccggccgtcggcaacctgtcgtcgctgcgggagctcgatctgagctccaactggctgcgcggcgagatccccgcgagcctcggccgcctgcgccgcctccggacgctcgacctcagtgtcaacaccttgtccggcgcggtccccggcaacctcaccgcctgcaccagcctgaggtacctaaacctcggcagcaacaggctcagcgggcacgtaccggcggggctcggcggcgcgctggcgcggctcgaggtgctctggctcaccaacaacagcgtcacgggggccctcccagcgtcgctggccaacctgacgtcgctgcgccagctcggccttgggctcaacgccttggacggcccgatacctccggagctcggccgcaacatggcgcgcctcgagtacgtcgacctctgccacaaccacctgcgcggcgagatcccggcgccgctgtacaacgtgtcgtcgctggcgagcctcgacgtggggcagaacgcgctgcacggaggcatccctgccgggatccacgtgcagctccctcggctgcggtatctggccttgttcgagaaccatttcagcggggcgatccctcccaccatctccaacctcacccagctcgtagagctcgagctgtcagagaaccggttcagcggcctcgtgcctcgcgatcttgggaggctgcaggatctgtggaaactgctgctggacgacaacatgctcgaagcgggggacaaaatggaggggtgggaattcatggagtcgttggccaactgcagcaagctaaatcttttcggtctgggtggcaacgatttcaccggagatcttcctgcttcggttgctaagctctcgacaacacttgagtggctttacctagaaaaccttgcgatctccgggagcatcccctcggagatcggaaacctggtcggcctgaaagtacttgttctgacggatactgacatctcaggagcaattcctgatagcatcgggaggatggagaacctggttgagctacacctggacaacaatagcctgtcggggccggtaccgtcatcggtggggaatctcaccaagctcatgaagctatcggcgagcggcaacagcctgggaggatcaatcccgaggaatctcggaaagctcaccgacctcaccagccttgatctttcaagcaaccacctgaacggctcgatccctgaagaaacattccagctgcagtctctttcgctgctcctggacttgtcacacaactccctctccggaccactccctcccaacgtcggaaggctggccaacctcaacacgctgagactgtcaggaaaccagctgtccggccagctaccggcaggcatcagagactgcgtggttctggaggagctcctgctggacagcaactcgttccagggaagcatacctgaggctctaggcgacatcaagggcctccgcgtgctgaacctgaccatgaacgggttctccggtgcgatccccgacgcccttggtagcatacgcagcatgcagcagctgtacgtagcgcgcaacagcctctccgggccgatcccagccgacctgcagaacctgacgtcgctgtccgatctggatctgtccttcaacgacctgcaaggcgaggtgcccgaccgaggcttcttcagaaacctgcctcgctcatcggttgccggaaacgaaaacctctgtggcggaatgcctcggcttcgcctgcatccgtgccccacgtccgcttcggggaagaacagtcggagcaagaggtggccgccgctgaagcatgttgaaatggctctggcgacagtgggcgcagtcgtgttcttggcatcattattagccgcagctactcagctcgtcgtctgtaggagccgtaaacaaaggcggcagcagacgaagaggcagcccctaggagccccagcagcgaccggagagcggtacgagagggtctcttacaaggagctgtcggaggggacgaaggggttttcagacgccaacctgctcggaagaggaagctacggcacagtctacaggtgcgttctcagccgtctcaccgacgatggcggaagaaccgtagccgcctccgccgccgccgtcgccgtgaaggtgttcgacctcgagcggtccggatccacgcgaagcttcgtggccgaatgcgaggcgctccggagcgcgcgccaccgctgcctcgtaaggaccatcacgtgctgctcgagcgtggaccgccaggggcaggagttcaaggccctggtgttcgagctcatgcccaacggcaacctgagccgctggctccatccgagcccgaacgaggccgaccccgagagcacgctgagcctgatccagaggctcgatatcgccgtggacgtcgtggatgctctggactacctccacaaccactgtcggccgccgatcgttcactgcgacctcaagcccagcaacgtcctcctcgcccaggacatgagcgctcgggtcggagatttcggcctttccaggatcctgtctgactctgacagcgcgtgcagggccaaagccgccgatccgaactcgagcagcgtcattgggatcagaggctccgttggctacgtccctccagagtacggggaaggcagcggcgtctccaccctcggcgacgtttacagcctaggcatactgctgctggagatgttcacaggacggagccccacggacgacgcgttcggagactcgctggacctccgcgggttttcagaggccgggtttcctggcaggatactggaaatagcggacccgaacctatgggcacacctccctgacactgtcacaagaaacagggtccgggagtgtttgcttgcggtcattcggctcgccctgtcctgctcaaagcgccagcccaaggaccgaacgcccgtacgggatgcggccacggagatgcgcgcgatcagagacgaggcgtacctgatgatgcttgccggctctgtggtggtccgaatggaaggggaagtagtgggaggagcagtggccccatcattgacgtcccaaagctagaaataaaatccttggttcagtgccgttattatgacaccgagaagaatggtcttagttttagcctagaaagatttcggttggggccaaatcccagcaagggtccatcaaaaccagcacgctgggccgaagcagggcctggctgcacaaaccgtgatagaaatttcaaactgtactgctgttgattagcgcattcttggttgggcccggaatatgtgccgccacggctgactttggttgggccacaagcccacggc

SEQ ID NO: 126176 - DNA, 939 bp, Zea Mays
gcaatatttgcttggcatacttccaatccttccttatatacgtgaacgcacccacctaatcacctgatacctagctgcctgctcgtggcaccagcaccaccgatcgccaagctagctaggacggccgaccgatcgatcgagctgctgcaagggcggccgccggcgactctcgatcgctaggcgctagctgcccgccggcgccggtacgtatatatggcgacgggggacgacgcggtcgggacacggaagggcggcgccggcaccggcggtgcagctggcggcgggggcacgcctaccacgcagacgcaacagcagcagcagcagacgcccccgccgcccgagcagggggtgagctgcccgcgctgcgactccccgaacaccaagttctgctactacaacaactacagcctgtcgcagccgcgccacttctgcaagacgtgccgcaggtactggaccaagggcggcgcgctccgcaacgtgcccgtaggcgggggctgccgcaagaacaagcgctcgcgctccgcggcggccgcgcgcctctcgctcaacctgccgctggaggccgccgccgaccagcaggcggcgaggctgggcttccttggcgccgccgctcatccggtgttgtcgtcgtcgtcgatcggcggcggcggccccgcggccgactaccaccaaccgcaggtgggcgccgccgtcgggatgatgatggccctgccgcggctccacgccgccccctgttggcgccggccaccggagtttggagctggacggcgatcagcggcggctctgttttttcacctgatgaaaaaaccactcaacagaacagaggctgaatgcgatccgctttccccgccacgcccgcccacgctgcgtcgtgcccgcctttggcgcgggaacgtttcatgcgtggcgtggcgagaatgccgctgggccgcaccgtga

SEQ ID NO: 126177 - DNA, 720 bp, Zea Mays
acgtgccgttcggggagtggccgttgacggcggccggggacgtttctcccggcggcggcgaaggctgccacgcggcggtgacggtgagcagcagcgtcgcgacgtccatcgagtcgctgagcttcattaacctggacctgcactggaagctgcagcagcagcggctggccacaatgttgctgggcgcgccgccgagctcggccgccgcggcccatgctgacgatgacgacggcgcggcaagagcagcagcgcacgtgggcggcggcgccttcttgcaggtggccccgggaccatcgcccggcatggaggccaccggcaccgtgccgccgccggtggcgacgtcgtcgtggttcatggacagctcctgctacgacgtgctcccgtcgtccccggccgcgcatgctaacacggccgcggccgcggccgccgtaggcgccagcgactgcaacgtcgtcaacagcggcggcggcgacaacgccacgtcgagaaacagcagcaactgctgcgggccggggagcgcaatcccgccgtggggcgacatgtccacgttcgctatgctgccttgatggcggcgcatgcatgcaccaacaagaagatggtccagtttggaagggctgatttcatctctaactgcgtattgtagtatctgctaattattctgtgggtgtatatattgtatttgtcggaaacaacattctgatcggccgtagatccatgttg

SEQ ID NO: 126178 - DNA, 317 bp, Zea Mays
agcccagcccagcccatgtacattccgcagaccctagaaacttgcagccgcgtccctgaccatcgcagaggaaccaaagctagagacaaccgctgcgtaaacgaatccatcgccatggcgtctcgtctcgttgcggcggcggcctcctcctcctccctctcctcagcgtcccccctcgctcgcctaatctctcgccgcggccttgccggtgccgcagacggccatgggtctgcgaaggtgcccttgtggaaagatccgttgagcccgagcaagtggaaggaagagcactttgttctcatttgaatcatgtcatagag

SEQ ID NO: 126179 - DNA, 781 bp, Zea Mays
agcccagcccagcccatgtacattccgcagaccctagaaacttgcagccgcgtccctgaccatcgcagaggaaccaaagctagagacaaccgctgcgtaaacgaatccatcgccatggcgtctcgtctcgttgcggcggcggcctcctcctcctccctctcctcagcgtcccccctcgctcgcctaatctctcgccgcggccttgccggtgccgcagacggccatgggtctgcgaaggtgcccttgtggaaagatccgttgagcccgagcaagtggaaggaagagcactttgttctagcaagcctctcaatgtggggggttattttttatggtggttacaagctttttagtggaaagaaggaagccaagactgaggcggcatcaccacaggcataggtggcggagatggagttatacccgtatctgtggcctggcaacaatgttaaataaaaggaatgctttatgttgtgctttcaagttgataaattgtggcaacaggagattttgctttacgtaggcaatatattgagaagctactcttactcatccaccatgaataatctttgctgcagtggagcttcatgtcggcgaacaatgcaaacgttgtacttctttcatgcgattgagtagttgatgttttacttctgttgccaccaacagttgaacgctgtacttgcagattgataagatctccgtgctttctagtttgcgttgttactgatgaatttagcaaacgttttattggtggtattatttgaaaattggagtattggtagggatg

SEQ ID NO: 126180 - DNA, 922 bp, Zea Mays
catggccgctggctagctctcttgtcagtttgtcacactgcctgtgttagattgtggaaggaggtggataactggattgcaacgtaccacgtgtgaggtcaggagcgatgtggtcttggtaactgggctgggccacatggtctatgaattggtccaatggccagcactgtgcgtgatctgtttttttgggtgatctgagtcatttggtttctgaacctgataaaccatcccacactccaaaccagttaggcatggcttctccgaccacaccgaacacagatcactgaaaaatccttaagttttggtatggtacggtgtggttagtttggcagtgtatttttgcccagcagcaactgcagcttagcttgtgggtgatcccacaaccaatgtgtcatgttaggttaactattgctaatacacaatccaaatgcttgctgcttttgtttttctgcactttacagtgagaatgctttatgaaatctaacagtgttacaaaaatctgatactctgctacaggcggcatcaccacaggcataggtggcggagatggagttatacccgtatctgtggcctggcaacaatgttaaataaaaggaatgctttatgttgtgctttcaagttgataaattgtggcaacaggagattttgctttacgtaggcaatatattgagaagctactcttactcatccaccatgaataatctttgctgcagtggagcttcatgtcggcgaacaatgcaaacgttgtacttctttcatgcgattgagtagttgatgttttacttctgttgccaccaacagttgaacgctgtacttgcagattgataagatctccgtgctttctagtttgcgttgttactgatgaatttagcaaacgttttattggtggtattatttgaaaattggagtattggtagggatg

SEQ ID NO: 126181 - DNA, 1853 bp, Zea Mays
gggcaaaaaagctattattttaattactcgccgctttccttcccgatgcagggaggtgcttgctgctgatttgagtccgaaagcagataagccacatgctgcatccacagacggccttgggacccttgctaaatggattggaaaacaagaaaaaatcaagcagcaagatacccagagagttccgtgcaagtacacctcatgatgcgcgcatccccgctataagagggccctttgctcaatcactgagcaggcacgcactcactcactcaagagccacgcacgcgcactgacagacacagtcagagggagatcagggaagagaggggaggggaggagaggaggaagaagaagaagcagcagcagctgcagctgcagggcagcaggcatggagcctcatcacgcaaacaagccaaggccaaagctcagcgcgacgaagcactccaagttcatctcctgcaagctctacatttccgaatcccgcaacgctacggccgtggacgcagtggagcgtgcgagcaagagtgacccccaggtggtcgtcgtcagccagttcggggaccatcactacaaccgtttccgctacacgcttgtctcctacatcgtcgtcgtcgacggcggcggatcgtcggcggctggagaggcgacagtagtacatagcccgatcaggaaggtgttgctggcaatgatcgaggccgcgttctcaagcatagacctggaatcacagtcgggagcgcatccgaggatcggcgtagtcgacgacctgtccttccaccccgtgggccaagcgacgatcgaggacgccgcttctctggctaggcaggtagcgtctgacattgcctgcatcgcagcagtcccagtgttcctgtacgcagcagcccacccggcggggaagtcggtgggcgcggtccggcgtgagctcggctactaccgcccaaactacaggggcaaccagtggtcaggcagcgtgctccccaacgtcctgccggtgaagcctgacgtcggtccggcccacgtcgtctcgcacaagagaggcgctacgacggtgggtgtcacgccttggatcgagaactacaatgtccccgtgctgtgtaaggacgtcgccaccgtcaggaggatcacccgtggtgtcactggacggagcggaggccttcccacggtgcaggctctcgcgctcttccatggagatgactgcaccgagattgcgtgcttgctggatccagatcatgccagcgcctatcaagttcagaccgtcgtggaacagattgcaggagaccagggacttgaggttgagcagggatactacactgacataaccaaggacgaagcgctcgataagtatctcaagattgcttgcgctgacgactgatgagcttgtagaaataaatacatggggtaaatgtaaactcatgtttgtagcactgatgctgctgctggagcattattttttttgcccgtgtaaattcaaatttgcatctgaaaacttgagtttggatctgagctcttttcagagaagaaaacaaatgcatcatcagttttattctgaagaatgttaccgttttcctccagatggatgaagagatgagatccatgccgcaacgacttcctcttttcccaaatgttgaagaactctgaacacaggctaagaaacctcttttcccaaattttgaagaacttattatttgctggtattaggggaaaaaagatctttgcgagtgggtatgagtacaacccttgacaatgtaagtatatatttttttcctaaaaggttgagtgagatcatcattacaattttattatttgtattagggctcaaatactggtaagaaaaattctgaagatttacagtacaccaa

SEQ ID NO: 126182 - DNA, 650 bp, Zea Mays
ttgagaataaatttgaattttcagaaggcagccgattacaacgcactagaatatgtgtgttaaaggccactttccctatcaggttggtgcgtacagttggagggaaaaaaattgaagatacaaattaaaactaatcgtctccttggccgagctcagatcccctgcacgatcatgattatgtagaaattccgacacgattcaattcaattgcattgatatagagtctgtgtgatcgggtgtagtctctgcaagatgatatcaatctaatctcttgtctttctctatcattccttggctttccccccttcttttttttgaaggatactgttctttgtcatcgcaagcgagcttggcagaaggtttgatgacgaagcaggagcatcaactcgaaatatgaaaaaagcaactccggatgaacgaagcgaacaaggagatacgcagaagcaatcaatcaaagcagggggaaaggaagagccggacggagctcatcgccggcgcgagctgggcctgggctgggcagggcaggcaggattaccgcgaaagggttgacctcggccgcggctgcgccctcctcgaaggggttgtcgtacgtcgatctccccgccatggacctttccttccctcctgccggttccttgctctgctccgct

SEQ ID NO: 126183 - DNA, 116 bp, Zea Mays
gttttcttatttctcattgtcttttccatcacctacgaccaaaaaatctaattgtctgtataaaaaattgaataaacttctatgaacgactagggagaaattagctcaatatgaga

SEQ ID NO: 126184 - DNA, 489 bp, Zea Mays
atggccgcgcctgctctgccttctctgctgcgtctcgcactcgagacgctgcccccctccccaacctgctccgccccctccgcgtggacgtcgtctcccgtcgtccttgcctcaccgattccctactccgttccaccgggcgtccccggggtcaaccgcctccgtgcctgccgcctttccatcctccgcgcgtacgctcgcctccgcgccacgagcggattgcatcttccatgcgtcagccgccccagcatcgttgcgtatcctcgcgtcgccagatgtctccatgccatctccgcgccatctgggacctcgggtggcggcggcggcacttgcaacccaaggaaattcttcattggacggctcctgggacaccacagatggcaggttgcagatgaatttatcaaggtggacattggcggtttgaacaagcacgtgacaaggcgggtgatgatgtctgtctctgctacagctgctaagggcagccgatag

SEQ ID NO: 126185 - DNA, 273 bp, Zea Mays
atgactaccaaagacgaccctaaggcaagaaagatgttcatcggtgggctaccaccatctcttactgaagagaagagctctacacttgtcccagaacaatgtgcatgggacattggtaatgttgctggtgaaggagcagagctgagaaacacattacttgctcaaggataccagttcgactatgtgtttgactggaccattatgaggtatcctcaaataggctccaacccgcgaaccaaggtgaaagaaccagtggagctgctggacccttaa

SEQ ID NO: 126186 - DNA, 718 bp, Zea Mays
atgatgaatcatgcattcaatcgctttcttcctaatgatgtgggatggagaaatctgtttgaaatggttatagtctctgcaaggaagccagaatttttccagctttcacatccattgtatgaggttgtaacagatgatggactgatgtgtccctgttttaaagctgttgaactcatgcttgtcgatgcactcattgaggctaatgactacttggggatatcattgcatgcacacgacccagaagatttttggaagttggatgacacaatcatcaaaaccattgagactgctcccaacaatgaactgaaaaaagcaaaagaaatcattcaacgtattcgtcgaagagaactttacaaggtagtatgatgctcatatacaagtgttgttttgtcatgccatttcgcatgcttagtatgcataggatattctattttttaacacagttgtcccatgccatgaattcatgtgaattaatttactcttttctcaatcttatacatcgaaatcctgtaacctattatatcacagcttcatgagagtagtatgcttgtgttgtagatatagtaattctggcttgtttgaacaaaccaaaatttcttccaaatacaagttacatgtcctaaagagtaacctattttatcagatgctctatacttaggaggaaatgttgtttggtcgttggagatgtgtgtataataatgcctatatgaaaaaaaaa

SEQ ID NO: 126187 - DNA, 1116 bp, Zea Mays
atgggcagctgcgtgagcaagaaagccgcccgcgccggcgccaagggtgaggtggctgccccgctgccggtcgtggagaaggagaacgcccatgccctgccaccggtgctggaggtggaggtcgaggaggaggaggtcaaggaggtggtgctgtcggagacgccggtgccgcggccgcccaggctgctgccgccgctgccggagccggcgaagaggcggcaagagcaggcggaggccgttgatgatgaggcggcggcggtgtcggcgtcagagacatgcagcgccagcgacagcgctgcgtcggctgctgcgaagggagccaaggcggccggaggggagcgggaggtggagaagagggcgctgctggacgcgccggagaaagggaagcctacggcccggaggacgacgccggagccggaggagagccgcaagcccaagggagcgggcgcgggcgcgggcgccgttaacgggcacgtgcgggcgcggtctccgtcaccctcgtcggcgcacaggaggcagcagagcggcggccagggccagggccagggccaccagcaccatccggcgcggcgggaacatccggcggtggtgtcgggcatcgggtgccgcagcggccggttctcgccgtccgcggcgaggcgcgccgccgagagcgccgtccggcggacgcactcggccagggaggccgacatggcgcttccgtcgtcgaagcggtccctttccctcagtgccttcgccatcaacggcaacggccacggccacggggcaggcgtcgcgctctccgggcgggagcgggggcgggaccctggcgagcggtccggccggcggtcggtctccccggcgacgcgtaggcgcgcgcccgcctctcccagtcccagcgcggtccaccggcccgcgagccccgtgcgcaaggcggcggcgaaggagcacggcacccccgagcgaggcagcaggccggcgcgggtcatcagagacggcgggcccgacgctgagcgggcggcgttgctgggcggaggagtaggagcggagcagaggacgaagctggcggagggcgaggaaggcgcgctgggccaccagaacccctcggtggccatggagtgcttcatcttcctctag

SEQ ID NO: 126188 - DNA, 1659 bp, Zea Mays
tcaccctcccaccacatccacaaaaaatcaccctccccacctcgatcctcttccgcgagacggcaaaccgatcggtggaacggaacctccctcagtctcaaggcgagcgagcaagcgcggctcacgtccacagggccagcgacagtaggctgtaggccccgcccgctccagatccataggcagccgcgcgcgatcgcggcgtggtggataaaagcgtgcgcgctgcgccgctgccacgaggtaagagaggcgggacgagcgtcagtgcagtgcgcgtgtggtcgggtagcgatccgaggagcgcgcagcgatggcagcggcggccgtggcgactgtggccaccccatcccccgcctccaggcggctgttcccctccgccggcccgtctcttctccggctcccaaggccgaccaagcggctccggcgcgccctgcggttcgccgctgcgggggatgaagcggacgtgctgcctggcccgggggccgagggggaggccgtggtgcccgggaggctggaggagcagccggacgagcagctgggcggaagccagctcgacatcggagggctcgccttccagggcgacgtgggcgggggcttcaccggcggcggagcgggctccggggcctccggcggtggcggcggcaacaagatgctggaccggggcatcaacacggccatcgtgctcggggccagcacctacgctctcaccaagctgctcaccgtcgaccaggactactggcatgggtggacgatcttcgagatcctgcgctatatgccggagcacaactggtccgcatacgaggaggccctcaaagccaacccggttctagccaagatgatgatcagcggtgtcgtctactcccttggtgactggattgcacagtgctacgaaggcaagccgatatttgatttcgaccgtgctaggatgttccggtctggccttgttgggttcacgcttcatgggtcactttcacattactactaccatatatgcgaggcactgttcccattcaaggattggtgggttgtccctgcaaaggttgcattcgatcagaccatctggtctgcgatctggaacagtatctactttgtggtcttgggtttccttcggttggaatcacctaccactatctacaacgagctcaagtccacattctggcccatgcttactgctggatggaagttgtggccttttgcgcacttagttacatatggtgtggttcctgttgagcaaagacttctatgggtcgactgtgtggagcttgtctgggtcacaatactgtcgacttattcaaacgaaaagtcagaggcaaggaattctgatagtacctccacaccagcggcttcaaaggacaactccacatagcaaccccaaagatcttggaaagttgcttcgcccttccctcacttcaggggttatgtaaattgtacagttagctgcagcaactatgcagaagtgaactgcacttgttttgggacgtaaggtactctgcaacttgaattatcctatggaaccagagttggtcggtgtactcctagcaaactagtttccataaatctgtcatattggaagagttgatacaatttcattactctgctaagagttctaccaagaaagcatgtacagatgtgtttaatgtagaggtttttaatgtgctt

SEQ ID NO: 126189 - DNA, 2045 bp, Zea Mays
acggcaaaccgatcggtggaacggaacctccctcagtctcaaggcgagcgagcaagcgcggctcacgtccacagggccagcgacagtaggctgtaggccccgcccgctccagatccataggcagccgcgcgcgatcgcggcgtggtggataaaagcgtgcgcgctgcgccgctgccacgaggtaagagaggcgggacgagcgtcagtgcagtgcgcgtgtggtcgggtagcgatccgaggagcgcgcagcgatggcagcggcggccgtggcgactgtggccaccccatcccccgcctccaggcggctgttcccctccgccggcccgtctcttctccggctcccaaggccgaccaagcggctccggcgcgccctgcggttcgccgctgcgggggatgaagcggacgtgctgcctggcccgggggccgagggggaggccgtggtgcccgggaggctggaggagcagccggacgagcagctgggcggaagccagctcgacatcggagggctcgccttccagggcgacgtgggcgggggcttcaccggcggcggagcgggctccggggcctccggcggtggcggcggcaacaagatgctggaccggggcatcaacacggccatcgtgctcggggccagcacctacgctctcaccaagctgctcaccgtcgaccaggactactggcatgggtggacgatcttcgagatcctgcgctatatgccggagcacaactggtccgcatacgaggaggccctcaaagccaacccggttctagccaagatgatgatcagcggtgtcgtctactcccttggtgactggattgcacagtgctacgaaggcaagccgatatttgatttcgaccgtgctaggatgttccggtctggccttgttgggttcacgcttcatgggtcactttcacattactactaccatatatgcgaggcactgttcccattcaaggattggtgggttgtccctgcaaaggttgcattcgatcagaccatctggtctgcgatctggaacagtatctactttgtggtcttgggtttccttcggttggaatcacctaccactatctacaacgagctcaagtccacattctggcccatgcttactgctggatggaagttgtggccttttgcgcacttagttacatatggtgtggttcctgttgagcaaagacttctatgggtcgactgtgtggagcttgtctgggtcacaatactgtcgacttattcaaacgaaaagtcagaggcaaggaattctgatagtacctccacaccagcggcttcaaaggacaactccacatagcaaccccaaagatcttggaaagttgcttcgcccttccctcacttcaggggttatgtaaattgtacagttagctgcagcaactatgcaggtgtaaccttttttttttgtagctatatattcatgaaacatgaactgtgcagcatgtgctatagaataccatgaagaaattagcgtgctccgttcgtcccccaaataagtataagtatgtttctagttttcaaaatttgtaacacgacaagtgcatttctaggccatagtccaaataggaccagtacctttttctattttcctcccattcctatttcctaacatgcaatttgtgacatgttattttatgtttataggaatatatatttttatagggatataagtaatttaatatagacactgattcctttccttgattccagaagtgaactgcacttgttttgggacgtaaggtactctgcaacttgaattatcctatggaaccagagttggtcggtgtactcctagcaaactagtttccataaatctgtcatattggaagagttgatacaatttcattactctgctaagagttctaccaagaaagcatgtacagatgtgtttaatgtagaggtttttaatgtgcttaagggggatatttattaaaaaaaatcgttggacctgtctctctgtgaagagacatattaacaatagacgtctatcttttactgtaggaatctgttatctattctatcgatatgatattgtaca

SEQ ID NO: 126190 - DNA, 1691 bp, Zea Mays
aagagaggcgggacgagcgtcagtgcagtgcgcgtgtggtcgggtagcgatccgaggagcgcgcagcgatggcagcggcggccgtggtgcccgggaggctggaggagcagccggacgagcagctgggcggaagccagctcgacatcggagggctcgccttccagggcgacgtgggcgggggcttcaccggcggcggagcgggctccggggcctccggcggtggcggcggcaacaagatgctggaccggggcatcaacacggccatcgtgctcggggccagcacctacgctctcaccaagctgctcaccgtcgaccaggactactggcatgggtggacgatcttcgagatcctgcgctatatgccggagcacaactggtccgcatacgaggaggccctcaaagccaacccggttctagccaagatgatgatcagcggtgtcgtctactcccttggtgactggattgcacagtgctacgaaggcaagccgatatttgatttcgaccgtgctaggatgttccggtctggccttgttgggttcacgcttcatgggtcactttcacattactactaccatatatgcgaggcactgttcccattcaaggattggtgggttgtccctgcaaaggttgcattcgatcagaccatctggtctgcgatctggaacagtatctactttgtggtcttgggtttccttcggttggaatcacctaccactatctacaacgagctcaagtccacattctggcccatgcttactgctggatggaagttgtggccttttgcgcacttagttacatatggtgtggttcctgttgagcaaagacttctatgggtcgactgtgtggagcttgtctgggtcacaatactgtcgacttattcaaacgaaaagtcagaggcaaggaattctgatagtacctccacaccagcggcttcaaaggacaactccacatagcaaccccaaagatcttggaaagttgcttcgcccttccctcacttcaggggttatgtaaattgtacagttagctgcagcaactatgcaggtgtaaccttttttttttgtagctatatattcatgaaacatgaactgtgcagcatgtgctatagaataccatgaagaaattagcgtgctccgttcgtcccccaaataagtataagtatgtttctagttttcaaaatttgtaacacgacaagtgcatttctaggccatagtccaaataggaccagtacctttttctattttcctcccattcctatttcctaacatgcaatttgtgacatgttattttatgtttataggaatatatatttttatagggatataagtaatttaatatagacactgattcctttccttgattccagaagtgaactgcacttgttttgggacgtaaggtactctgcaacttgaattatcctatggaaccagagttggtcggtgtactcctagcaaactagtttccataaatctgtcatattggaagagttgatacaatttcattactctgctaagagttctaccaagaaagcatgtacagatgtgtttaatgtagaggtttttaatgtgcttaagggggatatttattaaaaaaaatcgttggacctgtctctctgtgaagagacatattaacaatagacgtctatcttttactgtaggaatctgttatctattctatcgatatgatattgtaca

SEQ ID NO: 126191 - DNA, 103 bp, Zea Mays
gccagcaaactttactttttttctctcaactttcattcaggagaaaaaggacaaggagatgcaaatgcctactccaaatatgcagggcgtgtcacacaaagtc

SEQ ID NO: 126192 - DNA, 1703 bp, Zea Mays
acctaggcgagctgccgagctattgctcggcgcctccatctcgtccacaccacacagccgttgagtccaattcgctcactcaccgtcaaacccacacctcaaactccttcccttcaagaatgtcagattatccactgcggcctcttcctcctcttcctccgcccctcccaccatgattgccacccatctctccccaggcctcaagcagtaccgcttcccgtccccgctccactccacctctcacaaccaccaccttcccgtgcacctcccgctcccccgccgccaccgcaacttcgctaagcccgccgcggccgtgcctgacctcctcgccagcgtcgagtccgtggcctccgcggcctccgtcctggccgccatcgtgctcgtccacgagtccgggcacttcctggccgcggcgtcccggggcatccacgtctcccagttctccatcggcttcggcccggcgctcgcccgcttccgcctcggccccgtggagtacgcgctccgcgccatcccgctgggcggctacgtaggcttccccgacgacgacccggagtccggcttcgcgcccgacgaccccgacctcctccgcaaccgccccgtcccggaccgcctgctcgtcgtctccgccggcgtcgccgccaacctcgccttcgccttcctcatcgtctacgcgcaggcgctcaccgtcggcgtccccgtgcaggcgcagctccccggggttctcgtgcccgaggttctcccgggctccgcggccgcgcgcgcgggcctcctccccggggacatcatcctcgctgtgcccggggccgcgccggacccgtccgtccccgtcctcgtcgacctcatcaaggccagccccagcagggaggtgcccctcaccgtctcgagagccgcgcccggggcggtggacaggcggtccgttgagctcaccgtcgtgccggacaccagcgccgatggctcggggcgcatcggcgtgcagctctcccccaacgtccgcgtcacgcgcgtgcgcccccagaacctggccgacgcgaccgtccttgccgtgcgcgagttcacgctcttgaccgggacggtgttcgacgggctcaggcagacattgctcaacttctctcagtccgccgacaaggtgtcaggccctgttgccatcattgcagtgggagcggaagtggccaggtccagcgcggatgggctgttccagtttgcggcggtgatcaatctcaacctcgcagccataaacttgttgcccttgccagcattggacggtggcaccttggcattgatccttcttgaggcagcccggggtgggcgcaagatcccccgagaagttgaacagggtattatgtcatcggggatactggtggtgctcatggttggcatgttcctcattgtacgtgacacactcaaccttgatttcatcaaggagatcttgtgatacttcgcgtgaaaaatcaattgattgcagttgtagtaaaattgccagtgtcagaacttggttggcttggaaatgtgtagttgttgtgattcattttgcctttgatgggactgctctagcactccaggtctctggtttcttgctatactgatcgtaggttattgtattgctggttttggaatgaagcttgtgatattatagttaatcatgaccgagataaaaaaaaagaatgctggattgttcaaatgtaaattactacttccactgcaca

SEQ ID NO: 126193 - DNA, 2298 bp, Zea Mays
atcccttccctcctccagagtccagaccccactcttcccgcccgcgcacgcgcagttggtgcgtcatgtccgtggctgcctgcctctgcctgccttccttcctccttggcctgctggcctagcttccccttcaccccaaaggcaccaaccagtggtggtggtggtggtggtggcagcagcagcagccccagccggcaggaggaggacctgcgcatcatcgggagcccgggaatctagagggtgagagtgggcgaggaacgaaaagccgcggcagatagagagacttgctctggacaaaagcgagagcgactgccgcgggagcaggaggaggagagaggccgggaccatcgcttggtgcctccttcaagttcttggggggctgactgcgatcatgagctctcggcgagtgaggagcagctagtagggccctgacgagcctccgacagcgctgaggcccagagagagccgcgctgcccctggggtcggtcgtcgagagagaaagagagatagagagaggggaacagagagtgattgggaaagagatcgatgaagatgagcttcaacaagagcagcggcagcaggggctgggggcagggagcggctgcaggaggaggaggagacgagctggtgctgcgaggctccatctccaagaagtggaccttcctcctctgcttcggcagcttctgcatcggcctgctcttcaccaacaggatgtggacggtgccggagccgaaggagatcatcagaaggtcgacgttggaggtggagaagatgagccttgtcgacggcgactgcgctccgaaaagcgccggcgatgcaagagacgttcccggagaggttccaagaactcaagatgtcatccagacgctggacaggacgatctcgaacctggagatggagctagcgtccgcgaaggcgacgcaggagtccatgctccacggcgccgccggcgccccggtgcccgagcccacggggaagcggaagcacttcatggtcgtcggcgtaaacaccgcgttcagcagccggaagaggagagactcggtccgcgcgacatggatgcctcaaggcgagaagaggaggacgatggaggaagagaagggcatcgtcattcggttcgtcatcggccacagcgcgactcccggcggcatacttgaccgagcgatcgacgcggaggacaggaagcacggggacttcatgaggctggaccacgtggaagggtacctggagctggcggcgaagaccaaggcgtacttcgtggcggccgtgtccacgtgggacgcggagtactacgtcaaggtagacgacgacgtgcatgtgaacatagcgactcttggaaacacgctggcgaggcaccgctccaagccgcgagcttacgttggctgcatgaaatctggccccgtgctagcccagaagggcgtgaggtaccacgagcctgagtactggaaattcggcgagtgggggaacaggtacttccgccacgcctccggtcagctgtacgccatctccaaggacctggcctcctacatagcactcaaccagcatgtcctgcacaaatacgctaacgaagacgtgtccctgggatcctggttcatcggactggacgtcgagcacgtcgacgaccgccgcctttgctgcggcacgccaccagattgcgagtggaaggcgcaggcggggaacgcgtgcgtcgcctccttcgactggagctgcagcggcatctgcaaatccgctgaccggatcaaggaggtccatcagcgctgcggcgagagcgagaacgcgatttggaatgcagagttttaggccccagataaatcgcacgcttttttacaaggaaagcacgtacatacatacgtacgtatacaaggggacaacaaaaaaaacagggctcaacagtgtgtgcctggctgccaccgaaggctcactctgctttgcaagtgcaggaccagactgaagggcttcagatcgagaggggcaatgtacacccaagtgtacatgcgttatggtagacacaaggggtgtatgttttttttttggggggggagggggggtgtttttggattaggaattggattattgtaaggggattttttctttttctattttggtgctcgaaaagatcccacgttttttttactgatataaagacaagctaggagaggatcatgatgaggaagagagagagtgaaaggagtgggagactgggcatctccccccaccattcttggcgagatcctcatcgatgttactggttggtttcaaataacatactgtaataaatttcttctccaaagtaactgaatt

SEQ ID NO: 126194 - DNA, 2308 bp, Zea Mays
atcccttccctcctccagagtccagaccccactcttcccgcccgcgcacgcgcagttggtgcgtcatgtccgtggctgcctgcctctgcctgccttccttcctccttggcctgctggcctagcttccccttcaccccaaaggcaccaaccagtggtggtggtggtggtggtggcagcagcagcagccccagccggcaggaggaggacctgcgcatcatcgggagcccgggaatctagagggtgagagtgggcgaggaacgaaaagccgcggcagatagagagacttgctctggacaaaagcgagagcgactgccgcgggagcaggaggaggagagaggccgggaccatcgcttggtgcctccttcaagttcttggggggctgactgcgatcatgagctctcggcgagtgaggagcagctagtagggccctgacgagcctccgacagcgctgaggcccagagagagccgcgctgcccctggggtcggtcgtcgagagagaaagagagatagagagaggggaacagagagtgattgggaaagagatcgatgaagatgagcttcaacaagagcagcggcagcaggggctgggggcagggagcggctgcaggaggaggaggagacgagctggtgctgcgaggctccatctccaagaagtggaccttcctcctctgcttcggcagcttctgcatcggcctgctcttcaccaacaggatgtggacggtgccggagccgaaggagatcatcagaaggtcgacgttggaggtggagaagatgagccttgtcgacggcgactgcgctccgaaaagcgccggcgatgcaagagacgttcccggagaggttccaagaactcaagatgtcatccagacgctggacaggacgatctcgaacctggagatggagctagcgtccgcgaaggcgacgcaggagtccatgctccacggcgccgccggcgccccggtgcccgagcccacggggaagcggaagcacttcatggtcgtcggcgtaaacaccgcgttcagcagccggaagaggagagactcggtccgcgcgacatggatgcctcaaggcgagaagaggaggacgatggaggaagagaagggcatcgtcattcggttcgtcatcggccacagcgcgactcccggcggcatacttgaccgagcgatcgacgcggaggacaggaagcacggggacttcatgaggctggaccacgtggaagggtacctggagctggcggcgaagaccaaggcgtacttcgtggcggccgtgtccacgtgggacgcggagtactacgtcaaggtagacgacgacgtgcatgtgaacatagcgcactgcagcgactcttggaaacacgctggcgaggcaccgctccaagccgcgagcttacgttggctgcatgaaatctggccccgtgctagcccagaagggcgtgaggtaccacgagcctgagtactggaaattcggcgagtgggggaacaggtacttccgccacgcctccggtcagctgtacgccatctccaaggacctggcctcctacatagcactcaaccagcatgtcctgcacaaatacgctaacgaagacgtgtccctgggatcctggttcatcggactggacgtcgagcacgtcgacgaccgccgcctttgctgcggcacgccaccagattgcgagtggaaggcgcaggcggggaacgcgtgcgtcgcctccttcgactggagctgcagcggcatctgcaaatccgctgaccggatcaaggaggtccatcagcgctgcggcgagagcgagaacgcgatttggaatgcagagttttaggccccagataaatcgcacgcttttttacaaggaaagcacgtacatacatacgtacgtatacaaggggacaacaaaaaaaacagggctcaacagtgtgtgcctggctgccaccgaaggctcactctgctttgcaagtgcaggaccagactgaagggcttcagatcgagaggggcaatgtacacccaagtgtacatgcgttatggtagacacaaggggtgtatgttttttttttggggggggagggggggtgtttttggattaggaattggattattgtaaggggattttttctttttctattttggtgctcgaaaagatcccacgttttttttactgatataaagacaagctaggagaggatcatgatgaggaagagagagagtgaaaggagtgggagactgggcatctccccccaccattcttggcgagatcctcatcgatgttactggttggtttcaaataacatactgtaataaatttcttctccaaagtaactgaatt

SEQ ID NO: 126195 - DNA, 1632 bp, Zea Mays
agctgtacttgttgacggtaaaaaggaccgtttgtttgatgcaggatgtggacggtgccggagccgaaggagatcatcagaaggtcgacgttggaggtggagaagatgagccttgtcgacggcgactgcgctccgaaaagcgccggcgatgcaagagacgttcccggagaggttccaagaactcaagatgtcatccagacgctggacaggacgatctcgaacctggagatggagctagcgtccgcgaaggcgacgcaggagtccatgctccacggcgccgccggcgccccggtgcccgagcccacggggaagcggaagcacttcatggtcgtcggcgtaaacaccgcgttcagcagccggaagaggagagactcggtccgcgcgacatggatgcctcaaggcgagaagaggaggacgatggaggaagagaagggcatcgtcattcggttcgtcatcggccacagcgcgactcccggcggcatacttgaccgagcgatcgacgcggaggacaggaagcacggggacttcatgaggctggaccacgtggaagggtacctggagctggcggcgaagaccaaggcgtacttcgtggcggccgtgtccacgtgggacgcggagtactacgtcaaggtagacgacgacgtgcatgtgaacatagcgactcttggaaacacgctggcgaggcaccgctccaagccgcgagcttacgttggctgcatgaaatctggccccgtgctagcccagaagggcgtgaggtaccacgagcctgagtactggaaattcggcgagtgggggaacaggtacttccgccacgcctccggtcagctgtacgccatctccaaggacctggcctcctacatagcactcaaccagcatgtcctgcacaaatacgctaacgaagacgtgtccctgggatcctggttcatcggactggacgtcgagcacgtcgacgaccgccgcctttgctgcggcacgccaccagattgcgagtggaaggcgcaggcggggaacgcgtgcgtcgcctccttcgactggagctgcagcggcatctgcaaatccgctgaccggatcaaggaggtccatcagcgctgcggcgagagcgagaacgcgatttggaatgcagagttttaggccccagataaatcgcacgcttttttacaaggaaagcacgtacatacatacgtacgtatacaaggggacaacaaaaaaaacagggctcaacagtgtgtgcctggctgccaccgaaggctcactctgctttgcaagtgcaggaccagactgaagggcttcagatcgagaggggcaatgtacacccaagtgtacatgcgttatggtagacacaaggggtgtatgttttttttttggggggggagggggggtgtttttggattaggaattggattattgtaaggggattttttctttttctattttggtgctcgaaaagatcccacgttttttttactgatataaagacaagctaggagaggatcatgatgaggaagagagagagtgaaaggagtgggagactgggcatctccccccaccattcttggcgagatcctcatcgatgttactggttggtttcaaataacatactgtaataaatttcttctccaaagtaactgaatt

SEQ ID NO: 126196 - DNA, 637 bp, Zea Mays
ccagcacacaccgccgagtccgcgtggctgctcagccagtactgctcacgccagcacaacagtgatcagccaacacttatcctcaactccaactcgttcagccggttcttcatccgtcgtccacaggcttcagacgtagctcgccagcttcgacctccgccctgcccttgaccccactcgcccgttcttgttcccgacgctcgagctcacctcagcttcgctgtgcccctgcgttcggcctcttccctccaccagcggacgtcctcggtctcgctttcctcgccgtggcaaggccccggccacgacgtcatccccctgtgagcctcattgctgtgtcgcttgcctgcaccctctttgttcgatgaaatggtcaagtcgataactattgctgttgctcacagctaagctagctgttgaagtcgtgcctcgcatacgcctattcgatgaaatgcccaaacgtcacgtccgctccttgtcccaacaccctgtcacaattccgtgcgttgccgtgtgtgtttcggaagagaggaatcccatatatgtgaggacaggcaatccgtgcaatagttgtttgatgtttggtgttatgcgcaaatcagaaatcgtcatcattatcccaaatatcgatttggtttgt

SEQ ID NO: 126197 - DNA, 411 bp, Zea Mays
cgcaacgtgcttgcttttgcaggtgtcgcggttggatgcgggtggcaatcgttcgtggcgtacgtgaacgtcgcgtgctactacggcgtcggcatccccctgggctgcgttctcggattctactttgatcttggtgccatggggatatggggtggaatgataggcgggttatttgctcaaacgctcattcttacctgcgtcacacttcgtgctgattggaataaagaggtagaacaagcgcgcatgaggctaaataaatgggaagacaaaaagaagccccttttgacataagatcaacaagttagttacatgcacgccttttcagatgggaagacaaaaacaagcggcctaattaatatgctctttttgaatgatgagattaatccgtatcggcttctactgcttctacaa

SEQ ID NO: 126198 - DNA, 230 bp, Zea Mays
tgatcttgaaggggattggattatagaagagaaaccaagaactgaaactacattgcttggagatagttcagcggagatccttgatgacgctcacatggtgatgtctgctgaacctttcaatgtgcctggttatttgaacttggaggtaggaaattcacgcacaatggatcatgttgagctaacaattttcgatgagaaactggccttggcttgaatgttgcaagtctttc

SEQ ID NO: 126199 - DNA, 1818 bp, Zea Mays
cccgccacctactgacctacccctccacttccctaccctactctcccccctccctctctcttccccgcctctcctctctcttcccgcagcggcagtcgacggcaaaaccctagatccctctccctcttaaaccctctacgagtgcgggaggatgtcggagccttccaaggtaatccacatccgcaacgtcgggcacgagattgccgagtctgatctccttcagctgctgcagccgttcggcgtggtctccaagatcgtcatgttgcgtgccaagaaccaagctcagactcttctgcagatggaagacatacatgcttccgtgagtgcgctgcaatattacacttccgttcaacctagcataaggggaaggaatgtttacatgcagttctcatctcaccaagagcttaccacagaccagagctcgcatggaaggaattctgatcaggagtctgaacccaaccgaatcctcttagttactatccaccacatgatctatcctataacggtggaggttctacatcaagtattcaaagcttatggatttgtggagaagattgtcacatttcaaaagtcagctggttttcaagctcttattcagtttcactcgcgccaagaagctgtggaagcatttggttctttgcatggaaggaacatatatgatggttgctgccagctagatattcaatattcaaatctcagtgaactgcaagtccattacaacaacgaccgatctagagatttcacaaatccatcattacctacagaacaacgccctagggcctctcagcaagcttatcctgatccagctaatctctatgccttccaacaagctggagatggggagggctgcaatgattgctgccgcatttggtggaactttacctcatggagtgactggtaccaatgaacggtgcacactcatagtcagtaatctgaataatgataaaattgatgaggataagctcttcaatctgttttccttgtacggaaacatagttcgtatcaaggtactgcgtaataaaccagatcatgctcttgttgagatggctgacgggttgcaggctgagctagctgtgcattatttgaagggggctatactatttgggaagaagctggaagttaactactcaaagtaccctaacattacacctgccccagatgcccacgactacttgaactcgagcctaaaccgattcaacagcaacatggtaaaaaactaccgacattgctgctctccaacaaagatgatccacatctctgccctcccccaagagatctctgaggaagcaatcctgaaccatttgtctgagcacggtactgttgtcaacaccaagctatttgaggtgaatggcaagaggcaggctctcgttttatttgagactgaagaggcagcgaccgaggccctcgtgtcaaagcatgccagcacacttgagggtaacacgatccggatctctttctcccagatgcagagtatataagccacctcaagggaaagctcatgtcgccctcgcttaccacccggcgagcactatttaggaagcatttcagactaagatgtgaatcctctgcgccattctccaagacatgctgtctgagctgtacctccccctgaccttcgggttttcttttcactctacactggccttgcaccaaaaggtttctgtgtttctttccaaatcctgttggctaggttatcaaaggacatttaccccttgtcgtgatattctgagttggaaggcctgttaattgtgtgaatcgtattatccttttgcctggacgctatttgccttgttttatatttttttcggtgtaattgtt

SEQ ID NO: 126200 - DNA, 1603 bp, Zea Mays
cccacgcgctccgcagtctcctctctcctcgggtggctagggttttgactcctagtcctaaaccagctcccacgccgccatgatgcagccgccgccgccacatcagcagcagcaatgggcaatggcgcccccgcccccgccgcagtactaccaggcggggcaccctccgccgccgcccccgcagttctaccaggcgggccctccgcctcccgctatgtggggccaaccgccaccgcaggcggcggcggcgccggcgccggccggcggcggggcgggggacgaggcgaggaccctctggatcggggacctgcagtactggatggatgagaactacctctatagctgcttctcccaggctggcgaggttatttccgtgaagataattcggaacaagcagactgggcaacctgagggttatggttttattgaattcagcaaccatgctgtagccgaacaagttctgcagaactataatggtcaaatgatgcccaatgttaatcaacctttcaaattgaattgggctaccagtggggctggtgagaaacgtggagacgatggttcagattatactatatttgttggggacttggcctcggatgttacagatttcattctacaagatacgttcaagagtcgttatccatcagttaagggtgcaaaagttgtctttgacagaactactggccgttcgaaaggctatggttttgtaaagtttgcagattcggatgaacagacacgggcaatgactgaaatgaatggacaatactgttctagcagggccatgcgccttggaccagcatccaacaagaagaatactggtggaccacaaccatcgagtgctatttaccagaacacccaaggaactgattctgatagcgatccgaacaatactactgtatttgttggcggccttgacccgagtgtgactgacgagcttctgaagcaaactttcagtccatatggagagcttctctatgtcaaaatacctgtaggaaagcgctgcggatttgtccaatattctaacagggcatcagctgaggaggccataagggtgctaaatggaagccagttgggaggtcagagcataaggctctcatggggccgtagccctgcaaacaagcagcctcagcaagagcagagccaatggagcggtggtggctattatgggtatccccaaggatacgatccatatggctatgctcggccccctcaagatcctgccatgtacgcctacgcagcatatccagggtatggaaattaccagcaacagccaccacagcagcccccgccacaacagtaatgatgtcccgagagtgatcatttgcaagctggtcgcaaagtagctggggggttggggcgcagcaactttggtgcgttggcatgagaaattttgcggcggttgcttgtgttgtgttgtattgttccgacgcccttgtacacgtagcctgtgttgtaactgaatttttgccgaggccttatgagtgactagtgtttcaactgtaactggattgcacatttttgtcgcaaggaatgtactattattgtgtggctcgtgccgctttgaacgctgagtcccggtattaatttttcttcatgctcttat

SEQ ID NO: 126201 - DNA, 739 bp, Zea Mays
agaaagccacgcgcgcaccgcaactggtcgacgacgactttctagtctctctcctcccgcctccgagtccgacccgtccgagaaaacaaaacaaaccaaaagaagaaaagaaaggcgacgacgagggagggaaggctcgccgcgagatctgggggagctcccattcccaggatgcacgacttctgcttcaccatcccctacgggttcgccgtgctggccggcggcgtgctgggctacctccgccgcggcagcaccgcctccctggcggggggcgccggcgccggcgcgctcctcctcctcgcgggcttcgtcagcctcaaggccttccagaagcgccgcaactcctacgtcgccctcgcgctcgagacgcacagtttgtgcattagccttaacttccgttatggggcaaagattcctcgagacttcgaagattatgccagctggtgccgttgctggtctcagtgccgtgatgtccgcattttatctgttcaaaattgcaacgggcggcaaccacatcccaccaccaaagaaagagtaaaccaggctttaacttgtaaattatgtttgattgatgtcgaagaagactacgagcgattgtgttgtctagttgcatggtaacttcagggactaacatcttcttccccatttgtaattcggctagaatgtaccatggtttgtgaacaatgtaaaagaaataaagatgtgattcacggaaatgaatatgatgtttactgaggca

SEQ ID NO: 126202 - DNA, 735 bp, Zea Mays
agaaagccacgcgcgcaccgcaactggtcgacgacgactttctagtctctctcctcccgcctccgagtccgacccgtccgagaaaacaaaacaaaccaaaagaagaaaagaaaggcgacgacgagggagggaaggctcgccgcgagatctgggggagctcccattcccaggatgcacgacttctgcttcaccatcccctacgggttcgccgtgctggccggcggcgtgctgggctacctccgccgcggcagcaccgcctccctggcggggggcgccggcgccggcgcgctcctcctcctcgcgggcttcgtcagcctcaaggccttccagaagcgccgcaactcctacgtcgccctcgcgctcgagacgctttgtgcattagccttaacttccgttatggggcaaagattcctcgagacttcgaagattatgccagctggtgccgttgctggtctcagtgccgtgatgtccgcattttatctgttcaaaattgcaacgggcggcaaccacatcccaccaccaaagaaagagtaaaccaggctttaacttgtaaattatgtttgattgatgtcgaagaagactacgagcgattgtgttgtctagttgcatggtaacttcagggactaacatcttcttccccatttgtaattcggctagaatgtaccatggtttgtgaacaatgtaaaagaaataaagatgtgattcacggaaatgaatatgatgtttactgaggca

SEQ ID NO: 126203 - DNA, 977 bp, Zea Mays
aacgaatgcatccacggaaggacggaccaaccacttgcattcgacagcatgcgcatgcgatctcgtcgggtactgaagtagcgtccacgcctcctgcccccgcaatcacttccacctccctgctctgctttgctgtttgcatcgcatcgcgtcgcctttgctgaatcccagcgacggacgggccgccacgggcactgtacggtgccgacgagcattgcttgctgctgcctcggccggcatggcgatggcggcgccggtggaggtcggcacgcagggcacggtgggctcgctggtgctccgggaggtcgagcacttccggaggatggaggtcgccggcggccacggcaagaagagcagcaaggtcgttgcagccggcggcgccagcccccggagcaacggcggcaagaagcccaggccgaagaagggcgccgcagtagtaggcaatgcgtcgtccttcttgccgaggatgtgctcgtcggcggaggtcgcggaggatcccgccggcagcggccggagggagcggccgtccagggtccggtaccggcctctcggcgacgacggggacggggacgccctgcctcagcaggactagctggtcacactcacagggcagggccgggcatgcaggaggatcgatattatgcagtgtcagatcagattcagatccggagagatctgtgccaatagggtactggatggatgatgtcttgccatttttttcatccgtttcttttgcttccgcttgttcagtgatgtttaggagtggtagatgtatgacgactgtggtttgactcgtatccaataataataataatatctattttgctagcaacattgaacattgacacagaattgcagcttcacaatctgcttacttcgaatgtgttgttccatctgcatcctctactgccgttctcgaatatttatcgtccactaatttatttttaaactaaaacgtaataaataaaaaacaaata

SEQ ID NO: 126204 - DNA, 401 bp, Zea Mays
gtatatatctgatccttgtattcatatttgtcaggtttctaactatccgtatcctaactcaaatccaattgaaatacacaaggataggatataggttgtccgttcgcatcagctcgttttcacccaatcacccctctaccatttttagcgatcaaagtttcaaaactgaagacaaccaatactgcgcgctctccaatatctaaaccagccctgcatgtgtatttggataaaacaaaggcagcaggatctctgacaacaaaatgacgagtggccccaaatgggcctagctaacccagagaggattggaatctcctgtaaactgatgcgaagaaactcgacccaaaacatctagacttattcttcataccaaaactcctacaaactgtactccacgaatccag

SEQ ID NO: 126205 - DNA, 3291 bp, Zea Mays
tcagtaattggcaatatggatatctccagttacttggctataggtggctggttcatccaggttatcttcgacaaatacttgtcctaccagctccggcaatgggcggccgactgtggcatcgagcatgagctggacaggcttcgtgttgctttgcttcgcacgcagtcagttctccatggtgccgagctggtacccgcactctcctacagctcccttccatggatgcgagagctccgagatgttatgtatgatgcagaggacctcctagacaagcttgagtacaaccgtctccaccatgaggtagaagaatcaagtgcaaacgagagcagtagcccaatcagtgccttcatgctctcccggtttcacagccaaggtgtcgctgcttctagccttgaaccatgttgggatagatcagcaagggtaaagaataagatggtaaatctgttggagcgtattgagcaggttacaagtggagtaagtgaagtactcagtctacccaggaacatcggaagcagcaatcgcaacgccatgacaagctcaataccctacgggagaatcaccgggcgggacttcgaagcccaacagctggtaactgctctgataagttctcaggtcgagaacccagtttctgttgtctctattgtttgttggtgtaggtggcataggtaagactgctctagcacagcatgtgtacagcaacgctagaataacagagagctttgatgtgaggatgtggatttgtgttacttctctcttggacgagttgagaatcacaaaagaaatgctggagtcagcttccagcagtcggtttaggcatggtggcatagcaaatttcaatagacttcaagtcgccttgaaggcaaggcttgcttcaaaacgtttcctccttgccttagatgacgtttggaacagtgacaacaaaacaatagcaatagaacaagagaactggcagaagctgctagcccctctgaaggacggagcaaaggggagcaagatacttttgacaactcggtcaagtatagtagcagagatgctacaatcatcctctataattaatctggagaccttgcaagttaatgattgttggtccctgataaagacttatgtgtttgatgagacaaaacataccatcgactcaaaactggagaacattggaaggaaaattgctgagacactcagtggccttcctcttgccgcaaaggtggtagctggacacctgaaacgtaacaacagtgtagatgagtggaaacaagtcttgcagagaaatgcagtatgggaggaaatcatgccaattctacgaacgagctatgacaatctaccaccacagctgaaacaatgctttgcatattgcagcatcttcccccagaaactgggaatttgaagctgagcagctgattctgctgtggttagcacaaggttttgtgcacccagatggttgcaggagattggaggacattgggaaagaatacataaatgatctatgtaataagtcattcttcacgatacagaagaaagaatttgtcagctattatgtgatgccacctgtaatttatgagctcgcaaaatcagtggcagctgaagaatgcttcagaataggaggtgatgaaaggacaagaatcccatcgtcagtgcgtcatctatcagtacatctagatagactttcagcacttgatgacacaatcccatacaagaatctacgcactctcattttccttactagcagaacagtggctccaattaatgtctccatccctccagtggctctcaataacataagaagcctccgtgtgttggatttatcctgtgcatgatgggacgatttcctgatagcatatcaaattgtgtgcatcttcgctacctaaatatctcatctactaccattgcaacagtaccagaattcttgtgcaaactctaccacctacaggttttgaatttatcaggttgtaggcttggaaaattgccttccagaatgaacaacttggtcaatctacggaatctcacagcagctaatcagattatttcagctataacagacattggcaggctgaaatgccttcagaggttgccaactttcaaggttaccagagagaaaacacaaagtatagttcagcttgggtacctactagaactccaaggatccctacagatcagaaaccttgagaatgtcgaagctccaattgaggcaaaggaagcaatgctttgcaagaaacgccagctctctgtgctgcagctaatgtgggcatctgatcgagatgaggtaaatggaaataaggaagaggatgtgctagaagctctccaaccgcacgaaaatctgaagagactagacatcgtgggttggatgggagtcaaatcccctaattggcttaaaaatgaatggttaagcaatcttgagcttattttcctaagtggctgaaatgcatgggagcagcttccaccacttggtcagcttccctccatccgaacaatctggttgcagcatttgaaaatgttgagacagataggcccagaggcatatggcagtggcagccaaatgaagccattccaatcactagaagagctggtgcttgatgacatgccagaactcaatgagtggttatggagtgaccagacaatgaggaatctacagaatgtcgtgatcaaggactgcaataagctaaaagcgctgcctccagtgcctcctaaccttacagagataacaaattaacaattgcaaggaaagggtattgggtgccataccaccatgatgtaaagttggcacatgtgaccactggcaggtccagtgtctcatctctttgcatattcaattgccccctgttacttgccagattatctgcacaaacaaacaatgaaataattgaaaggtttaggtcacttagaagcattatcactgatcaaatggcaatactaaggtgttcacttttaaaagaaaggcttgaactcattgagagcctagacatccaagattgctcagagatcacctccttcagtgcagacgacaatgatgccctcctacagctaaaatcactccagagcttatgtatatctggttccaacacactgcaatcacttccttccactctgtccagcatgcaatccctgcataagttggtcttatggaactgccctgcgttggaatcactggcagaggaaccactgcctctgtcagttaggaagattgaagttgcactctgtcacccactgctcaaggagaggctcgtaaaagaatatggagttgactggccaaagattgcacacatcccttggattgaaatagatggtgaaattttgcag

SEQ ID NO: 126206 - DNA, 213 bp, Zea Mays
atgacgccgaggacgccgagagagaccttggcggcgtccaggtccgggtcagcggcggtgagcacgcgcaccttggcgtagccctcggcggcggccgccggcgtgacgatgcgcatcccgacgacgtactcgtgcacggcgctgccgttgccccagagcgagctgccgtgcgcgcccgtgccgagcatgccgccgacggtgagcccccaccag

SEQ ID NO: 126207 - DNA, 1352 bp, Zea Mays
catttttttaatgacatttacttcttcagtttaggagtacgtcgcctctcatcccggctctcgcctctcgctccccagccatccatggcgatgccaccgagccgttcgtgggcggagctgcagcacgacctcctggtgtcgatcatgacccgcgtgggcgcgccggacctcctctggggcggcgcttcccgcgcctgctcttcgtggcgggccgcggcgcgggacccactcgcgtggcgacgcgtcgacctccgcgactgggtcgccctcacctccggccggcgcgccgcgagacctggacactccagctctcgcgtatccgtccacgccgcgctcgtcggcatcctggaggtcgccgccaagttggccgaagggcggatcgaggccgtgttgctccccgagtttgctgatgaggaccatctcttgttcctcgctgagaggtgcccaaacctgcactatttcagccttcctagcacctgtatgacttacgatcagttctgcaaggcgataggtggacttcaatcgcttaaaggcatggcagtggacgagagtctgattaattatgatgtcctcctgcatgtgcaccagtgctgcccagactttgtggagctgaaggtgtctgcactgtacgtggatgaagagatggcctcagtcatctgcaactctcttcctcgtctgaagaagttggagataccaagttgtgacatgtcttccgctgcgattataaggttccttgattgcctagagcagctcgagcacctggacatctcaggttacgagacatcagccatctcaagcccggttcttgagaaagcttcgcggctcaaggtcttcctctggaactcgaaatttgagcttggggagttcatggactgctccaattgtggagaacacaacattaaccctcaagaaccctgcaagtgcatgatggagcacaaggtcatggactggctggctggaccttcataagcttcctgaaccaaaggcgtctcttcttgtgtcttgttaaatcatgacgttttcctggctgtaaaattccaacctctgtcaaagttggtgtctgagctgtatgcacaaggaaatatgctacttcaaatgtttagcgcgccttagagaggtctgcaaccttttaatgtaacaaattgttgtatcaagtgttaatggaacctcttctttacaccaatgagccgatacgaaacatctgtgcctattttgaagcgatttcacctcggagtcaaaccttgttgtgtggtgagtttttgcttcggctatgcgaagattaatccatttctttttttagaggacaggaggggggcctactgaaaattttatttaaattaaaaagaaaacaa

SEQ ID NO: 126208 - DNA, 959 bp, Zea Mays
tcatccacaactcgtcatcgctcatcacagataaatcctttccccctccatttcatttcagcgtcgcgaaaaatggtagtcgttgatccgaaagccgtcgcctcggcgcaccagttcaccgtggtcatcgacggcgtcgagacgaccgtccacgagggcgtgctccggcgcaacggcggcacggtggccgtggtcggcccgggcgtcctcgaggtgagccgtctccagcacgtggtggtgcgcggcgggggcgggggcgacgtgcgcttctcccggtgcctgtacgcggccgccgaggactgcggcgcggcgtcgttccaccggtgcgacgcggtgcgcgtggagggcgcccgcgccgtggccgtgcgccggtgccgctcggccgacgtggagcgcgcgggcgccgtggccatccgccgctgcaagggcgccgcgcgcgtccgcggcgccggggagctgcgcgtgggccggtgccgggaggccgacgtcggcgcgtgcgccgacgtcgccgtggcccgctgccgcgccgcgcgcgccgactggtgcggcgcgctcgccctcggcaggtgcggttccgccgacgtcagccgctgcggcgccgtgcgcgtcgaccggtgccgcgacgccaccgtggccgggtgcggcaccgtcgccgtgcgccgcggcaaggtcagcatggtggaactggaccagcagatgccgccggatttccaggatcagaccccgatgtgtcagcagggtggacctgtcctcgcgacgccggtggcagtcgtggccaagtgaaaggagcgagatgcatacttcgccccgtcgtatcgtacgaccgatagtcgcattcgtatttacgcgcaaagtatacattaatatttgtaatattattgtgtatatatgtggagacaaatccttgttcgattagtctcggtattgttctaatatatgttattgtactagtaatttct

SEQ ID NO: 126209 - DNA, 2392 bp, Zea Mays
atggtggatggcccttttgtcattttcagattgtcggacaacgcttatctccttgtaggtgaagtgttgaaaaagattgtggctctggcccctttcttctgttgccatttcataaatgagcttgcacgatcaatgcaaagcttgacactttgtgcaatgaaggagcttcgtttgtacgagaattctgaaaaggctcttcttagttctacatcagccaatggaactgcgattcttagagttgtgcaggctttgagttctcttgtcagtactcttcaagatagaaaggatccagaacagcctgctgagaaggaccattcagatgcagtttcccagatttctgaaattaacacagcattggatgctttgtggttggaattgagcaactgcataagcaaaatagaaagctcttcagagtatgcatcaaatctaactcctgcttctgcaagtgcagctacattaacagcaggagtagcacctccattgcctgcaggaacgcaaaataggcgtactcaaggcttgctggggcgcagcgggattcgcaggcggggcgcagcgggatttggcatcggtgatggcgcagaggtggctagggcgaatttgccggaggtgacaggcgcagcgggatttgcaggcggggcgcagcgggatttggcggcggcgacgcagagctgcgccagctcaccgatttatggcgatggcgcgttcgcgtctacggtctatccatctccaaaacgatgggcagctgacctacccaaccaccaagagctgaagagcaaattcctgtcccgcacatctgctcgccgcccagcgaacctgatggcgctcgtcgacgcgaaggccgccggcgcgtccacctccaccgtggccgctgcgcccacggtggagcacctgttgttcctcgtcgtcctcgacggcgtcgagacgcccatccacgaggggacgctgtacggaagcgccgggggcacagtcaccgtcaccggccctggccagctctccgccgacggcctcgagagcgtcctggtgcgcggcggcgggaccggggccggcgccgtgcggttcacgctctgcgccgacgcggccgccgagggcgtcggcgctgcgtgcttcgagcggtgcggcgcggcccgcgtggagggcgcgcgcgaggtgtccgtgtcctcgtgccgcgccgtggaagtggagcgcgcgggcagggtcaccctcgaccgctgccgcgacgcgcggctccggggcgggggcgcgctccgcgccacgcggtgccggcgcgctgacgtcgagagcttcggcggggtgcgcctggcgcggtgcaaggccgcgcgcgccgactggtgcggcaccgtcgaggtcgagctgtgcagggccgtcgacgtccgccgctgcggagctgtcaccggagagcggtgccgcgtcgtgaacgctgcagggtgcggcagcgtcgaggtggcgcgggccgtgatcaacatggtggaggaagagcagccgtacccagcagcccatccccagcagcactgcctcgtcgtctcgcatattggcgttggcatcaccgtcggcattgtgcccattaccatgccgccgctgcccgcggccgacgatttactcattctcgagttcatcgcgagcaaccgccgtatcccccacgccgtgttcaactccttcatcgcctcccaatccccaccctccgccttctcccgcacctcacagcgcctccgaaaagccctagtgctccgcgccctcgacgccgccctctacaccgtgggcgcctcctgctcctccagcctcctcctccacaaggcgcgaaaggtcctcgccgaccccgacgcagccgcctgcttcccccaccagattccttttacagaaaatgaagaaaacgatgaggctagggctgcggtggccgatctcaagcgcctcctcgaccttgagtgggccaacctcccgccctccacgctcgagctcgtcgccggggacgggtcccaccagactggtgccgctgccgaccacaccatgcgtacaaagcttcgcctgttcggtacctctattcacaaagctagcctagtccatatcctatttggttttgtttttgcttttgaaacaattgtcctgtttaccttttccaatgttgttgcttactgaaattaatgaatggatgaatgatgagattgtggttactccatttgccgtaggggagtcagcgaagcgtgaaattttagctaagcctgtgcaggttggatccgcttctcatcaatcaattcggacgcaagttgctgataacgcgagcaatgccaataaagctgatggcgcccggcgagatgaggcacatccttctaattctaatgtaaactatgaggctgatagtgatcgtgaaagtatggttgggcaccaaaatgcatcggtt

SEQ ID NO: 126210 - DNA, 3082 bp, Zea Mays
atggtggatggcccttttgtcattttcagattgtcggacaacgcttatctccttgtaggtgaagtgttgaaaaagattgtggctctggcccctttcttctgttgccatttcataaatgagcttgcacgatcaatgcaaagcttgacactttgtgcaatgaaggagcttcgtttgtacgagaattctgaaaaggctcttcttagttctacatcagccaatggaactgcgattcttagagttgtgcaggctttgagttctcttgtcagtactcttcaagatagaaaggatccagaacagcctgctgagaaggaccattcagatgcagtttcccagatttctgaaattaacacagcattggatgctttgtggttggaattgagcaactgcataagcaaaatagaaagctcttcagagtatgcatcaaatctaactcctgcttctgcaagtgcagctacattaacagcaggagtagcacctccattgcctgcaggaacgcaaaataggcgtactcaaggcttgctggggcgcagcgggattcgcaggcggggcgcagcgggatttggcatcggtgatggcgcagaggtggctagggcgaatttgccggaggtgacaggcgcagcgggatttgcaggcggggcgcagcgggatttggcggcggcgacgcagagctgcgccagctcaccgatttatggcgatggcgcgttcgcgtctacggtctatccatctccaaaacgatgggcagctgacctacccaaccaccaagagctgaagagcaaattcctgtcccgcacatctgctcgccgcccagcgaacctgatggcgctcgtcgacgcgaaggccgccggcgcgtccacctccaccgtggccgctgcgcccacggtggagcacctgttgttcctcgtcgtcctcgacggcgtcgagacgcccatccacgaggggacgctgtacggaagcgccgggggcacagtcaccgtcaccggccctggccagctctccgccgacggcctcgagagcgtcctggtgcgcggcggcgggaccggggccggcgccgtgcggttcacgctctgcgccgacgcggccgccgagggcgtcggcgctgcgtgcttcgagcggtgcggcgcggcccgcgtggagggcgcgcgcgaggtgtccgtgtcctcgtgccgcgccgtggaagtggagcgcgcgggcagggtcaccctcgaccgctgccgcgacgcgcggctccggggcgggggcgcgctccgcgccacgcggtgccggcgcgctgacgtcgagagcttcggcggggtgcgcctggcgcggtgcaaggccgcgcgcgccgactggtgcggcaccgtcgaggtcgagctgtgcagggccgtcgacgtccgccgctgcggagctgtcaccggagagcggtgccgcgtcgtgaacgctgcagggtgcggcagcgtcgaggtggcgcgggccgtgatcaacatggtggaggaagagcagccgtacccagcagcccatccccagcagcactgcctcgtcgtctcgcatattggcgttggcatcaccgtcggcattgtgcccattaccatgccgccgctgcccgcggccgacgatttactcattctcgagttcatcgcgagcaaccgccgtatcccccacgccgtgttcaactccttcatcgcctcccaatccccaccctccgccttctcccgcacctcacagcgcctccgaaaagccctagtgctccgcgccctcgacgccgccctctacaccgtgggcgcctcctgctcctccagcctcctcctccacaaggcgcgaaaggtcctcgccgaccccgacgcagccgcctgcttcccccaccagattccttttacagaaaatgaagaaaacgatgaggctagggctgcggtggccgatctcaagcgcctcctcgaccttgagtgggccaacctcccgccctccacgctcgagctcgtcgccggggacgggtcccaccagactggtgccgctgccgaccacaccatgcgtacaaagcttcgcctgttcggggagtcagcgaagcgtgaaattttagctaagcctgtgcaggttggatccgcttctcatcaatcaattcggacgcaagttgctgataacgcgagcaatgccaataaagctgatggcgcccggcgagatgaggcacatccttctaattctaatgtaaactatgaggctgatagtgatcgtgaaagtatggttgggcaccaaaatgcatcggttaaaggagcagagggtcaactttcagagaagtctgtctttacttctaaaaagcgcgttcttgtggagagaattccgaagtgggatagctctgatgatgatcagccagtgcggaagcgcaagttagatccatttgagagaaaaccatatccttctcctacatgtgcatataagatcagaaagaaatggagtaagatagagatagaaaccttgctggaaggggtggacaagtatggcataggcaactggaaagatatcaaattagcttaccctggtgtctttgaggagagatcaacggtagatctgaaggacaagtttagaaatttgggaaagcgccaccatgaatcgtcttgaggcttagtggcgctgtgcttttgctctgccctggagatattttatgttgatggcagtggtatgcaaaagaaggcctatgtaaggtgcatggagacatttgggtttcgtgccaaggatattgttgacttgttgagtgcactgttcttaaggcgtcgcttagacgtccaggcggaggtccaacgcctagccgccttgcccgcctaccgtacctaggcgatggtccaacgccttgtatcgtcttaccgctttaaaaaacatcgttgatggttgagtgtttaaagataagtaactggaaccccacatgatggcatgttgtcacgggcgtgcacaactcgagcacccatctggctcagaaaagcaccatgggaagatagaactctggcattggtggaatctgatgcaatggtcattgtaattctgaattgaaaattttgaaccagtgacacactaattgttcaagaagctcaatatcgtttgctccaggagtcagaag

SEQ ID NO: 126211 - DNA, 3073 bp, Zea Mays
atggtggatggcccttttgtcattttcagattgtcggacaacgcttatctccttgtaggtgaagtgttgaaaaagattgtggctctggcccctttcttctgttgccatttcataaatgagcttgcacgatcaatgcaaagcttgacactttgtgcaatgaaggagcttcgtttgtacgagaattctgaaaaggctcttcttagttctacatcagccaatggaactgcgattcttagagttgtgcaggctttgagttctcttgtcagtactcttcaagatagaaaggatccagaacagcctgctgagaaggaccattcagatgcagtttcccagatttctgaaattaacacagcattggatgctttgtggttggaattgagcaactgcataagcaaaatagaaagctcttcagagtatgcatcaaatctaactcctgcttctgcaagtgcagctacattaacagcaggagtagcacctccattgcctgcaggaacgcaaaataggcgtactcaaggcttgctggggcgcagcgggattcgcaggcggggcgcagcgggatttggcatcggtgatggcgcagaggtggctagggcgaatttgccggaggtgacaggcgcagcgggatttgcaggcggggcgcagcgggatttggcggcggcgacgcagagctgcgccagctcaccgatttatggcgatggcgcgttcgcgtctacggtctatccatctccaaaacgatgggcagctgacctacccaaccaccaagagctgaagagcaaattcctgtcccgcacatctgctcgccgcccagcgaacctgatggcgctcgtcgacgcgaaggccgccggcgcgtccacctccaccgtggccgctgcgcccacggtggagcacctgttgttcctcgtcgtcctcgacggcgtcgagacgcccatccacgaggggacgctgtacggaagcgccgggggcacagtcaccgtcaccggccctggccagctctccgccgacggcctcgagagcgtcctggtgcgcggcggcgggaccggggccggcgccgtgcggttcacgctctgcgccgacgcggccgccgagggcgtcggcgctgcgtgcttcgagcggtgcggcgcggcccgcgtggagggcgcgcgcgaggtgtccgtgtcctcgtgccgcgccgtggaagtggagcgcgcgggcagggtcaccctcgaccgctgccgcgacgcgcggctccggggcgggggcgcgctccgcgccacgcggtgccggcgcgctgacgtcgagagcttcggcggggtgcgcctggcgcggtgcaaggccgcgcgcgccgactggtgcggcaccgtcgaggtcgagctgtgcagggccgtcgacgtccgccgctgcggagctgtcaccggagagcggtgccgcgtcgtgaacgctgcagggtgcggcagcgtcgaggtggcgcgggccgtgatcaacatggtggaggaagagcagccgtacccagcagcccatccccagcagcactgcctcgtcgtctcgcatattggcgttggcatcaccgtcggcattgtgcccattaccatgccgccgctgcccgcggccgacgatttactcattctcgagttcatcgcgagcaaccgccgtatcccccacgccgtgttcaactccttcatcgcctcccaatccccaccctccgccttctcccgcacctcacagcgcctccgaaaagccctagtgctccgcgccctcgacgccgccctctacaccgtgggcgcctcctgctcctccagcctcctcctccacaaggcgcgaaaggtcctcgccgaccccgacgcagccgcctgcttcccccaccagattccttttacagaaaatgaagaaaacgatgaggctagggctgcggtggccgatctcaagcgcctcctcgaccttgagtgggccaacctcccgccctccacgctcgagctcgtcgccggggacgggtcccaccagactggtgccgctgccgaccacaccatgcgtacaaagcttcgcctgttcgcgaagcgtgaaattttagctaagcctgtgcaggttggatccgcttctcatcaatcaattcggacgcaagttgctgataacgcgagcaatgccaataaagctgatggcgcccggcgagatgaggcacatccttctaattctaatgtaaactatgaggctgatagtgatcgtgaaagtatggttgggcaccaaaatgcatcggttaaaggagcagagggtcaactttcagagaagtctgtctttacttctaaaaagcgcgttcttgtggagagaattccgaagtgggatagctctgatgatgatcagccagtgcggaagcgcaagttagatccatttgagagaaaaccatatccttctcctacatgtgcatataagatcagaaagaaatggagtaagatagagatagaaaccttgctggaaggggtggacaagtatggcataggcaactggaaagatatcaaattagcttaccctggtgtctttgaggagagatcaacggtagatctgaaggacaagtttagaaatttgggaaagcgccaccatgaatcgtcttgaggcttagtggcgctgtgcttttgctctgccctggagatattttatgttgatggcagtggtatgcaaaagaaggcctatgtaaggtgcatggagacatttgggtttcgtgccaaggatattgttgacttgttgagtgcactgttcttaaggcgtcgcttagacgtccaggcggaggtccaacgcctagccgccttgcccgcctaccgtacctaggcgatggtccaacgccttgtatcgtcttaccgctttaaaaaacatcgttgatggttgagtgtttaaagataagtaactggaaccccacatgatggcatgttgtcacgggcgtgcacaactcgagcacccatctggctcagaaaagcaccatgggaagatagaactctggcattggtggaatctgatgcaatggtcattgtaattctgaattgaaaattttgaaccagtgacacactaattgttcaagaagctcaatatcgtttgctccaggagtcagaag

SEQ ID NO: 126212 - DNA, 3041 bp, Zea Mays
atggtggatggcccttttgtcattttcagattgtcggacaacgcttatctccttgtaggtgaagtgttgaaaaagattgtggctctggcccctttcttctgttgccatttcataaatgagcttgcacgatcaatgcaaagcttgacactttgtgcaatgaaggagcttcgtttgtacgagaattctgaaaaggctcttcttagttctacatcagccaatggaactgcgattcttagagttgtgcaggctttgagttctcttgtcagtactcttcaagatagaaaggatccagaacagcctgctgagaaggaccattcagatgcagtttcccagatttctgaaattaacacagcattggatgctttgtggttggaattgagcaactgcataagcaaaatagaaagctcttcagagtatgcatcaaatctaactcctgcttctgcaagtgcagctacattaacagcaggagtagcacctccattgcctgcaggaacgcaaaataggcgtactcaaggcttgctggggcgcagcgggattcgcaggcggggcgcagcgggatttggcatcggtgatggcgcagaggtggctagggcgaatttgccggaggtgacaggcgcagcgggatttgcaggcggggcgcagcgggatttggcggcggcgacgcagagctgcgccagctcaccgatttatggcgatggcgcgttcgcgtctacggtctatccatctccaaaacgatgggcagctgacctacccaaccaccaagagctgaagagcaaattcctgtcccgcacatctgctcgccgcccagcgaacctgatggcgctcgtcgacgcgaaggccgccggcgcgtccacctccaccgtggccgctgcgcccacggtggagcacctgttgttcctcgtcgtcctcgacggcgtcgagacgcccatccacgaggggacgctgtacggaagcgccgggggcacagtcaccgtcaccggccctggccagctctccgccgacggcctcgagagcgtcctggtgcgcggcggcgggaccggggccggcgccgtgcggttcacgctctgcgccgacgcggccgccgagggcgtcggcgctgcgtgcttcgagcggtgcggcgcggcccgcgtggagggcgcgcgcgaggtgtccgtgtcctcgtgccgcgccgtggaagtggagcgcgcgggcagggtcaccctcgaccgctgccgcgacgcgcggctccggggcgggggcgcgctccgcgccacgcggtgccggcgcgctgacgtcgagagcttcggcggggtgcgcctggcgcggtgcaaggccgcgcgcgccgactggtgcggcaccgtcgaggtcgagctgtgcagggccgtcgacgtccgccgctgcggagctgtcaccggagagcggtgccgcgtcgtgaacgctgcagggtgcggcagcgtcgaggtggcgcgggccgtgatcaacatggtggaggaagagcagccgtacccagcagcccatccccagcagcactgcctcgtcgtctcgcatattggcgttggcatcaccgtcggcattgtgcccattaccatgccgccgctgcccgcggccgacgatttactcattctcgagttcatcgcgagcaaccgccgtatcccccacgccgtgttcaactccttcatcgcctcccaatccccaccctccgccttctcccgcacctcacagcgcctccgaaaagccctagtgctccgcgccctcgacgccgccctctacaccgtgggcgcctcctgctcctccagcctcctcctccacaaggcgcgaaaggtcctcgccgaccccgacgcagccgcctgcttcccccaccagattccttttacagaaaatgaagaaaacgatgaggctagggctgcggtggccgatctcaagcgcctcctcgaccttgagtgggccaacctcccgccctccacgctcgagctcgtcgccggggacgggtcccaccagactggtgccgctgccgaccacaccatgcgtacaaagcttcgcctgttcggttggatccgcttctcatcaatcaattcggacgcaagttgctgataacgcgagcaatgccaataaagctgatggcgcccggcgagatgaggcacatccttctaattctaatgtaaactatgaggctgatagtgatcgtgaaagtatggttgggcaccaaaatgcatcggttaaaggagcagagggtcaactttcagagaagtctgtctttacttctaaaaagcgcgttcttgtggagagaattccgaagtgggatagctctgatgatgatcagccagtgcggaagcgcaagttagatccatttgagagaaaaccatatccttctcctacatgtgcatataagatcagaaagaaatggagtaagatagagatagaaaccttgctggaaggggtggacaagtatggcataggcaactggaaagatatcaaattagcttaccctggtgtctttgaggagagatcaacggtagatctgaaggacaagtttagaaatttgggaaagcgccaccatgaatcgtcttgaggcttagtggcgctgtgcttttgctctgccctggagatattttatgttgatggcagtggtatgcaaaagaaggcctatgtaaggtgcatggagacatttgggtttcgtgccaaggatattgttgacttgttgagtgcactgttcttaaggcgtcgcttagacgtccaggcggaggtccaacgcctagccgccttgcccgcctaccgtacctaggcgatggtccaacgccttgtatcgtcttaccgctttaaaaaacatcgttgatggttgagtgtttaaagataagtaactggaaccccacatgatggcatgttgtcacgggcgtgcacaactcgagcacccatctggctcagaaaagcaccatgggaagatagaactctggcattggtggaatctgatgcaatggtcattgtaattctgaattgaaaattttgaaccagtgacacactaattgttcaagaagctcaatatcgtttgctccaggagtcagaag

SEQ ID NO: 126213 - DNA, 1472 bp, Zea Mays
ctcgcctgtagctcgccggagatccatgcctttgtgagctcgagtggagagaaaaaaaaaggagcagcgaagagcgaacgaccgagatgctggagaagctgtgggacgacgtggtggccgggcctcgcccggagacgggcctcgagaagctccgcaaggccaccaccgcccgcccgctcgtcgtcgtcgacaaaggatatatgtatatcctcggtcgaccccgtattgatggaaccagctgtgcactagatacctactggatagatgtgttctgcaccggtgcgtctaacagagttaatgaagacgcggccaaacttgaatggcagacaacgagcagctccggtgaaggcagcggggaggaagatagttctagtgatgacaatccttttcctcctatatctccaaggaagaaaaaaacttcagatgagcttgatgccgactatattcccaacgatgaagagttgaaagaaggtgcagttatgtacgtaacaaaactcaatgcagatgagtttcctgaagaaccacttgacgtggttacaaagtttcgaaattcctgcgagtctattgttagagatatagtgtcaatcacacttcagaaatggaaggatttagatgaagacacccgcaataagctatgggctaagatgttcgagtcattcaaggtcccaaaaggcatagaggatgcagtaaggaagtcgatgctctctgctatggccaagatgtttcgtgggtggaagaccgagatgaatagggattttgttaagaagaatagggttcttccgcctaagaaaatggggaaaatcaatcaagctcagtgggaggaatttgttcgtcagaagaccgaactgaagaccaaagaacttggcaaaactaattctcagagagcgaagatgaacaaacacccccatcgcctggggtcaaccggatatcaccataaagttgtgcagtggaacaggataatcgaggaagctatagctaacggcactttggacccaatattaaaagatatcgatgagcgagctattcgttggatcttagatctggcaggtttgaccgaggacggcaaacttttgcatccagaattggtaggcaaagtttcgacaaaaaatcaagaatatgcagaaaagagaaagaagggcgaatttaagcctcggagggagaatgacatactaatcgcggcactaggcaattctgaacacactggacaggctcggggaatcttttctaagattacctggagagagtctcttcaagtgtccttttcgacttctcgtgtttcctatatgacgccgcatactctggaaacgcctctctccaggtataggaggaaaaggattgtcatcactagaactatcctcctccccgctgccttcaccggagctgctcgttgtctgccattcaagtttgaccgcgtcttcattaactctgttagacgcaccggtgcagaacacatccatccagtaggtatctag

SEQ ID NO: 126214 - DNA, 3097 bp, Zea Mays
ccaaaattgccgccgtcgcctccgtgtccttccacggcagggacccgccggagcatcaccgcctccgtccatgtcgctcaaccgcctcaaggaaaccctccacgcctgttcctcttcctcctccgaaccacggacccaaccgcgctcaccacagcatcctgcccgccttccgcggagacccccaaagacgtccctttcgcagcagctcctccgcctcgaggccgccgcctcttcatcctccttcttctcctccaggcccttacagctcccacccgcccccaggcccccgatcgagaagccgcgggaggatgtcgaaccgccgtcgtcggaggatgaggacgagagaaaaagtcgccccattatccgccgctgcctgcatccgccaccagcggccgccctcgagtcccgcgggccatacgagccacttgtgctctcgctgcctggagagcaccctgtcgtccaggtgcccccatcaataaattgcaggctacttgcgcatcagagggacggtgtgagattcttatacaatttgtatagaaacaatcatggcggtgttcttggagatgacatgggtttggggaagaccattcaaactattgcttttttgtcttctgttattggaaaaggcaatggccatgggcaatcaacaaacaaaggaaagatgactggtcctgtactcatcctctgccctacttcggtgatccggaactgggaaaatgaattttccgagtgggcagaattctctgttgctgtctatcatggtccaaatcgtgatttagttcttggaaaaattgaaaatcaaggactggaggtactcattaccagttttgacactttcagaattcatgataaggttttatgtggtatctcgtgggaacttgtggttgttgatgaggcacatcgtctcaagaatgaaaagtccaagttatatacagcatgcttggggataacaactcaaaagcggtttggtctcacggggaccataatgcagaataagatcatggaattatttaatctatttgactgggtcgtgcctggctgcttaggggaccgagaacactttcgagcttattatgatgagcctctaaaacagggtcagaggctaagtgctcctgagagatttgttcaagttgctgatgcgcgcaagaagcaccttgtttccattcttagggaattcttattgagaaggacaaaagaggagacaattggacatcttatgcttgggaaggaggataatattgttttctgcaaaatgagtgacgttcaaaaacgtgtttatagaagaatgctgcaacaacctgatatacaaatccttattaataaggatgtccgctgtagctgtggaagtcctttacctcaggttgaatgttgcaagagaactgaaccagatggtgttatatggtcttatcttcacagagagaaccctgaaggctgttctatatgccccttctgtcttgttcttcctttcctcgtcaagcttcagcagattagcaaccatctggagctgataaaacctaatccaaaggatgagcttgaaaagcagaagaaagatgctgaacttgcagctgctgtctttggtgcagatattgacttagttggtggtactgctaaaagtgagaacttcatgggtctcagtgatgctgagaactgtggaaagatgcgagcactagaaaggcttctgtcattatggactggacagggtgacaagattcttcttttcagttattctgtcaggatgcttgacatactagagaagtttctcataaggaagggttattgcttttcacgcttcgatggaacaactccgatgaatgcacgccaatcactagtggatgagttcaacagaagccctagcaaacaggttttccttatatctactcgagcaggtaatttaggtgtaaaccttgttagtgctaaccgcgtggtgatatttgatccaagttggaaccctgcccaagacttgcaagcacaagacagatcatttcggtatggacagagacggcatgttacagtatttcgcctacttggtgccggttcacttgaagagctcatttattctaggcaaatatataaacagcagctttccaacattgcagtctctggaaaaatagagaggcgttactttgaaggatgacaagaaatttcaaggtgagctctttgggatctgcaatcttttccgtgacttgtccgataagctttttactagtgagattattgagatgcatggagaacatggcaagagtagtgcaacagaagcaacagggataagagaaatagtcgatactgatttatttggttcacaagagaataggaagtcttccacagcaacaacacatacggatgatcagaaattggttgattttgggatagtttatgcccaccgcaacgaggatgtcgtgaacatgaggacagacggaagagagaaaggtggagcagacgagactgtccagagctccttagaggagctgcttagtaagaatgaaacaaagcacactgccatggaaaaatcttattcatcggaggagaaaagggaagtggcaagatcttattcactggagcagaaaaagaaagagtttagctgcatcgcatccttcatgggtatggatgaccttgaatttagcaagtggttgctatcagcctcaccgcaccagcggtctgaagtgctgcaggactacaggaggaagaagaaaaatcagaaatgatgatgcaggtcctcggagctaaccggctaccgcaaagctttgacgtagtgattagcttgtgtagctaattgtggtagttatgacaagggaatggtagtaaaattgacccgtggcaccgatcagtatgtatgtctgcagccccgcttattttgaaccttatattggtgcaaactgagctcagcaaggccttggtcactctccctggccgttttttttcggtcaggtgaaatataatctgtattgtgtctgttagttcctgttcagctgtctaagcctttgtgtagcgagtcttatcatgttaggtggcttgcaatgttaccttggtctgtactaatcatttggatatcgtagtcttctccgtactaaaatataattcgttttagattaaatataca

SEQ ID NO: 126215 - DNA, 3025 bp, Zea Mays
ccaaaattgccgccgtcgcctccgtgtccttccacggcagggacccgccggagcatcaccgcctccgtccatgtcgctcaaccgcctcaaggaaaccctccacgcctgttcctcttcctcctccgaaccacggacccaaccgcgctcaccacagcatcctgcccgccttccgcggagacccccaaagacgtccctttcgcagcagctcctccgcctcgaggccgccgcctcttcatcctccttcttctcctccaggcccttacagctcccacccgcccccaggcccccgatcgagaagccgcgggaggatgtcgaaccgccgtcgtcggaggatgaggacgagagaaaaagtcgccccattatccgccgctgcctgcatccgccaccagcggccgccctcgagtcccgcgggccatacgagccacttgtgctctcgctgcctggagagcaccctgtcgtccaggtgcccccatcaataaattgcaggctacttgcgcatcagagggacggtgtgagattcttatacaatttgtatagaaacaatcatggcggtgttcttggagatgacatgggtttggggaagaccattcaaactattgcttttttgtcttctgttattggaaaaggcaatggccatgggcaatcaacaaacaaaggaaagatgactggtcctgtactcatcctctgccctacttcggtgatccggaactgggaaaatgaattttccgagtgggcagaattctctgttgctgtctatcatggtccaaatcgtgatttagttcttggaaaaattgaaaatcaaggactggaggtactcattaccagttttgacactttcagaattcatgataaggttttatgtggtatctcgtgggaacttgtggttgttgatgaggcacatcgtctcaagaatgaaaagtccaagttatatacagcatgcttggggataacaactcaaaagcggtttggtctcacggggaccataatgcagaataagatcatggaattatttaatctatttgactgggtcgtgcctggctgcttaggggaccgagaacactttcgagcttattatgatgagcctctaaaacagggtcagaggctaagtgctcctgagagatttgttcaagttgctgatgcgcgcaagaagcaccttgtttccattcttagggaattcttattgagaaggacaaaagaggagacaattggacatcttatgcttgggaaggaggataatattgttttctgcaaaatgagtgacgttcaaaaacgtgtttatagaagaatgctgcaacaacctgatatacaaatccttattaataaggatgtccgctgtagctgtggaagtcctttacctcaggttgaatgttgcaagagaactgaaccagatggtgttatatggtcttatcttcacagagagaaccctgaaggctgttctatatgccccttctgtcttgttcttcctttcctcgtcaagcttcagcagattagcaaccatctggagctgataaaacctaatccaaaggatgagcttgaaaagcagaagaaagatgctgaacttgcagctgctgtctttggtgcagatattgacttagttggtggtactgctaaaagtgagaacttcatgggtctcagtgatgctgagaactgtggaaagatgcgagcactagaaaggcttctgtcattatggactggacagggtgacaagattcttcttttcagttattctgtcaggatgcttgacatactagagaagtttctcataaggaagggttattgcttttcacgcttcgatggaacaactccgatgaatgcacgccaatcactagtggatgagttcaacagaagccctagcaaacagttggaaccctgcccaagacttgcaagcacaagacagatcatttcggtatggacagagacggcatgttacagtatttcgcctacttggtgccggttcacttgaagagctcatttattctaggcaaatatataaacagcagctttccaacattgcagtctctggaaaaatagagaggcgttactttgaaggtgtgcaggatgacaagaaatttcaaggtgagctctttgggatctgcaatcttttccgtgacttgtccgataagctttttactagtgagattattgagatgcatggagaacatggcaagagtagtgcaacagaagcaacagggataagagaaatagtcgatactgatttatttggttcacaagagaataggaagtcttccacagcaacaacacatacggatgatcagaaattggttgattttgggatagtttatgcccaccgcaacgaggatgtcgtgaacatgaggacagacggaagagagaaaggtggagcagacgagactgtccagagctccttagaggagctgcttagtaagaatgaaacaaagcacactgccatggaaaaatcttattcatcggaggagaaaagggaagtggcaagatcttattcactggagcagaaaaagaaagagtttagctgcatcgcatccttcatgggtatggatgaccttgaatttagcaagtggttgctatcagcctcaccgcaccagcggtctgaagtgctgcaggactacaggaggaagaagaaaaatcagaaatgatgatgcaggtcctcggagctaaccggctaccgcaaagctttgacgtagtgattagcttgtgtagctaattgtggtagttatgacaagggaatggtagtaaaattgacccgtggcaccgatcagtatgtatgtctgcagccccgcttattttgaaccttatattggtgcaaactgagctcagcaaggccttggtcactctccctggccgttttttttcggtcaggtgaaatataatctgtattgtgtctgttagttcctgttcagctgtctaagcctttgtgtagcgagtcttatcatgttaggtggcttgcaatgttaccttggtctgtactaatcatttggatatcgtagtcttctccgtactaaaatataattcgttttagattaaatataca

SEQ ID NO: 126216 - DNA, 1594 bp, Zea Mays
ttacagctacaccaaaaaggatcatgttatgttctttttgtgttctgctacgactgtgtttgcccaagttaatcattgcatttggttcagttccataaacattttccatgttttccaaaaaaaaagctctaacagtgtaagaaatatgtgtttttcattttcttcttatcttcagagatgtgttaggattgagacatttgataaggacttcatacgtttagaaatgtttcaaatttctgactgttatacacctgctttttggttccaaggcccaatcaggatgttaagtgtttgaaattcatacattgatgcttcatacctcggtgtattgttacaagtgacactgtaatccacagaataacattacgcataattgttgttagatgacatttgagcaaaaccaagcatgtcaccaccaaacgaacttcctatgcagttttttttctcacatcagcatatgttagtttgagattttaagtttgggctgttttagctgttgtgggtgtggcagaccaggtgcaatctcgactgcacaatagtttaattcggattggccttttggtagttgtaagttaacagcttactgactagatatctggtgtccattttggataattctgatttaggatgacaagaaatttcaaggtgagctctttgggatctgcaatcttttccgtgacttgtccgataagctttttactagtgagattattgagatgcatggagaacatggcaagagtagtgcaacagaagcaacagggataagagaaatagtcgatactgatttatttggttcacaagagaataggaagtcttccacagcaacaacacatacggatgatcagaaattggttgattttgggatagtttatgcccaccgcaacgaggatgtcgtgaacatgaggacagacggaagagagaaaggtggagcagacgagactgtccagagctccttagaggagctgcttagtaagaatgaaacaaagcacactgccatggaaaaatcttattcatcggaggagaaaagggaagtggcaagatcttattcactggagcagaaaaagaaagagtttagctgcatcgcatccttcatgggtatggatgaccttgaatttagcaagtggttgctatcagcctcaccgcaccagcggtctgaagtgctgcaggactacaggaggaagaagaaaaatcagaaatgatgatgcaggtcctcggagctaaccggctaccgcaaagctttgacgtagtgattagcttgtgtagctaattgtggtagttatgacaagggaatggtagtaaaattgacccgtggcaccgatcagtatgtatgtctgcagccccgcttattttgaaccttatattggtgcaaactgagctcagcaaggccttggtcactctccctggccgttttttttcggtcaggtgaaatataatctgtattgtgtctgttagttcctgttcagctgtctaagcctttgtgtagcgagtcttatcatgttaggtggcttgcaatgttaccttggtctgtactaatcatttggatatcgtagtcttctccgtactaaaatataattcgttttagattaaatataca

SEQ ID NO: 126217 - DNA, 1040 bp, Zea Mays
gtgccttagcacgtcttcattcagattcaggtagcttgcattttgtacactaaaatataaactgcttaaaaagttgaaccatcatgttattttacgctgttttggaatatcaagctattcttttgtagccagaagctgagcagctgtttatgggtccagctataattatgcagtgattctcttcgctgaaaagtgaaaaacctgtcaaaatattttctccctttgactcccgggtgtattatgtaacctctcttccctctcactgatccattttattttgaagtaataaatctggcctgtctaacagggatagtttatgcccaccgcaacgaggatgtcgtgaacatgaggacagacggaagagagaaaggtggagcagacgagactgtccagagctccttagaggagctgcttagtaagaatgaaacaaagcacactgccatggaaaaatcttattcatcggaggagaaaagggaagtggcaagatcttattcactggagcagaaaaagaaagagtttagctgcatcgcatccttcatgggtatggatgaccttgaatttagcaagtggttgctatcagcctcaccgcaccagcggtctgaagtgctgcaggactacaggaggaagaagaaaaatcagaaatgatgatgcaggtcctcggagctaaccggctaccgcaaagctttgacgtagtgattagcttgtgtagctaattgtggtagttatgacaagggaatggtagtaaaattgacccgtggcaccgatcagtatgtatgtctgcagccccgcttattttgaaccttatattggtgcaaactgagctcagcaaggccttggtcactctccctggccgttttttttcggtcaggtgaaatataatctgtattgtgtctgttagttcctgttcagctgtctaagcctttgtgtagcgagtcttatcatgttaggtggcttgcaatgttaccttggtctgtactaatcatttggatatcgtagtcttctccgtactaaaatataattcgttttagattaaatataca

SEQ ID NO: 126218 - DNA, 1847 bp, Zea Mays
atcaggttcggatgataaacttcctttccctcaaccagatgatagtctccaatctccacctgtcattattggggaaaattctcctggtcctgttattgacgagacagaaaatcaggagaatgaaagagttccctttttccagagggccacatctatcccgaaggacgatgaaaatcttggcattggcatttcttcccagactgcaatgctctcagaagctaacagttctttggaactgaaacattcagtttctagcccagggaagaattcttttcgtgatcatgctgaagagtctaattatgattctattggtgtatctgggagaccatctttacaagcagatcatcaacaattatctcgtagacatgaaaagagaagtccacgaaaattttctgagacttctctgtcaaatggattccatgggcgtgagcatagacattccaataaccatccacctctgccaccaatgccacctccaatttcatccgtgtccatgcaaaatactgattcagttaataggcagtcatcttcgttcagtgctcgagatcgaccaacacctaatccttctggttatcctacacaatcttttgactctagtatgcctagtgctttcacaggccttcagggtcaaactcaatacatgcttgcaggcgctggcagttcatcagcgaatgagttacccaatgtggaggccaagcttctatggaacacatttccagcaaataggatccctctggagaccttcagctcaggtttacctgctcggccgatgccaccccttacaccttattcagctgttgctactcagcacgctacgatgaactctggctctcctgcaaacctgtatagccagggcagtgttgtccagccttctccaactgcttctattattagtgattcaaatttggccatgaactccgcatctggcagcatgcttgcatcgaatctgctgccatcatttgcatcacaatttctgatgagcaggccttcaatgcctactccgttttttggcacgcctcttcaacaagttcaattctcatccggtcttccacaaaatatttctaaccctcagccacctgtctcaatacaaccacggccacccccacccccaccacccccgcagcagccacatccttctcagacactccaacaacttggtgctatccaattaccacaccaagatcagcagcactcatatccccatagtgctatcttgccacaagttacgttgcagtttcctaaccagctacccattcctcaagtacaattgtatcatcaaagccagcaggaatctgggcaaacactgaggcaagttggtgaacaatcacaacttcagaaccagggtatgcaagcagatagtttctctcaacagcagcaagactcagggatcaacttaaaccagttcttttcatctccagaagccattcagagtctacttagtgatcgtgagaagctctgccaacttttagagcagaatccaaaacttatgcaaatgctccaggatcgcattggccagttgtagtcgcactggaggtgctattgtgaaagtgaaatctgatgctggtcgatcgctaggttcctagagtatggtgttgttttgttttcggctatggctgtagctagatgaaagcaactgccagcttgctagtcgccgaaatgtattcctatgtacattatatgtaactttgttctgtaatgtgaaaatttgtaatgttagtgcgtatctaatttatagttttaagtttaccttagtggttagatcgtgtgacatgcgcagcgacgggaaaacgacgccgccttttgtctgcaaaggcatttgacgctaactacctgtagagttctgaata

SEQ ID NO: 126219 - DNA, 1735 bp, Zea Mays
cactcacagacagcagccacagcggagcttaattagcaatcattgactatgggtgcgctcttgccatggctggcatggttgctcgtctccctcgtcggcgtctacctcctcggccatctcgtgcaggcccgtcgtcgtcgtggtctaccgccgggaccccacccgctgcccatcatcggcagcctccacctgctcggtaaccaaccgcaccgctccctcgccaggctcgccaagacccacggcccgctcgtgtcgctccgcctgggctcggtgaccacggtggtcgcctcctccccggccgccgcccgggagatcctgcagcggcacgacgccgccttcagcaacaggtccgtgccggacgccccgggcgcccacgccaggaactccacggtgtggctgcccaacgcgccgcgctggcgcgcgctgcggaagatcatgggcacgcagctgttcgcgccgcacaggctggacgcgctccagcacctccggcgcgacaaggcgcgggagctcgtggaccacgtgcggcggctggcgcgcaggggcgagcccgtgaacgtcggccgcgtcgccttcaccaccagcctcaacctcgtctcgcgcaccatcttctcccgcgacctggccagcctcgaggacgacggcgcgtccaggaagttccaggaggtggtgacggacatcatggaggccgtgggcagccccaacgtctccgacttcttcccggcgctcgccgttgccgacctgcagggctgccggcggcggctggcgcggctgttcgcgcggctgcaccggatcttcgacgaagagatcgacgcgaggctgcgtggccgcgacgctggcgagcccaagaagaacgacttcctcgacctgctgctggacgccgcagaggacgatgacaacacggccggcctggatcgcgacacgctccgttcactcttcacggacttgttttctgctgggagtgacacaagctccagctcagtggaatgggcaatggtggagctgcttcgaagcccgggttcaatggctaaagcatgcgacgagcttgcaacagtcatcggcccaagaaaagacatcgaggaatctgatattgggcggctgccctacctccaagccgtggtgaaagagaccttcaggctgcatcctgctgccccgctgttgctaccgcggcgtgcccaggccgacgtgaagatgatgggctacgtgattcccgaaggttctcgagtgttcgtaaacgtatgggcgatgggtcgagacgaggagacgtggcctgagcctgagaagtttttgcccgagaggttcctggggaagaagacgcagcaggcggttgatctcaggggcggggacttcgatctcatcccgttcggtggaggacgccggatctgccctgggatgccgctggcgatcaggatggtgcatctgctgcttgcgtcgctcttgaatcagtttgcatggaggcttccggctgagctagagaggaatggagttgacatggctgagaatttcggcatcacgttgaccaaggccgtgcctctttgtgctatagccacagagatctgagtcggcaagctattctattctagttaactattctatggtcgatatatgtacatgtatccttatcaaatttcgaaataaacttagcaaataggttagaggatgtttggtttgaagaatcaatctattctacatggagtgatgcatcatgattcatgaatccattctacatatttggtgt

SEQ ID NO: 126220 - DNA, 1578 bp, Zea Mays
caaaagcaaggagggaggcagcaactgccaacggcgatgatggggcaggacggcgtcggcggaggggtgatcggggccctgctctacgccgcgctggcggtgctggcgctgcgtctggtgctgtcgtacaagtcggcggcgcacgcggtgcggcgggcgtggcggtgggcggacgagtgggcgcaggcgtaccagtactacgaggtgccgcgcctcgccgtcgacggcgcggagaacccgctgttccggaaggcggcggcgtacgtggcgtcgctgccgtcgctcgaggacgcggacgccgcctgcgtgctgtcgtcggcggccaagagcaacgacttcgcgctgcagctggggccgggccacaccgcgcgggacgcgttcctcggcgcgcgcctcgcgtggaccaacgccggcggcgacggccgcctcgtgctccgcgtgcgccgccacgaccgcacccgcgtgctgcggccctacctgcagcacctcgagtccgtcgccgacgagatggaggcgcgccgccgcgagctgcgggtccacgccaacgccggcggtggcgcgccgcggtgggcgtccgcgcccttcacgcacccggccacgctcgacacggtggccatggaccccgacctcaaggcccgcgtccgcgccgacctggagagcttcctcaagggccgcgcgtactaccaccgcctcggccgcgtctggcgcaggagctacctgctgtacggcgctcccggcacgggcaagtccacgttcgccgccgcgatggcgaggttcctggggtacgacgtctacgacgtggacctgtcccgcggcggctgcgacgacctccgcgccctgctcctggacaccgccccgcggtcgctcatcctcgtggaggacctcgaccgctacctgcgcggcggggacggcgagacggcggcggcgaggaccgcgcgcgtgctcggcttcatggacgggctctcctcgtcatgcggcgaggagcgcgtgatggtgttcaccatgagcgggggcaaggacggcgtggacccggccgtgctgcggcccggccggctcgacgtccacatccacttcaccatgtgcgacttcgagggattcaaggctctggcgagcaactacctggggctcaaggaccacaagctgtacccgcaggtggaggaggggttccacgccggcgcccgcctcagccccgccgagctcggcgagatcatgctcgccaaccgcgggtccgcgagccgcgcgctccgcaccgtcatcagcgcgctgcagcacgtggccccgtcaccgcctccgcagcggaccgtcaccgcggcgcggccgccgaggctgacatcgagatggtccgggcacctcgacgaggccagcgtcgcgaccgcgacgtccgaggccagcgcggcggggcagtcgccgcggggcgggggaggtttcgccaaggacgcgccgatcagggagatcaagaagctctacggtctgatcaagtacaggagccgcaaggacgccggcgtcgtgccggtggatgacagcgcggcatcgccggacgggcgggacagcgacgttagccccgagaaggaccggtga

SEQ ID NO: 126221 - DNA, 99 bp, Zea Mays
tcagcctgggccagcagcgaaactccctccccgccttccccacgcatgcaggcgggaggtggaaaaaccacctgggttgcatgcgcatgtacgagctcg

SEQ ID NO: 126222 - DNA, 889 bp, Zea Mays
caggaggagatctgagatcttctattacgataattagttagatggaatccaccactggatcagtagaactggaacatgctccttcacaaatcacttcttctgggtactctacatgaaatgccatgattatgaatgtcggtgtatatgctactagcaaggaaggtattatgaagcattacaaaattacaattaccagctatcaccacaagccataactaccagggagctacttatccttagaactcatctaaccatccaaaacatgctaagcaactttattttacacgaacacattagatgcccatttttctagaaatttctcccgcatttacgtatatatccgaaccatacctgctctaacacgcggaaagccgacgaagcgagagaaccacatggagaaagtatgccgagcacaacggcttgctgggtatcaggaacagcgagacaggcagctagcagctttacgatgacatcgcgagcacgacgaggtcggaagagaggttgtgggtcaaggaaatcgacgacgcgaaggagctgcaaggttgagcgtggctgacgaggagacaacaaccatgagtacgttgcagctcacaacatggatggggaactgcggcaagcacaacaaacaaggctgcacgacgagcgtcggcacggcgtggaagctgcaggacgacctcgaccctcacctcaccagcgaggtcggcggacgacaaagcgtggagttggaagacggtaccaggccggcgagctggaacgtgtgcgatggagcagcgacagatggtcggtcgagcgcgtgaggaagcagctcaaggcacggaagagcagcagcagcgcccaagccagcgtgagaagggagctcgcgtccgggctcagtatctgggagttgagc

SEQ ID NO: 126223 - DNA, 95 bp, Zea Mays
ccattttgtatttgctaagctccgcatggaattggctaccactgacatgggagaggcaatgagatcctacagcccgctatcccatcgcgcacgga

SEQ ID NO: 126224 - DNA, 222 bp, Zea Mays
gtttatcccgggcaggaacaattgcactcagctcctgcattgcagattcatactatcataggcaggtggaactcaaacaaatagttaaccgaacttcaaggaagaaggctaagaaaataaaaatgataagatgtacctgtagcccaagaccccagttattgagagcctgcaatcgaaaaggaaggaaattaagaaagcagcaacactggctaataaaaattc

SEQ ID NO: 126225 - DNA, 398 bp, Zea Mays
atctcactaaacctgcttccagagttcttcggcttcttttgtccgacctcgcattttagcccgatcagcaatagcaatagcccagttataatatgcctaaaataaaattggactaagtcgagtagcttcagcatactttttgcaagcctcctccagcaatgcatctttagaggaactcgaattgggatccacattgtctgcgctctcctgaaagactagagcccaattataatatgcatcagggtcgtcaggattactttcaattgcatttacgtatctgccagcaaaagaaagaatcctttggcgagaacgtccttcctcgtcaactccagttacactatttatcaagtccatcgctacatcatggtgtgatgaaaactgtgcgctatcttggctga

SEQ ID NO: 126226 - DNA, 951 bp, Zea Mays
gctcaaatgacgccatgccggcgccaccgagggcgaaagctgtccagatcgtgtgattttgcatcccatccgcgagcgcgacacgcgctgacctactcgacggcctccacctccgtcttgaggcgaagcgtaggtgagccaaactgccaaagcccatcgggcaaccactagcaattcaactgctttcgcttcatcgctccatggctcaattcaatgcggtttcgtattttttgctgcgaagtgcgaaggaccaactctttcgaagggaaattatatctcaggtgcttaggagtctgccatggccagcgagaataaggtatttaggttcgaggaagtcgccaagcacaacgtcaccaaggactgctggatcatcatcgccggcaaggtgtatgatgtcactccttttatggatgagcatcctggtggagatgaggttttgctagctgtaactgggaaagatgctacagctgattttgaagatattggccacagtgattccgcaagggacatgatggagaagtaccacatcgggcagatagatgcttcaacaatcccagcaaagcgaacttatgtgcacccccagcaagcgcccagccactcagacaagaataatgatctcctcatcaagatcctgcagttccttgtgcccattatgatcctgggccttgcatttggtatacgtcagtacaccaaatcagagtagtactgttcttgaagacttgcctttggagtctgttttatggtaatggtttggatgagaacagttcagtaattgcttagtgtatttgtcaggtggatgttatctcattggtcatatactatgtattatggacatccatgtgttgccgaaatgtgctcttttccccatgaaccgaggcatacaagatgaattctgactcttccatgaaccgagtagttgataccagattattgcagtaatgtttgttttgt

SEQ ID NO: 126227 - DNA, 843 bp, Zea Mays
gctcaaatgacgccatgccggcgccaccgagggcgaaagctgtccagatcgtgtgattttgcatcccatccgcgagcgcgacacgcgctgacctactcgacggcctccacctccgtcttgaggcgaagcgtagtgcgaaggaccaactctttcgaagggaaattatatctcaggtgcttaggagtctgccatggccagcgagaataaggtatttaggttcgaggaagtcgccaagcacaacgtcaccaaggactgctggatcatcatcgccggcaaggtgtatgatgtcactccttttatggatgagcatcctggtggagatgaggttttgctagctgtaactgggaaagatgctacagctgattttgaagatattggccacagtgattccgcaagggacatgatggagaagtaccacatcgggcagatagatgcttcaacaatcccagcaaagcgaacttatgtgcacccccagcaagcgcccagccactcagacaagaataatgatctcctcatcaagatcctgcagttccttgtgcccattatgatcctgggccttgcatttggtatacgtcagtacaccaaatcagagtagtactgttcttgaagacttgcctttggagtctgttttatggtaatggtttggatgagaacagttcagtaattgcttagtgtatttgtcaggtggatgttatctcattggtcatatactatgtattatggacatccatgtgttgccgaaatgtgctcttttccccatgaaccgaggcatacaagatgaattctgactcttccatgaaccgagtagttgataccagattattgcagtaatgtttgttttgt

SEQ ID NO: 126228 - DNA, 836 bp, Zea Mays
gctcaaatgacgccatgccggcgccaccgagggcgaaagctgtccagatcgtgtgattttgcatcccatccgcgagcgcgacacgcgctgacctactcgacggcctccacctccgtcttgaggcgaagcgtaggaccaactctttcgaagggaaattatatctcaggtgcttaggagtctgccatggccagcgagaataaggtatttaggttcgaggaagtcgccaagcacaacgtcaccaaggactgctggatcatcatcgccggcaaggtgtatgatgtcactccttttatggatgagcatcctggtggagatgaggttttgctagctgtaactgggaaagatgctacagctgattttgaagatattggccacagtgattccgcaagggacatgatggagaagtaccacatcgggcagatagatgcttcaacaatcccagcaaagcgaacttatgtgcacccccagcaagcgcccagccactcagacaagaataatgatctcctcatcaagatcctgcagttccttgtgcccattatgatcctgggccttgcatttggtatacgtcagtacaccaaatcagagtagtactgttcttgaagacttgcctttggagtctgttttatggtaatggtttggatgagaacagttcagtaattgcttagtgtatttgtcaggtggatgttatctcattggtcatatactatgtattatggacatccatgtgttgccgaaatgtgctcttttccccatgaaccgaggcatacaagatgaattctgactcttccatgaaccgagtagttgataccagattattgcagtaatgtttgttttgt

SEQ ID NO: 126229 - DNA, 803 bp, Zea Mays
gctcaaatgacgccatgccggcgccaccgagggcgaaagctgtccagatcgtgtgattttgcatcccatccgcgagcgcgacacgcgctgacctactcgacggcctccacctccgtcttgaggcgaagcgtaggtgcttaggagtctgccatggccagcgagaataaggtatttaggttcgaggaagtcgccaagcacaacgtcaccaaggactgctggatcatcatcgccggcaaggtgtatgatgtcactccttttatggatgagcatcctggtggagatgaggttttgctagctgtaactgggaaagatgctacagctgattttgaagatattggccacagtgattccgcaagggacatgatggagaagtaccacatcgggcagatagatgcttcaacaatcccagcaaagcgaacttatgtgcacccccagcaagcgcccagccactcagacaagaataatgatctcctcatcaagatcctgcagttccttgtgcccattatgatcctgggccttgcatttggtatacgtcagtacaccaaatcagagtagtactgttcttgaagacttgcctttggagtctgttttatggtaatggtttggatgagaacagttcagtaattgcttagtgtatttgtcaggtggatgttatctcattggtcatatactatgtattatggacatccatgtgttgccgaaatgtgctcttttccccatgaaccgaggcatacaagatgaattctgactcttccatgaaccgagtagttgataccagattattgcagtaatgtttgttttgt

SEQ ID NO: 126230 - DNA, 708 bp, Zea Mays
catcagaatggtagacaattatgcatgctcctttggtctttgcccacctctccagtatgcatgctcagttaaaaacaaatgctgccattgctgcctagctaactccacaacgtgcttctattcactgttggtacgtacttcatacaaagtgtttgggtataatggaagtatggtaacgtgacaaatagcgcaagcaatgaacaccacagctactcgatcctatcgtgaagggtcaccacaagatcgtgcgcatcgtccaggagcttccaaatgtccagctgcccagccatgctgttacactcccttatgatctcatccatgctgttgtagctttctattatcagtttccgcttctgcaacacactagcagcaatcgcatacagtaacagatcatctgttggaggcgctcccaactgcaatttacgccaggatgagtttgcgatctcggcgcggtttgctgcctgatcagcccacatcacctcccagagacatagggtctgctcgaaggtgagttccctccggaacatcacaaccaccattctgtaaacgaaaaagcagtcttcagcttggagcatctccaaatgtctgtagagatggaagtccttgtatttgattatcctggcaaccatattgagttgccggcgtatacccacttcatcaagcctaaagttgtggcgggctttcctcataaaaccagcaaagcaccag

SEQ ID NO: 126231 - DNA, 303 bp, Zea Mays
atggcggatggggattctgctagggcatataaattaacaggccggatggggattggagatataccaggatggggattggagagccacttgttgaattggagagcgccaccgccgaggattgggattggggtggcagcgaatatctgtcttgggggcgatggggattggggtggcatggtctttaaggaacaccatcatctgcgtagatgggaggttggcgtcgatttggggcgaggatgttggatgattgattctcacggatggctcgggtggcttggattgcgagattttggtagatgctaa

SEQ ID NO: 126232 - DNA, 98 bp, Zea Mays
atgttatgtcgcatcgaaaaaatcgccagccttccatggagagcagatcagttatggggggagtggatcgagctgccttccatcggttgggcgcaccg

SEQ ID NO: 126233 - DNA, 2716 bp, Zea Mays
agccttccgtggccgcggtgcagtgccgctcgatctcacacccgctcgacgtggtggcccgccgttcagtcaccattcgtccgctgcagccacgaccccataaaagcccaccaggccatcacaagtcagagccactttcgcaagcccccttccgaccttgcccctgcggtctcccgagtcccgaagcatccccttccaaaaccctcgccgcgccgcagccacccttgcttccgcacgctatcgcccgggaccagccatctatggcggcgtccctgctcctccgcgccgtgcgccgaagggagcttgcgtcccctctcggatccctgggtgccagcatacagtcaacatgtgttgccaacgtttgctcaaaatggggaagttttgcaagacctttcagtgcaaaagctgctggaaatgaggttattgggattgatttggggacaactaactcatgtgtttcggttatggagggaaagaacccaaaagttattgagaatgctgaaggtgcgagaacaacaccatctgttgtcgcatttactcagaagggtgaaagacttgttggaactccagccaagcgccaggcagtaaccaacccccagaatactttctttggaacaaagaggttaattgggcgacgcttcgatgatccacagacacagaaagagatgaagatggtgccatacacaatcgtgaaggctccaaatggtgatgcttgggttcaaacaacagatggcaagcagtactcaccaagtcaggtcggtgcatttgtgctgaccaagatgaaggagacagctgaatcttaccttggcaagtctatctcaaaggcagtgattactgttccagcttatttcaatgatgctcagcgtcaggccacaaaggatgcaggccgcattgctggccttgatgttgaaaggatcatcaatgaacctacagcagccgctctgtcttatggaatgaacaacaaggaaggcttgatagcggtatttgatcttggaggaggaacttttgatatctctattctggagatctcaaatggagtttttgaggtcaaagcaacaaatggtgatactttcttgggtggtgaagattttgataatacactattggagttcttggtgagtgatttcaagagaactgagggcatagatctgtcgaaagatagattggccctgcaaaggcttcgtgaagctgctgagaaggcaaaggttgaactttcgtcgacttctcagacagaaatcaatctgccattcataacagctgatgcttcaggggcaaaacatttgaacatcacactgacaaggtcaaaatttgaatctcttgtacacaatctgattgagagaactagagatccatgcaagaactgtttgaaggatgccggaatatctactaaagaggtggatgaagtacttcttgttggtggaatgactagggttccaaaggtgcaggaggtagtctctgaaatctttgggaagaacccaagcaaaggagtcaatccagatgaagctgtggccatgggtgctgcacttcagggtggcattctccgtggagatgttaaggagcttcttcttcttgatgttactcccctgtcactaggtattgagacgctcggtggtatcttcaccagattgatcaacagaaacactacaatccccacaaagaaaagtcaggtgttctcaactgctgctgacaaccagacccaggtaggtatccgggtgttgcaaggtgagcgtgaaatggctacagacaacaagctccttggtgaatttgacctcgtgggcattccacctgccccaagaggcttgcctcagattgaggttacattcgacatcgatgccaatggaatcgtgactgtctcagccaaagataaggctaccgggaaggagcagaacatcaccatacgatcctcgggtgggctgtcggaggctgacatccagaagatggtgcaagaagctgagctgcatgcccagaaggaccaggagcggaaagccctcattgacatcaggaacaatgccgacaccaccatctacagcatcgagaagagtcttggagagtacagggacaagatcccggcagaggttgcatctgagatcgaggctgccatcgctgacctccgccaggagatggcctcggatgacatcgagaagatcaaggccaagcttgaggctgccaacaaggctgtctcgaagattggacagcacatgtctggtggtggctctggcggctcgcagtcaggatctggacctcagggtggcggcgaccaggcgccggaggcagagtatgaggaggttaagaagtgaggctgcgggagttcaagggaattgtagcggcttgtttagaagtagctcgttttttttgggaacgcagatagtcagatgtctcagatgaggtgtaacctgtgttgcaataatctatgaacttacccctcttgttttctcctgcagtgaaacaggtcacacgacattgtcatggcttttattgcatatgaagccttgttctgcccgatgtactcgcacagcgaaaaccatcggcgagttctgttaatgagttgaagtatatttgttcctgtgttttgactattggtgatattaagggtggcaacaactgtgactttggcaatgttctgagaacgctaggtcagatcaaagagattgtatggtacttttgtgaagagccgtctcttatattttttaagtatttttttagttagcttcacaga

SEQ ID NO: 126234 - DNA, 132 bp, Zea Mays
atgacgtcgctggaggacgagcctaaggacttcggatcggcaaacgcctctgaagccaccagatcggaggtggtcttcgttaaagggcgtccgagatgcgctggaccggaggagatcatcgtcttcgggtga

SEQ ID NO: 126235 - DNA, 1717 bp, Zea Mays
cccacaccgctctgaactctgattccattcccgagcccgatcgatctcctgctcctttgcaacgcacgcacgcttacatcccaatggcccagacgaccatggccgccgcctccgagctggtcaccctaaagcgcccgttcggcaaggacgtgtctggctctggcgacggcagcgtcgccgaggagaagcccaaggcgccggcgcgccggcgggaggcggaagacccggcggcggcgctggccgcggcgcggcacgagttcggcgagcacggcggcgtgaacatgtccatcgaggcgtcggcgacgttcacggtgatggagccggaaaccatgcggcggctcttcgcgggcgagctgggccccgaccgcggcggcatgtacatctacagccggcacttcaacccgacggtgcaggcgctggggcggcagatggcggcgctggagggcacggaggccgcctactgcacggcgtccgggatgtccgccatctcctccgtcatggtgcagctggtgggtgccggcggccacgtggtggcgtcgcggtgcctgtacggcggcacccacgcgctgctcgcccggttcctgccgcgcgccgccggggtgcgcgccaccttcgtggacgtcgacgacgaggccgccgtgcgcgccgcggtggtccccggtgagacgcgggtagtgttcgtggagaccatgtccaacccgacgctcgccgtcgccgacatccccatgctggcgcgggtggctcacgaggccggcgccaagcttgtggtggacaacaccttcacccccgtcgtggtctcgcccgcgcgcctcggcgccgacgtcgtcgtccacagcgtctccaagttcatcagcggcggcggcgacatcatcgctggcgcgatctgtgggccggcgagcctggtgaacgcgatgatggacctgcaggagggggcgctgatgctgctgggccccacgatgaacgccaagatggccttcgagctgtgggagcgcctcccgcacctgccgctgcggatgcaggagcactcgcgccgcgcgctggcgttcgccgcgcggatgcagcgcctgggcctgcgcgtgctctacccgggcctcccggaccacccgcaccacgcgcgcctggccgccatgcggaacccgggatacggctccggcggcatgctgtgcgtcgacatgggcacggaggagcgcgccaaccgcctcatgcaccacctccagaacaccacccagttcggcctcatggccgtcagcctgggctactacgagacgctcgtgtcctgctccgggaccagcaccagcagcgagatgccgccccaggaccgcgagcgcgccggcatctccccgggcctcgtccgcatgtccgtgggctacaacggcacgctggagcagcgctgggcacagttggagcgcgcgctagcgctcatgcagccgccgccaccgccgcggcaccaccacctcaagggcgctgccgaccgcgatggccccgacgccgccaacaaccacggcaaacactgacgcttggccttccgagtgtgcatgcacgttgtggctttgtgtcgtgttcgtggatatactactagtaccaaagaagtaaggttaaaaggccgtctgatccctctggttcagatggatatgccagtatgtgcaagcggcatggtcattggtctctgagaaacatggaagtgaacttgaataaatgggatctgtctttaacggtt

SEQ ID NO: 126236 - DNA, 192 bp, Zea Mays
atgttgcttcggatgaacgggggcggtggcgagggcagcgactacgagagctctgatgaagggagctacgaatatgatgaagagggagaggaggactacgaagaggaactggagctctcgctggtctcagtgattggcgaacagttgaggtggagcacgaggaggatcatgcgaatgatccataggttgtga

SEQ ID NO: 126237 - DNA, 2066 bp, Zea Mays
aaataagattagccgattaaattgacaaaaaagtctaataaattataaatcgggaccgtggaaatattaattaactgcaaagtaaaaatagagagtaatcggttttgtacggggcaagaagcaaatgagatttcaaatggaacggcgtgatgttttacaactgcaaggagaggcagccacccggccccacgtccatccctaaaacatcgccacgttccgcctgcgccaccccccaatgtccgtggccaccggaggcggcggcgtccaccaccaccgagtccaatgcccaagtcccactacgccgcttccccacccccgcacccgccgccgctcctcccgctcgcgctcgtcccgccgcggcagtgcccgctcgtcgcggccctgctggcgctgctctcggtgctgcttgccaccgcgctctggctcctcctcgtgctctccccgtcccagggggctacccccgccgcctccgagcgctcggtgctgccggatgcgggagcggccgcggccgcgggccccggcgccgcctcgcccctctcgctcggccacatcgtcttcggcatcgcggggtcggcgcatctctggccgcgccgccgcgagtacgtccgcctgtggtgggaccccgccgcgatgcgcggcaacgtctggctcgacgcgggcgcgcccgccgcgccggggcctagcgccccctgggagggctccctcccgccgatccgggtgtccgaggacacctcgcgcttcaggtacaccaaccccacgggccacccgtcggggctccggatcgcgcgcatcgccgccgaggccgtccggctcgtcggcagaggggcgggcgcgcgctggctcgtgctcgtcgacgacgacaccgtgctgtgcgcggacaacctcgtcgccgtgctcagcaagtacgactggacggagatggtgtacgtcggggcgccgtccgagagccactccgccaacacctacttcagccatagcatggctttcggaggtggcggcgtcgcgctcagctttccgctcgccgctgcactcgcgcagacgctcgacgtgtgcatcgagaggtaccccaagctgtatggaagcgacgaccgcctccatgcctgcatcacggagctcggcgttcccctatcccgcgaatacggattccaccagtgggatatcagaggcaattctcatgggttattggcatctcatccaattgctcctttcatcagtatccaccatgtggagcttgtggaccccatataccctggattgaactctcttgagagtctggagctgtttacaaaggctatgaaaatggaacccatgagcttcctgcagcgttcaatttgttacgatcaaagccaaaagcttacatttgctatctcgttgggctatgttgttgaagtatatcccaatgttcttcttccgcgtgatttggagcgatcacaacgtacttacgttgcttataataggatgagtcagagaaatgaatttgattttgacactagagatgtccagaaatctttgtgcaagaagccgatcttatttttcttgaaggatgtctggaaggatggaaacataactaggggatcttatgcacgatcaagtgctagggatgacctcaaaagaaaggtgttctgcttccggtcaccccctttacctgacatagatgagatccaagtttcctcgtctccattaagcaagcgctggcatctggcaccaagaaggttgtgcagtgcacttaaaggatctattgatggtactctgtttatgtttgttcagcaatgtggacgtgggacttttggttcagcttctgattccttatgacatgggaaatagagatgtatattttctgttcagatgatacctggaagatgtagttaccaccctacattctttgagtcaagtataattggggctctttttctgcctcaaacgcttgacagtagccaactgtttgttataattggtagttactgaaggtagtttctgtatcctctcttagtggattacatttaaaaatagcatgttagtgttaagcatgaatagtacttgtgtcatataaggcacttcaaagcata

SEQ ID NO: 126238 - DNA, 5278 bp, Zea Mays
ctaaaacatcgccacgttccgcctgcgccaccccccaatgtccgtggccaccggaggcggcggcgtccaccaccaccgagtccaatgcccaagtcccactacgccgcttccccacccccgcacccgccgccgctcctcccgctcgcgctcgtcccgccgcggcagtgcccgctcgtcgcggccctgctggcgctgctctcggtgctgcttgccaccgcgctctggctcctcctcgtgctctccccgtcccagggggctacccccgccgcctccgagcgctcggtgctgccggatgcgggagcggccgcggccgcgggccccggcgccgcctcgcccctctcgctcggccacatcgtcttcggcatcgcggggtcggcgcatctctggccgcgccgccgcgagtacgtccgcctgtggtgggaccccgccgcgatgcgcggcaacgtctggctcgacgcgggcgcgcccgccgcgccggggcctagcgccccctgggagggctccctcccgccgatccgggtgtccgaggacacctcgcgcttcaggtacaccaaccccacgggccacccgtcggggctccggatcgcgcgcatcgccgccgaggccgtccggctcgtcggcagaggggcgggcgcgcgctggctcgtgctcgtcgacgacgacaccgtgctgtgcgcggacaacctcgtcgccgtgctcagcaagtacgactggacggagatggtgtacgtcggggcgccgtccgagagccactccgccaacacctacttcagccatagcatggctttcggaggtggcggcgtcgcgctcagctttccgctcgccgctgcactcgcgcagacgctcgacgtgtgcatcgagaggtaccccaagctgtatggaagcgacgaccgcctccatgcctgcatcacggagctcggcgttcccctatcccgcgaatacggattccaccagtgggatatcagaggcaattctcatgggttattggcatctcatccaattgctcctttcatcagtatccaccatgtggagcttgtggaccccatataccctggattgaactctcttgagagtctggagctgtttacaaaggctatgaaaatggaacccatgagcttcctgcagcgttcaatttgttacgatcaaagccaaaagcttacatttgctatctcgttgggctatgttgttgaagtatatcccaatgttcttcttccgcgtgatttggagcgatcacaacgtacttacgttgcttataataggatgagtcagagaaatgaatttgattttgacactagagatgtccagaaatctttgtgcaagaagccgatcttatttttcttgaaggatgtctggaaggatggaaacataactaggggatcttatgcacgatcaagtgctagggatgacctcaaaagaaaggtgttctgcttccggtcaccccctttacctgacatagatgagatccaagtttcctcgtctccattaagcaagcgctggcatctggcaccaagaaggttgtgcagtgcacttaaaggatctattgatggtactctgtttatgtttgttcagcaatgtggacgtgggacttttggttcagcttctgattccttatgacatgggaaatagagatgtatattttctgttcagatgatacctggaagatgtagttaccaccctacattctttgagtcaagtataattggggctctttttctgcctcaaacgcttgacagtagccaactgtttgttataattggtagttactgaagttgctgacagaagaaactttgcagaaaagacaggctggaaattttcgctttggaatctctgtggttggtgtctgatacttggagactgaggcctagtgaagagatctttgactaaagctgcgccgctatggttggctgagaactaactatctggtttcatcctggtgaccagtttactcaccttcgtggattctccatgagttgtgcgaaatcaggtaaggatagtaatatgttagtcgtaggttttagtgctgtgatcctgtaacccttcattgttcgtacccttcccgtcctgtgccttctcatgtgaaatggagcattaaccaaagagtcgctgtggatttcagtcaggatccagtataatagttgaacgattgactttagaatttggagttaaacagtcctagattcatccacacctgttcgaactccggtggaaggttttccgatttctaggggaatttaaccatttcttcactttgatgtgaaatttcaacgagctggacagaactggccttctctttaagttgtatcttcatctagtgtatttttttaataataattcgtctggtgttgaagtcactttattgggatatgtctaatgcttgagtttaaatgaacacggacctaactcccttaacgaggggttcgtggatgcggatgtgcattgcccgtgccatgacgtccgtttgtgcaatggaaaaaagtgaacgcctctaggagctcgcggatgtggatgtatatcctctctggtacatgaaaatgcgtgaccgggcggctgagtgctcattttgagcgacgacatccgctatctgttggaaggaacaatgctttatatttatgctctccaatctccagagttttttttgcgttgttattttcagtagtgaacaaatgaacacgttctgtgggcctgatatatccacggccccaaaatcccatcctagtagaatgctttctggcccatcaggtccacggagttttgttgcccatcttatgtgcatgtaatctttccgttcttttttttatttgtcatcgttagtttgaaacaccgaggactgaagaggccacggccacgccgtgacgctctctgcttgggtcgatatcgcctagctagtgaagaatatttactaggattacacggtaacaaacactcgtcgatatatatatactagtcggttgcccgtgcgttacgacggcttacaacaatatctatataaattatcctacaaaaagattttaatattttttattaattgtctccgccctccgtataatatttttttgatttggctaactgatgttattatttactctattcaatatgtcttggtacaatacggtcaatgaagtgagcgattagaagagagttcacaacgactgactgaacgaacagagattataaaatgatataatttcaccatacagagaccaaataagagaaaatttgtgagctcaagtttctaaaataagtcacatgaactcaaacttataaaaaagatagatcaaaatatggagtgattgctaaagtcagacatcaataaaaactggatgcgctccatataaattatgttacttcgtagcaattactaacgtttaaaacaaacaaataaccgttcattttactgttcatgtgacaaatcattgttgctccattcaatttagtaacctcaaacaccatggagtccattgcgtcagtgtagtcttagaaacgacctaatgcttgcaagagtcaagaacgttgtgtcgtgtttgggctgtagcctcgggccgtagtgctggtgcggtccgacacgattacatattttttattttacaaaaaacgtatatacatatatataatttatattcaatattaaaaatatctgagcatgatgttctattggttagacagctttcacctcctccactgtttttaacattttacgctgatttaatcaaatgggccgacaggctaacggactgtcccggcacagtcagcaggccgatatgacgtgcctaggccagagttgtggcccgcgaggcgtctggcccgtgccgggccgtcgtttggccatctataggtgtgcaacgggttaatttgaaatagatgtgaaggtttatttgtaaaaagatgacgcgggatgaccgttgaaactgttgctttaagtatagtatatatatatactagtccgttgctcgtgacacttaaaatatccatcaaaaagatctcaaaattttttattgattgtttccgctctccacatattttttatttgactaactgatgttgtttactctatccaatatgtcttggtacaacacgaccaatgaagggagcgattagaagagagttcacaacgactgactgaacgaacagattatagaatgacataattccactatacagaaaccaaataagagaaagtttgtgagctcaaatttctaaaataagttacatgaactcaaacttataaaaaagatagatcaaaatatagagtgttgctaaagtcaggcatcaataaaaactggatgcgctccatataaattatggtacttcgtagcaattactaacgtttaaaatcaacaaataacatttccttttactgttagcgtgacaaatcactgctgatccgtccaattcagcaacctcaaacaccatagagtccattgcgacaatgtggtcttagaaacgatataatgcatgtaagagccaagaacacaaaggataaacactctgtggtagtgcccgcatggatcttcaaatcctaacacatattttgcaggatccatgagccatcataaaagaacacaaaccacgtacaaacaataaataaagtattaacacatccaaattatgttaagtccttagcacaaaaaactaacacccaaaacaacagagaaacaacacaataatttttgcaatgagagaaggatgtgtgacagatacatagaagtggttgacaccgtggtaagggaaagtccatgtagacaggcgatgccgagccatcgaacgggtaccataggcagcaaatcagggaccctcatcgctcgcctcccccacttccaaggtttcgtagagcaggaagggaatggaagaggcgggcatacctgttcgttgccggagaaggacacaacaaaaacctgagtatctagaggcgacataagtagtataacgctagatacatatacggagagagcacacaagtggataaagaagcccaatcggagcagctccgaaccgagagacacccgtaccagacgtcaatccgagaagggcgagagaatgcgagtgccttcccagccctggactcgccgaggcgacacaacaccaccaccaactccatagcatatgccgactgctatcgcgttgtgggtcttggttgtccaatatctcagacctgaactcctcgtcgccaagataacctaagtgtggaagacgccaatatgtcctcctcgacggcacgcacggagaaaggccaggagcaagaccgactcgccccatacccgcgtcgacgagcgtcggtcgg

SEQ ID NO: 126239 - DNA, 3257 bp, Zea Mays
cccctctctagcctccttcccttctccactcttatccctctctgagtggtaacacacctggcgacgtgcacgagtgcgcgtgtgcgggagcagtagctgtactgtaagcatgcagcagcagcagcacgggggaggcggcggagcaagcggtggaggcccagcgcagcagttctgcgcacagcaggtggagatgccgctgccattctcgccggtcggcggcgctgggcagcggatctcgctggcggaggcaccgtcgcccatcagcagccggccgccggcgccggcgccggctcagcagtatgacgagctcggcccgtccggcgccggcgcagtgggctttgacgccgagggcctggccgccgccgcagctggtgaggatggcgccagcggcggctcggcgggcaaccggtggccgcggcaggagacgctggagctgctcaagatccggtcggacatggacaccgccttccgggacgccaccctcaaggcccccctctgggagcaggtctccaggaagctggctgagaaagggtacaaccggagcgccaagaagtgcaaggagaagttcgagaacgtgcacaagtactacaagcgcacaaaggagagccgcgccggccggaacgacggcaagacgtaccgattcttcacgcagctggaggccctgcacggcaccggagcggctcccgcgtcggtggcgtcgcaggtgggcccggcaatctccggcggggtgtccggggcagcccggccgtcgtcggccgtgcgcgtgcctgccgagccgctgcctgcggtgtcggccggcgtgggaatgccgatgacgacgacggtgggctacccgagcatctcgacgtccaacacggaggacgactacacggacgaggacgactccgacgacgagggcacggaggagctggtgggcggcggcgcggacgatcagcgcaggaagaggaagagggtgtcggacggcagcgggaagatgatgaggttcttcgagggcctgatgaagcatgtgatggaccgtcaggaggcgatgcagcagaggttcttggaggccatcgagaagcgtgagcaggaccgcatgatccgcgaggaggcgtggcggcggcaggagatgactcgcctagcgcgcgagcaggagatcctggcgcaggagcgctctatggcagcctcacgcgacgctgccgtcctctccttcatacagaagatcaccgggcagaccatcccgatgccatccattgccgcgcccaccatcaacgccatgccaccgccgtcgcatccgaagccgccgccgccccctcagccgcaccccacacccattgcctccgtgtcgccagccccgccgccaccgcaaccaccagcttcgcagactccgcccccgcagcagcagaagtcgccaatgccggcgacgccacaaacgccagcaccgcaacggcaaagcacagacattgttatgacaccggccgagacgacgccgcacgccgacacccaggggcacgaggggtccggtggcggcgcgacgtcgtcccggtggccgaaggctgaggttcacgcgctgatacagctgcggagcacccttgacacgcggtaccaggagaccgggcccaaagggcccctctgggaggagatctccgccggcatgcggggcatgggttacaaccggaacgcgaagcggtgcaaggagaagtgggagaacatcaacaagtacttcaagaaggtgaaggagagcaacaagaagcgtcccgaggactccaagacgtgcccctacttccaccagctcgacgcactctaccgcaacaaggcggcgatcacctcatcctccggcgccggagccatggtgcacgctaacgcatcgtcggcaccgcaggagatggtcacggtcacggccgcgacgcccatctcacagacgccgccgcctccaacacagccttcccagtcccatcacgcggcgaagaacggcggcagcagcaactccgctggcacaggcactgggaacggcagctacgcatcagagcacggctccaggggcatgcaaacgcaggcgagcaacggcagcgctgcagccagcatgttcgtcggcctcggcggcggcgcggcctcggcagcgaagaagccagaggaaatcatgaaggagatgatagagcagaggcagccgcagcagccgcaggcggtggtaggcggctacaacagaatggacggcgcgggcagcaacaatatggacgacgacgacgacgacgatgaagacgactacgatgagaacgataacgacgaagatgacgccggcaacaaaatgcagtacgagatccagttccagcaccaccatcagcatccgaacgttgtcaggtcgaacgccggcgccggtggtggcaacccgcccggcaccaccgcgcccagcacggctgcggccccgacaacaacagccggatctttcttgggcatggtccagtgatcgatccatccacacgcgtatcccaagcattattcctcccggtgatgactactctatcctcctcttgccgatggcttcttttctttctctcgcttgtgacatttgtatctacctacctgtcgcctccatgctcgcgtccatatatctgatctactccacaaatcctaaaaccacaacaactatccccctctcctctctattctccggcgattctccatattcttcatgcaggtcgtagccacacctcgatccatgtcgtgtcgtcgtcgctgttgcccaccctcctatttctccattcgttgctgcgctagttacagtggtcgccctcttagatgttacagtaaaaaaaatattggtggtgatatggttatttattgattcgttagggtaattaataagaaccctcaaaagcttggggtcttcacggagtggttgaatcgatgcggtgaaaacggcacgtgaagggtaataagagatcgatcgagcggttaaagagaacaaggagacagagacaggtggcagatgatgcagtgggtgtttttcactgttactgcggtaatttttgtgcatgcggctactactgtacagtggggtagtttgttacaagagaggagtaaaaaaatggaaacagagaacttggccgtcatgcggcaagtgacatgaagaatagtcagtttgatgcatgcaggaatttgttttctttatccttttacttttttattttcagttttcactgtttcttttatgttctgcaacgagtaaactgtccattacgtttttctttcttcctcaaactgttgttaccgaaatttac

SEQ ID NO: 126240 - DNA, 110 bp, Zea Mays
gatcaaagaaaacggtcaccaaaatatgacacaaactgaagtggcactcacccaaaactatcagctacaagtaacagtcactcaacactacattaaacatttaaactgac

SEQ ID NO: 126241 - DNA, 162 bp, Zea Mays
ctcatcccctatccaatactctattttaaacttcattcttcactaggtgtatgcccgtgcgttgctacggagtcaattgcctcatcaacgtcctccaccttgcctccctctgcaccctctacctcggcttctggcgctttgaaagggaaatgtgcccttggg

SEQ ID NO: 126242 - DNA, 961 bp, Zea Mays
tcttccggggcttagcccgagtccgaaccctgggtcgggcggagcggagtttcctatggtgccggaggccgggcctgactgcctgccggtcagtgggcctcgggcgagcctgaaatatgttcgtcgctggagggggccctcgggcgagacggagatcccccgggcgttagtcagaatgcatatggctggcttacctttgcctaccgatgcaattgaagagcctgtgtatgtaaatgcaaagcaatacaatgtcatattaagacggcgtcaatatcgggctaaagctgaatcagaacggaagcttgtcaaggatgtgcatccctatctccatgagccacgccatcagcatgccttaaaaagggccaggggagctggaggtcgatttctcaattcaaaatcagatgacaaggaagagaactccgaatcaagtcacaaagagaaacagaactgagttgcgccccacaagagtggccaactgtcaaccccaccgtctcccaacagtgcatcgtcagctaatcagccagacagtggtgaatggtgattcaaaactcacaactgaagagattttagcccctgagctagatgtggcaacagttctgtacagaaagcgctagcgggcagcagaaacatggtgttggtcggtcggttgttgtaggacatgttccatagaaaagcatagatgagtctacaggttttggagtcttggtttggtcctctgtgtattcacctttctgtacgattttagtagcattgtgtcccttcccttggatagcttcagtccgaatgttaagtgtgtagcatattgacttattgtttgctttgcttggacttggagatttgggagtggagttcataaccctactgtcctgcatcatcatccttggggcaaagaataaatactgtctatgttgaagacgatataaacccaaatgtagtacatgcaactggctatgcatcatca

SEQ ID NO: 126243 - DNA, 98 bp, Zea Mays
cattaaacacgatcagatcttgcttacactatcagtcaacaggttctgaccacgaaactgacaacagcgacacacaggctaaaatgagcggccaaacg

SEQ ID NO: 126244 - DNA, 638 bp, Zea Mays
ggatcccgtcctgggcggggcgcccacggctcccctcccctgtcgttgcgccacaggctctgccccacgcgactggactcgctgccccctgcagtcgcgacaccagccatgggcctcgcggcttctctccccaaccccagatccgggctgcccgagtccgcgccgccgccgcgtacagggctggtcgtcgccgccggtcctcatgttggccgtctgctccgctgcctctctggctgtgagggcctccttcccctcggccgctctcgcacctgcgcgcctctcccctgtgccggtatctctgcctgtgcagccccctgtcatcgcgctagccacctcctaattgctcgcgctatcgccccggcagcgcctcccacttcgagcttctcctgtcaccggtgccgtcaacaccccttgccaggtccggcgcaggcccctgcccggctggacacgccctgccgcccaccccctttctttgccttcgctggatccgtcgctgccgcggccttcccggccggatccacgttgttgcgacctttctggctcgatccgccgtccctttggctggatcgtgtcttcccgactgcatccgtcgctgccgtggccttcccggccggatctgtcgtttccccttctattct

SEQ ID NO: 126245 - DNA, 1856 bp, Zea Mays
aagtacacagagatacaaatacagagaggcagagggcaggcggaggcaccatctccctcccttcttcatcacccacaagtcctctcctctgcggtctcctctcctctcctgtctattttgtgcaagaaacttccttggacaaagatgggagtgcagagttactacaggttattctgctgcgggtgcggcgccaatgcggcggccggcgaccgggaaggcgacgaggacgggggtttcgaggcgttcgacgacaagggggccgccgaagccgggccgcgggggctgtcgtgggcgcaggtggaggcgatgacgggcaggttcacctcggccgtcgtcggcgagggcgggttcagcaccgtgtacctcgcgcgcctctccggcggcgcgctggccgccgtcaaggtccaccgcagcagcgagcgcctccaccgcgtgttccgccaggagctcgacgcgctccgacgcgtccgccacccgcacatcgtccgcctccttgccttctgcgaccagcaagaggaaggcgtgctggtgctggagttcgcggcgaacgggaacctgcacgagcggctccacggcgggggcaaggcggcggggacgatgccgtgggcgcggcgggtgtcggcggcgctgcaggtggcgcgggcgctcgagtacctgcacgaccgctgcgagccgcaggtggtgcacggcgacgtgaaggcctccaacgtgctcctggacgcggccatgtccgccaagctgtgcgacttcgggtcggcgcggacggggttctcggccgccgtgcgcccgcggccgtccgcgcgcaccgccatgctcggctccccggggtacgtcgacccgcactacatccgctcgggcgtcgtcaccaagaagagcgacgtgtacagcttcggcgtcctgctcctggagctcctcacggggatggaggccttctgcgcggaggagggcggccgcctcctcaccgccgccgtcgcgccgcggctcagggccggcgacccgccccgcgggatggtcgacgagaggctcggcaccgcctacgacgccgccgaggccgccgccgtggcggcgctggccgcggcctgtgtcggcgagaaccccagcctccggccgtccatggccgacgtggtgcgcaccctggagcagagcgcgcagggatccatctccgccgtggggatggcatcggacggtcactggaaggtgtgagtcaccagtggaaagtcgtcgcctccgccgacgcgctcagatctggctccccgagtcgttaacttgcggtgctgatgcgcatgcgtcgcgcacgtggcgcccatccattggttgcgaggagaacaaagcgttgttagtaggcgagcatatcaaaaagaaataggggagaaaagcgtggtgaaaaaacgttgatttccatagctaaattaggggaagacttggggagataaaaaggcagagctaagttgtgtgctgatggggatttccatcatattatgccaaagcggcatctacttgagagagacaaaaaaaagagagagagagagaggatctttgcagcgcacgattccaagattttgttgattcttattagtgggttctttttttttgtaaagtgcatcgggtgtttcttccttgccgttgtctgtacctataatttagctagatttggatttgtataggatttgttgagggcttggtttgtgaacgctgcgtgaatgaacaaaagaaatcgcatctcgaaaatgtgcccttcgcagaacggcacagtcctggttcaaaaacaaatgggcgtccatacgacttttattccgccgccagtggtcgtgctgaaataataattgggtgtttgcatcaaagcgttttgaacgcac

SEQ ID NO: 126246 - DNA, 1260 bp, Zea Mays
cgaaaagctgaaatatgagcatctgaaaatttctgaggaacattgcgatttaatcaaccagaaccataaattaagtgaggaagctgcatatgcaaaagaattggcttcttcggctgccgtcgaactcaagaatttggctgaagaagttacaaagctatctgtgctaaatgcaaagcaggcgaaggagttattagttgctcaggagatggcacattcaagggttcatggtagaaagggtcgtacagctagtaggggtagggatgaggttgggacatggagcctcgatttggaggacatgaaaatggagctacaggccagaagacagagggaggctgctttggaagctgctttggcagagaaggagcttctcgaagaagagtacaagaaaaagtttgacgaggcaaagaaaaaggaactatctctggagaatgatctagcaggcatgtgggttcttgttgctaagttgaaaagaggggctttaggcatatctgatttgaatgttgacgaccgaactgttaacctagctgatataactaacagcacaaaggagaacaaaggtggaaagaattttgctctagttgagaagcaagcatcagaagattctgtgaagtcactgagttcagaagaacatacaagtccggagtttgaaccacttcttgttcgtctgaaggctaaaattcaggagatgaaggaaaaggacattgatcccctgaccgataaagatgggaactcacatgtctgcaaagtttgtttcgaatctgcagccgctgcagtattgcttccttgccggcatttctgcttgtgcaagccttgctcgcttgcctgctcggagtgccctctgtgccgcacaagaatcgcagacaggataatcaccttcacgtgagctgcgttctagcttcaggtcattctgaagcacacatcctcttgtaaaatcttcaatggtatatgtttctctttttccttagcaaagaaggtgccttttatgttccttctgtgttgtatcgccattctttgggttccccttcccctatagcttcacgccttcaccttacgttctttgttgtatcgaggagttacaaatgatgacttctcgctctgcaaatatgtatagatacgcaactcgacgctgtaacacattttgattctctactcctgaagaaaagcagcgaacgacatgatgacgtgtgtatactgtgctcctagtcgtccctgttagcatggaaggctatattctataattgctgagctacgcccctataa

SEQ ID NO: 126247 - DNA, 2281 bp, Zea Mays
ttagtaaatttgttaatagttatttgttagctagctaattacactaataaattttagccaactaactattagttttagtgcattcaaacatcctcttaaacggccaaccaatcagatagtacggggaaaatatgaccgtgtggcgtgtgcaggtgcaggtacacattcacgcgaagtacaggtaaacgggcactccggacagcattactatttactgcatcagtaccacctccgtcaccagagccggcgccgtccgacttccggccatctcaggcacccgaactccgccccgatcccttgcttcaaaaagcaaaaaacaacaacaaaaaaaggactgaaagagaaagaacgccggagcgggagcctgaccctgacgccatctctccatccttctcctcctccctggttcagatctctcatcgtcccccgctgcattccatcccgaccccgtttgccactggtcacaccctctccatcgcttcctgccaccgaccacaccctctcgatcgccattcgccaccggccaaatggaggccatccggaagcaggcctcaaagttccgggagcaggtggctcggcagcagcaggcggtgatgaagcagttcgggggcgggtacggcgcagacggcgtgttcgcgaacgaggccgaggcgcaacagcactccaagctcgagaagctctacatctccacgcgcgccgccaagcacttccaaagggatatagttcggggcgtcgagggctacatcgtcacggggtcgaagcaagtcgaaatcgggaacaagttatgtgaggatggcaagaagtacggcaccgagaacacttgtagcagtggaagcacactgtcgaaggcggcgttaagttttgctaaggcacgatccatgatggaaaaggaaaggggtaacctgctgaaagcccttggcacacaggtattagtcattgttgcctttatacccgtgatgtatgaatgcactggattatggaatatgagccatatatgtgttccacattacacttggaacaattcctaatttgtgatgtactgataggatagtaatatatgttagggtgatttgttctaattaaataccatgtaaattgctcatgttatgtaagtgcatctagaacttgcaacggttaaatacttgtagtggattgaaactaccagtcaacagttaaatactgaagaggattgatagtgtcagttttaggaccttttcttaatttcttgttcttatgtttaatgagagtccaaattttacccgtaagtgccataatatcctttcatacttcgtacatttttttctaacaatcaaacccggacaaagcttgttttaagtgaagcgaactgacatcaggttgcagaacctctgagggctatggttatgggagctcctttggaggatgctcgccaccttgctcaaaggtacgacagaatgcgtcaagaagctgaagcgcaggctattgaagtttcgaagcgccaaatgaaactaagagaggcgtctggaaatagtgatatggtttcaaggctagaagcagctgagtcaaagctgcaagagttgaaatcgaatatgggggtattgggcaaagaagctgttgcagcaatgactgccgttgaggcccaacagcaaagattgaccttgcagcgtcttattgcattggttgaatcagagagaaactaccaccaaaaggtcctacaaattcttgatcaacttgagagagagatggtatctgagcgccaaagaatcgaaggagcacctccggtggttgagagttccatgcctccaccgcctgcatatgaagaagtcaatggtatattcatgagaaatacagttgcagaattggtcgagactgtggagtatttcttggctgaggcaatccagtcataccaagccgaaagcgataccgagctcaacctttcaactggtgactacatagtggtccgaaaggtgtcgaacaatggatgggccgaaggtgaatgcagggggaaagctggttggttcccctacgactacatcgagaaacgggagcgtgtgcttgcaagtaaagtcgcccaagttttctaagtcttccgctgagccatgtagtatccccggggttgtacaatgtgtgttgtttatgcttgtcatcttcagagaatcagaggagatctgtaatttttgctgaaagctgcctgttgggtggtttgtttctgcctggccgcctcaattgttcaaattcatgtggcaggaactgaatatattcattcttcagttatcctgtctatatatatatatatacatat

SEQ ID NO: 126248 - DNA, 2028 bp, Zea Mays
ttagtgcattcaaacatcctcttaaacggccaaccaatcagatagtacggggaaaatatgaccgtgtggcgtgtgcaggtgcaggtacacattcacgcgaagtacaggtaaacgggcactccggacagcattactatttactgcatcagtaccacctccgtcaccagagccggcgccgtccgacttccggccatctcaggcacccgaactccgccccgatcccttgcttcaaaaagcaaaaaacaacaacaaaaaaaggactgaaagagaaagaacgccggagcgggagcctgaccctgacgccatctctccatccttctcctcctccctggttcagatctctcatcgtcccccgctgcattccatcccgaccccgtttgccactggtcacaccctctccatcgcttcctgccaccgaccacaccctctcgatcgccattcgccaccggccaaatggaggccatccggaagcaggcctcaaagttccgggagcaggtggctcggcagcagcaggcggtgatgaagcagttcgggggcgggtacggcgcagacggcgtgttcgcgaacgaggccgaggcgcaacagcactccaagctcgagaagctctacatctccacgcgcgccgccaagcacttccaaagggatatagttcggggcgtcgagggctacatcgtcacggggtcgaagcaagtcgaaatcggtggacagctgaactcccgtgtctcttttattgaacacatgaaatttgaattcggaattgttagtgtaatgtgctttgtgttgttcagggaacaagttatgtgaggatggcaagaagtacggcaccgagaacacttgtagcagtggaagcacactgtcgaaggcggcgttaagttttgctaaggcacgatccatgatggaaaaggaaaggggtaacctgctgaaagcccttggcacacaggttgcagaacctctgagggctatggttatgggagctcctttggaggatgctcgccaccttgctcaaaggtacgacagaatgcgtcaagaagctgaagcgcaggctattgaagtttcgaagcgccaaatgaaactaagagaggcgtctggaaatagtgatatggtttcaaggctagaagcagctgagtcaaagctgcaagagttgaaatcgaatatgggggtattgggcaaagaagctgttgcagcaatgactgccgttgaggcccaacagcaaagattgaccttgcagcgtcttattgcattggttgaatcagagagaaactaccaccaaaaggtcctacaaattcttgatcaacttgagagagagatggtatctgagcgccaaagaatcgaaggagcacctccggtggttgagagttccatgcctccaccgcctgcatatgaagaagtcaatggtatattcatgagaaatacagttgcagaattggtcgagactgtggagtatttcttggctgaggcaatccagtcataccaagccgaaagcgataccgagctcaacctttcaactggtgactacatagtggtccgaaaggtagtgctttcagatttctcttacacgtcatttacgaattgctcatgtagtcatgttatgctgcggccagcttcacacatattggttgcccatttcatgagtatctcaatcacatttcacattgtacccgaacttgattaccgaatttacataaaaaaccctttcctaatcaggtgtcgaacaatggatgggccgaaggtgaatgcagggggaaagctggttggttcccctacgactacatcgagaaacgggagcgtgtgcttgcaagtaaagtcgcccaagttttctaagtcttccgctgagccatgtagtatccccggggttgtacaatgtgtgttgtttatgcttgtcatcttcagagaatcagaggagatctgtaatttttgctgaaagctgcctgttgggtggtttgtttctgcctggccgcctcaattgttcaaattcatgtggcaggaactgaatatattcattcttcagttatcctgtctatatatata

SEQ ID NO: 126249 - DNA, 1778 bp, Zea Mays
ttagtgcattcaaacatcctcttaaacggccaaccaatcagatagtacggggaaaatatgaccgtgtggcgtgtgcaggtgcaggtacacattcacgcgaagtacaggtaaacgggcactccggacagcattactatttactgcatcagtaccacctccgtcaccagagccggcgccgtccgacttccggccatctcaggcacccgaactccgccccgatcccttgcttcaaaaagcaaaaaacaacaacaaaaaaaggactgaaagagaaagaacgccggagcgggagcctgaccctgacgccatctctccatccttctcctcctccctggttcagatctctcatcgtcccccgctgcattccatcccgaccccgtttgccactggtcacaccctctccatcgcttcctgccaccgaccacaccctctcgatcgccattcgccaccggccaaatggaggccatccggaagcaggcctcaaagttccgggagcaggtggctcggcagcagcaggcggtgatgaagcagttcgggggcgggtacggcgcagacggcgtgttcgcgaacgaggccgaggcgcaacagcactccaagctcgagaagctctacatctccacgcgcgccgccaagcacttccaaagggatatagttcggggcgtcgagggctacatcgtcacggggtcgaagcaagtcgaaatcgggaacaagttatgtgaggatggcaagaagtacggcaccgagaacacttgtagcagtggaagcacactgtcgaaggcggcgttaagttttgctaaggcacgatccatgatggaaaaggaaaggggtaacctgctgaaagcccttggcacacaggttgcagaacctctgagggctatggttatgggagctcctttggaggatgctcgccaccttgctcaaaggtacgacagaatgcgtcaagaagctgaagcgcaggctattgaagtttcgaagcgccaaatgaaactaagagaggcgtctggaaatagtgatatggtttcaaggctagaagcagctgagtcaaagctgcaagagttgaaatcgaatatgggggtattgggcaaagaagctgttgcagcaatgactgccgttgaggcccaacagcaaagattgaccttgcagcgtcttattgcattggttgaatcagagagaaactaccaccaaaaggtcctacaaattcttgatcaacttgagagagagatggtatctgagcgccaaagaatcgaaggagcacctccggtggttgagagttccatgcctccaccgcctgcatatgaagaagtcaatggtatattcatgagaaatacagttgcagaattggtcgagactgtggagtatttcttggctgaggcaatccagtcataccaagccgaaagcgataccgagctcaacctttcaactggtgactacatagtggtccgaaaggtgtcgaacaatggatgggccgaaggtgaatgcagggggaaagctggttggttcccctacgactacatcgagaaacgggagcgtgtgcttgcaagtaaagtcgcccaagttttctaagtcttccgctgagccatgtagtatccccggggttgtacaatgtgtgttgtttatgcttgtcatcttcagagaatcagaggagatctgtaatttttgctgaaagctgcctgttgggtggtttgtttctgcctggccgcctcaattgttcaaattcatgtggcaggaactgaatatattcattcttcagttatcctgtctatatatatatatatacatat

SEQ ID NO: 126250 - DNA, 476 bp, Zea Mays
tttttttttgttcctgtgatgaactgagagagttggtttttgagttctgcaggctattgaagtttcgaagcgccaaatgaaactaagagaggcgtctggaaatagtgatatggtttcaaggctagaagcagctgagtcaaagctgcaagagttgaaatcgaatatgggggtattgggcaaagaagctgttgcagcaatgactgccgttgaggcccaacagcaaagattgaccttgcagcgtcttattgcattggtacattatttgtctagttgggtgatttgggccacttgactttttgtttgtttgtcttgaagttgtctattgtgtctcataacatttgtggacttaattgaaggttgaatcagagagaaactaccaccaaaaggtcctacaaattcttgatcaacttgagagagaggtctgatggtttcacatccacatcctttccatccttgcccattgtgctaaagaaagt

SEQ ID NO: 126251 - DNA, 1529 bp, Zea Mays
ccttaatttcttatcccctcgtcctctgcgtcttgttgcacttgaagcttcctccgcggcctcccgtcgagcaaccatggcggcggcggtaaccctcctccgccttcctctcgcccgactctcctaccacctccgctccgtaccttcctctcgtctcccgtccccgcgcctccgtatctttgcctcccatcgccttttctcctccctggaccatggctccgcctctgcttccgcctccgcggccgtggccgaggttgtaggcgtgccggacgcggaggagtcggtagaggaggaatctgcggccgaggccgaggcggaggcgcccaggtcgttcgtgctcccacggctgccgcggccgaagctgagcgtgaaggagcggaaggagctggcctcgtacgctcacggcctcggcaaaaagctcaagtcgcaacaggtcggtaagagcggcgtcacaccgaaccttgtctccgccttcagtgacaacctcgagtccaacgagctcctaaagctaaaaattcatgggaactgccctggggagctacctgatgtgatactgcaacttgaggagtcaacaggatccatcgctgttgaccaaattggtcgctctgttattctgtataggcctagcaccagcaagatgaaaaagaagcaacaggttgatgaaaatgctaggaggttttcaagaactgaagaaggaaacgctaggcggtttgcgaaatccgaagaatcatttgaagaacgccctagaaacagaccaggcagaagatctgttggatctggatccacatttaagggggcgcaacagaagagaagaccgatggcatccaaggggtcttcttcatatggccgaggatagcagtggcataaaacactatatgcttgcttttttttcgtgttgtctgtgctccggaccctggagcgttcatgtgaagttctcgacgaactggttggagcacatggcagtgtttagttctagttttgacaagtaagttgtggttccaggtctcatcaactgcacaatgaaataggcacaagatactttgtgtcaactacttgcgattttgtgcaagactagcacaggaacatggagtttcttcagttttgaccgtagacctcgtccatctggtccttgaaatcacagcagaggaccatccattggactgtcatgtttttgcgacttcgttgagcagctgtctgttgatgtttcactgagagtctcaggctggtgcagggtcaagtgcttaacatccatattgcccctgtcatgagttataaccatggttccaagaaccatctcagcaacagcaacattgctaggccgccatagttctactagaagtgtggtggagcttcttagctacaatgtgaactttttctaagccgaacttaaacttctaattttttttaagccggcgagccggttagctccaaagcagtctagacggatgtggtgcgcacatgtgcatttcttcgactgatgtcatgagctccattcctgatagtcaataaatgcccagatatttggtttc

SEQ ID NO: 126252 - DNA, 2042 bp, Zea Mays
tcagctctactcaaagagcgctctaccagtacaactacaaccacactaaaacccaaacaaaaaaaaggaagcaggtgctgccgatatatcgattgatcgatcatggcggcggccgtggccaatatcggcatggagtggctccaagaccctctgagctgggtgttcctgggcacggtgtgcttggtggtcctgcagcagctgcgacgtcggcggggcaaagcgccgcttccgcctgggccgaagccgctgccgatcgtaggcaacatggggatgatggaccagctgacgcaccgcgggctggcggcgctggcggagacgtacggcgggctgctgcacctccggctggggcggctgcacgcgttcgcggtgtcgacgcccgagtacgcgcgcgaggtgctgcaggcgcaggacggcgcgttctcgaaccggcctgcgaccgcggccatcgcgtacctgacgtacgaccgcgcggacatggcgttcgcgcactacgggcccttctggcggcagatgcgcaagctgtgcgtgatgaagctgttcagccggcggcgcgccgagacgtgggcggccgtgcgcgacgagtgcgcggcgctggtccgggccgtggccgtgggcggcgggagcgggggcgaggccgtgaacctgggcgagctcatcttcagcctgacgaagaacgtgacgttccgcgcggcgttcggcacccgcgacggcgagggccaggaggagttcatcgccatcctgcaggagttctccaagctgttcggcgccttcaacgtgggcgacttcctaccgtggctgggctggatggacctgcagggcatcaaccggcgcctgcgcgccgcccgctccgcgctggaccggttcatcgacaagatcatcgacgagcacgtgaggcgcgggaagagccccgacgacgccgacgccgacatggtcgacgacatgctcgcgttcttcgtcgaggccacgcccggcaaggcgacgggcgccgccgccgctgctgacggcggcgacgacctgcacaacaccctccggctcacgcgcgacaacatcaaggccatcatcatggacgtgatgttcggcgggacggagacggtggcgtcggcgatcgagtgggccatggcggagatgatgcacagccccgacgacctgcgccgggtgcagcaggagctcgccgacgtcgtgggcctcgaccgcaacgtgagcgagtcggacctggacaggctccccttcctcaggtgcgtcatcaaggagacgctccggctgcacccgcccatcccgctgctcctccacgagaccgccgacgactgcgtcgtggccgggtactccgtgcccaggggctcccgcgtcatggtcaacgtctgggccatcggccgccaccgcgcctcgtggaaggacgccgacgcgttccgcccgtcgcggttcgcggcgcccgagggggaggccgcggggctcgacttcaagggcgggtgcttcgagttcctgccgttcgggtcgggccgccggtcctgccccgggatggcgctcggcctgtacgcgctggagctcgccgtcgcccagctcgcgcacgccttcaactggtcgctgcccgacggaatgaagccctcggagatggacatgggcgacatcttcggccttaccgcgccgcgcgccacgcggctctacgccgtgcctacgccccggctcaactgccccttgtactgacgccctgcacgtggcgcgcggggactgccattacgcatgcatgcgtttggactttggtgttcatccctggggtggggccgccgtgggggaagttaggagtttggtggctttctagctctgtcttcttgtattctgtttattataaattttcccaacccttccatgcctgatcgatgtgcggtaataattgttagaaaatgtgacattttgtatgtaatcaatctatggggtgcaattgttatctcgtcaaaggacacaccactcgacttgcaccccttcatgtatatatatacatacacgaacatcccctgcaataaagaaatcgctgtcactttctttcg

SEQ ID NO: 126253 - DNA, 740 bp, Zea Mays
ctccatgaccctcctcactttacaggtattgctgagcatcacggccgggaaagtattgcatgcttctatgtttgactaaatctgatggttttgttcaatttctccgttactttctgcagcaaatagcaacggcacttctgatacattttggtcaagttctaggaatgtctaaacaaaaagactttagcttgataaccgcgaagaaacttcttccagtgtcaattttatacaatgcaattgtgggatttgctctagcaagcttgaaaggggttaacatcccaatgtatattgcaatcaaaaggatcactccccttgctgcgttggtggctgggtgcatgcggggaaaggggaagccactgacataggtgtcaatatcagtgcttgtcttctggtggccatgttttccagtaaaaatttatgcaagcactttaggtattgcaaaaggcattgacaatgtaactgacactcatgatatgctctacattcttgttttgaaatttcctcatttgcaacttaaaaatcaaactttagggaaatgcattgcattgtttcttcctaggaactaacagatatttattactattgttgtttaccacatcctgatcaattcaaaattgttttaggtcattctttcagttatctgcaccgacactggtgtcctcattgcagcacttggagatttttcctttgacctatatggatactgcatggctctaacatcagtcttcttccaggttgtg

SEQ ID NO: 126254 - DNA, 2592 bp, Zea Mays
gccccctcgtcccttgtctcccgtcacgcgagcccccccgcacccccggccgcgcagcccacacgcgcaggcggcaggcgcagtccgtcaccctcaacgcgtccaatgcggggtctgctgctgccgcaattcattttttccctcttcagttcccgtttggtttcgtcacaccaccctccactgccttccttctcgtcgccccctcgtccactgcattaatactgccactccccgccccccgttcccctctcctcgcacgcttccggagctataaatctcggcgccccccggctaccggaccccgcattcccgtgcgcgagctccggtgatcgccgggaccggccggcggccatggggcagtgctacgcgaggaacgtgcacggcgtcgacgccgacgacggcggcgtgggggcgaccaccatcacggtctcggcggcgggagggccggaggatgcggcgtcggtagggggagggggaggacgaggaggagggaggcggagcgcgcggccgtcgccggcgacctcggtgtccacgccgcgccgattcttccgccgcccgttcccgccgccgtccccggccaagcacatcaaggcgtccctcgcgcgccggctcggccaccggtcgccggcctccgcgtcgcaggtgcccatgccgcccgtcgaggtcccgatccaggagcacggggcgggaggcgccgggggtggcgctgggcagcgggagcttgacaagagcttcggctacgaccgccagttcgccgccaagtacgagctagggaaggaggtgggccgcggccatttcggacacacctgcctcgtgcgtgcccgcaagggagacatgagaggccaggtcctggctgtcaaggtcatctccaaagccaagatgacaacagcaatatctattgaggatgtgcgcagagaggtgaaaattttgaaggcgttatctggacattccaatcttgtcaagttttatgatgcttgtgaggatgcccttaatgtctacataatcatggagctttgtgaaggtggagaattattggataggatcttgtccagaggtggaagatacaatgaaggggatgcaaaaattattgttgaacagatattaaaagtagttgccttttgccatcttcagggtgttgttcaccgtgatctgaagccagagaatttcctattcagcacgagggaagagcattctcctatgaagataattgattttggtctctcagattttataagaccagatgaaaggcttaatgacattgttggaagtgcatactacgttgctccagaagtcttgcataggtcatatagcacagaagcagacatgtggagtattggtgttatcacttatatattgctgtgtggtagcaggccattctgggcacgaactgaatcaggtattttccgctcagtgctgagagctgaccccaattttgaagactcaccatggcaatcagtatctcctgaagccaaagattttgtcaaaagacttcttaacaaggattacagaaaaagaatgactgctgcacaggcactttctcacccctggctgcgagatgagcaacaacaaatacctctggatatgctagtattcaagttggttaaagcataccttgtttctacgcctctcaaacgggcggcattgaaggccttgtcaagagcaataacacaagatgagcttatctacatccgggcacaatataacttgttagaaccaaacagtgcagatggtcgaatatgtatcgataacttcaggatggctcttttacaaaactgtactgatgctatgaaagaatctagaacacttgagatcttgcacgcgctggagccgctcgcatataggagaatggactttgaggagttccgcgcagctacaataagcccttaccagcttgaggctgtgcctcggtgggaagaaatcgccagtactgcattcgggtactttgagcaggaaggaaaccgtgctatcacaatcgaggagctagctcaggagatgaatctttcagcggcggcgtattccgtcgtccgtgactggatcagaccatctgacggcaagcttagcttcctaggctacacgaagttcttgcatgggttgacgatgcgaagtggcaacgcaagacggcaccattgaccctcttgctgcccccggtaattacttgagttggttccattggttttgttgatgtggagttggagagagagagagggtgttttgtctctcttcttctgttggcttagcttcttgtagaatgcttgtagagagaaagggggaaaaaaaggaaaccaaaagtgatagctcaaaattgagttgtagaagaaaaggtcatgttttgctcgtttggttctggtacattgtacagttagtcagtcagttgggccatgctacatggtgctatggcctatggccgaacttggttgctctgttgctggtcgcaacagcctacaggaatggtgctgcggttctgatgaaactgttgaggcagtgtagtcgtcttaatgcctgtgattgcgttgtggtttgccagcatgttactgtcatatggcaaagcaaagcttatcttaatgcaaaagggtggagcagaaacgaaactat

SEQ ID NO: 126255 - DNA, 814 bp, Zea Mays
ctcgctcggcaccgcaaacaaacagaatccacaagggaggcagaggcagacccgacccgaatcaccgccgtcgtcgtcgttgagaagagacaaagtggaggagtaggccatgtccaacgtgcccacctccctccgcgattcctccctcaccgtcttccgcctcgccatctccagctccgacccctggcccttctcttcctgcctgtaaccaccatcagcccccggccggccggcttcttcgtcctccttcctgatcgagcaaccaccacaagcaagcaaaaagaacaccgagctccttcctggtgaccatcatgcccggcaggcatcatcatcatcagcagcagcagcagctggcggcggtggcgcccaaggggtgcgtgacggtgcgcgtgggcctggagggcgaggagcagcgccggttcgcggtcccgctgggccacctcaagcacccgctcttcggcgcgctgctggaggaggccgagcgcgagtacggcttccggcaccagggcgccctcgccatcccctgccgcgtcgaccgcttcgtccaggtggagcacctcatcggccaggacctccgcgggaccagctgcgcccagcacctcgtggacctcgacggcgccctggcaagcggcggcggagcgcaccaccaccaccagcaccaccacctgcacctgccgcgcttcgttggctgcttccgcgcctgatcgacggcgggccgcgcgtcgagcgaggtggttgcttgctttggttgattaactagcactttggtttggctcgtcgtccttttccccgaattttttgtatttttagccct

SEQ ID NO: 126256 - DNA, 1634 bp, Zea Mays
ggtgggcaaattattccgcgttggcacggccgccctcccccaactttccagtgcggcaccggccttctttacacctcactcccaccaccaccacctcctccaccgttgctaccccagcacgctctcgccgtcgccacgccctatatctcgcgcgcctttcacgtcccactctttctccatccgcacgctcgcctccctgctagtgctacgcttcgtgccgccgccgcaacctattccttcccgttccagattgcagatcatttaacataaatggctgacgcagaggacattcagcccctagtctgtgacaatggaactggaatggtcaaggctggctttgctggagatgacgctccacgtgctgttttcccaagtatagttggtcgtccacgtcacactggtgtcatggttgggatgggacagaaggatgcttatgttggtgatgaagcccaatccaagaggggtattctgactttgaagtaccccatcgaacatggaattgtaagcaactgggatgacatggaaaagatctggcatcacaccttctacaatgagcttcgtgtcgcaccagaagagcacccagttcttcttacagaggcccctcttaacccgaaggctaacagggaaaagatgacacaaatcatgtttgaaaccttcagtgttcctgctatgtatgttgctattcaagctgtgctttccctatatgctagtggccgtaccactggtatcgtcctggattctggagatggtgtcagtcacactgtcccaatctatgaaggctacgccctcccacatgccattcttcgtctcgatcttgctggcagggacctcactgattccctcatgaagatcctcaccgagaggggctactctttcacaaccactgccgagcgggaaattgtacgtgacatcaaggaaaagcttgcatatgtcgcgctagactatgaacaagaacttgagaccgccaagagcagctcatcagttgagaagagctacgagctgcctgatgggcaagtgatcaccataggcgcagagcgcttcagatgcccggaggtgctcttccagccatccatgatcggtatggaagctccaggaatccacgagacgacctacaactccatcatgaagtgcgacgtggacatcagaaaggacctgtacggcaacattgtcctcagcggtggatccaccatgttccctggcatcgctgaccgcatgagcaaggagatcaccgcgctcgcgccaagcagcatgaagatcaaggtcgtcgctccgccggagaggaagtacagtgtctggattggaggatcaatcctcgcatccctgagcacattccagcagatgtggatctcaagggctgagtatgaggagtctggtccagctattgtccacaggaagtgcttctagacgtcactcctcgtggaaatgcctttgtttcatgacatatctatgggtggtcgctctgctacagctcgcagttttttgtgtatgccacaagccgcatatatatatatccattctggtaacgttgtggagtcagccgagcactgtatgaagtatgtagtttggtttgatatatattgattggattattacttgattctatggggtcttggatgccagctggaatgtgcaaa

SEQ ID NO: 126257 - DNA, 1759 bp, Zea Mays
acctcactcccaccaccaccacctcctccaccgttgctaccccagcacgctctcgccgtcgccacgccctatatctcgcgcgcctttcacgtcccactctttctccatccgcacgctcgcctccctgctagtgctacgcttcgtgccgccgccgcaacctattccttcccgttccaggtgagcgaatcgagagccccttgccgcacttccttaatgctgctgtttcttgttgctgccgaggatgtctagaggactggaggctgcgtgataggatgtactgggatctggggtctggggttcgctggtcgtataaggttctggttgactgttaaattctggatccgtagtaggagtaaggttcgccaaagttgctgagattgcagatcatttaacataaatggctgacgcagaggacattcagcccctagtctgtgacaatggaactggaatggtcaaggctggctttgctggagatgacgctccacgtgctgttttcccaagtatagttggtcgtccacgtcacactggtgtcatggttgggatgggacagaaggatgcttatgttggtgatgaagcccaatccaagaggggtattctgactttgaagtaccccatcgaacatggaattgtaagcaactgggatgacatggaaaagatctggcatcacaccttctacaatgagcttcgtgtcgcaccagaagagcacccagttcttcttacagaggcccctcttaacccgaaggctaacagggaaaagatgacacaaatcatgtttgaaaccttcagtgttcctgctatgtatgttgctattcaagctgtgctttccctatatgctagtggccgtaccactggtatcgtcctggattctggagatggtgtcagtcacactgtcccaatctatgaaggctacgccctcccacatgccattcttcgtctcgatcttgctggcagggacctcactgattccctcatgaagatcctcaccgagaggggctactctttcacaaccactgccgagcgggaaattgtacgtgacatcaaggaaaagcttgcatatgtcgcgctagactatgaacaagaacttgagaccgccaagagcagctcatcagttgagaagagctacgagctgcctgatgggcaagtgatcaccataggcgcagagcgcttcagatgcccggaggtgctcttccagccatccatgatcggtatggaagctccaggaatccacgagacgacctacaactccatcatgaagtgcgacgtggacatcagaaaggacctgtacggcaacattgtcctcagcggtggatccaccatgttccctggcatcgctgaccgcatgagcaaggagatcaccgcgctcgcgccaagcagcatgaagatcaaggtcgtcgctccgccggagaggaagtacagtgtctggattggaggatcaatcctcgcatccctgagcacattccagcagatgtggatctcaagggctgagtatgaggagtctggtccagctattgtccacaggaagtgcttctagacgtcactcctcgtggaaatgcctttgtttcatgacatatctatgggtggtcgctctgctacagctcgcagttttttgtgtatgccacaagccgcatatatatatatccattctggtaacgttgtggagtcagccgagcactgtatgaagtatgtagtttggtttgatatatattgattggattattacttgattctatggggtcttggatgccagctggaatgtgca

SEQ ID NO: 126258 - DNA, 2613 bp, Zea Mays
ttcttgcaaacaatgggcctccttccaatccacagaatcatcttgctgtgtttttgctcgtctagcttattactgcctcctccagtatcatcggacagccgcatccttcccaacaagccgctgactgttggaagcacgctcacctccgatgacggcacttttgccctgggcttcttctccccgtccaacccggacaagaaacactactactatgttggtatatggtacgccaacattcccaaggacaacgtcgtgtgggttgccaaccgtggaaccccaataatcacggacccttcctctgcaacacttgccctgacgaacacgtccgatcttgttttgtccagcgcggacggccagacgctttggatggcaaacaccagcgctgctgcgtcgtcggagccggagaccaccgccggagaagccacgcttgacaacactggaaacttcatcctctggagttcacagggcgccgtcttatggcaaagcttcgattacccggccgacactcttctgcctggcatgaaatttagagtcacccaccgtaggcatgcactgcaacagctggtctcttggaagggcccccaagacccagccccgggcagcttctcctacggcgcagatcctgacgagctcctgcagcgctttgtcaggaatggctcgagaccatactggagaagtccggtgttgaatagttacttggtagccaggtcatatatcggaattctcaagtccactatctacctcacaataagcaaatacgacgacggtgaggtctatatgtcctttggcgtacccggtggctcctcatcgtcaactgccatgaagatcaaaatggactactcaggaaagatagaaatcctaatctggaacaccaacattttggaatggtacgtcctggaggcacagcctatgaatgaatgcagtacatatggatattgtggtccgtttgggtactgtgataacacagagcttaatgcgacatgcaagtgtctcgacagtttcgagccaataagcaacgaaggcaggagcaatggaagttttacagaaggatgccgccgcaaggagacactaagatgcggcgaagaagatactagtttcttaactttggcggacatgaagattcccgacgagttcgtgcatgtcaagaatagaagcttcgacggatgcacggcggaatgcgctagcaactgctcctgcacaggttacgcttatgccaatttcagcaccacggctttcaccggggatgacacaaggtgcctattatggatgggagatttgattgacacagcgaagcgcactggagatggagaaaatctttaccttcgagtaaacagatcaaataaaaagaggaggagcaatatcctgaaaattactctgccagctgtatcaagtttgctaatactcgtattcatgtggtttgtttggatctgttactcccgagtcaaagaaagaaataaaaaaacttggaagaaggtagtatcaggagttttgggcacttctgatgaactcgaggacgcgaaccttccttgtattagcttccgagaaattgtactagcaacgaacaatttttctagctccaacatgcttggacacggaggtttcggacatgtttataagggaacattagaatgtggtaaggcaattgccgtgaaaaggcttagtaagggttctggccagggggtactggagttcagaaacgaagtaattctcatcgcgaagttgcagcacagaaacctagttaaacttcttggtttctgcattcatggagatgagaaactattgatatatgaatacttatcaaacaaaagtttggatgcctttcttttcaattccacaagaaaaccatcgcttgattggtcaaaaagattcaacataatcttagggatagctagaggacttctttatcttcaccaagattcaaggctgaagataatccacagggatctcaaagcaaacaacatattactggatgatgaaatgaaccccaggatatctgattttggtatggcaagaattttttatggcaaccagcaacaaggaaacaccaaccgcgttgttggcacatatggttacatgtcgcctgaatatgctctggaaggtgtgttttctgtcaagtctgatgtgtatagcttcggagttttagttctagagattgtgagtggctcgaagatcacctctacgcacatgacagaacattaccccaaccttatagcctgtgcttggagcttatggaaggatgggaacacaaaagaatttgttgactcgtccattgttgcggatagttgttcgcttgatgagacttcacagtgcatccatatcgggctcttgtgtgttcaagacaacccaaatgctcggccactcatgtcatcagttgtgtctatcctggagaatggagacacatcacttccacctccaaaacagccaatatattttgcagaaagaaactacggaactgacggagcagcagaagctgttgtgaattctgcaaatactatgagtgttacagcgttggagggacgctagacgtatagttcctgcaaataccgatgcaacacatgcatgagaaagcaacatacattgtataggatgaaaacggtcggaaacggtatttat

SEQ ID NO: 126259 - DNA, 555 bp, Zea Mays
catcagccactccgtgagaagttctagtcatcacacacaccaatggcgccctccgctccccggctggtcgccggagctctcgtgatcctggctgctgtagctctggcccgtccaaacgccgagcaacggagccccggtcgctacaatgtcgccgacgcgatcgcgatgggctcaggtcagcatcgtcatcatcaggggcggacaccaccatgccatgtgtcgcctccgcccgtgttgccgccgccgtgtcctggtcaccaagatcggcgtagagaagcactggtgccgccgccaattgttctcggtgtgcagaggaccgcgccggctccgccctcgccgcagcacgcgcaggtggagcattatagggcgctattcccgccacctccagcttgctcattctaggcgatggctcttgttgttactgtacttcctaagcgtctagtagccgtctagtgtttggagttcatttactcagcaagcaacgtaaaagctatcagttttttcattctcacccatttctgttgacacaaaaaattgaacaatttgtttaacgtt

SEQ ID NO: 126260 - DNA, 746 bp, Zea Mays
gcagaccagaggccgacagcaaacccgtgaagccgagagagtgaagaaggggacaagtcagatttgtcatttgtcgcaccccccgtgactccaggccaatctgatctgccttatctttttatgagtagcattagagctcaacgagatatctacgctgctatctagagacagccgtgacgagttcgggtcgagcgaggagcaaccaacaacatgacactctcgtttaggctggtcgccggcgttcttctggtcctggcattagctctgctctcttcgagcgcggaggagaggagcgccgggcgcgctgccagtgtcagcgcgatgggctcagatcacgatcagacgtcggaagctccggtgccgccgttgaggcctcttggctcgaggaaaccgaaggcggctccgcccccgcctcatccacgggcgagtataaggacaaggccatctcctcgatctcgtttgttacaaccgccgccgccgccaccaggctcgtaggtgtaggctgtgtacgtctaggcggccggcaggctctagtcctctaggtctacagacgtgagaaaatggtttgttggcgttggcatccctccaatttcctgtgaacctgttgtagtgttcctcagttgtgagttttcaacgaacttttggaagttctatgtctctgtcggttatggttcaggtatttgggcgctttcagccccaaaaccatcggttgcgtattttaatattttcttcttggctgctcaaca

SEQ ID NO: 126261 - DNA, 916 bp, Zea Mays
ctgatctgcctcaacgagatatctacgctacgctgctatctagagacagccgtgacgagttccggtcgagcgaggagcaaccaacaacatggcactctcgtttaggctggtcgccggcgttcttctggtcctggcattagctctgctctcttcgagcgcggaggagaggagcgccgggcgcgctgccactgtcagcgcgatgggctcagatcacgatcagacgtcggaagctccggtgccgccgttgaggcctcttgggtcgaggaaaccggtggcggctccgccaccgccgaggccggcacatccacgggcgagtataaggccatttcctccacctcgtccgtcacagccgcagccgcagccgccgccgccgccaccacgctcgtaggtgtaggctgtgtacgtctaggcagccggcaagctctagtcctctaggtctacagacgtgagaaaatggtttgttggcgttggcatccctccaatttcctgtgaacctgttgtagtgttcctcagttgtgagttttcaacgaacttttgaaagttctatgtctctgtcggttatggttcaggtatttgggagctttcagccccaaaaaccatcggttgcgtattttaatatttccttcttggctgctcaacatttctatgcctttcttttatcagatgacctggcatttgtcggttgtttccaagatgctagtgctacaagctcatgaacttgctcacccgaatcaccagaggaccagaacgcgttgtattgaatttctgactgtgcagtgaagtggctggaacgcctcaaagacctcatttttttttgtatcgaactccggatccgttgacctgacctgccgtggcatccatgtgttcgttcagatctcaagggacctcctacctgagattccaccgacaaaaccct

SEQ ID NO: 126262 - DNA, 1049 bp, Zea Mays
ctgatcaccgcctcgccattcttccggcctgcatcaggatatatatataggcccaaagtttaagccaacccaacccctgaaatactttgaagagtacatataagcttgatcctctagcagcgacagcgttggagcagattgtattattagcagcatctcgttcccgatcgatcttatagccatgacgacgacgacaaaggtggccgcgggagccgggcgggacgcggaggaggggatgaggcggaggaacgccgagctcgagagggcggtcgcggaggcggcggcgagggaggagcggctgcggcgggagctggagacggccctggcgcggctggccgtggccgaggaggccgaggagcgcctgtgcgtccagctcggcgagctggaggccgaagccatggagcaggccgtcgagtaccaggagcgcgtcagggcgctgtccgaccgcctcgccttcgtcgacggcgtgctcaggtcgtccggggtccggggcttcgccgccgccggcggcgtaacgagcatggattcatcgagctgagcggtcatcggtgtgttatatataatctaatctaaggcagagctgggtgctccgaaggatcgacgtatacgggtattgttgttatctacggcttgttgtattgtatgtccctcgattacacaccaaatcactccgacatccaaacaatatctaaacaagtatgtacagttccacgttgattcatgtgtgacgtgtgtttattgtccggagttgtaaattagcttgaggagattgattcttttcgtaaccaggtgctgtttggttcacgaaatgtaatgtaaagggtaatggtaatggtttacactcgattacgggcggtaacaagtttgaatagttcggtatcaacttttagtatggtatctgattacggttggactaaaacaaacatgatttaacgttatcacttactcattacgttacaaatatttgaaccaaacggtatccagattcttcgaaaatctcgtcacgaaaaagctaaatcaaacaggctctatatattgtttagagttgt

SEQ ID NO: 126263 - DNA, 252 bp, Zea Mays
atgacgatggcctcccgcgtcagggctcagtctacagccttaggcctcacggttgccaaggtggagacacagctgggtgagttgctgcggaccatgaacctgtacgacttcctgcgaaccatgctcccggatgcgggcccgcccccggcggccaagacggtggacgaggtatgtcgtgacattcagagcaccagcggcggtgcccgccagccctccacgggtgagatgatgctcaaagacttcctctcctga

SEQ ID NO: 126264 - DNA, 2596 bp, Zea Mays
atcaccctcggtatacccctctctcccgcgttcttcattcctaggtcagacggacgcgcatccccgcaagcacgttcccgtgctctcgcagctcgcttctccagaggcgactagggtttgaaggctaccgagagggtgctactgggccaactcctccgaccgcccgcaggcgaaggagctctccgccttcccgccctcgtgtcatccttcccatcgcgacccgcgaggccacgagcccacgagctccagctcttgttattcggaagggttctggatttgggagccaagcgactggcgcagcggcagagcccggcggacacgctcccccctgtcgcccattctcttcctccccgagcggcacccccgcgtgttgccgcttgtagcatcggggagaaaaatacagaggaaggacatgagggatccatttgatgcaccggttgatctcattaatgtggaccataatggtggctatcaactatccaggactggtgcggtttctgctggggaccatggtttacaaaatggtggacccaaatcccttgctccaaactccgacactgtagtcaggcatcaactccagggtgcatccttgcacaaagacttagctcttgaagatcctaatactcgtatcatggatcccgagaccaaggaactttactttagatcacaatcacaagaggacgagatcttgttgcttcgcaagaaaattgctgaggcgtctctcaaggagctgagtttgctgagtgaaaaacacattctggagaggaggctcacagacttgaggatggctgttgacgagaagcaggaagaagctatatctggtgctttgaaacaattgaaccagaagaaaacccatctcgaggacaatatgcgactggcaaatgaactaaaagttgaggaagaagagctatacttttttacttcttcattgcttagcatgctagcagaatacaacatccgcccacctcaaataaatgcatctaccattacaattggcacaaagcgcttgtaccaacagatgcattggaagctcaaatctttaaatgacaatttaggtgatatgcctcaacctggaaacatttataactccagtcatcagcaacagcaagtaaccctaccaagaaatgaagcttccccatcttataatatggtttcaaataagaatgctcttcaacaatatgctcaaggtccaagtgaccgacatattgagcaaatgtaccatggatccagttttcagcaggatactggaggtactactccctctaattattttgaagaaggaagagtagacggtggctcacagttatacccatctgatggtgatgctttacctggtattgagggatttcaaattgctggtgaacctagaccaggatgtcaattaacagcatgcggtttccctacaaatggtactaccctttgcaatttccagtgggttcgccatcttgaaaatggtatcaaacagtctatcgaaggtgccacgatgtatgactatgtggttactgcagatgatgttggtactcttcttgctgtagactgtacgcctatggatgacaacggccgccagggtgatttggtgacagaatttgctaataatgggaataagataacatgtgatccagagatgcagagtcatatcgatgcatgtatttctaaagggagagctgaatttgaagtttttgtcctggcttattctcctgaggaatgggaactggctacattggtgctcacacgacctaattatcagattaagttcaaacagaccggtaatgttgtaattgacgagaagtactcacaaagtctacagacaaaaattccaaatgggcgcacaactcagtttgttttaataactgcgggtacaactcttccatttaacacacagggaatatcagagccaaacaatgaggattacgatgttaggttacgtgatctaatcgtattagtcatgagaacttttcagaaaaaggctctagatgctaaaaggaaaggaaaggcttagaattcatgtaaatcttttacaaaagtagaaccgtagaagattttcctatttctgattgttttgtgcagtatttgataatttttgtccttgaggtggaatgagcttctcgatagagcaggaatttcaagagttacctggtgggcacataaatggttagaggaacgtaggatcgattcttatcctaattcttttttccttcgcattgcttactctaagttaagccatgtcactgcggtctttgtaaattctaagcagccagtgctgcaaataaacctatgagatgttcgctgcagctcttggatgacttaacatgcccatatgattgttgattttgtttatcatgttgatcaccatgctgctacttacactatgttcacaaagaatagcggtatgggttctcaatatggccataacccattccttttgcgtttccattaacggtgcttcaaccatacagcacaccgcatgaaagaactagcctgaatagcaatttccaaacgtatgctccgtttgggcttcagcttgcaaatgagcggcaaccactacgaatttcccagatccagaaaaaagggaagaagttaaaaaaaaaagaataaa

SEQ ID NO: 126265 - DNA, 2571 bp, Zea Mays
cgttcttcattcctaggtcagacggacgcgcatccccgcaagcacgttcccgtgctctcgcagctcgcttctccagaggcgactagggtttgaaggctaccgagagggtgctactgggccaactcctccgaccgcccgcaggcgaaggagctctccgccttcccgccctcgtgtcatccttcccatcgcgacccgcgaggccacgagcccacgagctccagctcttgttattcggaagggttctggatttgggagccaagcgactggcgcagcggcagagcccggcggacacgctcccccctgtcgcccattctcttcctccccgagcggcacccccgcgtgttgccgcttgtagcatcggggagaaaaatacagaggaaggacatgagggatccatttgatgcaccggttgatctcattaatgtggaccataatggtggctatcaactatccaggactggtgcggtttctgctggggaccatggtttacaaaatggtggacccaaatcccttgctccaaactccgacactgtagtcaggcatcaactccagggtgcatccttgcacaaagacttagctcttgaagatcctaatactcgtatcatggatcccgagaccaaggaactttactttagatcacaatcacaagaggacgagatcttgttgcttcgcaagaaaattgctgaggcgtctctcaaggagctgagtttgctgagtgaaaaacacattctggagaggaggctcacagacttgaggatggctgttgacgagaagcaggaagaagctatatctggtgctttgaaacaattgaaccagaagaaaacccatctcgaggacaatatgcgactggcaaatgaactaaaagttgaggaagaagagctatacttttttacttcttcattgcttagcatgctagcagaatacaacatccgcccacctcaaataaatgcatctaccattacaattggcacaaagcgcttgtaccaacagatgcattggaagctcaaatctttaaatgacaatttaggtgatatgcctcaacctggaaacatttataactccagtcatcagcaacagcaagtaaccctaccaagaaatgaagcttccccatcttataatatggtttcaaataagaatgctcttcaacaatatgctcaaggtccaagtgaccgacatattgagcaaatgtaccatggatccagttttcagcaggatactggaggtactactccctctaattattttgaagaaggaagagtagacggtggctcacagttatacccatctgatggtgatgctttacctggtattgagggatttcaaattgctggtgaacctagaccaggatgtcaattaacagcatgcggtttccctacaaatggtactaccctttgcaatttccagtgggttcgccatcttgaaaatggtatcaaacagtctatcgaaggtgccacgatgtatgactatgtggttactgcagatgatgttggtactcttcttgctgtagactgtacgcctatggatgacaacggccgccagggtgatttggtgacagaatttgctaataatgggaataagataacatgtgatccagagatgcagagtcatatcgatgcatgtatttctaaagggagagctgaatttgaagtttttgtcctgcaggcttattctcctgaggaatgggaactggctacattggtgctcacacgacctaattatcagattaagttcaaacagaccggtaatgttgtaattgacgagaagtactcacaaagtctacagacaaaaattccaaatgggcgcacaactcagtttgttttaataactgcgggtacaactcttccatttaacacacagggaatatcagagccaaacaatgaggattacgatgttaggttacgtgatctaatcgtattagtcatgagaacttttcagaaaaaggctctagatgctaaaaggaaaggaaaggcttagaattcatgtaaatcttttacaaaagtagaaccgtagaagattttcctatttctgattgttttgtgcagtatttgataatttttgtccttgaggtggaatgagcttctcgatagagcaggaatttcaagagttacctggtgggcacataaatggttagaggaacgtaggatcgattcttatcctaattcttttttccttcgcattgcttactctaagttaagccatgtcactgcggtctttgtaaattctaagcagccagtgctgcaaataaacctatgagatgttcgctgcagctcttggatgacttaacatgcccatatgattgttgattttgtttatcatgttgatcaccatgctgctacttacactatgttcacaaagaatagcggtatgggttctcaatatggccataacccattccttttgcgtttccattaacggtgcttcaaccatacagcacaccgcatgaaagaactagcctgaatagcaatttccaaacgtatgctccgtttgggcttcagcttgcaaatgagcggcaaccactacgaatttcccagatccagaaaaaagggaagaagttaaaaaaaaaagaataaa

SEQ ID NO: 126266 - DNA, 1777 bp, Zea Mays
gctgctgtttttagtttctattaatttcttaaggtgctgccttgcctcatgctttagtcgcctagggcggtagtcgtcactatgtcttgccttactgccttgataaccatgaaagcatcacctctagttttcagcatttgctgttctcatttttgttgttgtcaattttttttataagatagattacatgcttttcgtctgtctttctgtgaacttctagacttactatggaattcttctaggttgaggaagaagagctatacttttttacttcttcattgcttagcatgctagcagaatacaacatccgcccacctcaaataaatgcatctaccattacaattggcacaaagcgcttgtaccaacagatgcattggaagctcaaatctttaaatgacaatttaggtgatatgcctcaacctggaaacatttataactccagtcatcagcaacagcaagtaaccctaccaagaaatgaagcttccccatcttataatatggtttcaaataagaatgctcttcaacaatatgctcaaggtccaagtgaccgacatattgagcaaatgtaccatggatccagttttcagcaggatactggaggtactactccctctaattattttgaagaaggaagagtagacggtggctcacagttatacccatctgatggtgatgctttacctggtattgagggatttcaaattgctggtgaacctagaccaggatgtcaattaacagcatgcggtttccctacaaatggtactaccctttgcaatttccagtgggttcgccatcttgaaaatggtatcaaacagtctatcgaaggtgccacgatgtatgactatgtggttactgcagatgatgttggtactcttcttgctgtagactgtacgcctatggatgacaacggccgccagggtgatttggtgacagaatttgctaataatgggaataagataacatgtgatccagagatgcagagtcatatcgatgcatgtatttctaaagggagagctgaatttgaagtttttgtcctggcttattctcctgaggaatgggaactggctacattggtgctcacacgacctaattatcagattaagttcaaacagaccggtaatgttgtaattgacgagaagtactcacaaagtctacagacaaaaattccaaatgggcgcacaactcagtttgttttaataactgcgggtacaactcttccatttaacacacagggaatatcagagccaaacaatgaggattacgatgttaggttacgtgatctaatcgtattagtcatgagaacttttcagaaaaaggtatcccttttatatgtcaatttctgatcttgaaccaatagttttctggattgtgtgtttacatgttttcatttgtttgattttcatggttgacaggctctagatgctaaaaggaaaggaaaggcttagaattcatgtaaatcttttacaaaagtagaaccgtagaagattttcctatttctgattgttttgtgcagtatttgataatttttgtccttgaggtggaatgagcttctcgatagagcaggaatttcaagagttacctggtgggcacataaatggttagaggaacgtaggatcgattcttatcctaattcttttttccttcgcattgcttactctaagttaagccatgtcactgcggtctttgtaaattctaagcagccagtgctgcaaataaacctatgagatgttcgctgcagctcttggatgacttaacatgcccatatgattgttgattt

SEQ ID NO: 126267 - DNA, 498 bp, Zea Mays
acaagagtgtcatcagattcttccctcaccaggtttcagatcttgagctcgcagttgctcttcttgagaagtgtcatacaatgagttcagctactgctcttaggcaagagagcacaggagaaatggagactaaatgtgttgttctattgtggctttatatactggtcctgatcccatttgacatatccactgtggatacaagcattgctactgctgataacgtcgatgggcctgaggtcgttccactggtgacaagaatactggacatctgtaaggattatctctccagttctggtccaatgagaaggatgtcaggattattgcttgcaaggctcttgactcgtcctgacatggcaaaagctttcagcagttttatggactgggcacacaagatgttactgtctgtatcagatgactttgttgatcaatttagatccattggtatagtggaagctttagcatcaatatttaagattggtaaccgtagagcactgcatg

SEQ ID NO: 126268 - DNA, 636 bp, Zea Mays
aaagctacaaagacaaatctagactgaataaatacaaaaactttagtgttgaaaaattgcaaaatatctagcacaaggaatttttgttgctaaccgcctgctttgattatgcttatccaactgtaagttgccattctaagctagattacagtaaagcaaagccagcacaattttgcatcacaaataatatgatagcgggcttacactataagaagtatataaataatttatttttgtctcagtcatacggaatgtaagcggtttacattgcttcaagaagttagtaaaaaacaatgtttttatagtaaaacttgagtatcagtcaactggttgtgtcttgggcgggattatgcagctaggcgcttttgctcttttacagtccaacatattgagagaactttgcagagcatacaacctaagatgtaaaatcaagaagctcgtccagcccctccctcttttttggcatcaatcaaaattgggattttctttgacttgcctgcactggattgttcaatacacaaaggaaaaattaactatagaaaggcttatgtgtggcattaatacgacagaaggtgtaggctgacaacatggaaaaattaaacagctttgctatttcgagccaaatctatgatttat

SEQ ID NO: 126269 - DNA, 357 bp, Zea Mays
atggcgtgccctacgcccgtcgatgagtctctaagaccaactccagtagactccctctccgtatccctaaaacgcgcggccaacagattctctctcctctccgtatccgtctccgtttccagcaacactccccatcccactccgcatacagtctatgacacctggggcccgccaacaggcgcgcgcacgcagagagctgcggagaggagagagaaagcgtggaaatggggagtgcagggacacggcgtctattttgcggagagggatgcgaagcctgctggagagcgtaatagtgcctcagaccgtgcaaaatgcggatgcggagtgggatggggagcgttgctggagttggcctaa

SEQ ID NO: 126270 - DNA, 1701 bp, Zea Mays
aactcctcatcctcactaccaaccaaggcactttctcgcctcccccgtcttcgcccccttcttttctctctctctctctctctctctctctctctctctctctctctctgtaagttgccaaatcgcagctgcagcaacaaccgatccaatacatactaggttccattgcatcacacatcagtcactccaaaccatcaaatcacacacccatcagatcacaaaggcaaagaggagagagagagaaagagggatgatgaggacgacgatgagagagagatactactaaactatctatccatcaatcaatcaggtagcccggcagcaatcgcgtgccgcctttccactcacgtacaccaccacctcccaggctcagctcggttcgttcgttgccgcgtcaaatcgggacaagaagccagccggacctgttgcagtgttgcttcgcctgccctgctgctgttgcttgcgccacgcacgcacgtacctgaagaaagcagcgacggattgatcgaccggtggttcgctgtcgccacggccggcatgtcgtcctcgtcctcgtcctcgtcgtcctccgccgccacggtgttcccgcggtccccgcagctgccgcctccggtcctggtggagaacggcctcacgccgctgcatcagcttacgccggtagccgcggccgcgccggccgccgagcagctctgctacgtgcactgctacttctgcgacaccgtcctcgtcgtgagcgtgcctacgagcagcttgttcaagacggtgacggtacgatgcggccactgcagcagcttgctcaccgtcgacatgaggggcctcctcttcccgggcacgccgacggacacggtcgcgggggccgcaccaccaccagctgctgacactagtacgactaccaccaccatcaccacggcgccgccgccggccaactcggtcaacaacgggcagttccacctcccccactcgctcaaccaccctcaccaccaatccctcctggtggtacgcgcgtggttcaaagctgccggtggagctagctagctcgctctgatctgatgtcatatatcgcatgcctaatctcttgtttccgcgcgcgcgcgtgcatgcaggacgagatatccagcgccgcgaacccgagcctgcagttgcagctggagcagcacggcggcctcggcggcctgatactcggcggcagcaggaacacggccgcgccgcctccgccgcagccgcctgcagcgggtaaaggggccaaagagccgtcgccgcgcgctaatcccgccgtcaacagacctccggagaagaggcagcgcgtgccgtcggcctacaaccgcttcatcaaggacgaaatccaacgcatcaaggctggcaatcccaacatctcgcacagggaggccttcagcgcggcggccaagaactgggcgcactttccacatatccactttggactcatgccggatcaccaggggctcaagacgacaagcctgctacctcaggatcaccagagaaaggacgggcttcttaaggaagggctctacgcggcggcggcggcggccgcagctcatgcggcagccaacatggggattgctccatactaattaatttacaattactcctcctcaagcttgctactgatggtaccttgcttccgagaatctcccttctttacattagcttgttaaacgttccaaatcacgtatgttccttcga

SEQ ID NO: 126271 - DNA, 1594 bp, Zea Mays
aactcctcatcctcactaccaaccaaggcactttctcgcctcccccgtcttcgcccccttcttttctctctctctctctctctctctctctctctctctctctctctctgtaagttgccaaatcgcagctgcagcaacaaccgatccaatacatactaggttccattgcatcacacatcagtcactccaaaccatcaaatcacacacccatcagatcacaaaggcaaagaggagagagagagaaagagggatgatgaggacgacgatgagagagagatactactaaactatctatccatcaatcaatcaggtagcccggcagcaatcgcgtgccgcctttccactcacgtacaccaccacctcccaggctcagctcggttcgttcgttgccgcgtcaaatcgggacaagaagccagccggacctgttgcagtgttgcttcgcctgccctgctgctgttgcttgcgccacgcacgcacgtacctgaagaaagcagcgacggattgatcgaccggtggttcgctgtcgccacggccggcatgtcgtcctcgtcctcgtcctcgtcgtcctccgccgccacggtgttcccgcggtccccgcagctgccgcctccggtcctggtggagaacggcctcacgccgctgcatcagcttacgccggtagccgcggccgcgccggccgccgagcagctctgctacgtgcactgctacttctgcgacaccgtcctcgtcgtgagcgtgcctacgagcagcttgttcaagacggtgacggtacgatgcggccactgcagcagcttgctcaccgtcgacatgaggggcctcctcttcccgggcacgccgacggacacggtcgcgggggccgcaccaccaccagctgctgacactagtacgactaccaccaccatcaccacggcgccgccgccggccaactcggtcaacaacgggcagttccacctcccccactcgctcaaccaccctcaccaccaatccctcctggtggacgagatatccagcgccgcgaacccgagcctgcagttgcagctggagcagcacggcggcctcggcggcctgatactcggcggcagcaggaacacggccgcgccgcctccgccgcagccgcctgcagcgggtaaaggggccaaagagccgtcgccgcgcgctaatcccgccgtcaacagacctccggagaagaggcagcgcgtgccgtcggcctacaaccgcttcatcaaggacgaaatccaacgcatcaaggctggcaatcccaacatctcgcacagggaggccttcagcgcggcggccaagaactgggcgcactttccacatatccactttggactcatgccggatcaccaggggctcaagacgacaagcctgctacctcaggatcaccagagaaaggacgggcttcttaaggaagggctctacgcggcggcggcggcggccgcagctcatgcggcagccaacatggggattgctccatactaattaatttacaattactcctcctcaagcttgctactgatggtaccttgcttccgagaatctcccttctttacattagcttgttaaacgttccaaatcacgtatgttccttcga

SEQ ID NO: 126272 - DNA, 1663 bp, Zea Mays
aactcctcatcctcactaccaaccaaggcactttctcgcctcccccgtcttcgcccccttcttttctctctctctctctctctctctctctctctctctctctctctctgtaagttgccaaatcgcagctgcagcaacaaccgatccaatacatactaggttccattgcatcacacatcagtcactccaaaccatcaaatcacacacccatcagatcacaaaggcaaagaggagagagagagaaagagggatgatgaggacgacgatgagagagagatactactaaactatctatccatcaatcaatcaggtagcccggcagcaatcgcgtgccgcctttccactcacgtacaccaccacctcccaggctcagctcggttcgttcgttgccgcgtcaaatcgggacaagaagccagccggacctgttgcagtgttgcttcgcctgccctgctgctgttgcttgcgccacgcacgcacgtacctgaagaaagcagcgacggattgatcgaccggtggttcgctgtcgccacggccggcatgtcgtcctcgtcctcgtcctcgtcgtcctccgccgccacggtgttcccgcggtccccgcagctgccgcctccggtcctggtggagaacggcctcacgccgctgcatcagcttacgccggtagccgcggccgcgccggccgccgagcagctctgctacgtgcactgctacttctgcgacaccgtcctcgtcgtcccgctcagctgtttaaatctcaaagattttcacaagcttgaaggtgtgcctgggacctgggtgcaggtgagcgtgcctacgagcagcttgttcaagacggtgacggtacgatgcggccactgcagcagcttgctcaccgtcgacatgaggggcctcctcttcccgggcacgccgacggacacggtcgcgggggccgcaccaccaccagctgctgacactagtacgactaccaccaccatcaccacggcgccgccgccggccaactcggtcaacaacgggcagttccacctcccccactcgctcaaccaccctcaccaccaatccctcctggtggacgagatatccagcgccgcgaacccgagcctgcagttgcagctggagcagcacggcggcctcggcggcctgatactcggcggcagcaggaacacggccgcgccgcctccgccgcagccgcctgcagcgggtaaaggggccaaagagccgtcgccgcgcgctaatcccgccgtcaacagacctccggagaagaggcagcgcgtgccgtcggcctacaaccgcttcatcaaggacgaaatccaacgcatcaaggctggcaatcccaacatctcgcacagggaggccttcagcgcggcggccaagaactgggcgcactttccacatatccactttggactcatgccggatcaccaggggctcaagacgacaagcctgctacctcaggatcaccagagaaaggacgggcttcttaaggaagggctctacgcggcggcggcggcggccgcagctcatgcggcagccaacatggggattgctccatactaattaatttacaattactcctcctcaagcttgctactgatggtaccttgcttccgagaatctcccttctttacattagcttgttaaacgttccaaatcacgtatgttccttcga

SEQ ID NO: 126273 - DNA, 680 bp, Zea Mays
actacatttttcatgctgtgcgttacagtgtacaagtcgtatggctggccggtggttctctcatcggccacggcaatgcatgccggccgcctcgttggcagcaggaagagggaagagggagacgaccctgatggtttttgttctcgttcagtcgtcgttcgctgaggaagagagagagagagaggcagatcatgctatagtgacgtgtcgctgagctagctaggtagcttctgatcatatgcatcgatctgacgtctcccttttgcttttcttttttctgctggctctctccctcggggaatacgattgcagggacgaaatccaacgcatcaaggctggcaatcccaacatctcgcacagggaggccttcagcgcggcggccaagaactgggcgcactttccacatatccactttggactcatgccggatcaccaggggctcaagacgacaagcctgctacctcaggatcaccagagaaaggacgggcttcttaaggaagggctctacgcggcggcggcggcggccgcagctcatgcggcagccaacatggggattgctccatactaattaatttacaattactcctcctcaagcttgctactgatggtaccttgcttccgagaatctcccttctttacattagcttgttaaacgttccaaatcacgtatgttccttcga

SEQ ID NO: 126274 - DNA, 219 bp, Zea Mays
atggtgccctcggtgagccggcgctccttagcatgggggcgacgcgaggccctaactaacacgaggcgcaagcgcggtgcggatccaggaaagcttgatcgccggccctgggcggagaggtgggtcggcggcggcataaacggacagcggagggaagaggaggcagaggtgcggcacaagggaggtggcggacaggagacggcggagagggagaggtag

SEQ ID NO: 126275 - DNA, 582 bp, Zea Mays
atgacgcggaacggccgcctccctacgccagcggaacaaccacggagaaacctccacgcgccgtgcctacgcgaacccaccccagccgcaaacgcccgaggaacaaccgcggagaaacccacccgcaaacgccataaacacccgtacgcacgcacgcgattcgccccaatctacaacaagaagggcggcgggctggagaaggtgccggcggccggcggcgaccacaagcctgtgttcgccacggcggcggtgagctccccgccggagcagaagccgttcgtgacggcggcgggcgagctgcccccggcgttcccggagctggcggcgtactacgaccggccgtcggactcgatgccgcggctgcacgcagactactccagctgctcggagcaggtgctgtccccggagcagctggcatgcgaccgggaggtgcagagccagcccaagttcagcgaatgggagcggaccttcgcctccgatcccgtgaaccccgcaggctccatgctcgaccccgtcgtcggccacgccggcagcgacccgctgctgcaggacatcctcatgtactggggcaagccgttctag

SEQ ID NO: 126276 - DNA, 655 bp, Zea Mays
ccttgcatacagtatttctaggagcaagatgagtttgatatcatcagtcgccaaacaaggatcagtctccactttcaaggcggaaagaaacatatgttgtgatatgctttcacataccattggtgcctatggtcgattccggagatcaaggactgcttggaggaggctggattcaagtgggtccacgtttggatgagggagatgccaaatacccagtcaggtggaaacgccaaggaatataacgccaaccgggatgtgaagtatgaagaatcatagcatatcaaccaaggagatgcttggaacgcctatgtcattggagtagcaaatatctagccggtacgtgttgaattctgctacgaaaatgtgatggtggctctcagtttcccaggccaattaatgttttgtggacgcttccactttgctcatgacttctgcatcgcattgctgcggacgaagtatgcagggtggctattaccggacccagataacttttactccagaacatggcctcactgatgtttctgttttcaaaatgaaatgctggcaacgtgccatgcctttgaatgtatttcctacgtatacggtgtataggatatgatgggtgcttcgacggataccgatactacctttcatgattggacgattaggggttggt

SEQ ID NO: 126277 - DNA, 564 bp, Zea Mays
atgctcggcgtcgggtgtcctcggcacgggacagcaggggcgctgcttggcgcggaacagcaggggcgcaggtccaccgggcgggtgctcctggatggcgcggggtcgacgggcgcgagcaggacgggcacggctgccgctgggggcggcttcggtcgggtgaagcagggaggagaaggctgccgagcagcggcgacgccagcaggagcggtgagggccgggcgggtgatggcgcagcgcggtgaggagtgcgaaggcagcggagagggtcggaagcgaggcaaggtgcgcggcaagggaatcgaggggaagttcgtcctgggagcccgggaggaggagcgccgcggagaggaggcggccggcggcagggacgtggcccgcgtagaggaggcgcgggaggagcgggatgcggcgggcgaggctgctaccggtccctacggcgccgggggacgcggggccggaggtgaagtaccgcggggtgaggcggcggccgtcgggacggtacgcgaccgagatctggacccggccaggaagactccgatctggctgggcaccttcgactag

SEQ ID NO: 126278 - DNA, 799 bp, Zea Mays
caccacgtattccttgtcgatgcgactcccgccgcaccctcgctagccacctcctctccgtcgtcgcagcaccgcagctaggccgtggtcgcatcgctacatcctcccaaccgaggcaccacagctactcctcctcttccccccaccgttgccataaggaggcgccagaggaggcatgcactgcggcgaggcatgcagacggcggttaaaccctagcgagacagctcggggtgagacggcggatgccgctgtaggtcgacgagggccggctccgccgcccgcgcaaggcgctcatcgacctcgtcacgcttctcgtataaataaacagcatccccctctcaatccaaatccaccaaacccactcctctgctgccgcattccaacccattcccatcgtcttcaacgaccaacccagcgccaccagcagcgccatcagcaggagagagatcgccggagccatgacgaggggcggcggaggcgacatgaagtccttctaccgtcagcagaagacgcacgccgccgccgccactaccaagcccactggcggcgtctccaagaaggcggcggtgcaccaccacaagaaggccgcgctcgccaccaacgtccacccagccctaggtactgatcctggtccgaatcccccgctcatcgatgttcgcttccgtgacagtaccggcggatcgaccgattgattcgattttgattcgtctctcgtgaacatgaactccagatgagaaccagatgtattcgtccttttgtggtttgctgacaatatattcagagtacctgtttcaaaatc

SEQ ID NO: 126279 - DNA, 1136 bp, Zea Mays
ctgttcgcacaaactacttttgttattcatcaatcagacgcgttaagtggcgaccatctatttgtcgttctgctccccttaacatgtaactgttaagtggtaaccaatcagacacgtccatttcaaggttttccttagtttccattgaaatttatctattaccatggttatctgttaaccaaactatgaagttctgcatataatggtcagaggctatggtatttatcttatagtacaggaaatagacgccgaagcagctcctatgttccattgaagaaagaaggcaattcaattctgaatgataagaaaaataccaagcttcgagtacttgtcgttcgagatccttgtgctatttgcagggctgatgcccgactctcagctcagcacttccatcattgtgatgtgccaaaacaccgaagccatatcatacatgatcacctatggcttcgccgctgtcatcagcacaagggtgtccaacgagctgggagcccggaacatcgccaacgccaggaaggcgctcaccgtgtcgctggcgctgtccctgatgctgggggtggtgttcctgctgctactgggcctcggccatgacctctgggtgcgcctcttcaccaccagcgaggccgtggtcagcgccttcgcctccatgacgccgctgctcatcggctccgtcgtgctggactccacgcagggggtactctgcggcgtcaccaggggctgcgggtggcagcacctggcggcgtggacaaacctggtggccttctatgtcatcggcttgccgctcgccatcctcttcggattcacgctcgccttccaaaccaaggggctgtggatggggcagatatgtagcctcctctgccagaactgcgtcctcttttttatcaccctgcgaaccaactggcaggagttagacctgaccatgttcaacaaggacaacgattttgtctgctaggattctagaaagagtttttcttttcttttttgccatgtgctgttgctgaaacattgaaccatcagcatcaggcttcgacagagctgtttggtgtttgctcatcaattcatcatcagtgtaacactacagattgtaacatttggaatctcgaagataggaattaaaaatgttctgatacaccaatata

SEQ ID NO: 126280 - DNA, 435 bp, Zea Mays
cgtctcctctcccacctgcttggtgctagccaccagccccacctcgccgcctcccttgttgacctcctccaccgcgtggccctcgcgctagggcctagccgcgacactgcttggattttgggttttcccacttttgcatgagtaatattgtttcctgaactgtgtacttacgatgctcgatagttgttggttaggctattttttacttcaagctacctacatccagtagaaccttgtggagtttttcatccagcttagagttatggctcctccaaatgtgttccatgagcttgttagccatcgtccttacaattggtaagagtaaagcttttggtatatgttttgtatcaataggctacagtaatctatatgtgtgcgcctgctcagccttcggtaggaggaataagttcactacctggctattgttatttttca

SEQ ID NO: 126281 - DNA, 675 bp, Zea Mays
cattcaatccggccgggtaggtagcaggcagcagcacatctcagccttcacccctctcacactctcttcactcagttcgagcaaggggggcagcgagcgaagcggtaggtagcagcagtacgtgctgccgccaagctagttagtgccaatggcgagggcggtggcgatgctcgtggccctggccctggccctggcgctgatcgtggcggcgagcgcgggcggggcggcggcgcagcagtgcagcgcggcgcagctggcggcgtgcgccccggcgatcatcagcgggtcgccgcccacggcgtcgtgctgctccaacctgcgcgcgcaggagccgtgcttctgccagtacgcgcgcaacccggcgtacagcagctacatcaacagccccaacgcccgccgcacgctcacctcctgcggcatcgccgtcccgagctgctagggcgctagctcgtgcctcgtggtgtggatgaataaaaagatgcatgtcgatctctgcttactgttatcgtatctgtagtacctcgtgtgatatgaacaatatgtattatttaccaagagcggttgtgtcatgacattcgtgccagacgacagtgatggcgtcgtagcccccagccgctagactgggtgggcatcgagaaccaaacggttaacgatggcggtatatctcaaattatt

SEQ ID NO: 126282 - DNA, 2226 bp, Zea Mays
atagccttcccattggaaagcgaacgctcacagctcacagctcacgcacccatccacctccaaagtccaaaagcggaacccacgcctgccgcaacggcgaaaccgtcggaaccctagatctctctcgcccgcgctccgaaaccccagatccgccatgcaccagcctagagctcgctacccacccggctatggctccggcggtggaggcggagccggacgtggcggtggaggcggaaatggaggaggtggcggaaaccacaactactacggccgaaacccgcagcaacaccactaccaccagcagcagcagtcgcagcactctcataggaactcttcgtaccagcaacagtggctgcggcgagaccaggcccccgccgttgcgggggcagcgtccggaaacgctgtggccaagacggcgtctcagcttgacgccgtaggctcgagctcccaagactggaaggctcaactaaatataccagctccagatacacgctacaggacagaggatgtcactgcaacaaaaggcaatgagtttgaagattatttcttgaaacgtgaactgcttatgggaatctacgaaaagggatttgaaagaccatctcctattcaagaagaaagcattcctattgcgctgactggaagtgatattcttgcaagggcaaaaaatggcactggaaagactgctgccttttgcattccggcacttgaaaaaattgatcctgaaaaaaatgctattcaagttgttatactagtaccaacaagggaactggctctgcaaacttcgcaagtctgtaaagagctcgggaagtaccttaacattcaagttatggttagcactggaggaactagcttgaaggatgacatcatgcgtttataccaacctgttcatttacttgttgggactcctggccgaatacttgatcttaccaggaagggcatttgtgtgttgaaagactgttcaatgcttgtcatggatgaggcagacaagctattagctccagagttccagccttctgtggaggcacttattcatttccttccacctagtcggcagctgttgatgttttcagcaacctttcctgtaactgtcaaggaattcaaagataaatatctgcctagaccttatgtgattaatctaatggatgaactgaccctgaaaggaatcacacaatattatgcttttgtcgaagaaaggcaaaaagttcattgcctgaatacacttttctcaaagcttcaaattaatcaatccattatattctgcaactctgttaatagagttgagctactggctaagaaaataactgaactcggttattcatgcttctacattcatgctaagatgttgcaagaccacagaaaccgagtgtttcatgattttcgtaatggtgcttgcagaaaccttgtgtgcacagatctgtttaccagaggaattgatatccaggctgttaatgtggtcattaattttgacttccctaagacatctgagacatacttacacagggttggccgttctgggagatatggacaccttggtttggcagtgaacttgatcacttatgaagaccgtttcaacttatataggattgagcaagaacttggaacggaaattaagacaatacccccacagattgacctgtccatatactgccaatgatatgtgacagtttcaatgagcatcggacacattttatttattttgagaacatctgtacatagcaacccatcaagtgagttctccaactaaggcgcaactatttcagaagctacctaaatggctacattcctttgtcgtcacacatcaatttctcccccattctcgtcgggttttgttttaatgccttgatgtcgtttgtaagcttacttggattagtagaggaagtgtttcctgtaggctctgatctggtactaacctgtttagctgaggacatgcacattgggtgggctgcttggggcccaaaaactatgatgagatgagacattatcttacctcgcttgacattttcaatttacctgtttgccaatctcagtagagcctcagttctactggagttgcctgtgttattatttgattagttttccatttccatctccctaatgttatgatgcataatatagtgatgcctatctgtagccgtatttgttgattttgatttttcatggtgtgttacggtttaacttgaaattatttctgtatcaacttcgttgcgagaatacccatcttgtact

SEQ ID NO: 126283 - DNA, 600 bp, Zea Mays
ttttttttaatcttgtctagaagctgtttgttttataaccttcctgaattaaatatttatgtgtgttgtcaaattcctaggttggccgttctgggagatatggacaccttggtttggcagtgaacttgatcacttatgaagaccgtttcaacttatataggattgagcaagaacttggaacggaaattaagacaatacccccacagattgacctgtccatatactgccaatgatatgtgacagtttcaatgagcatcggacacattttatttattttgagaacatctgtacatagcaacccatcaagtgagttctccaactaaggcgcaactatttcagaagctacctaaatggctacattcctttgtcgtcacacatcaatttctcccccattctcgtcgggttttgttttaatgccttgatgtcgtttgtaagcttacttggattagtagaggaagtgtttcctgtaggctctgatctggtactaacctgtttagctgaggacatgcacattgggtgggctgcttggggcccaaaaactatgatgagatgagacattatcttacctcgcttgacattttcaatttacctgtttgccaa

SEQ ID NO: 126284 - DNA, 1167 bp, Zea Mays
tttctccgcctcctcgcttccctttccgtgtcgccctaaaagaccagactaccccgctgccccgaagtcagagcctcagaggggggagaggaggctagtagggatagcgcatcgtcatcgcacctccacgcgccggcgagccagaccaccagaggcagcgatggcggtggcggagctgtgggagacactgaagcagtcgatcgttgcatacacggggctgtcgccggcggcctttttcacggccgtggcggtggcggccgctctgtaccatgtcgtgtcggggctcttcgcagccccgcccccgccgccgccgcgcccgcgggaggagcccgaggcggagccgctcccgccccccgtgcagatgggggaggtctcagaggaggagctcagccagtacgacggctccgaccctaagaagccgctcctcatggccatcaagggccagatctacgacgtcacccagagcagaatgttctatggacctggtggaccatacgccctattcgccggcaaagacgccagcagagccctagcgaagatgtccttcgagccacaggatctgaccggcgacatcactggcctaggcccgtttgagctcgatgccctgcaggactgggaatacaagttcatgagcaagtacgtgaaggtgggtactgtcacgaagaacgtcaccgttgaagaccgcagcagcgccgcaagcacagcccctggaaccagtgaggccgccaccgaggccgagaaggcgccgactacgacgacgaccgaagagaagccgagggaagtgccagcggaggctgtgaaggagaaggaagccgccgctgccgccgccgcggctggtgaaggtgcccaggaaaactagagcatttttcagtatgcagcaataattcgacatggtcccattcggttcgtgtcggggccctctcgtatatcgtatcagcagcgtggcctgtgtaattggatatacgtcatctgtacgagcgccatggcccttgaggagctggtgctttgtgttgttattagtcgtccgttgcagattttaaagacatcgggttcaggttgggcgcccctggccctgtttggtcggaaaacaggcgctctttcaaaatgagttatttctttgtaccgtatgatcagtccacgtcggaaattactcagtttatcatctca

SEQ ID NO: 126285 - DNA, 2418 bp, Zea Mays
ccataacctttggctcccaagctgagcagcacagctttcttccttctcccgcatccaactcgttcgttttattacctcgagccaacgcggcgggaccgaaaccaattccacatctcctccccctccctccctcccaccgaggactctttcccaagacctgccccgagtcctagttcgggagagaggtcgagggaggcagcccataaattccttgcccgcgaaaatctctcctcgcctctctctctatatatttccgcttatctgcccgcgcaaatttcttgccgcattggtttggttttccggctcggcaaaggagacggcttttctgtctcccgtgacctacatgatggcgagcacggctccagcggcctccaccgccgtggcattcggggcagccgccacgccgcggggaccggcgtcggcgtcggcggcgctctgcgcgagggtgcctgccgctgccggcggcatgcgtcgctccggggtggccgtgcggtgcgacgccggcgccgacgcccaggtgcgggcggtggccaaggcggccagcgtcgccgcgctcgagcagttcaagatctccgctgaccggtacatgaaggaaaggagtagcatagctgtgataggcctcagtgtgcacacagcaccagtggagatgcgcgaaaaacttgcggttgcagaggaactatggccccgtgctattcaggaacttactagtctgaaccatattgaagaggctgctgtgcttagcacctgtaacagaatggaaatttatgtggtggccctatcatggaaccgaggtatcagggaagtcgtggactggatgtcgaagaaaagtggtattcctgcttctgagcttagggaacacctattcatgctgcgtgacagtgatgctacacgccatctgtttgaggtatcggctgggttggactctctggttctcggtgaaggacaaatccttgctcaagttaaacaagttgtgaggagtgggcaaaacagtggaggcctgggaaagaacattgatagaatgttcaaggatgcaatcacagcgggaaagcgtgtgcgctccgagactaacatatcatctggtgccgtttctgtcagttcagcggcagttgaattggccctgatgaagcttcgaaaatctgaagcgctgtcagctaggatgcttttgattggtgccggcaaaatgggaaaactagtgatcaaacacctgattgccaaaggatgcaaaaaggtggttgtggtcaaccgttcagcacaaagggtggatgccatccgcgaggagattaaagctatcgagattgtgtacaggcctctctcggagatgtatgaagctgctgctgaagctgacgtcgtgttcacgagcaccgcatctgaaaccccattgttcacaaaagagcacgcagatgcacttcccactgtttctgatgccatgggcggtgtccggctctttgtcgacatatctgtcccaaggaatgtcagcgcgtgtgtctctgaaattggctccgcgcgagtgtacaatgttgatgacctgaaagaggtggtggaagccaacaaggaagaccgtctcaggaaggcaatggaggcgcagacaatcatcaccgaagagctgaaacggtttgaggcatggcgggactcgctggagaccgttccaaccatcaagaagctgaggtcatatgccgacaggatccgagcctcagagctcgagaagtgcctacagaagatcggggatgacgttctcaccaagaagatgaggagagccatcgaggagctaagcaccggcatcgtgaacaagctcctccacggcccgctgcagcacctgaggtgcgacggtagtaacagccgcacccttgatgagacgctcgagaacatgcatgctctcaaccggatgttcagcctcgacacggagaaggcgatcatcgagcagaagatcaaggccaaggtggagaagacccaaaattgaggcctggagtcaatttttctacccgtgtatacttcaccctccaacctgattccattttttttatcctctcacttactgagctcctccccgtcttgccgagacatcaaacgtgtcgtgaattagcgccatggcagcagctcaatctgtcgagagagtggcaaattctctctactcgagctgcttttctttgtacatttttgctcgagctgctgtggagcaagagccccattcttaagttatatactttattcggacgaaataaacaggaatatagcaatgtgtcagctgatgccgttttccctttggcatcacacttgtaaggtttactgataccgtataccttttaatgcgttaacatttccaaagagtttaaccttgcttctgtaggggccagattggtctgtctcatatgtacataatttcgtctgtttatttaatgatatatcgacaaataagactga

SEQ ID NO: 126286 - DNA, 716 bp, Zea Mays
gaacggtgtcacggataagccgataagatagcgtggagccgtggaggtggagggctcgctgcgactccgcctcatcgccaccctctcttcacaccccacaggccaagccagccgcaccgcgccgcaccgcattttggacatggcgtcgtcctcctgcctcgcctcgccgtctggcgccacgctctgccgcccgcggcggccgaggtgccgcgtggcgtgctcggcggccgacgccggcgggagcaccgggccggcgtgggccaagggcgcgggccgcctcgcgtgcggcgtgctggcggcttggtccgtcgcgtccgcgtccaatccggtcattgccgcgagccaggttggtgaatgtccctctttcttatcccacatccgccgtttcgcgttgcggtcgggtcgcaattttctggaactgtcgcgtttcgctgcgcagtaagaggggtggaatttttaatctctgtcaaatgttagtctcggtctggatcaccgggtgtagatttttttttatgatcgaaggagcctcgcattttgcgatctggtaccaggcatgttttccttaattccgtcagaatatgttgctgtaaaatatacatatatacagagagctgctccattgaaaaattgtatacacggaaaacaatagtagtaattagttaagtacaacatgtttttcctcaacaaagattttataaacgttggaagatttttgg

SEQ ID NO: 126287 - DNA, 1614 bp, Zea Mays
gaacggtgtcacggataagccgataagatagcgtggagccgtggaggtggagggctcgctgcgactccgcctcatcgccaccctctcttcacaccccacaggccaagccagccgcaccgcgccgcaccgcattttggacatggcgtcgtcctcctgcctcgcctcgccgtctggcgccacgctctgccgcccgcggcggccgaggtgccgcgtggcgtgctcggcggccgacgccggcgggagcaccgggccggcgtgggccaagggcgcgggccgcctcgcgtgcggcgtgctggcggcttggtccgtcgcgtccgcgtccaatccggtcattgccgcgagccagagattgcctccactctcaacggagccaaaccgatgcgagcgcgcattcgtggggaacacaattggccaggcaaacggggtgtacgacaagccccttgatctccggttctgtgattacacgaacgagaaaaccaatctaaagggcaagtctttagctgcagcgctgatgtccgaggcaaagttcgacggcgctgacatgtctgaagttgtcatgtccaaagcttatgctgttggtgcaagtttcaaaggaaccgacttcacaaatgcagtgatagaccgcgtcaattttgagaaggccgatctcacaggggcgatcttcaagaacacggtcttgtcaggatcgaccttcgatgatgcaaagatggacgatgtcgtgtttgaggacacgatcatcggctacattgaccttcagaagctatgcacgaacaccagtatcagcccagatgcgagattggagctgggctgtaggtgattaattcaccaagagttcatccccatggtccatgttaatctgtctgtctatagagccgccatgacaagacgcgatcaaagacgtgacgccgattttatccatatctatgcatgtacaaattaaaccactgtatgtctcaagaatatcagcagcaatgtaaccatatacatagaagcactatatatggttcccacacgcatatattattattactgttcacatcgccgcagttatatataaaaacattactatctactagtgctttattccacataatactagtgctagtatcgcatcatgccctaacttttctttgccaaacattattgtttgcctcctggtcgtggtcctgggttggctccttgatgcgcatccatctactagtatactggaaaactggccactacaagggccgatgctgctcatggaagtatagccattggcgagcatgcgcggcacggcgatacctagacgcaccatctaaatggccggcccgccgccgggcacttgccggtggcaaggtagtaggtattttcctgtcttctttgattgtttttttttccgaattccgatcgaagggctgcggttcattcgacgtcgttgccattgttctgctttccggtggtgtcgatgaggcaggtctcgacgccgccggtcatccataggaaccacgcgtagctgctccggtggtggctgctctcgggctcctcgtcaatggcgccggtaaacatgtcctccgcgccgccaatgtcgccgcgggcgtgccagaggaacatgccgtacctccgcatcgcttc

SEQ ID NO: 126288 - DNA, 588 bp, Zea Mays
atagctggagccgaggttagatgcgagggtttcgcgggaagggtaagaagttaagccaacgagaattgggccgaaatggccaaaagccaaaggccccacgccccacggactacggtaagccagcggacgagccgccatccgccacgccatggcctctctcttcgccccggcacgccgcctgctcagccttggccgccgccgccaccgccgcggaggacagctccccgtgcccccctcgtctcgtagcaacagcgcggaggagcgaccaccgccggcgcggtcgctgagccttgattccacgctgtttccgctgggccacccgagcacactccttgtgccggagatcgaactgtgggcggcgcggcccagaaacctcctccgagccgttgagctccaacgcatcgtcaaggagctccgcaagcgccgccgccaccgccaggccctcgaggtagatacgtctctcctcctttcaatctaggttgcttgttgtggatggcgcatggaaggtgttcgatgaaatgatatgggttttttttgttgttgttgttgatgctgtacatgtccgtatcatctgtgccttcgtatttg

SEQ ID NO: 126289 - DNA, 1810 bp, Zea Mays
cgagaattgggccgaaatggccaaaagccaaaggccccacgccccacggactacggtaagccagcggacgagccgccatccgccacgccatggcctctctcttcgccccggcacgccgcctgctcagccttggccgccgccgccaccgccgcggaggacagctccccgtgcccccctcgtctcgtagcaacagcgcggaggagcgaccaccgccggcgcggtcgctgagccttgattccacgctgtttccgctgggccacccgagcacactccttgtgccggagatcgaactgtgggcggcgcggcccagaaacctcctccgagccgttgagctccaacgcatcgtcaaggagctccgcaagcgccgccgccaccgccaggccctcgaggtctctgagtggatgagtctcaagggtcacgtcaaatttctgccaaaggatcatgctattcacctggatttaattggtcaaatccatggggttgaagcagcagagacctacttcaataacctatctgacaaagataagacagagaaaccctatggtgcacttctcaactgctacacacgagaactcttggtcgacaaagcgttggcccattttcggaatatgaaagagctgggtttcgtgttctccacgctcccctacaatgacctcatgggcctctataccagaatagggcagcacgagagggtcccttcggtgatggcagaaatgaaaagcaatgggattgttcctgataattttagctacagaatatgcataaattcttatggcacaagagcagacttttttgggctggagaacaccctggaggagatggaatgtgagcctcagattgttgttgactggaatacctatgctgttgtggcaagcaactacattaagggtgacctaagggagaaggcatactctgcgttaagcaaagcagaagcaaaactggataaacaggatcctgatgcatataggcacctgatttccctgtatggcaaccttggggacaaatcagaagccaagaggctatgggcggtgcaaatgtcgaactgtaagaggtacattaacagggactacatgaatatgctttcggtgctcgtgaagcttgatgagatcacagaagctgaagacttgctgaaggagtgggagtctagccaaaactcattcgacttccgtgtcccaaacgtcctgctcacagggtaccgccagaaggccttgctggacaaggccgagatgctgctcgacggcttcttgaagaagggaaagacgcctccttcgaccagctgggggattgtggcaatcggctatgcggagaaaggtgatgtggcgaaagcttatgagatgaccaagaacgccctctctgtgcacgcccccaatactggctggatccctaggccttccatgcttgagatgatacttaagtacctcggagacgagggggaggtcaaggatgtcgaagctttcgttagtctgctgaaagctgctgtgccagtggactctgatatgaccgaggctttgtcgagggctcgggctcgtgcgagggaagaaaggaaggctgaagaggcaacggaagctcctcgcggggatgttattgcctgagctggttgtcggtgtttcagcgctgctgtctgatcctatgtgctagtagtagaataaattaatactgtagttagttataatccttcctttgatagctccttgttttcattagctataagttttatgttggtgtttggttcgccacttcgtaataactatagttatcatatcaatgatgcgaagcgatacccgttttggctgaacaataattcactcca

SEQ ID NO: 126290 - DNA, 108 bp, Zea Mays
tttttttataagccacgaacatatgcaccccagccacggataccgtgttcaaatactgtacagtgcataaacattgcaaccaacaattctttggtaaattccatgaac

SEQ ID NO: 126291 - DNA, 2727 bp, Zea Mays
gttaccgatgtctccagtcctctggctcacctcactcctcttcctcgtccactcggccgccgccgacaccaggcgggcgctgcacgagccgctcttccccatcgaatggaccccgccgccgtccactacggcgccaccagcaccgggattcgcctccgatccctccacacccgtcccacccgtcgacaacggcgggccggcgctactccccgctcctccgccaccgaacactgtcgccgcggacgcctcttcatcccgcacaggcccgggcccgcgcccccacggcggcggcggaacacccaaggccgccattgtcgtcgcctccgccgccgcggcggccgtcctcgcgctgctggccttcgccgccgcgtttctcctcacgggccgtctcgcgcggcaccccgcgtgggcgcacaaaccccccggcctcgccgccgccgcgcaccctgggcctgcctccgcactcgtgctgcacgctgacgcggtgggcacctcggcggcggcggcggcctcgtcgtcgggtgccactgccacaccgcaccggaaggcccgctcggagcgcgcgaggcggggcatgtgccgcgacgtcgacaccgtcccgagcccagaactcaggccgctcccgccgcttcggcgcgcgggatcgtccgacgaggacgccgcgtactacacaccgggccagcgctcggcggtgtccgccggcggcgagggcgccgggacgtggagccaggcgagcgcgtccagcccacgaaccaccactccctcccgccaaagcctccccagcctcaccagcgattttttcccaccgacgccggccgccgccacggccgttccagctgcaaccgtggcgcctcctccgcccgcacctcctgcgccacgctcccgacgcactctgccgcggacccgcttttccgccggctccgcctcggatatgaatatgatcaagcaaattgtctcgccatcctccaacctaccaccgccacctcctcctcctccaccgccgccgccgccagcgccaagacgcaccaacgcaatcccaaagcctctgacaaccgctacaccattatcaacgcgtcggcttctcaaacaagagcaaacagaggggccaagtgtcgctgtgccgagagcacccgtcgtggcggtgaacaaggacaatgacggcatgccaattcggacgaacgatgatcatgccggtgacgaagcccgtcccaagctgaagccgctgcactgggacaaggtccgggcgtgctccgaccgcgacatggtctgggaccggctcaagtctaattcgttccagttggatgaggacatgatcgaggtgcttttcacgaacaatgctgcaaatgcacctcctagggacacactgagaaaacctggagtgctgcaatgtagtgccaaagagaaggtccttgatcctaagaaggcacagaacattgccatcctgctgcgcgcgctgaatgtcactccggaagaggtctccgatgcactgctagatggcaatgctgaatgcctgggtgcggatttgttggaaaccttggtaaagatggctcctacgaaagaggaagaactgaagcttcgaaactttaccggggactcatcgaagcttggttccgcagagcggtttctcaaggcagtgcttgacatacctttttctttcaaaagagttgatgctatgctctatcgagcaaattttgagagcgaaatcaattacctcaggaaatctttcgaaacattagagggagcttgtgatgatttaaaaagcagtagattgttcctgaagctacttgaagctgtcctgcgaactgggaaccgaatgaatgtcggcacaaaccgcggtcaggcaaaagctttcaagctggacactctactcaagctcgcagacgtcaaaggggccgatggtaaaaccaccttgctgcacttcgttgtccaggaaatcgtgcggtcggaagatgcaaaatccgagaaagccgtagaagacgaaaccagaagcatcgtgaaagacgaaacgttccgtaagcaaggattgaaggttgtatctgggctgagcaatgagctcggcaacgtcaagaaagcagcgggcatggatttcgatgtgctgcacagctatgtatccaagctccaggccggccttagcaggatcaagtcggtcctcctgctcgaggagcagtgcgcccaaggccacggttttttcgcgaggatgcgtggttttctcgaggaagctgagatggagatccaacaggtgaggtgcgacgaggagagggctctgggaagggtgaaagagatcaccgagtatttccatggcgatgccggaaaggaggaagcgcaccctctgaggatcttcatggtggtgagggacttcctgtccatgctggaccatgtatgcaaggaggtcggccagcaggacaggacggttgttgttggatccgcaaggtccttccgcatgtcagcgaccacggcaatggcgaacctcaaagtgtacggccagcacgcaagagacaacgacgacgacgaagagagttggtcgctgtaggaaatcggggtcagggaccacggagccaaacgaacagaaccaaccacaagaaccctatatagatgagtattattgtttcatcttaccatatagcgcacatatgtaacttttgataagtacgaagataggatcaaattacgttgtataattatggatgcaccggattctttcttgtacgaagataggatgattttttg

SEQ ID NO: 126292 - DNA, 877 bp, Zea Mays
ttctgggcaaggaattagccatctattgcgaaaccaatcaaacaaaggaagcccatggtccaaaggcagaaaggtggtccctttctcaaggaaaccctagtctcgagccccaatcgcacaagaaaaccatcacgcttctcgattttccggtcaagattactaagaaagacaagcaagaacctaattgatgttattggttgagcacaagacaaaagaggcgcctttgatgcactcacccttgggaccggagcacgcggcggcgctcggcggaggcgcagatcccgagcagcgcgagcaggctggcccgccgcgtccgcttctgcgctgcgggtcggagcccgtcgagcgcgaacgtgacttcgtccacgctctccatcatctctccgtactcctccgcctccatcagcgttgccgtcggcgccaccgcgggggcttccgcgagctcccaccctcctcttcttgccccgcgccgccgcccctccggccggggccgcggcggggacggaggtgggtcctcgtcgaagtcccacatcgaagaggactcctgcgacggcgggagcgggagcggctgcgaggccgacgacaccagcaagtcggcggcgtcgtcgcagtcgaacgcgtcctgcgaggacgagaccccgcccccgccgtcggagaaggagcgggatctgcgcccgtacgttcgcaggatcatggcgtccgcgccgtcgtcgatgcgcggcgagagataggaattgggcgtggcttgggtgtgttcggggcgtcgtttgcttcgcgttgcggcggatttgggaatgaagttgtgaggggcagctgcagagctgcttgggggattttgggggagcgaggaactcggcttcggctcgatcaggttgtt

SEQ ID NO: 126293 - DNA, 2589 bp, Zea Mays
atgtccgacgaatacggtgggctcctcatccatccacatttctgtgggttactctatgctctattgctattgcgcttgtttaacttgggattttgattggttttcttcccctttcgctgtggttttggcgggggattagtggacttgcccgtctcggacgaggatgaagaagagctcgaagatgagatggatgatggtgatggggagagtggtggtggaagctcgaagaaaaaggccaagcagcacgtggagcagctcaagcggctgcagcaaaaggatcctgatttctataaatatttagaagagtttgataaagatttgttgggatttgatgatgatgatgatgaaatcgaggtaagctggtccctttttaacgaccgggagactggggttgaggagaaagagcaatatgtatctaaagaggaactgaagcatgtgaaaccgattacaatggaaatggttgattcctggtgcaacggagtagagaatgaaaagataggttctatccgttctattcttcaagcttttcgcagagcctgccattatggtgaagatcatggggacaattcaactccgaagctcagtgtcatgtctggcagcgtacttgataaagttatgcactttgttttgaaacacatggataaagtcctccgtcaattacttggtgccccaagctatggagggaagaaagaggtaatcagtgagctgatgctgagtaagtcatggaagaggcatggtaatcttatgaggatctatcttgccaatgcgcttcatatgataacagagatgaccgatgagcaaatgatagcatttactgtacaccgtgtcagagcatcagctgtttttctggcagctttcccatcgctcctgaggaagtatgttaaggctctgctccatacctgggctagaggacgaggtgcaatgcctcttgtttcttttatgttccttcgagacttgtgcattcaagtaggttcagattgccttgatacttgcctcaagggtatctataaggcttatttggtgaactgcaaactgtccaaatctatcagcggatcaaaacaacaacacattcaattccttggaaattgtgtcagagaattgtatagtctggatccacaaagtgcgtatcagcatgcttttgttttcatccgtcaactgggggttatcctaagaggagctcttactgaaagggggccaaagtcagtgaaggacaaaaggcagaaagaaagtagcaaatcatcgaaaaaacaagcggagaaatcttaccaaaaaatttatgattggcaatacatattctgccttgagctttggaccagtgttgtgtgcggatgtagttctgaggaagaattccgacctctagcttatccgttgacacaaataatacatggtgtggcatgcctcgtacctagcgcacgttacttccctgtgcgctttaggtgtgtcagaatgcttaattgtattgccgaagccactggtaccttcattcccgtgtcctccctgctgcttgatatgcttgaaatgaaagaacttagaggacgtccagatggtgttggcaaagccgtgaatttgttcagtgttaaacaggttgacaagaaaacagtaaagacacgtgcctttcaggaagcttgcatttattctgtggtcgatgagctggctaaacatttgacccaatggagctactccattgccttctttgagatgtcctttattccacttgttcggctccgaagtttttgcaaaaccattaaagcggacagatttaggaaagagatgaaggatcttatctatcagatagaggccaatgtcgagttcattaagtcaaaacgagtggggattgcattttcacccaatgacccagctgtagagtcatttctgcagaccgaaaaggaagaacgttgcagccctctctcaaaatttgttgctactttacaccagagagcgcaagacaggatggatgctctggatgagaccagtgtgattgtgggtgccgagtcctcaaccttctcacggaggttatcagaagcgcagaagcaacaggatgagcaggacgatgatgaaggcactatcgctttcagtaagaactggctgtctgaaaataagaaacccaaaaccccaaaggaggataaaaagcgaccccgggaggatgatgatgtcgcgactgaggaggatcgggttgaggatttggtcttgagctcagatgaagaggatggcaacaatgaggaagcagacgatggttttgttccggttgaaggtgatagtgatgaagactttgtagaccctgacagcgaatataagaaacaaaagaaggcgaagctgaagaagaggaacaagcgccagccatttctgcacaaggcgccctctagaacaaaaagtaattcagggcccaagaagaaggccagacattagttatgcctgatagggcttggcaaatatgctgccgttgtgatgtatgcttctgagttccgaccgataaaaacattgtcccttgagtggaaaaattattatattttttcaagaaaaatttcaagtctttttttgaccccaacaggactgagatagaatttccaatctgagttttcatttcagtgc

SEQ ID NO: 126294 - DNA, 2571 bp, Zea Mays
atgtccgacgaatacggtgggctcctcatccatccacatttctgtgggttactctatgctctattgctattgcgcttgtttaacttgggattttgattggttttcttcccctttcgctgtggttttggcgggggattagtggacttgcccgtctcggacgaggatgaagaagagctcgaagatgagatggatgatggtgatggggagagtggtggtggaagctcgaagaaaaaggccaagcagcacgtggagcagctcaagcggctgcagcaaaaggatcctgatttctataaatatttagaagagtttgataaagatttgttgggatttgatgatgatgatgatgaaatcgagaacgaccgggagactggggttgaggagaaagagcaatatgtatctaaagaggaactgaagcatgtgaaaccgattacaatggaaatggttgattcctggtgcaacggagtagagaatgaaaagataggttctatccgttctattcttcaagcttttcgcagagcctgccattatggtgaagatcatggggacaattcaactccgaagctcagtgtcatgtctggcagcgtacttgataaagttatgcactttgttttgaaacacatggataaagtcctccgtcaattacttggtgccccaagctatggagggaagaaagaggtaatcagtgagctgatgctgagtaagtcatggaagaggcatggtaatcttatgaggatctatcttgccaatgcgcttcatatgataacagagatgaccgatgagcaaatgatagcatttactgtacaccgtgtcagagcatcagctgtttttctggcagctttcccatcgctcctgaggaagtatgttaaggctctgctccatacctgggctagaggacgaggtgcaatgcctcttgtttcttttatgttccttcgagacttgtgcattcaagtaggttcagattgccttgatacttgcctcaagggtatctataaggcttatttggtgaactgcaaactgtccaaatctatcagcggatcaaaacaacaacacattcaattccttggaaattgtgtcagagaattgtatagtctggatccacaaagtgcgtatcagcatgcttttgttttcatccgtcaactgggggttatcctaagaggagctcttactgaaagggggccaaagtcagtgaaggacaaaaggcagaaagaaagtagcaaatcatcgaaaaaacaagcggagaaatcttaccaaaaaatttatgattggcaatacatattctgccttgagctttggaccagtgttgtgtgcggatgtagttctgaggaagaattccgacctctagcttatccgttgacacaaataatacatggtgtggcatgcctcgtacctagcgcacgttacttccctgtgcgctttaggtgtgtcagaatgcttaattgtattgccgaagccactggtaccttcattcccgtgtcctccctgctgcttgatatgcttgaaatgaaagaacttagaggacgtccagatggtgttggcaaagccgtgaatttgttcagtgttaaacaggttgacaagaaaacagtaaagacacgtgcctttcaggaagcttgcatttattctgtggtcgatgagctggctaaacatttgacccaatggagctactccattgccttctttgagatgtcctttattccacttgttcggctccgaagtttttgcaaaaccattaaagcggacagatttaggaaagagatgaaggatcttatctatcagatagaggccaatgtcgagttcattaagtcaaaacgagtggggattgcattttcacccaatgacccagctgtagagtcatttctgcagaccgaaaaggaagaacgttgcagccctctctcaaaatttgttgctactttacaccagagagcgcaagacaggatggatgctctggatgagaccagtgtgattgtgggtgccgagtcctcaaccttctcacggaggttatcagaagcgcagaagcaacaggatgagcaggacgatgatgaaggcactatcgctttcagtaagaactggctgtctgaaaataagaaacccaaaaccccaaaggaggataaaaagcgaccccgggaggatgatgatgtcgcgactgaggaggatcgggttgaggatttggtcttgagctcagatgaagaggatggcaacaatgaggaagcagacgatggttttgttccggttgaaggtgatagtgatgaagactttgtagaccctgacagcgaatataagaaacaaaagaaggcgaagctgaagaagaggaacaagcgccagccatttctgcacaaggcgccctctagaacaaaaagtaattcagggcccaagaagaaggccagacattagttatgcctgatagggcttggcaaatatgctgccgttgtgatgtatgcttctgagttccgaccgataaaaacattgtcccttgagtggaaaaattattatattttttcaagaaaaatttcaagtctttttttgaccccaacaggactgagatagaatttccaatctgagttttcatttcagtgc

SEQ ID NO: 126295 - DNA, 2219 bp, Zea Mays
cacttctgttccagcacacgcatgagaaagctgcggagccagaaagcaggcccgccggccgccgccgcctccctccgcttcgccgcgctcctccagtcgtgcggccgcaccggagacatccgccgaggccgcgccctacacgcgcgcctcctgctcaccggcgcggccgccgcgtccaccttcctcgccaaccacctcatcaccatgtactcccactgcgccgacgcggtctccgccgtccgcgtgttcggcgtcgtgccccgccccaacctcgtctcctggacgacgctcgtctcgggtctcgtccagaactccatgcaccacgacgcgctcgccgccttcgccgccatgcgccgtgcgcatatcgcccccactcagttcgcgctctccagcgccgcgcgcgccgcggccgcactctccgccccgcgccccggcacgcagctgcactgcatcggcatcaggcttggcttcgacaatgagctcttcgtcgcgagcaacctcgcggacatgtactccaagtgcggcctccttcacgaggcgtgtagggtgttcgatcaaatgccgcaaaaggatgctgtcacctggactaccatgatcgatggctacgcgaagaacgggagcctagaggccgccattctgatttttcgggatatgaaatgtgagggcctggttggagctgaccaacatgtcttctgcagtgcattgagtgcatcgggagggctcaaggatggatggtttggtcgaagcctgcactgttgtataattaaggctgggtttgaactggagactgttgtgaggaatgcgttactggacatgtatgctaagtctggggatttggagaatgcctctcgtgtggtgagtattgatcctggaggttggaatgttgtgtcagctacctcactgattgacggttacgttgaggcaggtcgtattgaggaggctcttgagacatatactgagttggggaggcaaggtgttgagcccaatgaattcacttttgcgagcatgattaagggctgtgccatgcatgatctgctcgaacaaggtgcccagctgcatgctcaagtgctcaagacaaatttgatcagtgactcatttgttggttccacccttgtgtatatgtatggaaattgtggcctcattagtttgtcccttcagttatttaatgagattggataccgtactgagattgcctggaatgcggttataaatgtttatgcgcagcacggtcatgggtggggagcaatccaagcttttgataggatgacctcaagtggtatcaggccaaatcacattacatttgtctgcctgctgactgcatgcagtcatgctggattagtggacgaaggactgggatatttccactccatgaaggatgcacatggtattgagcctaaagcagaacattattcatgtatcattgatatgtatggtcgagctgggagactagatgaagcagaaaaattcataagtgagatgccagtcaaacccagtgcttatgcttggtgctccttgcttggagcatgccgtatgcaaggaaacaaggagttgggagaggttgctgctcagaatcttatgaaacttgatccaaataacaccggtattcacatatccctttctgggatatacacatcattgggccaatgggaggatgtgaaggcagtcaagaagtcaatgaaggatatcagtattaaaaagctgcctggttttagctaggtcgatgctaacaagaaaacacgtgtgtttggatctgaggtttagtcacactcactcacagcaagagcagatatataaaaaacttgagaaactctccaaaaggataaaggaggaaggttatgtggcagacataatctccttgccactttaccttgaagatagaaaaaaaaacgagaggcttctgcactatcacagtgagagaatggccgttacttttgcttggattagcatgccagctacaaaaccaatcattgtgaagaagaatttgcagatttgtgtagactgccattctgcattgaagttcatttctaaggtagaaagcaggtatattattgttagacataattctaaggttccaccattttgtgaatgtgaggtgttcctgtggagattactgatgattaactcttatccaccacttctttcttccatcggcatagagaggatacagttcacattcttgccagctggttgtttcacaatgcttatactttacttcgatg

SEQ ID NO: 126296 - DNA, 1670 bp, Zea Mays
acgcgcagtggctgcgtgccgttgggggctggtggagacttcacgtctccgcctcccgccgggcttactcgccggcgcccaccctcgagtcgacacgcgcgcacataaacaagtcaaaacagaagtcaacccgcccctccgccacctcgccgtcgtgccgtactgtcgtgtatcctagccccgcgcctccttcctatatagagagagcgagccgcgcgaggtctctgcagccagaaacagagctgggcgcacggagagaccaggttccaagcgaaggcagtgcaggcaggacgagtggagctagcgtgaccttgcgttgccttcgccgctttgcttgtgtcgagaggagaagcagagcagcgggacacgagcagcgggttggaggttgacaatggctgatcaccagaggatccacccagcggacctggaggccggcaaccggccgctgatgccgggaggctcgttccggtcggacaagggcgacccggcgcagcgcgcgaagcagcagcaacaacaaggctacgttcccggggccctgcctccgccgccgcgccgcgtcgcgccaccggcgccgctgccgccgccgaagcggcggggccggggctgctgctgccggctcctctgctgcgccgtgatcagcgcggcagtgctggcggtgctcgccgcggcggcggcgggcgcgctgtacctggcgctggaccccaaggcgccgcggtactcggtggaccgcctctccgtgtcggcgttccaggtcgacccggcgacgctggcggcgcgggcccggttcgacgtggcggtggcggcgacgaaccccaactcgcgcatcggcatccactacgagcgcgggtccagcctgggcgtgtggtaccagtcgtaccgcctggcgcggggcgcgctgccggccttctaccagggccaccggaacacgacggtgctggcgctggccatggccggcgaggcgcagctgggcagcgccgccgtcgtgtcggggatgcaggacgcgcagcggacgggcgccgtgccgctcgtgttccgcgccgacgtgcccgtgcgcgtccagctcggcaccttcaagctctggaaggtcacggccagggtgcgctgcgacctcgtcgtggacaggctcatggacgtcaccagtctcatcaagatcaaggccggcaactgcaagttcagcttgaagctctgattcattgggttttcagttttctgttctctcttttggagcgagttcagagtcgttgcgttggattctcttggcagagtgctggccgtgcacaggtgcatacgtgcagtgcagtgcactcccgccaacctcgttggcgttcatctgggccgacgtgtacaggtggtagtatataattgttgttagagagggacaatacgcatggctagaattttataattctagagttacttctatcaccacacaactgaatgcacaagacgcaacaaccaaatggaaaatgtgtgcctgccaatggaaagcacatcacaactacttctgcagcagcaaaatggaaaatcgaatcacccactccagagaagcttggatttacaagcaaaagggttgttgtgagttcgctctagcaggaatttacttgcagacacaggtacaaagacagatttgcatatcaattcgtggaagatggaggtcgatacagtcacac

SEQ ID NO: 126297 - DNA, 834 bp, Zea Mays
attatattttaggacggagaaaggttttgtaaattttattccgctagggctttgttcttgtttgccgccgccggcaccaccctcagtccccacatggccgccgcctgccttcgccgcctccaccgcatccctcatcctgtccttaagctcgccgcagccactcactggcccttgccattccccggtgccaagttggctccggtcacacagtcgtgcccatccgccgaccgcgtcgaagtacagctgagcgcccgctgccccggttttgcaagtaatggtaacttcaaacatcgatggcatcacaagctgggttcatcagttggtgctgtactgattggacatgcagccttttttcttggtttgagcaatggctctgcatttgcccaggaagattcagttagcccagctgcagctagtgagcatgctgagggaaatgctcctggtttacaaccgattgaagatggatcagtggtctcaaacgaacacacggtcaaatggagaatttacactgataatgcgcgggagtttttccagaaaagacaattggatgaggctgagaagttattccaggcagccctactagaagctaaggaaggatttggacttagagatccacatgtcgcgtcagcccttaacaatctggcagaattttataggctaaagaaagagcatgtgaaagctgaaccactatatttggaagcaattgagatcctggaggaatcatttggacctgatgatatacggtacattacaaacttcaattttttctgcgccatcatgtagagtgtcaatttattgcagataaccagtatttgttttgagttaagtgtcaaa

SEQ ID NO: 126298 - DNA, 999 bp, Zea Mays
aagcttgctcaagcccagacatgttatgagcgtgctttgaagatagaaggacgtgttctgggggttggtcacccagagtattcaagtacaatgtacagtctagccaaggtgctcagtctacaaggaaaaagaaaaaatgcagaatgccttattgaagagtctattagaatacttgaggaagctgggcttggcgattcactaacatgtttacgaagaatggtctctctctctagagagttaataaaatcaagacgatttgctgaagctgaaatctggcaaaggaagatattacatgttctggagctttcagagggatgggattcattggtcactgcacgtgcagctgaactcctaagtttaaatcttgaaaccatggagaagttgaaggaatcagaagagctattggaacgatgccttgcagtcaagaaaaagattctacctgaagatcatcttcaggtagcttatacgttggtacacctggcaaggttaacattgcacagagttgtaaaggatcgggatgtaaacagcgatgtaactgcatattacctcgcaaaagcaaaacagttcagcaatgattcaatcaggattacagaaggacaattaaattcttcaagaaaagatcagaataaaattaacaacacatcaactgcagatacagataagagtgcagcaataattctttttcaagcacttcatgtttttggactcattgatattgcagcgaagcagttgctagggcaaggggagcaagactataattctgttcaagatgctctgcagaagtgtgtttcactttacaaagagcctcatacacgaaggttggtgaaaaatgctgccaagcaggactacatgatatgcctgacgagcctgatcgatatggttcagagcttgtttcccattccacacataccggggttgcaggagttgctttgcgaggccgaacaaattttaggagagctagaagaagagagtactaggaagaagcaatgatacgtagga

SEQ ID NO: 126299 - DNA, 1457 bp, Zea Mays
aagcttgctcaagcccagacatgttatgagtgccatctgtagatagaaggacgtgttctgggggttggtcacccagagtattcaagtacaatgtacagtctagccaaggtgctcagtctacaaggaaaaagaaaaaatgcagaatgccttattgaagagtctattagaatacttgaggaagctgggcttggcgattcactaacatgtttacgaagaatggtctctctctctagagagttaataaaatcaagacgatttgctgaagctgaaatctggcaaaggaagatattacatgttctggagctttcagagggatgggattcattggtcactgcacgtgcagctgaactcctaagtttaaatcttgaaaccatggagaagttgaaggaatcagaagagctattggaacgatgccttgcagtcaagaaaaagattctacctgaagatcatcttcaggtagcttatacgttggtacacctggcaaggttaacattgcacagagttgtaaaggatcgggatgtaaacagcgatgtaactgcatattacctcgcaaaagcaaaacagttcagcaatgattcaatcaggattacagaaggacaattaaattcttcaagaaaagatcagaataaaattaacaacacatcaactgcagatacagataagagtgcagcaataattctttttcaagcacttcatgtttttggactcattgatattgcagcgaagcagttgctagggcaaggggagcaagactataattctgttcaagatgctctgcagaagtgtgtttcactttacaaagagcctcatacacgaaggttggtgaaaaatgctgccaagcaggactacatgatatgcctgacgagcctgatcgatatggttcagagcttgtttcccattccacacataccggggttgcaggagttgctttgcgaggccgaacaaattttaggagagctagaagaagagagtactaggaagaagcaatgatacgtaggaaccaacacccatatgggtggaagcatttgttaattgcaagttgtgagccatatattttttcagttggtcgagatcgcccacctatatgggtggaagcatttgtttgacgaggtgctgaatcgagtgacgggttaaagagtttaatgcttgtttgcgcagtggtgttatgacgtggtcttcaacatagagtcctagtttctcggtggtggtggtccacaagatagatcatgttgctgaaatcttggatgctttctaaatcaaaatccttgacattggcgaccaaaaaaaaagatccctatcaatggcggatggccaaactgaaccaaggattggttttggcatagaagctcttcctaaaagttgtgctggctgtttgcgtaattcttttagatattgtggtcttagactatctctagcaacttactcatctttatctctatatttaaactccacattat

SEQ ID NO: 126300 - DNA, 606 bp, Zea Mays
ccgcacaggcaggcaccagcgcgaacgcatggacgggcggcccctgagacgtgccgcccagctggcccgctgcgcccacacgtggcgcggagctgcgcgcggctcggccacgttataagccacgcgcgctggccgtcgccgcacctcctgactactgcacactcgtctccgcagtttgaaacgaagcccgcggctactgcaagctactccgtctccgtagctaaaggagaggtaggtttttatttggcgacgacatgagcacgggcgtgcgaccggggcggcggttcacggtggggcggagcgaggacgccacgcacccggacaccatccgcgccgccatctccgagttcatcgccaccgccatcttcgtcttcgccgccgagggatccgtcctctcgctcggtacgcacgcacgcacgcttcgtcttccgatccgctcgaaagtgttcgacgacgacgacgacgatgcgtgtggggtttgccgtttatttaatttattgttgtgttgtgtgcgcagggaagatgtaccacgacatgagcacggcgggcggcctggtggctgtggcgctggcgcacgcgctggccctggccgtggccgtggcagtg

SEQ ID NO: 126301 - DNA, 1227 bp, Zea Mays
ccgcacaggcaggcaccagcgcgaacgcatggacgggcggcccctgagacgtgccgcccagctggcccgctgcgcccacacgtggcgcggagctgcgcgcggctcggccacgttataagccacgcgcgctggccgtcgccgcacctcctgactactgcacactcgtctccgcagtttgaaacgaagcccgcggctactgcaagctactccgtctccgtagctaaaggagaggtaggtttttatttggcgacgacatgagcacgggcgtgcgaccggggcggcggttcacggtggggcggagcgaggacgccacgcacccggacaccatccgcgccgccatctccgagttcatcgccaccgccatcttcgtcttcgccgccgagggatccgtcctctcgctcgggaagatgtaccacgacatgagcacggcgggcggcctggtggctgtggcgctggcgcacgcgctggccctggccgtggccgtggcagtggccgtcaacatctcgggcgggcacgtgaacccggcggtcaccttcggcgcgctcgtcggcggccgcgtctccctcgtccgcgcggtcttgtactgggtcgcgcagctgctgggcgccgtcgccgccacgctgctcctgcggctcgccacggggggcatgcggccgccggggttcgcgctcgcgtccggggtcggggactggcacgccgtgctgctggaggccgtcatgacgttcggcctcatgtacgcctactacgccacggtgatcgacccgaagcgggggcacgtgggcaccatcgcgccgctggccgtgggcttcctgctcggcgccaacgtgctggcgggagggcccttcgacggcgcagggatgaacccggcgcgggtcttcggcccggcgctcgtcgggtggcggtggaggcaccactgggtgtactggctgggccctttcctcggcgccgggcttgcagggctggtgtacgagtacctggttatcccgtccgccgacgccgccgtgccccacgcgcaccagccgctcgcgccagaggactactagcttgaaaattgtattgtggggtcgtgtaagtggttaataaggggggcataggtacgtacttgtctgtcgccccagcgtgtgttggagacggtgaatcaggtgatgtgtacatgctgcttcactgtagtgtatgtgtatgtgtatgtagtaaataattccaggtatataaggcacgacttgtgta

SEQ ID NO: 126302 - DNA, 697 bp, Zea Mays
gtcctagactcccaggtgaaaacttcagactctgaccctgtccccataacgtgtgcctcatcgcagatctgcttgtccgcctccggcggcggctaccactccccagcaagccatctcctggagctggagggggtctgcttcctccttgactgcccatcgacgtctccgccctcgtggccttcgcgccggtgcccctcgcctgtgatgcagggggtctcatccatgtggtgccacgctactggttgccaacgaccgggaaaggtggtgtggatgtcgtgctcgtgtcttcctctacagggatgctcggactccccttcctcactgggctccctggatacgccaacacgaaggtatatgtgacagaggtagcagcaaggatcggagctaataatatgatttgacttctctggtgcctctatatatgtccgttacagaatcactagcctgctggcgtgcacatttgtggcttctcttccggtcttcccgcagggctatcaatatgtatgaaagcttgacatgaaatatcaaatgcagagtttacattttcaccgtggacaccttttcctaccaagaggttattaccaagaatcctcgatccaaatccaagacgttcagcatcatagcaatatttatgaacattgatatcgtttttatgcttactgacagaatgcatatggtctgaaaatggagaattgag

SEQ ID NO: 126303 - DNA, 2687 bp, Zea Mays
gagggagcgcattactctgcagcgcggacacgcccggcacggcaagccagccactcttctcgcgtgaagcttagccattcttgcggctgggcaaggaaactgctgaagccactagccggctgcctgctctacggcctccgaaccgaacgaggtgcatcgtgaggaagcagcagcagggggggggggggggggggggcagtggccgggcgggatgacggggagggaggccgtggcttcggcggaggcggagctggatcaggactcggcggcggcggcggccgcggcgcccgtgctgctgagcccgctcagcgagacgctgtggcgcgacagggcggcggcggcggcgggcggggtcctcgtcggggacgtgtcggcgcgcctggcgtggcgcgacctcaccgtgaccgtcgcgctcggcaccggcgacacgcaggccgtgctgcagggcctcacggggcacgccgagcccggcaccatcaccgcgctcatgggcccgtccggctccggcaagtccacgctgctcgacgcgctcgcgggccgcctcgccgccaacgccttcctctccgggaccgtcctcctcaacgggcgcaaggccaacctctccttcggcgccgcggcctacgtgacgcaagacgacaacctgatcggcacgctgacggtgagggagacgatctcgtactcggcgcgactccggctccccgacaagatgccgagggaggagaagcaggctctggtggagggcaccatcgtggagatggggctgcaggactgcgccgacaccgtcgtcggcaactggcacctgagggggatcagcggcggcgagaagcggagggtcagcatcgccctggaaatactcatgcggcccaggctgctgttcctggacgagcctaccagtggccttgacagtgcttcggcgttcttcgtgacgcagacgctgcgagggctggcaagggacggccggaccgtcatagcgtcggtgcaccagccgagcagcgaggttttcttgctgttcgactgcctctaccttctgtcagggggcaggacagtctacttcgggaaggcatcggaggcctgcgagttcttcgcccaggctggcttcccgtgcccgccgatgcgcaacccgtcggaccatttcctccggtgcataaactcggatttcgacaaggtgaaggccactctcaaagggtcgatgaaggcgaggttcgaaaggtccaacgacgacgacccgctggagaagatgacgacgtcggaagcgatgaggaggctcaccagctactaccagcactcgcagtgccacatcaacgcgcagcagaaagtggacgagatggcccggctcaaaggaacggtgctggatccaggaggagggagccaggccagcttcctgatgcaggcgttcacgctcacgaagcgctcgttcgtcaacatgtccagggacttcggctactactggctcaggctcatcatctacatcgtcgtcacgctttgcatcgggactatatacctcaacgttgggaccggatacagctctatcctggcccggggcgcgtgtgcttcgttcatcttcggcttcgtcacgttcatgtccatcggagggtttccgtctttcgtggaggacatgaaggtgttccagagggagaggctgaacgggcactacggcgtgctggcgttcgtcgtcagcaacacggtctcggcgatgccgttcctggtcctcatcaccttcgtgtcgggcacgctgtgctacttcatggtgcgcctgcacccgggcttcacgcactacctcttcttcgtgctggcgctctacgccagcgtcaccgtcgtcgagagcctcatgatggccatcgccagcgtcatccccaacttcctcatgggcatcataatcggcgcagggatccaggggatcttcatgctggtgtcgggttacttcaggcttccgcacgacatccccaagcccttctggaggtaccccatgtcatacatcagcttccactactgggcgctgcaggggcagtaccagaacgacctcaggggcctgctgttcgacaaccaggacgacgagctgcccaggatcccgggggagttcatcctggagaccgtgttccagatcgacgtcgcccgctccaagtggctggacctggccgtgctcttcagcatgatcgtcatctaccgcctgctcttcttcctcatgatcaaggccagcgaggacgtcaccccctggctgcgccgctacgtcgcgcggcgccgggtgcggaaccgtcgccaccgcaagccggacctgcccgcccggacgccgtcgctccgcgggtacgtcgtcgacgcggccagcctgccggacgaccacccgtgacgaaagagcgcgagagaaaacgtacgggcagggatgtcatttcatatcatatcacacagaggctaaaccggatcgagctgataataacacactcactcactagtactgcaataatatgatgttaagttggtatagcaaccgcttaagtgcccgttcggttcttcctgaatgctttactggattggttccggattggaatagttcacaaatttgtattagctcgatgagttggaatgattccggccttcaatctggactaaacgaacagagctgtaatggagtgttgcttgatgcactgctaagatgtacacgtatatgaagagcatgtgaccatcagttctac

SEQ ID NO: 126304 - DNA, 1184 bp, Zea Mays
acacgcaacatctatcgtcgtcttttgttgggcccggggcgcgtgtgcttcgttcatcttcggcttcgtcacgttcatgtccatcggagggtttccgtctttcgtggaggacatgaaggtgttccagagggagaggctgaacgggcactacggcgtgctggcgttcgtcgtcagcaacacggtctcggcgatgccgttcctggtcctcatcaccttcgtgtcgggcacgctgtgctacttcatggtgcgcctgcacccgggcttcacgcactacctcttcttcgtgctggcgctctacgccagcgtcaccgtcgtcgagagcctcatgatggccatcgccagcgtcatccccaacttcctcatgggcatcataatcggcgcagggatccaggggatcttcatgctggtgtcgggttacttcaggcttccgcacgacatccccaagcccttctggaggtaccccatgtcatacatcagcttccactactgggcgctgcaggggcagtaccagaacgacctcaggggcctgctgttcgacaaccaggacgacgagctgcccaggatcccgggggagttcatcctggagaccgtgttccagatcgacgtcgcccgctccaagtggctggacctggccgtgctcttcagcatgatcgtcatctaccgcctgctcttcttcctcatgatcaaggccagcgaggacgtcaccccctggctgcgccgctacgtcgcgcggcgccgggtgcggaaccgtcgccaccgcaagccggacctgcccgcccggacgccgtcgctccgcgggtacgtcgtcgacgcggccagcctgccggacgaccacccgtgacgaaagagcgcgagagaaaacgtacgggcagggatgtcatttcatatcatatcacacagaggctaaaccggatcgagctgataataacacactcactcactagtactgcaataatatgatgttaagttggtatagcaaccgcttaagtgcccgttcggttcttcctgaatgctttactggattggttccggattggaatagttcacaaatttgtattagctcgatgagttggaatgattccggccttcaatctggactaaacgaacagagctgtaatggagtgttgcttgatgcactgctaagatgtacacgtatatgaagagcatgtgaccatcagttctac

SEQ ID NO: 126305 - DNA, 1762 bp, Zea Mays
gaattgcgtcgcgactccgccagcaccggctgaagcaggccgaaacccagcccaagaaagagcaataaacaaaacccagcccgagaaaggagaaagaaaaattagaaaccctagcgatgctgcagatccgcctgagcaagattggctcgtcggactccggcgctgccgccaccggctcggcagccgccgccggtgccgccgccgctgtggggtcggctgcggcgctgggcggcggcatcccggaatcggtcaccgtggcatgccccgaccacctggtgatcgcggacctacccgtcgcgaagagcctcggtgccgtcacgacctccgctgccgccgccacgcgcgccatcggccgtcgctcccgtcgcccgctcggggagcgcgtccacatctgctcccgctgcgagttccccatcgccatctacggccgcctcatcccttgtgaacatgccttttgtttaacctgtgcaagaagtgattccagctgctatctttgtgatgagcgcattcagaagatacaaagtgtgaaaatgatggaggggattttcatctgtgctgcaccgatgtgtctcaagtcattccttaagaaagcagattttgagtttcatgttcccgatgtccatgccaacctcctgcaaactaatctagagaaggaagaagaacgcaatgagccagatgctcctaacatctcccgtgcttctgcaggggatacacaaagacaatctcaaatgcctgaaatgtctactgcacgggctccttcaaggccaggtgtttcacaagatcgtgatgaacgctctcgctaccaccagtccagggagcaaacaccactgaggcccccaaccctttcaaaaccaccttcattccatggtcggcattcgtacccaccaggggatactcaggccgagaacaatccacctcaaggattcgaccgggcctacaactgggcttctcaatcacggcaagagagcccaggtgcggcgactccacttcgccaagaatctgaccaaagtattcaggacaagcagcaattgatggctaatgcaccttttatgtttccgccgattcctcctcaccagggaaactttatgatgcctatgaatatgaatcagcctttgattcctaatgcaccattcaattatcctctccagcaagatggaaaccctcagtacttctctgcccctttccagatgcagctaccagatactggatcagaacaaggttccatgtcaaatgtccagcctccagctggtcctatgagtttccctgaggggcctcagcgcccatggggtatgaggctgatgagtaatccatttcaatcgatggcccttggtcagggaatgattgatggtgcgggtgatcctcaaggtggtggtggccttgccttcatgcaagctggttttgggggcatgcctgatggctccatgaatacaggcatgcccgatagaggtgatggaaggggtattctagcacagatgcatatgcaaatgcagatgtcacttcccccacctccgcctacacaacctcctccaggttcacagcaaacgtttaacaggacttgatatttttttttgtacgaattgatggcaactcccagaattgcatgtcaattcattgagcaaattgtaattttgtcgtttttggcatgtaacctgtggactagatggctcagttctgttccctggttggataggagcctgtattatgctataactcctgtttgaatgaaatgttccgaaatttcgaaattttagttcgagatggt

SEQ ID NO: 126306 - DNA, 781 bp, Zea Mays
aataaacaaaacccagcccgagaaaggagaaagaaaaattagaaaccctagcgatgctgcagatccgcctgagcaagattggctcgtcggactccggcgctgccgccaccggctcggcagccgccgccggtgccgccgccgctgtggggtcggctgcggcgctgggcggcggcatcccggaatcggtcaccgtggcatgccccgaccacctggtgatcgcggacctacccgtcgcgaagagcctcggtgccgtcacgacctccgctgccgccgccacgcgcgccatcggccgtcgctcccgtcgcccgctcggggagcgcgtccacatctgctcccgctgcgagttccccatcgccatctacggccgcctcgtacgaacttgctaagcccttttctttatgcggctatcaaaccacgaacttgttccgcttgtgttgctgctaaggaaactaggggtttaattaaccgcgtgtgttgtggagccacttaccgccacaaactctattattcctctgttgatatcgtaagtgaaaatggagcagcggatgtgcatcatctttgttttatgcttctgtttagagtgttaggcttatgagagttggagaaaatacgaatagatataatttgtagtagatctgtggtaatggctattgcctcagtgttctagcgattccattgtaaggagagccaatgttatctcgttttgttcatcacaggcagtcaagggaagctaagaccgacttgttagcgattgaatgaaggcagtattgatgttctctta

SEQ ID NO: 126307 - DNA, 2950 bp, Zea Mays
cacggactctgagtctctgacgctgccttttgctctccccttccaccccgtctgcccgcgcgcgctgtctcgtggcgacaactgggcgaccgccgccgccgtcgctgccgccgctacgccaagaagctaggtcttcatcggtcccttcgtcgagattttctccggagacaagcacccagcaggggactacaagattgattttgatggattatgacaagtctagaagaagtaactccaaaaagaggagacattccaattctgatgacggaaagaggaaacggttgagctctaggcatgatgacacatctatgtcctctgagccaattgaaaccatctacaggatattgtgcccggcaaaaaagataggcagtgtcttgggaagaggtggtgacattgttaaggcccttagagaggaaactaaagccaagataagggttgccgattccattcctggtgcagatgagagagtaattatcatcttcaattaccaaaatcaacctgaacttactgatgaagcagctgaaaaacaaattagtgatggcttagggaacatgaaaccccattgctttgcccaagatgccttattgaagatacatgataagattgtggctgatgaaatttatgatgaagtcgctcatgatgaaagttctgatgatgtcactgctcgaattttggttcaaggcaatcaagttggctgccttctaggaaaaggtggctccattatacaacaactacgaagtgatactggtgctgggatccgtgtcttgtcatctgaaaaccttccccagtgtgcacttcaaagtgatgaactggtgcagatatctggagcaccatctcttgtaagaaaagctctatatgaaatatctactcgtctccatcagcatcctcgtaaggaaaatagacctcttgaacaaataatagatgcaagcacacaaaggaaacacgagtctccaacactgcaacatgaaaatccaatgttgccgcacctgcatagtcatcatccacctccaatacccctgcttgacccatacagaagtggacctcagtatcctgttagtgaaactgaagagttttctatcagaatcctatgtgcttctgagctcattggttcagttattgggaaaagtggggctaatgttaggcgggtagagcagcagactggtgctcgcattaaagttcaagagattgacaaagatgcttctggagaaaggctgatcattgtttcatctaacgagataccaactgaaccaatatccccaacaattgaggcactcattttgctccacgataaagtaagtgcatcctctgagaaacaccattcaagtacaaggcttgttgtaccatcaaacaaagttggctgtattcttggggaaggtgggcaggtgattactgaaatgagaagacgaactggggctgaaattcgagtttactcgaaggcagataaaccaaaatacttgtcttttggtgatgaacttgtgcaggttgcagggcctccagctattgcaagaggagccctcacagagattgcttcgaggcttagaactaggactttgagagatacaagtactgccaataatcctccaccttttgccccttccgatgatcctactgtcgatatgcctagcagaaaattaacactatatggagggcctaccaatgatacaccgtatggaaggcctgccaatgatccactgtatggaaggcctgccattgatccaccatttggaagacctaccaacgatcgaccatacggaaggcctgccatcgttccaccatttggaagacctaccaatgatccaccatatggaaggcctgccaatgatccaccatatgaaaggcctaccaatgatccaccatatggacgaccttccagtactatagcatatggaagaccaaacagaagtgcacctcgtgatccttcagatgcatatcctgtagactacttctctaaaagagaacatcctagtggaggccctatgtttactagtaatgccccatcagctgcttatgagagatatgcagcacccacacactttcctactagagaacctccctcaactttcagtcatcgttcctatcgtgaccacatgcctactgatagctactctagtaggggtacacagaaattagacatcacgagagatggaaattcagatgcttatgattatacagaggctgctggacaaattcatggactggaggactatagaggactgccaagtgcttctggaaggttctcgagcactattgaactaaggattccaaatagttctttggagtctattgttggtgttggcggggtcaatttagcagagatacgtcagatttctggtgcaagactgaggctacatgaggctcatgctggttcttctgagtctgtggtggagatccagggcacactggaccaagcaaaagctgcgcagagcctcctggagggctttatcagcgcgaacagcaggcagcagcaatcccattcttctcgcatgccactttacccaagatggggatagcttctggttgtggcaggggaaaaccgagtcagcagggttggctggagttatctcagactgcagattagatgcatcgatgatgttaatggtagctgtttaaattgaccgtgcaagcatgataacttatattatgccataggacaagtaatgctgattctctcatgaaatactaagtgacaagctgtctctgtagttgtatttgtttctgaatgtttgaaccctactgttacaacggctgctattttaggtcagatttcagaggccggataattatgttatctgcagagttgggccaaaaaaaaaagctcaatctggttgagactggcttcacccatgccgtttcatttttagaagttacagcatctctgcaaaatatatgggtaaggcctcttggaacgcatgaatttcatagaaatcagtttattttctcagaaaaaaca

SEQ ID NO: 126308 - DNA, 2329 bp, Zea Mays
gagtctctgacgctgccttttgctctccccttccaccccgtctgcccgcgcgcgctgtctcgtggcgacaactgggcgaccgccgccgccgtcgctgccgccgctacgccaagaagctaggtcttcatcggtcccttcgtcgagattttctccggagacaagcacccagcaggggactacaagattgattttgatggattatgacaagtctagaagaagtaactccaaaaagaggagacattccaattctgatgacggaaagaggaaacggttgagctctaggcatgatgacacatctatgtcctctgagccaattgaaaccatctacaggatattgtgcccggcaaaaaagataggcagtgtcttgggaagaggtggtgacattgttaaggcccttagagaggaaactaaagccaagataagggttgccgattccattcctggtgcagatgagagagtaattatcatcttcaattaccaaaatcaacctgaacttactgatgaagcagctgaaaaacaaattagtgatggcttagggaacatgaaaccccattgctttgcccaagatgccttattgaagatacatgataagattgtggctgatgaaatttatgatgaagtcgctcatgatgaaagttctgatgatgtcactgctcgaattttggttcaaggcaatcaagttggctgccttctaggaaaaggtggctccattatacaacaactacgaagtgatactggtgctgggatccgtgtcttgtcatctgaaaaccttccccagtgtgcacttcaaagtgatgaactggtgcagatatctggagcaccatctcttgtaagaaaagctctatatgaaatatctactcgtctccatcagcatcctcgtaaggaaaatagacctcttgaacaaataatagatgcaagcacacaaaggaaacacgagtctccaacactgcaacatgaaaatccaatgttgccgcacctgcatagtcatcatccacctccaatacccctgcttgacccatacagaagtggacctcagtatcctgttagtgaaactgaagagttttctatcagaatcctatgtgcttctgagctcattggttcagttattgggaaaagtggggctaatgttaggcgggtagagcagcagactggtgctcgcattaaagttcaagagattgacaaagatgcttctggagaaaggctgatcattgtttcatctaacgagataccaactgaaccaatatccccaacaattgaggcactcattttgctccacgataaagtaagtgcatcctctgagaaacaccattcaagtacaaggcttgttgtaccatcaaacaaagttggctgtattcttggggaaggtgggcaggtgattactgaaatgagaagacgaactggggctgaaattcgagtttactcgaaggcagataaaccaaaatacttgtcttttggtgatgaacttgtgcaggttgcagggcctccagctattgcaagaggagccctcacagagattgcttcgaggcttagaactaggactttgagagatacaagctgctggacaaattcatggactggaggactatagaggactgccaagtgcttctggaaggttctcgagcactattgaactaaggattccaaatagttctttggagtctattgttggtgttggcggggtcaatttagcagagatacgtcagatttctggtgcaagactgaggctacatgaggctcatgctggttcttctgagtctgtggtggagatccagggcacactggaccaagcaaaagctgcgcagagcctcctggagggctttatcagcgcgaacagcaggcagcagcaatcccattcttctcgcatgccactttacccaagatggggatagcttctggttgtggcaggggaaaaccgagtcagcagggttggctggagttatctcagactgcagattagatgcatcgatgatgttaatggtagctgtttaaattgaccgtgcaagcatgataacttatattatgccataggacaagtaatgctgattctctcatgaaatactaagtgacaagctgtctctgtagttgtatttgtttctgaatgtttgaaccctactgttacaacggctgctattttaggtcagatttcagaggccggataattatgttatctgcagagttgggccaaaaaaaaaagctcaatctggttgagactggcttcacccatgccgtttcatttttagaagttacagcatctctgcaaaatatatgggtaaggcctcttggaacgcatgaatttcatagaaatcagtttattttctcagaaaaaaca

SEQ ID NO: 126309 - DNA, 2247 bp, Zea Mays
gagtctctgacgctgccttttgctctccccttccaccccgtctgcccgcgcgcgctgtctcgtggcgacaactgggcgaccgccgccgccgtcgctgccgccgctacgccaagaagctaggtcttcatcggtcccttcgtcgagattttctccggagacaagcacccagcaggggactacaagattgattttgatggattatgacaagtctagaagaagtaactccaaaaagaggagacattccaattctgatgacggaaagaggaaacggttgagctctaggcatgatgacacatctatgtcctctgagccaattgaaaccatctacaggatattgtgcccggcaaaaaagataggcagtgtcttgggaagaggtggtgacattgttaaggcccttagagaggaaactaaagccaagataagggttgccgattccattcctggtgcagatgagagagtaattatcatcttcaattaccaaaatcaacctgaacttactgatgaagcagctgaaaaacaaattagtgatggcttagggaacatgaaaccccattgctttgcccaagatgccttattgaagatacatgataagattgtggctgatgaaatttatgatgaagtcgctcatgatgaaagttctgatgatgtcactgctcgaattttggttcaaggcaatcaagttggctgccttctaggaaaaggtggctccattatacaacaactacgaagtgatactggtgctgggatccgtgtcttgtcatctgaaaaccttccccagtgtgcacttcaaagtgatgaactggtgcagatatctggagcaccatctcttgtaagaaaagctctatatgaaatatctactcgtctccatcagcatcctcgtaaggaaaatagacctcttgaacaaataatagatgcaagcacacaaaggaaacacgagtctccaacactgcaacatgaaaatccaatgttgccgcacctgcatagtcatcatccacctccaatacccctgcttgacccatacagaagtggacctcagtatcctgttagtgaaactgaagagttttctatcagaatcctatgtgcttctgagctcattggttcagttattgggaaaagtggggctaatgttaggcgggtagagcagcagactggtgctcgcattaaagttcaagagattgacaaagatgcttctggagaaaggctgatcattgtttcatctaacgagataccaactgaaccaatatccccaacaattgaggcactcattttgctccacgataaagtaagtgcatcctctgagaaacaccattcaagtacaaggcttgttgtaccatcaaacaaagttggctgtattcttggggaaggtgggcaggtgattactgaaatgagaagacgaactggggctgaaattcgagtttactcgaaggcagataaaccaaaatacttgtcttttggtgatgaacttgtgcaggctgctggacaaattcatggactggaggactatagaggactgccaagtgcttctggaaggttctcgagcactattgaactaaggattccaaatagttctttggagtctattgttggtgttggcggggtcaatttagcagagatacgtcagatttctggtgcaagactgaggctacatgaggctcatgctggttcttctgagtctgtggtggagatccagggcacactggaccaagcaaaagctgcgcagagcctcctggagggctttatcagcgcgaacagcaggcagcagcaatcccattcttctcgcatgccactttacccaagatggggatagcttctggttgtggcaggggaaaaccgagtcagcagggttggctggagttatctcagactgcagattagatgcatcgatgatgttaatggtagctgtttaaattgaccgtgcaagcatgataacttatattatgccataggacaagtaatgctgattctctcatgaaatactaagtgacaagctgtctctgtagttgtatttgtttctgaatgtttgaaccctactgttacaacggctgctattttaggtcagatttcagaggccggataattatgttatctgcagagttgggccaaaaaaaaaagctcaatctggttgagactggcttcacccatgccgtttcatttttagaagttacagcatctctgcaaaatatatgggtaaggcctcttggaacgcatgaatttcatagaaatcagtttattttctcagaaaaaaca

SEQ ID NO: 126310 - DNA, 1147 bp, Zea Mays
acatctttgccgtgagcttccctcttttgcaaatggccatcacctaaaattttcattagaagcttgagactttacacatgactgttccactgtccctattctgttccataatttgctggcactactgaacattggggaaacgttatatgttggtgtcttagcttctgtggcagtaatgttcaccctataatgtggtcacactgtcacagtggtgcaactcttttcatttgttgtcacttgcatcttggttcaatatatatctggctgttggatgtactctgctgcttttagtttcaatcggtttttcttgatattatctatgcctaccagaacatctcatattctgtatatatttaaattttatcattgcacaggctgctggacaaattcatggactggaggactatagaggactgccaagtgcttctgggttctcgagcactattgaactaaggattccaaatagttctttggagtctattgttggtgttggcggggtcaatttagcagagatacgtcagatttctggtgcaagactgaggctacatgaggctcatgctggttcttctgagtctgtggtggagatccagggcacactggaccaagcaaaagctgcgcagagcctcctggagggctttatcagcgcgaacagcaggcagcagcaatcccattcttctcgcatgccactttacccaagatggggatagcttctggttgtggcaggggaaaaccgagtcagcagggttggctggagttatctcagactgcagattagatgcatcgatgatgttaatggtagctgtttaaattgaccgtgcaagcatgataacttatattatgccataggacaagtaatgctgattctctcatgaaatactaagtgacaagctgtctctgtagttgtatttgtttctgaatgtttgaaccctactgttacaacggctgctattttaggtcagatttcagaggccggataattatgttatctgcagagttgggccaaaaaaaaaagctcaatctggttgagactggcttcacccatgccgtttcatttttagaagttacagcatctctgcaaaatatatgggtaaggcctcttggaacgcatgaatttcatagaaatcagtttattttctcagaaaaaaca

SEQ ID NO: 126311 - DNA, 1650 bp, Zea Mays
tacatcataacttgtatgtcatctttaatatctatgacaacattgtttcgccgtacaattttttatatgctactatattatagtttatggtcgcttcggaccgggtctttctgggtccgccactaaatcatacaaagctatacctgctattacactacccgaactctctcgtatgcagtagtagtacaccagaatggtaagacccaatggaaaaaaaagaagcaaaataataagaaatagttgcagcacttattgaggtcggtaatagttgctctggtgcggagggtaagccccagtggcattgtacggcgcctgtggacaaggcacagattgctgcggctggggggcattgtagtatgggtatggcccgcgccatccaggatatgccggctgaccgcagtcatggccaggaggcggctggtactgcccggggtgttgtgcaccatacgtcggctgttgcggtgtcgccccataggatggggggtatggctgcgagtatgcaggtcttgcctccggttgagaatatccatgcctcgagtctacccctggtggagaggcatagggagcctgggcatgcggcggtggcggtgatgggctgctctcgtcaggtggcacagaagcagcattcctctgcatagaggagcggctggacgacgagaatctgaagccggagggagtagagattaagcagagcaatagcaatttgaagttactcaagaaaatggcggacattcaagaaaagggctccaacaatggcatcttcatttccatccaaggacatgataggcctggaaatacttggaagtgcagactctatctgcaacagacaacaggtacatgtaactatctagatatgaagaataaaatgatgatcacagaagagaggtacggttcattgggaagcaaataaagataagtaatccactcatatgttaaatcctaattatacttctagtttcatgttatatactaatgttgaactctcaccggccttttgtcaaggatagacatcaatgaatagttctccttcacgcctcgttcaatcagagaatcactatcagcagctctcttcaaattagaagcaaacagattcaatctatcctgaatattctttgttagggtgcttgattgaggtctagtccaacgactcccaaattgtgtacgaaattgagcgtcttcattcgcctccttctgtagaagctcttcagtctggacaagtagttcctgattgaccctgctcaaatccctaagttgctgcaactcagattctaagccagcagggccaccgcttatctgcacagcctctacgtcttccttcagatccatgggcaaggttatatttccttccaatgaaagaatagaatctggcacaagtgatgaaaaaagcctttccttgctggcatctaaaacttcagccaaagaggtaggttttacaagggacgctgcagggagggcacccaaggaaccagcagctggaacccgcatcaagtaaacacgatcattctccttcatagccctttccaagttggttttcatgttactttccagcttgttgacggaatccagaagttgggcagcaactcccttcgtagtcttcttagcatctgccaaggcactcataccaatctttaaacgtgcaatttcctcagc

SEQ ID NO: 126312 - DNA, 923 bp, Zea Mays
cgatggattttaggcggatcgtggtgcacagacacggatatgttcgcggatcgatcgggcgcgcaccctgactcacgactgggcgcacacatattcctccaatttttttttctgcgcatggaaactagggttggccctctgccggctgcccagatcctctctttcttgacctcttcttccgcttcctgcagatcttctgtatatctattaaggaggcttctccatctcctcggagcagcaaggctgtgcagcaatggagaacgataacagcaacactcaatttgcaccattgagagagactccgtttgccctccgtggtgctcttggtagttcaagctcatatcttgagcaagccaggggctacacatcttcccctgtagcagctctgcgcccaaagatgtctacacctggaaatcgactcctgcatacgagctgccccctgtcatctgctgtagcgaaccgcccgctgtcgccccatcttcctctgaagaagccacagttcagcgctactttctctatctcgcaccgtatcttcggtgtcgcgctgggagttgccatcatatccgtccccctcgccaccaagttcagcctgatgtttggcgtttgagagcgatttgctgcatcttatgaggaactgcatttccccgttcctgtgactgtttcatcgttcgtctgggttaccttgcaacacaactttaggtgcagttggaataacatctttgtcatgctgacagacttctgtaatacagtaataagtaaaactataaaatatcagtgcaaggaggtttgccccattatggatgtacatggtcatgaggtctgcagcctgcaggtttggctgggaaatagttgattatcatcacaacatattaactgcatggtgcgtatcttcgctacgtgcccttaagctcgtctggaaaatt

SEQ ID NO: 126313 - DNA, 636 bp, Zea Mays
atggccctccttgcccttaaagaagctccaccattctgcctacagaggttatacaagcataaggatgctttgagacaactttttacgcggggaagaaaacttagactttgctttctatacgattctggcatgctgcggaggattgcttggacatctcagcctttgttaattgtgttgaggattgttaatagggatgagaagcctgtcatgccagagatttctgctgctatggattttactatagaagagataaatacatctcttggaagcaagcctagggtactaaagaagttggttagtggttactcattagtgactacttttctagatccattgaaagaagcgaaccagttggagcaccaaaggttgaagattatggaaagtcacttgaaggccgcaatttgtctaggacgactaggacatactcatcgacgtggtttgacttctacctcaactaatgaagaagaagagcaaggatcggaagaagaggaagcctatgatctggacattgttgttgccgatgatctagatgttgaggatgactatggccaaccaccgcctactcctccccatgatggtactccaattgatgagaatgagggtggcctaaacgatatgggcttagatatcgattag

SEQ ID NO: 126314 - DNA, 1059 bp, Zea Mays
gacagacgtccgctgatacgacctgatggagagaggtcttggatgattttggagactgcagggggtcacggccgcaaccccaatggcatcctcggccttctatgcagggaagacttccctggacttgtcgagtacgccggagtgacgagcccagcatacaccttcgaccactacgccgtcgcccccgatgcagtagatcgggacggcagacaattcaacaacaaggcggagcgggtgaagcaagagctgtgggatttcttcagatgcgatgctggatacgaggccagggcgaatgtggtggctaccacgagctgtaagaagctcgtcgtggacatgcactacgaggcgcgcatccaggccatcgtcacttaccacggctccgtccttggggagaaggtgagcaagaaggacgcccgaaccatgtcgttgactccggaccagtacttgcagcgctgggagtagatggtgcagaggtggtgctcggctgagtgggacgaggcgcacaacgctagccgggaacggcgtttgatgatgcaaggtccctcccaccatcaaggcagccgcagcctgggcaaatacgcggaagcatggtcggcggcatatggtggcgcgccttgctccacgttctcggcatatgctatggcccacaaggggaaggcgacgtccgacgtcacctacaacccggatgacgggcccgaggcgtacaccaaccccgccgtccacagccacctcagtgagtacaccaccatggccaaggaggtccatgggccagattacgatccgaggaccgaggacatcgacggagatgtcctcatgagggtcggaggaggcaagaggcatgggcggtactggattgccgacggggcaatcgactcgtcctccattcccactctctctcaggtgcgagcaaggagtacgagcgcgagcccagccatacgacctcggcaggacaactcacagcatcgtatccagcaactccagactcagctagatgatgagaggaggcaacgtgaggagctggagaagaggatggcggagatgttcgcgtacatgcagagc

SEQ ID NO: 126315 - DNA, 2263 bp, Zea Mays
aagagctcgcagtctcgcacatcgtagtcttcgcagagcgcacacacaaaccaaggccaagccgctgctaccacctttctttgcccagcccacgcccaacgccatccatgagcgccatggacaccgccgtgtcgcaaaacgccacggttgctgcggcggcgacggcggccggtgtcggcagcgccgggctggcgggcctgctcccggaggtgcagacagtggagctgctggtggccgtgtccatcttcgttgccatccactcgctgcggcagcggcgcacacagggcttgcccacgtggccgctcgtcggcatgctcccgtccctgcttctcggcctccgcagcgacatgtacgagtggatcaccggcgtgctcaaggcgcgcgggggcacgttcacgttccgcgggccgtggctcaccaacctccactgcgttgtcaccgccgacccgcgcaacctggagcacctcctcaagaccaggttcgggagcttccccaagggcccctacttccgcgaaaacatgcgggacctcctcggcgacggcatcttcggcgccgacgacgaggtgtggaggaggcagcgcaaggcggccagcctcgagttccactccgccgagttccgcgcgctcaccgccagctcgctcgtcgagctcgtccaccgccggctgctccccgtgctggccggcgcggaggccgcggccggcgccgtggacctccaggacgtgctcctccgcctcacgttcgacaacgtctgcatgatcgccttcggcgtcgacccgggctgcctccgcccgggcctccccgagatcccgttcgcccgcgcgttcgaggacgccaccgaggcgaccaccgtccgcttcgtcacgccgaccgcgctgtggcgcgcgatgcgcgcgctcggcgtcgggcacgagcgcgtgctccggcgctccctggccggcgtcgacgagttcgcgtacgacgtgatccgcaggcgcaaggaggagctcgccgacgccgcggccgcggccgggcgcaggtcggacctgctcaccgtgttcaccaggatgcgcgacgaggacgggcgcccgtacacggacaagttcctccgcgacatctgcgtgaacttcatcctggccggccgcgacacctcgtctgtggcgctcgcgtggttcttctggctgctcggcaagaaccccggcgtggaggccaagatcctggaggaggtggaggggatcgtcgcggcgcggaagggggctggggaggtcgtcgaggaggaggaggagctcgtgttcaggcccgaggaggtgaagcggatggagtacctccacgccgcgctctccgaggcgctccgcctctacccgtccgtccccgtcgaccacaaggaggtcgtggaggacgaggtgttcccggacgggacggtgctgaagaagggcaccaaggtgatctacgccatgtactccatggggcggatggagagcatctggggcgacgactgccgcgagtacaagccggagcggtggctccgggacggacgcttcgtgggcgagtccgcctacaagttcacggccttcaacggcggcccgcgcctgtgcctcggcaaggacttcgcctactaccagatgaagttcaccgccgcctccatcctccgccgctaccgcgtccgcgtcgtcgagggccaccccgtcgcgcccaagatggcgctcaccatgtacatgaagcacgggctcaaggtgacgctcaccaagagaggcaaggccaattaattaagctctgaaccgtgtggtgtgccgagatcgagcttgccaattgtaaggcgcagagacgactcgagaaacacatgaaacaagcactactttcgtcgtgccactttgtgactgggatggaagtgttgatgctgctgcggaacaagatctctgtgttttcatgcgttttatttctcactttctttgtactagtctatatatatatatatatatactgttgttttgtacttcgtttgtttcatttacatgtagtgtagaacttttgcatatgtataaacttatatgtatatgcgtgttggcaaaacacttggccttcaggtggtgtaaccggtaatgttcttgtagaagtattaattatttcaggaaacagcagcaagatgccacggtatttgtttgaagaaatttgccataattaaaccaactgaactcagtgctagcttgatatctacgacctagttggacttggcaaagcacttaagcgctccagctccagcgtcatccacggaatcggtagtgggtta

SEQ ID NO: 126316 - DNA, 87 bp, Zea Mays
ttagtccattatgatgtcacccatgtctccatgattcatgattggcagtatatacagcaggaccaagcaatttactttagggtacct

SEQ ID NO: 126317 - DNA, 636 bp, Zea Mays
atgccgggcaagggacgacagcctgggcccagagcaatcgagaaaggcacagcggcggcggccgccactggtgctggccagaagcgaaggcgcggaacgaaagggcgcagtggccggagacgcgagacggaggtggtggcggtggacgcgggggcagctggaggggaggtcggcgtcgccatcgggaagaccctgagtgccgccctcaagttccagaaggactggccgcgggcccttggccggggcaccgccacagtctcctccatggatgcagcagctccggacaccaatgccgaggtctacgagacgtcccccaaggaagcaccaagtggtgaactagtgacaagggcaccaattgtggtagctgcaactgaagatgaagcaccaattgtggtagctgctaatgaagatgaagcaccaattgtggaggctgctaatgatgaagcaccaaatgtggtggctgctaatgaagatgaagcaccaattgtggtggctgctaatgatgaagcaccaattgtggtggctgctaatgatgaacacacgactgctacttcgccacctagaagtgtcaaatgggtagttaagaaaattaccctaaagaaactgatcaagaaccatgcagatcacagacagtag

SEQ ID NO: 126318 - DNA, 1041 bp, Zea Mays
atgtgtcgcccctctgcacgccctgacaagtctcagcaacctgcgccgccctcacaagtcacaacaagctctagggatatggaagatgcatctgcagatcgaccacaaggggagtcaggaagccagcagccatatgatccaactaaagatcctaagagaaaggcaaaatcaaatgatccggcatggaactattgttattggccggatttgaacaaaaaagatgtggtgaagtgcatcctttgtggaaaaattgttcattcaggtgttagaaggttgaagcagcaccttgttggtagtcatggtgatgttgctaagtgcccgaagacaacatcggcaatcagcaaagagatgagtgattatttgaagaagaatgctagacagaagcctattgagttggatgatgataaagagggtgaaaagacgatgaagttgaagtatttggagaaggggaaagtagagcatctcattcagttgttcagcccagttccggaacagcccaaaagagaaggctctcagcggaagcaagccaaaacaatcaacacgtgtcgaagtcttctaagtcaattgcatccatgcttcgcaaagcacctgaggatgtggttcatgagaggcattgcaagggcaacactcaaactacattgcagcgaaagagcaaggaggagaaggaaagaacagatatgtatgttgctgattttatttatgagtgagtctacagttagagaaggggatgatcttgcatgggctcatgtggatgatgcaatcggtgcttctagttcacttcaaggtcgcaacttcccaagaagagcccgatatgagtctgtttattcaaggcgttgtcaagctgctgctacacaggaggagagagttatggaagaggaagagcaaggcaacgagggcaatgaacaagatgatgaagagtacatgcctaatgatgatgaagaagtggatgactttggtgaatccccacataacagtccaactcaagctggtgctggtcgtgaagaaaatgcaatggatgatcttgatttgggagatatttag

SEQ ID NO: 126319 - DNA, 942 bp, Zea Mays
cccccctctaggtgctctcaaagggctcaagtggtcgcttcttcgctacggatgtcttacctatgggagtccatgtcccacttaaagcttgttagaaatatgagggcaaaaaacgacccttggtttgcggagtatttgctacgcgtaggcggtggaactgaggacacaaatagtgacggcgacatctttcttcctaacgaggtatgtgtgccttatagtgggagtgacagcgatcttgacaacctaatagacttcgttttcccaaatctcaacgaaaatatgtctgattcgacctacatcacttcaagggcgatactgtcaacgcggaacgactgggtgtaccatagtttcgatagcgccatggatgatccccataactactaccctcctgagttcctaaacacactgacgcctaatgggctgccaccacatgttttgaagctcaagattggatgccctattatattgcttcggaatatagaccctgcgaatggactttgcaatggcaccaggctggtcgttcgtggtttccaaagaaatagcattgacgcagaaattgtactaggtccgcacgctggaaaacggattttcctgccgcgtatacctttgtgtccatccgatgaagagatgttccctttccagttcaaaagaaagcagtttcctgtacggcttagctttgcaatgacagttaacaaagcacagggtcagactattcccaatgttggtgtgtacttgcccgaactggttttctctcatggccaactatatgttgctctatctagagcgacagctcgatcgaacataaagatccttgccatcccagccgtcgatgtgaagaagaggtcgaggaagggcgtaaaaaagaaccccacaatagattgtgggacatgcaccaagaacatcgtctacaaggaggtcctaacaaactagacccatggtaag

SEQ ID NO: 126320 - DNA, 435 bp, Zea Mays
atggctgtagtgaagctgcagcgccgccaacttggggcgctggtggcgctctcggcagtacgttataagaaaaagctgccgacggagacggtgtccctggcgctatgtaggatagggagcctgcaaattgcgaccgcggcggccctggctctgcgggcggggcaggagaaactagcggggcgggagaaacgggaggaggcgctgcggacgtggcaggtgaagcgggaggagtggtggcaagcgcgggaccggaagaggcatctccagcgtctgcggccgcgacgggagatggaatggatgcccctgccaattccgccgcggcggccgctggttcctccacggcggccgctggttccttcgggtcagctgcctttgctggagagggttcttcgacgcccacgtcggagacggccgacgccagcgtcgccatgttag

SEQ ID NO: 126321 - DNA, 1605 bp, Zea Mays
agaaactctaccaaaccaaactgcaccaaattctccggtccccgcctcagcgcctccgccatcgacatcccacccgcccgtcccctcgcggctcgcgcccgacggcccgaggcatggcgacgcggaaccgcacgccgctctaccgcaagtaccgcgacgcgctgcggcacgtccgcgcaccggccggggcgacgtcgtcgtcctgcgggggcgggggagggtcggtgatcgagatggcctcgctgctgcgctccgaccggccctacgcgcccctcagcatcgaagacccctccgcctccagtagaggtgctgtgtcagtcgggctacccccagcctgggtggatgtttctgaagagatatctgcaaacatgcagagggcaaggacaaaaatgacggagttggctaaggcacatgccaaagccttgatgccgtcctttggcgatggcagagacgaccagcgagcaattgaggttctcacacatgagataacagacttgctgaaaaggtccgagaagaggctgcagaagctgtccatgaaagatttgtcagaggattcaaatgtccgaaagaatgtccagcgttcccttgctacagacctgcaaaacctgtcaatggagttccggaaaaagcagtcatcatatttaaagcagcttcgccaacaaaaagagggtcaggatggtgttgatttggaaatgaatatgaacgggacaaagtctacatttgaagacgatgagtttgatgatgtgggtttcactgagattcagatgtcaaaacttaagaaaagcgaagcattcactagagaaagggagagagaaattgagcaggttgttgaatcagtcaacgaacttgcacagattatgaaggatctttcagttcttgtgattgatcagggaaccatcatcgatcggatagactacaacatacagaacgttgcagcttcagttgaggaaggttacaaacaattgcaaaaggctgagaggacccagaagaaagggggcatggtgatgtgtgccactgtccttgtcattctgatcttcatcatgatagtccttctgattttgaagaccattttctgacatacttagctatctcattttaatggttgatgaatggtggccaagcacacaccacgctcatctattcatgtgagtgaggattgcaccatgcctgcatatcaagaacgccacaaattcatttgaatagcggcgatacgactcactgatctgaagatggaaccatcttgagtcttggccacaatttttgcatcgttgcagatgtagacatgccctattcatacaggactcttaattttagagagagaaaaatctgaagaggattgtttgacacgtttcaccttccagtttgccttggagcaaccgggttaggctggctgtgtatgcctctgtatagagtgagttgtatcatacatcagggtatcggaaatcagaaagtaggttcagttcctgtgtcatctcttttctgctttatgttgtctgcccttctattttgagctagctttgaagtggcatttcattgtaccatatcctaacaattgttctgacaactttcgcccgggtagtcggatatgcaatgagattttgtgct

SEQ ID NO: 126322 - DNA, 1707 bp, Zea Mays
agaaactctaccaaaccaaactgcaccaaattctccggtccccgcctcagcgcctccgccatcgacatcccacccgcccgtcccctcgcggctcgcgcccgacggcccgaggcatggcgacgcggaaccgcacgccgctctaccgcaagtaccgcgacgcgctgcggcacgtccgcgcaccggccggggcgacgtcgtcgtcctgcgggggcgggggagggtcggtgatcgagatggcctcgctgctgcgctccgaccggccctacgcgcccctcagcatcgaagacccctccgcctccaggtgccaccacctccaactcccaacaccccctcgcatgtcgtctggcctctgcggtttgggaacccactgaaggttgctagctgcgacgcggggttgcaagattagaggtgctgtgtcagtcgggctacccccagcctgggtggatgtttctgaagagatatctgcaaacatgcagagggcaaggacaaaaatgacggagttggctaaggcacatgccaaagccttgatgccgtcctttggcgatggcagagacgaccagcgagcaattgaggttctcacacatgagataacagacttgctgaaaaggtccgagaagaggctgcagaagctgtccatgaaagatttgtcagaggattcaaatgtccgaaagaatgtccagcgttcccttgctacagacctgcaaaacctgtcaatggagttccggaaaaagcagtcatcatatttaaagcagcttcgccaacaaaaagagggtcaggatggtgttgatttggaaatgaatatgaacgggacaaagtctacatttgaagacgatgagtttgatgatgtgggtttcactgagattcagatgtcaaaacttaagaaaagcgaagcattcactagagaaagggagagagaaattgagcaggttgttgaatcagtcaacgaacttgcacagattatgaaggatctttcagttcttgtgattgatcagggaaccatcatcgatcggatagactacaacatacagaacgttgcagcttcagttgaggaaggttacaaacaattgcaaaaggctgagaggacccagaagaaagggggcatggtgatgtgtgccactgtccttgtcattctgatcttcatcatgatagtccttctgattttgaagaccattttctgacatacttagctatctcattttaatggttgatgaatggtggccaagcacacaccacgctcatctattcatgtgagtgaggattgcaccatgcctgcatatcaagaacgccacaaattcatttgaatagcggcgatacgactcactgatctgaagatggaaccatcttgagtcttggccacaatttttgcatcgttgcagatgtagacatgccctattcatacaggactcttaattttagagagagaaaaatctgaagaggattgtttgacacgtttcaccttccagtttgccttggagcaaccgggttaggctggctgtgtatgcctctgtatagagtgagttgtatcatacatcagggtatcggaaatcagaaagtaggttcagttcctgtgtcatctcttttctgctttatgttgtctgcccttctattttgagctagctttgaagtggcatttcattgtaccatatcctaacaattgttctgacaactttcgcccgggtagtcggatatgcaatgagattttgtgct

SEQ ID NO: 126323 - DNA, 1914 bp, Zea Mays
ctttaccgccctttttaaatcccctccacggcaagaagcgcgccaaagcaccagctagggcctctcgctgtcctccacccctaacgcagcagagacatggccagctcctacgtgcgactcctcgtcctcgtcatggcctccctagtcccggcttccgttgcttcgctccctcacaagctccgtctctctgcctcggacgtcgccgcgctcggaccgctggcaccgcggccgcccgcgccggaccagccgaccgtcttcttcgaggtggaccggccgcaccggccgccgccgggcagcttcggcccgtgctcgacgctgctcctctcgcactccttcgcgtacacctacgccaagccccccgccacggtcgcctactcgccgccgccgtgcctggcggcggcgggcggccgcgcggccgttatctcgctcgccgtcctcgagtggcgcgctacgtgccgcggcgtccagtacgaccgcgtcttcggcgtgtggcttggcggcgccgagctcctccgcggctgcaccgctgagccgcccatccagagcggcgccggcgtcgagtggacggtctccaaggacgtcaccaagtacgcgtcactcctcgccgcccgcgaccccaccacgctcgctgtgtacctcggcaacatcgtggaccagcagtacatcggggtcttccacgccaacgtcacgctacacctctacttccgccacccgccgccgccgccgccgcagcccgggctaggccccgccgacgtcgtcgctccgatatcgcggagcctcccgttgaacgacggcctgtggttcgagatcaaggacgacttcgacatcgcgtccgcgagcatcacagtgccggccaacacgtaccgtgccgttctcgaggtgtacctctcctaccactcggaggacgagttctggtacgggaacgccgccggaaacggcccgttccgcgaggtcgctgttcagatcgacggcgacttggtcggcgtcgtgtggccgttccccgtggtctacaccggcggcatcaacccgttgctctggcgaccgatcaccggcatcggctcgttcaacctcccatcctacgacatcgagctcacggcttttctgggcaagctgctggacggcgagaagcacgaggtcgcgttcacggtgaccaacgccatggacacgtggttcgtcgacgccaacctccacctctggctggaccccaggggcgcagccacggcggcgggcattgtcagctacgacgcgccgccgctggacacggccaccgcgactctgcccgatggccctaacaacgggctctactacacgacagcgttccgacacgtctccgcctccgggtgggtgcacacgccgtcgtatggcaaggtcacggcgacgtggacgcaaaggttgggctacgagaacactatcaacttccgcgacagctttttccagccggaggtgaaccagaccacggacgcgtactccgccgcccacgtcgcggaccacgccggcgtgctgtacgcgcaggaggcgcagcagagcttcacgctgtacaagttcgtgggagtggtgaaccagaccgacgtcgactcgtacaccgcggcgacgaaggtgcagctcgggttcagcgacgaccgcgtcgccgccggccggtcggggttctgggcccggtcgctgagcaactcgcaggagtgcgcccgggacgtggacgtcgaggacggggaagccgtccgggagtcgtgggccgcgcgccagacgtacaggtatgaggcctccgacgcatgcttcttccggaacgtgaccagccgaggcaacaacgtggtgtccgaccactccgacgagacctgcgtgaaggaatcgccagccgccgccggtggcattgcagagcgggcggcggccgcagtagcaccgcggctgagaaaggaatag

SEQ ID NO: 126324 - DNA, 1524 bp, Zea Mays
cgcaaaccaaagcaagcaaaccccctctgctccgaatcgcgcgcgtcacagcaatagcacgctgcactgcacgctgcggagtctacctgaccacaccttatccggacggcgcgggcgccatggagcggaggctgtcggcgacgtccaggcggtccgcgccgtcggccatccaacggctgtcccacctggcgcagcgcgtcggcgccgtcaacctcgccgagggcttccccgacttccccgcaccgccccacgtcaaggccgccgccgtcgccgccattgccgcggacctcaaccagtacaggcatgtgcaggggatctgcgacatcctcgccaacacgatgaaacgtgaccatgacctcgacgtggacccgctcacggactttgtcatctgctgcggccaatccgaagcattcgccgcggccatctttgcaataatcgaccaaggagacgaagttctcatcttcgaccctgcttatgaaacgtatgagacaagcattgagctagctcgaggcgtccctgtgtatgtgccattggatccaccttcttggactctgaacgaagaaaaatttctgaaatcttttacaagtcggaccaaggcgttggtcttgaacagcccacacaatccaacagggaaggtcttcagcaaagaggagctgcttattatctcccaagcttgtcagaaaatggactgctttgtgataactgatgagggatgcaagagaggaccatcatcacatcctcactgtcaaaaacttacagtgtgactggttggagactcggttgggcttgtgcagcagcaagcatcgcctcagctattagaaatatccacataaaattaacagattcagctcctgcaccattccaagaagctgcattgattgcattaacaagcacagcagattactacatatccctgagaaaagactatgaggtgaaaagagacttcatccttctgttgctgaaagacttgggcttcaaaatcagcgtcaagccacaaggttcagtatttgtgtttgctgagctgccaaggtcctgccaactttcagatgtagaatttgtgacaaagttgatcaacgatgctggtgtggttgccgtgcctggccgtgggttcttccacaagacttgtgacggtgaaagctactgccaccgatatgtcaggtttgcgttctgcaagggcgacgacacacttaaggctgctgccatgaagatgaggaagctggcaagcaggcagggagaaccatggcttactggcagacaataggataagactatgccctcctctaattgatcaaaacccttagatttattcctctttttagtttctggatacaactttgatgccatgtcacacggcccatgaaagtgtaacagctagttgcatccttttcccataaaagtgtaagggcatgtacaacctagaacccacttcacggttctccaagcgcaagacacacctaagacagtttcatacagtgggttgtatcttagattaaatgctttaataaatgcattgtatttacgtgt

SEQ ID NO: 126325 - DNA, 1794 bp, Zea Mays
cgcaaaccaaagcaagcaaaccccctctgctccgaatcgcgcgcgtcacagcaatagcacgctgcactgcacgctgcggagtctacctgaccacaccttatccggacggcgcgggcgccatggagcggaggctgtcggcgacgtccaggcggtccgcgccgtcggccatccaacggctgtcccacctggcgcagcgcgtcggcgccgtcaacctcgccgagggcttccccgacttccccgcaccgccccacgtcaaggccgccgccgtcgccgccattgccgcggacctcaaccagtacaggcatgtgcaggggatctgcgacatcctcgccaacacgatgaaacgtgaccatgacctcgacgtggacccgctcacggactttgtcatctgctgcggccaatccgaagcattcgccgcggccatctttgcaataatcgaccaaggagacgaagttctcatcttcgaccctgcttatgaaacgtatgagacaagcattgagctagctcgaggcgtccctgtgtatgtgccattggatccaccttcttggactctgaacgaagaaaaatttctgaaatcttttacaagtcggaccaaggcgttggtcttgaacagcccacacaatccaacagggaaggtcttcagcaaagaggagctgcttattatctcccaagcttgtcagaaaatggactgctttgtgataactgatgagggatgcaagagaggaccatcatcacatcctcactgtcaaaaacttacagtgtgactggttggagactcggttgggcttgtgcagcagcaagcatcgcctcagctattagaaatatccacataaaattaacagattcagctcctgcaccattccaagaagctgcattgattgcattaacaagcacagcagattactacatatccctgagaaaagtgagccttaattctaaccatgcttctttcagtttgagctgtcttaccttgcaattgtgatgactttggctaggactatgaggtgaaaagagacttcatccttctgttgctgaaagacttgggcttcaaaatcagcgtcaagccacaaggttcagtatttgtgtttgctgagctgccaaggtcctgccaactttcagatgtagaatttgtgacaaagttgatcaacgatgctggtgtggttgccgtgcctggccgtgggttcttccacaagacttgtgacggtgaaagctactgccaccgatatgtcaggtttgcgttctgcaagggcgacgacacacttaaggctgctgccatgaagatgaggaagctggcaagcaggcagggagaaccatggcttactggcagacaataggataagactatgccctcctctaattgatcaaaacccttagatttattcctctttttagtttctggatacaactttgatgccatgtcacacggcccatgaaagtgtaacagctagttgcatccttttcccataaaagtgtaagggcatgtacaacctagaacccacttcacggttctccaagcgcaagacacacctaagacagtttcatacagtgggttgtatcttagattaaatgctttaataaatgcattgtatttacgtgtatgaaagtatgattgatctagtgtgcatatacacttaggtgccgtttggtttccaaaatgtaacgtaaatggtaatggtaacggtttgcattcgattatcagtggtaacaagtttgaataggctggtatcaatttctagtgtggtatccgattacgattggacttaaacaaacatgatttaacgttatttgttaccg

SEQ ID NO: 126326 - DNA, 1309 bp, Zea Mays
aaaccccctctgctccgaatcgcgcgcgtcacagcaatagcacgctgcactgcacgctgcggagtctacctgaccacaccttatccggacggcgcgggcgccatggagcggaggctgtcggcgacgtccaggcggtccgcgccgtcggccatccaacggctgtcccacctggcgcagcgcgtcggcgccgtcaacctcgccgagggcttccccgacttccccgcaccgccccacgtcaaggccgccgccgtcgccgccattgccgcggacctcaaccagtacaggcatgtgcaggggatctgcgacatcctcgccaacacgatgaaacgtgaccatgacctcgacgtggacccgctcacggactttgtcatctgctgcggccaatccgaagcattcgccgcggccatctttgcaataatcgaccaaggagacgaagttctcatcttcgaccctgcttatgaaacgtatgagacaagcattgagctagctcgaggcgtccctgtgtatgtgccattggatccaccttcttggactctgaacgaagaaaaatttctgaaatcttttacaagtcggaccaaggcgttggtcttgaacagggaaggtcttcagcaaagaggagctgcttattatctcccaagcttgtcagaaaatggactgctttgtgataactgatgaggtttatgagtatattacttacgatgcgaacaagcatatctcactggcttctcttccagggatgcaagagaggaccatcatcacatcctcactgtcaaaaacttacagtgtgactggttggagactcggttgggcttgtgcagcagcaagcatcgcctcagctattagaaatatccacataaaattaacagattcagctcctgcaccattccaagaagctgcattgattgcattaacaagcacagcagattactacatatccctgagaaaagactatgaggtgaaaagagacttcatccttctgttgctgaaagacttgggcttcaaaatcagcgtcaagccacaaggttcagtatttgtgtttgctgagctgccaaggtcctgccaactttcagatgtagaatttgtgacaaagttgatcaacgatgctggtgtggttgccgtgcctggccgtgggttcttccacaagacttgtgacggtgaaagctactgccaccgatatgtcaggtttgcgttctgcaagggcgacgacacacttaaggctgctgccatgaagatgaggaagctggcaagcaggcagggagaaccatggcttactggcagacaataggataagactatgccctcctctaat

SEQ ID NO: 126327 - DNA, 1631 bp, Zea Mays
aaaccccctctgctccgaatcgcgcgcgtcacagcaatagcacgctgcactgcacgctgcggagtctacctgaccacaccttatccggacggcgcgggcgccatggagcggaggctgtcggcgacgtccaggcggtccgcgccgtcggccatccaacggctgtcccacctggcgcagcgcgtcggcgccgtcaacctcgccgagggcttccccgacttccccgcaccgccccacgtcaaggccgccgccgtcgccgccattgccgcggacctcaaccagtacaggcatgtgcaggggatctgcgacatcctcgccaacacgatgaaacgtgaccatgacctcgacgtggacccgctcacggactttgtcatctgctgcggccaatccgaagcattcgccgcggccatctttgcaagtagtagagtacagcagactagcgggcattccgactgaattattatgctagtttcagaacctcgtggaggcatgtgggcatccttcctgatggatatgcatttgcttccacttccatgcagtaatcgaccaaggagacgaagttctcatcttcgaccctgcttatgaaacgtatgagacaagcattgagctagctcgaggcgtccctgtgtatgtgccattggatccaccttcttggactctgaacgaagaaaaatttctgaaatcttttacaagtcggaccaaggcgttggtcttgaacagcccacacaatccaacagggaaggtcttcagcaaagaggagctgcttattatctcccaagcttgtcagaaaatggactgctttgtgataactgatgaggtttatgagtatattacttacgatgcgaacaagcatatctcactggcttctcttccagggatgcaagagaggaccatcatcacatcctcactgtcaaaaacttacagtgtgactggttggagactcggttgggcttgtgcagcagcaagcatcgcctcagctattagaaatatccacataaaattaacagattcagctcctgcaccattccaagaagctgcattgattgcattaacaagcacagcagattactacatatccctgagaaaagtgagccttaattctaaccatgcttctttcagtttgagctgtcttaccttgcaattgtgatgactttggctaggactatgaggtgaaaagagacttcatccttctgttgctgaaagacttgggcttcaaaatcagcgtcaagccacaaggttcagtatttgtgtttgctgagctgccaaggtcctgccaactttcagatgtagaatttgtgacaaagttgatcaacgatgctggtgtggttgccgtgcctggccgtgggttcttccacaagacttgtgacggtgaaagctactgccaccgatatgtcaggtttgcgttctgcaagggcgacgacacacttaaggctgctgccatgaagatgaggaagctggcaagcaggcagggagaaccatggcttactggcagacaataggataagactatgccctcctctaattgatcaaaacccttagatttattcctctttttagtttctggatacaactttgatgccatgtcacacggcccatgaaagtgtaacagctagttgcatccttttcccataaaa

SEQ ID NO: 126328 - DNA, 1762 bp, Zea Mays
aaaccccctctgctccgaatcgcgcgcgtcacagcaatagcacgctgcactgcacgctgcggagtctacctgaccacaccttatccggacggcgcgggcgccatggagcggaggctgtcggcgacgtccaggcggtccgcgccgtcggccatccaacggctgtcccacctggcgcagcgcgtcggcgccgtcaacctcgccgagggcttccccgacttccccgcaccgccccacgtcaaggccgccgccgtcgccgccattgccgcggacctcaaccagtacaggcatgtgcaggggatctgcgacatcctcgccaacacgatgaaacgtgaccatgacctcgacgtggacccgctcacggactttgtcatctgctgcggccaatccgaagcattcgccgcggccatctttgcaataatcgaccaaggagacgaagttctcatcttcgaccctgcttatgaaacgtatgagacaagcattgagctagctcgaggcgtccctgtgtatgtgccattggatccaccttcttggactctgaacgaagaaaaatttctgaaatcttttacaagtcggaccaaggcgttggtcttgaacagcccacacaatccaacagggaaggtcttcagcaaagaggagctgcttattatctcccaagcttgtcagaaaatggactgctttgtgataactgatgaggtttatgagtatattacttacgatgcgaacaagcatatctcactggcttctcttccagggatgcaagagaggaccatcatcacatcctcactgtcaaaaacttacagtgtgactggttggagactcggttgggcttgtgcagcagcaagcatcgcctcagctattagaaatatccacataaaattaacagattcagctcctgcaccattccaagaagctgcattgattgcattaacaagcacagcagattactacatatccctgagaaaagactatgaggtgaaaagagacttcatccttctgttgctgaaagacttgggcttcaaaatcagcgtcaagccacaaggttcagtatttgtgtttgctgagctgccaaggtcctgccaactttcagatgtagaatttgtgacaaagttgatcaacgatgctggtgtggttgccgtgcctggccgtgggttcttccacaagacttgtgacggtgaaagctactgccaccgatatgtcaggtttgcgttctgcaagggcgacgacacacttaaggctgctgccatgaagatgaggaagctggcaagcaggcagggagaaccatggcttactggcagacaataggataagactatgccctcctctaattgatcaaaacccttagatttattcctctttttagtttctggatacaactttgatgccatgtcacacggcccatgaaagtgtaacagctagttgcatccttttcccataaaagtgtaagggcatgtacaacctagaacccacttcacggttctccaagcgcaagacacacctaagacagtttcatacagtgggttgtatcttagattaaatgctttaataaatgcattgtatttacgtgtatgaaagtatgattgatctagtgtgcatatacacttaggtgccgtttggtttccaaaatgtaacgtaaatggtaatggtaacggtttgcattcgattatcagtggtaacaagtttgaataggctggtatcaatttctagtgtggtatccgattacgattggacttaaacaaacatgatttaacgttatttgttaccg

SEQ ID NO: 126329 - DNA, 123 bp, Zea Mays
cttatttgtctctctttgtctgccctgagatattctcctctccccgttattctttctccccgccttcgttggcgtcctggcggccctgttctttgtaaaccctaaaatgtgaatttaagtggg

SEQ ID NO: 126330 - DNA, 339 bp, Zea Mays
atggctggcagggcggaggtagtggtcgtagaggaaatggaggtgggggcgccgactgcgacggtcacgccgcctgatgtggcgacacatgtcgcggtcggtggtagggaggaggcgatgcggatggagggctggctgtacctgttccgatccaaccgatttgggatgcagtactcgcgcaagcgctgtttcatgctcgaggacgccgtgctccactgcttcaagtctgcgccgtcctccaagcgtgagaacagaattgcactgcagtggcaccgtagccagtttgtacgccaagtcttctctaagactcttttatcaatatgggacaatggtggctga

SEQ ID NO: 126331 - DNA, 687 bp, Zea Mays
agggttaaaaccctaaactagaaagggcctcagccagtccagccagcctcccgagccctatccttttccccactcccgggtctccagcattcctatcctctccccgcccgcccgtgccgccgccgccgccgccgccgcggcttcccttcctctcccgagccaaggtgagcttcctatctccatatatccagtcccgtggagtagcgacggtatcgtgggtagcttccttctcgcatcgactagcagtgtttcacgcggttttgtttggcctaggagctgctggatctgcacgtttagcccggttacgtacatgtgcgtttgcacgatttaaggtcgttgtaactggaggctatctttgggctgttttgttgtttgatttgtggtccgaactagcgggaaagcactggggcttagtagatcccatgtttattagatttgggatatcgtgttcggggaaaaagacgtaccttggtcctgattaatcgcttgatatgctgtttgaaagcaggagccgtgctagattacgcagtgttggagggtacaagaagtcattggtttagtttccgcactctgggagtgatactgtggtagactcgtagcgttttgtcctgggtaacagctgcatggatagttctagtaaatgaatgcagttagctccagagaagttaggttaagaccgatttacta

SEQ ID NO: 126332 - DNA, 991 bp, Zea Mays
agggttaaaaccctaaactagaaagggcctcagccagtccagccagcctcccgagccctatccttttccccactcccgggtctccagcattcctatcctctccccgcccgcccgtgccgccgccgccgccgccgccgcggcttcccttcctctcccgagccaagatgaatgttgaaaagctcaagaagatggcaggtgctgtgcgcaccggggggaagggtagcgtgcgcaggaagaagaaggcagtccacaagactacaaccacagatgacaaacggcttcaaagcaccttgaaaagaataggagtgaacagcattcctggtattgaagaggtcaacatctttaaggatgatgttgttattcagtttgtaaatcctaaagtgcaagcgtcaattggtgctaatacatgggtggtcagtggaactccacagacaaagaagctgcaagatctgcttccgtcgattatcaaccagcttggtcctgacaacctggacaatctgcggaggctcgcagagcaattccagaagcaggcctctggtgcttctggtgcagaggctggtgccagcgctggggctgttcaggacgatgatgatgacgttcctgagcttgtccctggagagacatttgaggaggccgcggaagagaaaaaggagtcctcatgattttgctacatgcctgctgttgttaaaccatgccattagaagggacctgttgagaactctgacctaccttatttgtgcctgtgggactggttatgtcatgatcgagaatttggtagggcgtgctggtgggattttacatgaagtatgcctcttttttttccatccatatctcccttgcttttgtgtggtaaaagtcttgttaatggtaaaggccacactttagaccaaatcaaggtaccgtgatgcatgaagatgaataccacatatcaattcaccttccatttatttgtctgggctgcagaaaatatatctttactactctatatgtt

SEQ ID NO: 126333 - DNA, 958 bp, Zea Mays
atatatccagtcccgtggagtagcgacggtatcgtgggtagcttccttctcgcatcgactagcagtgtttcacgcggttttgtttggcctaggagctgctggatctgcacgtttagcccggttacgtacatatgaatgttgaaaagctcaagaagatggcaggtgctgtgcgcaccggggggaagggtagcgtgcgcaggaagaagaaggcagtccacaagactacaaccacagatgacaaacggcttcaaagcaccttgaaaagaataggagtgaacagcattcctggtattgaagaggtcaacatctttaaggatgatgttgttattcagtttgtaaatcctaaagtgcaagcgtcaattggtgctaatacatgggtggtcagtggaactccacagacaaagaagctgcaagatctgcttccgtcgattatcaaccagcttggtcctgacaacctggacaatctgcggaggctcgcagagcaattccagaagcaggcctctggtgcttctggtgcagaggctggtgccagcgctggggctgttcaggacgatgatgatgacgttcctgagcttgtccctggagagacatttgaggaggccgcggaagagaaaaaggagtcctcatgattttgctacatgcctgctgttgttaaaccatgccattagaagggacctgttgagaactctgacctaccttatttgtgcctgtgggactggttatgtcatgatcgagaatttggtagggcgtgctggtgggattttacatgaagtatgcctcttttttttccatccatatctcccttgcttttgtgtggtaaaagtcttgttaatggtaaaggccacactttagaccaaatcaaggtaccgtgatgcatgaagatgaataccacatatcaattcaccttccatttatttgtctgggctgcagaaaatatatctttactactctatatgtt

SEQ ID NO: 126334 - DNA, 437 bp, Zea Mays
tggacagggacatccggctcctcaattacctcgatccgaccaaaactgggctcctgacgcatctcctgaacgacggtgacccgatcagcacctcctacatgaactacgactggtctctgaatgcctgaccagaattcgtccgggatgccgccggatgcgtacagtggtgaaacttggggctagtgccaggaatcccacgatatccgttcagagctgaggtcgatcagctgctggttaatggccaggtggaccgatgacatatatatatatatatgtttgtgatcagcatactgagcttattcagtagagagaaatctaaacatgtatatagaattctgaatgatgattttgtactcatgatatgccccacgcgcgtctcttgcggaaggcacatgagggtaaattttctgcactggagttgtggatgttaattttgc

SEQ ID NO: 126335 - DNA, 303 bp, Zea Mays
acaatggcccatgagcgtcattctcggagcctacggagtaccaaccacgtcaccgaaactgtagacgaggaggacaagggtcaagggaaagaaagccaaccgccccaatctcgcgtcccgccggcggccaccaccaccaccgccatgatcagcatcctcgcgcaggagcgcctcctcgggttcgccctgggctccgtctctatgggaggtttcgtcctccaccagcgccgcgccatctaccgctcaatcgctgaagccgatgggtcgtcctacttctaccagtgtaaaaagttacatcactag

SEQ ID NO: 126336 - DNA, 698 bp, Zea Mays
gtcgtccttatccccaatccacaccgtcggcggcccatccaacccgtccccatctgatctccccgtcggcggcggcccccaccgcttccttcccctcgccgtcgcgatactgagcagacactagcagaagtaggtgctccgtaacccgccccccaacaccaaagtggcactcatcacgcccacgcgaggtggtcgacgaagagccgcagaggagggggaggtgctgggtgggatccggcggaccgctcatgtcgagcggcgcggacggatcggatccctgcacgggccttgacccggggacgatcccagagctgccggcccatgaacctcctgtgctgcaggctccgtcgccggcgccgcagcaggaggtggtggtggcatcgcagaccgaggcgccgttgccagctgtcaccatcgtgatctcgcggccaggcgaggatgttcagatgcccgatgcaaagggtggctccccggcatgctccccgcaggccggtgacggcaagcctatggccacctcggtttcgttgaccgcttcggcggccgcgaaggaagccgggctggcaaggtccgactccgacagcttggacgactacgagcaatgcagtgactgtagctgtatgaacgaacttccttttatgatgtagtgattcatttcttggagtcgccctagcacatggatcatgtcaactgaactgatt

SEQ ID NO: 126337 - DNA, 1502 bp, Zea Mays
tttctggaggatgaatacatttttcacttctgcagagtttgtcaacagaagacagaagaacctctggtcgaccttggatgcagatgtcgtggtgatcttgcaaaagcacatcgcacatgcattgatttttggtttcgtactagaggttcaaacaagtgtgagatatgccagcaggttgctgtcaatatcgcccctccagaaacgcaatcaagtgtatgtttactattttgcactttatatatttcgatctatattggatcatttggagaatgtatgtgtcctaatgcatatgtatatccatttcatttattctctaactaataaactggtctatgtttatgtctaaccaagttaaactacctattgtcagttgtatctatttgtagttttgagaacacctcattaaatataacaactttaattggctttgttttggaagacttctttttcacaattacataaatgaaggccatcctgaaatttgaggaggcacaatattgataaaagtacaagtcaatttccattttctattatgaaatttacttgttttcattcaacagacaagttattgggtttggagggttgattcgacttatggaaggggacgaggaggacgagaaagggtatttttatcactggatatgataaataagaaacaaatgcagtaacctgactctttatctgcaaaaatgattaatgatcatgtaatcatgtgcaatttttctttttgttgagcctgtattttttattctgcttcatattttattttgtttctctttttgtgtgtagggatggtttagcccactttgggttgcatttgcaattctgattggtggtctcttattggatgtgctgatatctgtttctctcggtgtttccgcacttcctgtcaatataataattggtgttcttatagttctcggattgggcaccgcccttcatctagctcttgagtgctgtcacgaatggggctcaaggaggaacgtggccaatattccgaggctggagaacatagcgccgactgggtaccaccctgcagtagtataatcattatgggacttgtaaatagcgtaggaacatctaagctcgtgctggcttttggattattatgttctcgcaactagctttagctcacacgtgttgctcgttaatgtcgagctcaaattcaaagctcgttgattacaatccagttcatactcccactagtccaatccaatgtaaatgcagagttactgatactcggtcatcacgggctagtgctcatgccaaactgccagcaccttaattggatggtctggctacccattcagcatgacagggctaggttccttcttccctccttgtacggtttactctgacaagtcacttgttgtgtttcatctttatctgtggcttgtcggtataggcatttgtgaaggccatttgagctagtgttgtttttgtacatttatgtagagttgtggatataacatttttatatgaattaatctgctgatacgttt

SEQ ID NO: 126338 - DNA, 948 bp, Zea Mays
tttctggaggatgaatacatttttcacttctgcagagtttgtcaacagaagacagaagaacctctggtcgaccttggatgcagatgtcgtggtgatcttgcaaaagcacatcgcacatgcattgatttttggtttcgtactagaggttcaaacaagtgtgagatatgccagcaggttgctgtcaatatcgcccctccagaaacgcaatcaagtggatggtttagcccactttgggttgcatttgcaattctgattggtggtctcttattggatgtgctgatatctgtttctctcggtgtttccgcacttcctgtcaatataataattggtgttcttatagttctcggattgggcaccgcccttcatctagctcttgagtgctgtcacgaatggggctcaaggaggaacgtggccaatattccgaggctggagaacatagcgccgactgggtaccaccctgcagtagtataatcattatgggacttgtaaatagcgtaggaacatctaagctcgtgctggcttttggattattatgttctcgcaactagctttagctcacacgtgttgctcgttaatgtcgagctcaaattcaaagctcgttgattacaatccagttcatactcccactagtccaatccaatgtaaatgcagagttactgatactcggtcatcacgggctagtgctcatgccaaactgccagcaccttaattggatggtctggctacccattcagcatgacagggctaggttccttcttccctccttgtacggtttactctgacaagtcacttgttgtgtttcatctttatctgtggcttgtcggtataggcatttgtgaaggccatttgagctagtgttgtttttgtacatttatgtagagttgtggatataacatttttatatgaattaatctgctgatacgtttcgtgattacgtaaaaccataaa

SEQ ID NO: 126339 - DNA, 1324 bp, Zea Mays
tttctggaggatgaatacatttttcacttctgcagagtttgtcaacagaagacagaagaacctctggtcgaccttggatgcagatgtcgtggtgatcttgcaaaagcacatcgcacatgcattgatttttggtttcgtactagaggttcaaacaagtgtgagatatgccagcaggttgctgtcaatatcgcccctccagaaacgcaatcaagtacaagttattgggtttggagggttgattcgacttatggaaggggacgaggaggacgagaaaggggatggtttagcccactttgggttgcatttgcaattctgattggtggtctcttattggatgtgctgatatctgtttctctcggtgtttccgcacttcctgtcaatataataattggtgttcttatagttctcggattgggcaccgcccttcatctagctcttgagtgctgtcacgaatggggctcaaggaggaacgtggccaatattccgaggctggagaacatagcgccgactgggtaccaccctgcagtagtataatcattatgggacttgtaaatagcgtaggaacatctaagctcgtgctggcttttggattattatgttctcgcaactagctttagctcacacgtgttgctcgttaatgtcgagctcaaattcaaagctcgttgattacaatccagttcatactcccactagtccaatccaatgtaaatgcagagttactgatactcggtcatcacgggctagtgctcatgccaaactgccagcaccttaattggatggtctggctacccattcagcatgacagggctaggttccttcttccctccttgtacggtttactctgacaagtcacttgttgtgtttcatctttatctgtggcttgtcggtataggcatttgtgaaggccatttgagctagtgttgtttttgtacatttatgtagagttgtggatataacatttttatatgaattaatctgctgatacgtttcgtgattacgtaaaaccataaatttgacagttcccttttgattcttgacgatccttctagcaaaccttgacttgcaccaatatgttaaaaaaacagagtaacatggcccttatatataaaatggcgacatgtgacaatagttcaagccatttcggcggcatgttgcaattgctcaaactgtcttttttttttttgagagagcttccttttcttttgttttttttttgagagagaagtaacggataagaacctttcgtttttctcattttctttatcaatattgtcacatccttcaaccgaccaatcttgagcattagaagcaaggtagaagtaca

SEQ ID NO: 126340 - DNA, 146 bp, Zea Mays
tcagtatgttttggtctttgtatttctctctgttttcagagttcaaatgttgttcaatgtagcagtaatccttacaccttggaagggacagatggctagaattttttagcaaaacttcagtgtaagtataggtaaattatataagc

SEQ ID NO: 126341 - DNA, 2395 bp, Zea Mays
cttgtcgggaataaagtttagcccattgtattgtcggggcctcagctcgtacgcttgtacaccagtttctcattgcacagcaagcaatcgttcccttcatttgttaagaatttaataaagaatgtactgaagcttatcgaaaaaagatatagagatagaaaaaaaaggtgtcgctcgaaaaacaaaacccgaacctacgaacgaacgtgccgcttgtgggtccccagctgtcatcggcctgcctagtaaccgtaggcagcgagtagcattaaaatcttccaaaaatgaaacagaaaaaaaaaatataataagctccctctggttccacccgcaccacttcactcttctccctaaacacctcttctcgtagccggtagatcttccggggtcgccatctccggccacggcggccggcactcggagtaacgctggagctcgaggcggtggtcggcggccatgtacaagaatcagctgcaggagctggcgcagcggagctgcttcaacctgccttcttacacgtgcctgcgggaggggcccgaccatgcgccgcggttcaaggcggcggtgaacttcaacggggagcagttcgagagtcccgggttcttcaccacgctccgccaagcggagcacgccgccgcggaggttgcgctcgccgcgctcgcgcgacgcggcccgtcctactcgctcgccgcccgcatcctggacgaaacaggggtttataaaaatcttctgcaggaagtggctcaaagagttggggcgccattgccattgtatacaacagagcgatctggccttggccaccttccggttttcacatgcacagtagagctagctggtatcacatttgcaggtgatcctgctaagaataagaaacaggctgaaaaaaatgctgcttcagctgcatggtcagcactgaaacaattggtacgcgaggaggtgaattcatccaatgagccagaaaacattgatgagcaggagcagatcaggatcgcccgagccctcctcaattatcgcttgaaggagaagatggcgatggccaactaccctcatgtttcaccattccccaagaaatttcccatgcagcaagagcggaagccttgtttgggtcaatcttgtcaatccagccactcgaagattctccctttattccgccctaaacctaattcaagaccaaagtcgccagcatccaccgacggtgtgtcgaaaacgcctgggcggacggttgagagcctagtagatcaaagtcccaggtcaagatttccagctgcagaggcagctccctatgtgccagttgggcactaccgccgtataccttgccataacatggctccttccgtcacaattaggaccgctgttcctgtcttctctgctccacctctcccacctccccctgcacgcctgcagcagctccctccactcatgagccacccaccgcccattcggatggcatccccagtccgcatgaggccagcgccagcctctccaatgtttgcctcctcatctccagttcaagtgccgaaacctgtgatgcctgttcagctgaaggatgtgcaagatcacccaaggaaggaagcagttccacttccacctgtgatccctgttcaggtgaaggatgcgcaatgccgaccaaggaagagctccatgtctcccgtgattcctgtcccagtaaaggacgcacagcgccggcctgccgcaatcccagtgcagatgaaggacgtgcaaacccaagccccaaaggaaccgctggcagctccaattccagcagccaggccttcagttatgaccgacacgcctgcccaagtcaaggaagcttcagctggtgctaccagcgaggcgccatcgtctgctactggcaataacgctgctgtggaatgcagtgcatcatcggaaactgtcttggcaaggcaatctggggctgcggatgaggacacgctggtactaatgcggaagctaagcatgaggcccgaggctcaatcagcggcagaggcagccaccaccatgcggttggagaccaattgacttgatataaaaaaaatgcgcgccgccatcttctcccagattttgtaattatagccgcctcccgtgcacatccccgttctgttttagttcttgtatgccttgggtttcggattagggctgtctgggcaacctgcattgtggttggtaggaaggaacacctagtttttttttttttttggtctgttgagaagagagagagagaaaaaaaacaatgaggtggtggtggtaggtggcttgcccagtgtttttagttggagacggttatacttccctggacatgcagttggtctgcttttttttacccccaatgatgaggcgggctgtgcggtgcctctagggaaggaaggattctgatgaggcggcagttacatctaac

SEQ ID NO: 126342 - DNA, 1294 bp, Zea Mays
gctctcggctctcctccccccccccacacctgccgcagccgcacaccaccccaccggtcggtcatcggccatcgccttcgcgttcgctttatcggctctggcatcttctcgcccagctcttccgccagctccatcgcagtccccattactgcactgcgctctgtcgcctcctctcttccccacctcgctgctccgatccagcaagagctccatccgcgcgcagggaggtcgtcagatggagttcgtgctcatcatctcgctgccgctgctcatactcatcatcatcgtcgccgtcgtcctctgcatcatctgccgctaggctcgctgaacgtccacagagaagaagaagaaggttcagccccgtccgtctctgcagtctgcactctgctagctgtgatcctaccataccatgtgttagtgctgatttgacattgtacgtacagcatgacctgataaaccctcctctctctctctctctctctctctctctctctctctctctctctctctctctctctctctcttgtctgcattgccgtacgtgagattaatccgctgtagctctctatacgttgtttcttttcttcatctctcttttcctaaaagaaaaaaaaaaagaaacggccgtttgtgcagagcaacaagcaaacacaaggagaagccgctttccgcgtgtgatcaactgctgatgctccagtcatgcaacaacgcgttgccgacacttttgcagtagtgtaccgagctataggctgccacatggcgtgatacagccagagccaggcacatacggcacatggctcttgatatatatgacggctatggatctggaactgaagattaaacgggggaacatccatgtcaaggcactcgcctttcggggtccaatgtgctaacagcgagcacctaaacatattatatatagagatccaaatatgtcacccgctaaaaaggcacttttttatgtgctccttatatatgaccttataaatagagcatgtctaggttttgggtgagcattatggcttcctaacttgatatacaacctagtaaacccaaaaatatctttggctcacttctaatggtagtgattcatccataaagagattgaaagtgatatctagtgattcacattgaattgttgcatttagtagtactagtgatcatattgagtcgtgtggttcatgttactcctggtggttgttgctacctaaatggcttcgaggcaccagatgattgttgagtggctttggtgattattgagagcacctagagggaggtgaatatgtgatcctgc

SEQ ID NO: 126343 - DNA, 2194 bp, Zea Mays
ttcccctccaaccaaacgagctgctagcccttctaaccttgctcgacccttgcccgccgcctgaactcgcctcccccgcggccggtcccctgcatctgttcgccgcgccgcaacccggaggagactacgactacgagcaccaccaggtagcagcaactgttttgctgcaatctgacaaagtggagggtttaagagtcgctgcttcttttatgtctgaacaatctttgctttatttgggattgctgggagagtattcttgcgcgacgaggaaaaggcacaagtttctgctccactgcatgcatcaagagcccatccggtttccttgttctgaggtgtcattcgctagtgctcagagccggcttggttttctcgaaagatcagcagccactcttgattcaggactttgtcacacctgatagcatctagttaatacatctttatccaagatggcactgcaaaacattggtgcttcaaacagggatgatgccttctacaggtacaagatgcccagaatgattaccaagatagaaggtcgtggtaatggtatcaagacaaatattgtgaacatggttgacatagcaaaagcacttgccaggcctgcttcctatacaaccaaatactttggatgtgagcttggtgcacagtccaaatttgatgagaagacagggatttccttggttaatggggctcatgatactgcaaagctggctggtctccttgaggtattcatcaagaagtatgtccagtgttatgggtgtgggaatcctgagactgagattctcatatcaaagactcagatgctatcactgaaatgtgcagcctgtgggtttgtctcagatgttgacatgagggacaagctcacaaccttcatcctgaaaaacccaccagaacagaagaagggaggaaaagacaagaagaaggccatgaggagagctgagaaggaacgcctgaaggaaggtgaggctgctgatgaggagcagaagaaactgaagaaggatgcaaagaagaagggtgcatcttccaaggagtctactgccaagggttcaaagaagaaggctactgctggtggctctgatgaggaccactcaacctctccaactcgcagccgtgatggtgaccatgcagctgcggacgaggaagaggatgatgatgatgtccagtggcagactgacacttctattgaggctgcgaagcagcgtatgcaggagcagctgagtgcagcaaccgctgaaatggtgatgctgtccactgaggagactgagaagaagaaacatgcaacccacaaagatggcactgctaatggttcagcaaaagaaatacctgatgaaaagcctgccgtcactaagcctagtccctataaagaactgattggagacatcaaggctagcctgggaagtgctcccacacctacccagctcaaggctatgctggcctcctcgacccttccttcccaggacgtgatgaatgctctcctcgaggctctctttgacggtgtgggcaagggatttgcaaaggaggtcgtgaagaacaagaagtaccttgcagttgctgtgccagatgagggtgcccagaccctgctggttcaagccatcgaggcttttggcagcaagtgcaaccccgaggcgctgaaggaggtcccagttgtcctgaaagccctgtacgacggagatatcctggaggaggaaaccgttgtggactggtacaacgctgctgtcgcagctggaaaggactcccaggtcgtcaagaatgccaagccgtttgtcgagtggctccagagcgccgagtctgacgacgaggatggcgatgaatgaagaggcgatgctgctctactgttcatggcttcacttgataatattaattcaataagtttattttgcttgtctggtgtcatcgatgtcagtcttcgtttggtgtcagtcggtctggtgtcgatgtctaaaaactgttattgtcgtgccgcgcagcataccctatgtggttggctgcgtttggtgtcagtccgttttgtgtttggatgtcacggtttattatgttcctgtgggctgccactatatattatagttgcttgggatgtgttttttataaccttttggggtgttgcactttcttattgcattgttttatagtattttaagggttgatgagattttatatcaaacttatatggaatccttatcatgtgttggtactggtg

SEQ ID NO: 126344 - DNA, 555 bp, Zea Mays
agaccagcactagcagccgctcactccagccattacccgcagctagcaaacaaatggccaccgtcctgagcagcccccgcgcgccggccttctccttctccctccgcgccgcgccagcgcccactaccgtggccatgacccgtggcggtggcgccagcagcaggctgcgcgcgcaggccacctacaacgtgaagctcatcacgccggaggggggaggtggagctgcaggtgcccgacgacgtctacatcctggacttcgccgaggaggaaggcatcgacctgcccttctcctgccgtgcggggtcctgctcctcctgcgccggcaaggtcgtctctggctccgtcgaccagtccgaccagagcttcctcaacgacaaccaggtcgccgacggttgggtgctcacctgcgctgcgtaccccacctccgacgtcgtcatcgagacgcacaaggaggatgacctcctataattctagctagctatacaccgccagggcccgtcgtcttgtgtcatcacatgcagtaccgcccgcgcaggagatgagacgtgtcgtctc

SEQ ID NO: 126345 - DNA, 375 bp, Zea Mays
atggccaccgtcctgagcagcccccgcgcgccggccttctccttctccctccgcgccgcgccagcgcccactaccgtggccatgacccgtggcggtggcgccagcagcaggctgcgcgcgcaggccacctacaacgtgcccgacgacgtctacatcctggacttcgccgaggaggaaggcatcgacctgcccttctcctgccgtgcggggtcctgctcctcctgcgccggcaaggtcgtctctggctccgtcgaccagtccgaccagagcttcctcaacgacaaccaggtcgccgacggttgggtgctcacctgcgctgcgtaccccacctccgacgtcgtcatcgagacgcacaaggaggatgacctcctataa

SEQ ID NO: 126346 - DNA, 1341 bp, Zea Mays
atgccggccgatgccgctgccgccgcgcccgcccccgcccccgcaccgcatccacctccggcgatcctggacgctcgcacgggcggccgcatcctacgccgcgcggcggggcatctcgtccacccagcctctctcccgccgctcctcctcgcggcgctcctcctcctcctcttccgctccgctctcctggctggcacgctccgtctcgcctcctttgctgaccgcgacccggccctccgctcccttctcgcccgcctctcctctcccaatccgccatcgccgccgcctcccccacaccacctcccgcgacgccgctcgccgttcacctccccctcgtcctctctctccgacgatgatatcctggtcagccccctcgatcccaccgcctcaactccctccagccgccgcaacgcctcctaccaccatgtccaattcacctcctactccaccgtgcccaaaccctatacgttgccgctcccggcctccgcttcccccttcttcatcgccgtctataatgagacggcgcctccgaagcccgcctcgcggcggggcagcgagcttggcctgcttgacttgaccaggcgggacgcagcggccatcgtcaacctcctcgcgctgctgtcgtccgcacatatcttcgcgatcctcgggtacatcgccgtgcactccattgcgctgggcgcagtgtttgcgtccgtggcggggcaccacagacctgggcagcgtctagtgttcctcctcaccggtgctgccaagggcgctaagagactcacagggttcgcgttcctccggtgggccacgagggacgccgttgtgcagatgctctgcctctggttctttgccgatgtgcacgaccaggcccagctgttcaggctctttgtggtcgccaaactcatgccattctccgcttctgttaatccgtggcttggtgcagcggttgcaggcccagagctcggtggtttctttgttgcctgggctgtttttgatgcagttgtatcggttttgttcactgtggtgccttgggtggttgtcatggaccgtgatccacggccgcctgggcgcaatgctgtgaaggaagggtgctatcttgtatctctgatggcaactgatgccacaatgctcaagtgctgggaaacagttgtttgtggcagcatggggcggctcatcatggtgacatttggtggaaaggtttttggtggatttctgcattcaattgcgcaggtctacttcatggtggtatggctgctgttctactttgcagcaaggtgtaaggaggtgaggctgggtggtcgtcaatttggactggaggatgttgcagctgctcttgatggatttaggtag

SEQ ID NO: 126347 - DNA, 690 bp, Zea Mays
cgtggggggcctcgcagggggccgcgctgcgggcgcaggggcgcccctgtagccgccattctaggggagggggcggcagcgcggcgagcgctgcggccagcctaaagccgtcaggttggagttagacgatccacctcgtgtgcatggccgtgggcgctctaggtcgtccgtcgcctctcgcccacggcccacaccagttcgaccggcaccactcaggttgtcgtcacctctcgcagttcgctggtgctcgggcgcactccactccagtccggtcgcccgacgccacttgcccactctagttcggtctggccgcctctcgcccactccacactcccgtccgaccgcctgacgctgttcgcgtgtgttttacgcgccgatccgcgccggtcatcgatgtcgtatgctgctcctctggtagttttgtccactgctcctttgccggtgtcgttcactgacatcatccgatctcctctgtagtctgcacacgctgcctgcaggctcttgtcttggcctgggaaatctggtgctatgccatcctattttttggggagcaagcagctggctacgagataaacttgtccagactttgatattgccttgtgtttttcgtgttagtacggggtatctgttgtgcttgtttcgttgaaaataatgggaaaaggtgattgcattatgtgcaaaaagtcaaaa

SEQ ID NO: 126348 - DNA, 1102 bp, Zea Mays
ctgtgctgctgggcacccactccccagtcaaggcatatccattccatggatctcgcgcccctgctccttctctcgtagctgctgctgcttccggtggtggcggttgtctccggcgagaccgccgcgcacccgggctacgcgcacgctgaggaggcatgcggcggtgtgctagaggcagaggcggagaaagcaacggtgctggtgcctgcgccggagcggcgcaaggagttcgacggcgggcggatcgtggacatcatccactactaccgcgaggacatgccggagtgggagtcatcggagggctccggcgagttcctgcagctggcgtggtccatgcgcaatggctccgacatcgctaacttctcggagctccggctcactgcgcactccggcacccacgtcgacgtgctaggacacgtcttcgagcactactacgacgcctgcttcaatgtcgacaccctcgaactcgccgtcctcaacggaccagcgttgttggttgacgttcccagagataagaacatcacagaaaacttgtggaagaaagaatttgatacaagttatgttggcttcatgaaggatggtgcacaatggttggttgataatacagacatcaaactagttggagttgactacttgtcggtgggcgcatttgatgaatgcattccagctcatctagtatttcttgaaaaaagggaggtcatacttgtcgaagccttgaatctggagcatgttagccctagaatatacatcttgcattgttgccactaagattgcggggtgctgaaggttctcctgcaagatgcatcctcatcaagtgacatgggatggtgtgaggacccaataatatggagctgggctagtgctgatccaatcgacactaatatgagctgaagatactacataaaacatgaacaatatggagttttatatactggaccccagtccaggttttaaatccacccctgcaaggggtgagtttatgtttgtgtttgggagtgtatatttctatattgcagtttgaaaaaaatactatgtatataataaaataagaatatatcaatccattcacatgacaattgaaaaatgtggctcccatcactct

SEQ ID NO: 126349 - DNA, 2403 bp, Zea Mays
atgagatgttcggcggcggtacgctcgctcctcccgctatccctccattctcccgccggacccgccccctcccccatccacacctccgcccttcccctcgccgccgagctcgaagccggcgacgccctccacgcgctcctctccacgctcccgccgtcgctcccttccctcttcccttgcctctccctcctctcgcgccgactcaccccgcactccgtcgccgacgccctcctctgcgacgcgctcccgcccgcgtcccgcatccgcctcttcctcttctccgcgctcaccccgcgcctccgctcccccctcctccactcccgcgccgtcgtccccatcctccttgccaccgacgcggatgccgccatgtacgacgccatcgccgacgcccaagccgccggcctccaaccccccaccgccgcattcgaggcgctcatattcgcccacgcctccgccggccggcaccatgaggcggtcgaggccttctcccggatggagggcgagttcgggtgccgccccaccaccttcgtctacaacgccgtcctcagggtcctcgttgccagtggtggtgccgttccccttgccctggcgctgtataacaggatggtcgccgcaggctgcttgcccaacagggccacgtacaatgtgctcatccatggtctctgcaagcggggaacgccagtggacgcgctcaagctgtttgacgaaatgatctcgaggggtatcactcccaacgtcaagacacacaccatcttactatcgtcgatgtgcaatgctgggcagctgaaggaagctgagaacctgttacattccatggaagacaaagggtgtccacctgatgaagtcacatacaatgcatttcttagtgggttatgcaaggctggcagagttgacgaggccattgagcggctcgaggcactccgtcatactgggacctttgtacttggtttgaaggggtacagttgcttgattgacggtttgtttctggcaggtaggtatgaagagggattccagtgttacatggaggtcttggagcaagctgatgtctcaccggacattgttctgtacactataatgatccgtgggtgtgcggaggctggaagaaccaatgatgcatttgcgttctttgacgagatgaaagagaaaggttttactcctgataccttctgctacaacacgctgctgaaggccctctgtgatgctggtgatctggatggagctcgctcgttgatgtcagagatggtgcggaataatgtagtcctagacatccatacatatactaccatgataattgggttgtgcaaagaacagcttgtagatgaggcaatgcaggtttttgatgggatggtggaagttggctgtcatccaagtgttatgacatacaacgtgctcatcgatggactctaccgggcacacaggcttgaggaagctcggatgcttttctataagatggaggtgggaaataacccttccttgttccttcggttaacacttggtgcaaaccaggtgagagacagtgagaccttgcaaaagctggttgagagtatgtgccagtctgggcaggtgcttaaagcttacaagcttcttcgaggtataatagacagtggtgtggtccctgatgttgtcacgtataacacactgctaaatggactgtgtaaagtgaggaatcttgatggagccctgaggctcttcagggagcttcaagtgaaggggttccctcttgatgagatcacttatgggactcttatcgacagcctcttgagggcgcacagatataatgatgccttgacattgttccaggacatattacacagtggtggcactcctagtatgccgatctacaatagcatgatgagatcgctttgtaggatgcagaaattgtcacaagcaatcaacctctggtttgatcacctgccccgaaagtacaatctcttagcccaagatgaagtaatttctagtgcccgaaaaaagtttgaagagggttgcctgcatgaagcagttagggagctaatcaagattgatcaagaatatggttcagtaaattcatgtccttacaccatttggctcataggcctaattcaagcagggagaatagaagatgccctcaagatttttcatatacttgaggaatcaggcattgatatcacaccagcttgctgtgttcatcttagcaaatacttatgtttggaaggaaatctaggtgcggcggttgatgttatgctctatacattgaagaaaggattcaccatgcgaagatatgtaggcaaccggttactttgtagtctttgtatccatcacaggaggaaggacgcacaggcccttgcatggcgaatgcatcttgtaggatatgatatggatgcatatcttcatgagtctacaaaaggtttgttatacaatcaatag

SEQ ID NO: 126350 - DNA, 331 bp, Zea Mays
atgctcgtgctcggtcatctgcagcagttcgcttggtgtcagctcgccgacgtcgttgtttgctgctcgtggccgtcgtctccttctcaacatccacgtggacgctccctcgtcgatcgcgctctccggagttcgctgaacgccgctcccagtggaaaagctttgcaagttcgcgcgtcgtcgccctctatcgccggatgccatcctcgtctcgccaccttgttgtttgcgtcatcgtttttctcgtccagtgctcgcgcagtcttgcccaaaccgtgttgtcgtctcccaaccgcttgcccttgccccctgcacgcgcttgtcgcgctag

SEQ ID NO: 126351 - DNA, 698 bp, Zea Mays
ctctgttcgcctctgcgcgcagccatgtgctcctccgtgtcgtgctccttggagctcgcctagttccctctactcgctcgcgccgagtcgtcggacctcgcctccatccctatggtgctcggtgccctccctgctccgcgccgtgacgtggattagggggccggctgtccggtctcgtgaattgcctcattgtggatggacggctggatgggggcaggcaaatccggatccgttgcgctactcgcaaagcgcgtgggggcctcgccggtcatcctgcttccttctgtgcgctccgcttgtcgtcatcctccatgccccggcagttcgcttggtgtcagctcgccgacgttgttgtttgctgctcgtggccgtcgtctccttctcaacatccacgtggacgctccctcgccgatcgcgctctctggagttcgctgaacgccgctcctagtgggaaagctttgcaagttcacgcgtcgtcgccctctatcgccagatgccatcctcgtctcgccacctcgttgccgcgccatcgtttttctcgtccagtgctcgcgcagtcttgcccaaaccgtgctgccgtctcccaaccgcttgcccttgcccctgcacgcgcttgtcacgctagtcaaccccgcctcggtcatcgtcatcgatactgcacttgccggtggtcgaagcttgcgtcaccctctccctca

SEQ ID NO: 126352 - DNA, 802 bp, Zea Mays
atacaaacaccaaaatgtaaggtgttcttttttgttttaacctaagtcaaactttgctttgccgaagtttatagaaaaaacgcaccaacatgtacaacatcaagttggtttcatcaagtccaccatgatactgcatttatttggtatagtagatggctagatgctagacccctcctattccaaatgttgtttaagacttgtgcacaaggattaagaatgtgggtcaaatggccttgttactcttcattattctgcatttggaaagagggctcattcatctgtgagagtattggcatttattaagtagggaagagaaggggtaaaagatgcatagaagttttaggctgacttgcattttgagaatagttgggagggctagaaagacctacatttgtaaattttcctttttgggggtgggtggtactacattttccataaatttctcataagttagagaaatttgacttgacaaaactaaaacacctgatgttttggaaatggagtatacattttggtcagttagttttatcttgttcatgcaaatgcttacagtttttagcggtgtatcatgcttggctggtacctgaactatttgggcatgacgtttcaaggtgatatgttctccatcacacaaatggcttcagccttttggctgaaagctgcatccatatgcatatttctcttaaaggaattgtataggttactggttagtggttacaaggtctagcaacattgccattgcaaaaacattgatacatgcagaagtggtttttgtttttgtttcagcttctggccactagaa

SEQ ID NO: 126353 - DNA, 88 bp, Zea Mays
tgtggatctacacatgcaaattcaagaagtcatcaaacacttactgcatatttcagttactgcatatgaacattgaacaaacaacaaa

SEQ ID NO: 126354 - DNA, 1816 bp, Zea Mays
tatgtaaaattgcagtctgttttatctgattgttctgaggaacatcgatagtgcatatcagatttaagtatggtagtctaactctatctaaccacagggatgcatttgttgagtactggatggatgacaataagattacaatggatatggctagtcaaatatttgaaattttaagaaaaccaggttgcacatatctcactcaggatgacttcaagcctgtcctgaaagaactacttgcaactcaccctggcttagagtttttacaagggacccccgagtttcaggagagatatgcggagactgtaatatacagaatcttttactccataaatagatctgggaatggccatctgactctcagagagctcaaacgtggaaatttaattgctgcacttcagcagttagatgaggaagaagatatcaacaaagtgttgagatacttctcatatgagcacttttatgtgatctattgcaaattctgggagctggatgcagaccacgattttttgattgataaggagaacctcatcaaatatggaaatcattcgttgacctataggatagttgatagaattttcacacagataccaaggaaattcacaagcatgacagaagggaagatgggctatgaagactttgtttattttatattatcagaggaagacaaatcatctgagcctagtcttgaatactggtttaagtgcatcgatcttgatggtaatggtattttaacttacaatgaaatgcaatttttctatgaggagcaattgcaccgaatggagtgcatggcacaggaacctgtggtttttggggacatattatgccagatgattgatatgattggaccagagaatgagagctattttactctacgggacttaaaacggtgtaaactctcaggaaatatattcaatattcttttcaatctgaacaagttcatggcatttgaaactcgtgatccattcctcattcgccaggaacgtgaaaatccaacgctgactgagtgggatcggtttgcgcatagagaatatattagattgtccatggaagaagatggtgaagatgcttcaaatggaagtggtgatgtgtgggacgaatcacttgaggctccattctgaatggtatcttgctgcacgaatttggttgaacatgggtgattatggttgtgaagcggaagaattgtaaagtcggtggctacagtgctgaggccattgtaggctcacagcagattcagtgacactgaagactacttacaagttttactgtgcagatctgattcgatatttttggctggaaaattggggaggttggtgggcgccctgcagtttcaagtcaacaccctcagcagtcgcaaatgataatatagtgatggacccttcctggtcgactagttgcatttgtgttctgattggtccttagggtggatatctgttaattcaattgttgtgctaaaattttggagctgaactgttaatgtttgcctgcattttctttgttaatcttggaagcgtgggctagcacttccatcaaactaagatcgtggcatgtagctttccagttctgctttatcatcagcgtgttgttctgtaattcttggtgcatcttgggcggatggatactgttgtcattttgtaacatcaccgagaagctgtggattgggtgcatagtaacacaaaggtagataacattgtcaatccaatttttgttaaggtgtaaattcagagaagttttaggtttcaagtactattcgttgggttcgatctcttatctgaaagtgctttccctattgagctacttatgtcgtgatgagcggaaa

SEQ ID NO: 126355 - DNA, 2504 bp, Zea Mays
ctctctctctctccacattcgctcgcgctaccccgcaagtcgaggccttccgctggcgctcgctcgctccgtgaccggctgcctctccgctccacccctgcgctgcgaccggaggcgaccgcgccccgcggtggcgctgcgacccgcgacacgtgtgactgagaggggagggtttccagtcagtcatttatgaatcctgaggcctgtgcttactagagggagggcaaggctcgttgggatccgggatgaaggggagaaatgactcggggcacagcaagaggccggttgtgctgtgctgtgtgatgattgtgtgcctatgtctcctcttcttgtatttctcgggctccaatggacaggctgggagcgccgcatttgagtacgggaccaaattctcacggtcacttggatggggcagtgatgatggtgaggatggctctgaagagtccatttttggaaccggggatgcagatgatgtcaagcccaagagctttcctgtgtgtgatgaccggcactctgaactgatcccctgcttggataggaacttgatatatcaaatgaggctgaagctggatttaaacctgatggagcactatgagaggcattgccctccacctgaaaggcgttttaattgcttgattcctccaccacatggctataaggttcctataaaatggccaaaaagtcgtgatgtagtgtggaaagcaaacattccacacactcaccttgcaaaagagaagtcagaccagaactggatggttgaagctggtgaaaagatcaagtttccaggtggtggaacccattttcaccatggagctgacaaatatatatcaaatattgcaaatatgctaaatttcaaggataacaatataaacaatgatgggatgcttcgtacagttcttgatgttggttgtggagttgctagttttggaggatatcttctttcttctaatgtgatagcaatgtctttggcaccaaatgatgtgcatcagaatcagattcagtttgcactcgaaagagggatccctgcatatcttggtgttttgggaacaaaaaggcttccgtacccaagtagatcatttgaactagcccattgttcacgttgtaggatcgattggcttcaaagagatgggattcttctgcttgaactagatagattgctcaggcctggaggttattttgcttactcctctcctgaagcatatgcacaggatgaggaggatctccgaatctggaaagaaatgagtgcccttgtagaaaggatgtgctggaaaatcgcagagaaaagaaaccaaactgttatttgggtgaaacctctggacaatgattgttacaagaggcgagcacatggtacaaagccacctctatgcaaaagtggcaatgatccagattcagtatggggagttccaatggaagcttgcattactccgtatcctgaacaaatgcacagagatgggggaactgggctagctccctggcctgcccgattgacagccccgcctccccgtcttgctgatttgtacattactgctgacacatttgaaaaggacacggaaatgtggcagcaaagagtagaaaactattggagtttgctgggcccaaaggtaaaaccagacactattagaaacatcatggacatgaaggcaaactttgggtcatttgctgctgcactcaaggagaaagacgtatgggtgatgaatgttgtgccacatgatggaccaagcaccctcaagataatctatgatagagggctgataggcagcaatcacgactggtgtgaagccttctcaacctatcctcgaacatacgatcttctccacgcatgggcagtcttttctgaccttgataaaagaggctgcagtgccgaagacctgctccttgaaatggatcgtatcctcaggccgactgggtttgccatcgtgagggacaagggcaccgtcattgagttcatcaagaagtacctccacgcacttcactgggaggcattgactgtcgtggacgctgagcccagcccagaatcagaggagagcgaaatgatcttgataatccggaagaagctgtggctaccaaaagcaggcccgcaggattccggcacgtagttcttctcgtacctgttcctctcccagcacctgcagctcagaagccaggcgcagctgcaccatccaaaatggttcgacacttgtagctcctgagatagagtcagtcatgatttctagccctaccgcccacatgaagataggttgtttacgaggatactgcaagtagtatgtagcaggcttggattaaaaaaaaggcccttttttgtcgcgacagatatggattggtgtttgttatctagtttggttaggaaataaacattctttttcttttaggtgtttcgtgtcctttttttttgaagtctgctatagtctgtagcaagtgtatttggtgttttcttgaaagaactactgcgctcacatttttgggatatgtgctttgccctagagcctcaaggctgcgggtcctca

SEQ ID NO: 126356 - DNA, 2523 bp, Zea Mays
ctctctctctctccacattcgctcgcgctaccccgcaagtcgaggccttccgctggcgctcgctcgctccgtgaccggctgcctctccgctccacccctgcgctgcgaccggaggcgaccgcgccccgcggtggcgctgcgacccgcgacacgatcagtgtgactgagaggggagggtttccagtcagtcatttatgaatcctgaggcctgtgcttactagagggagggcaaggctcgttgggatccgggatgaaggggagaaatgactcggggcacagcaagaggccggttgtgctgtgctgtgtgatgattgtgtgcctatgtctcctcttcttgtatttctcgggctccaatggacaggctgggagcgccgcatttgagtacgggaccaaattctcacggtcacttggatggggcagtgatgatggtgaggatggctctgaagagtccatttttggaaccggggatgcagatgatgtcaagcccaagagctttcctgtgtgtgatgaccggcactctgaactgatcccctgcttggataggaacttgatatatcaaatgaggctgaagctggatttaaacctgatggagcactatgagaggcattgccctccacctgaaaggcgttttaattgcttgattcctccaccacatggctataaggttcctataaaatggccaaaaagtcgtgatgtagtgtggaaagcaaacattccacacactcaccttgcaaaagagaagtcagaccagaactggatggttgaagctggtgaaaagatcaagtttccaggtggtggaacccattttcaccatggagctgacaaatatatatcaaatattgcaaatatgctaaatttcaaggataacaatataaacaatgatgggatgcttcgtacagttcttgatgttggttgtggagttgctagttttggaggatatcttctttcttctaatgtgatagcaatgtctttggcaccaaatgatgtgcatcagaatcagattcagtttgcactcgaaagagggatccctgcatatcttggtgttttgggaacaaaaaggcttccgtacccaagtagatcatttgaactagcccattgttcacgttgtaggatcgattggcttcaaagagatgggattcttctgcttgaactagatagattgctcaggcctggaggttattttgcttactcctctcctgaagcatatgcacaggatgaggaggatctccgaatctggaaagaaatgagtgcccttgtagaaaggatgtgctggaaaatcgcagagaaaagaaaccaaactgttatttgggtgaaacctctggacaatgattgttacaagaggcgagcacatggtacaaagccacctctatgcaaaagtggcaatgatccagattcagtatggggagttccaatggaagcttgcattactccgtatcctgaacaaatgcacagagatgggggaactgggctagctccctggcctgcccgattgacagccccgcctccccgtcttgctgatttgtacattactgctgacacatttgaaaaggacacggaaatgtggcagcaaagagtagaaaactattggagtttgctgggcccaaaggtaaaaccagacactattagaaacatcatggacatgaaggcaaactttgggtcatttgctgctgcactcaaggagaaagacgtatgggtgatgaatgttgtgccacatgatggaccaagcaccctcaagataatctatgatagagggctgataggcagcaatcacgactggtgtgaagccttctcaacctatcctcgaacatacgatcttctccacgcatgggcagtcttttctgaccttgataaaagaggctgcagtgccgaagacctgctccttgaaatggatcgtatcctcaggccgactgggtttgccatcgtgagggacaagggcaccgtcattgagttcatcaagaagtacctccacgcacttcactgggaggcattgactgtcgtggacgctgagcccagcccagaatcagaggagagcgaaatgatcttgataatccggaagaagctgtggctaccaaaagcaggcccgcaggattccggcacgtagttcttctcgtacctgttcctctcccagcacctgcagctcagaagccaggcgcagctgcaccatccaaaatggttcgacacttgtagctcctgagatagagtcagtcatgatttctagccctaccgcccacatgaagataggttgtttacgaggatactgcaagtagtatgtagcaggcttggattaaaaaaaaggcccttttttgtcgcgacagatatggattggtgtttgttatctagtttggttaggaaataaacattctttttcttttaggtgtttcgtgtcctttttttttgaagtctgctatagtctgtagcaagtgtatttggtgttttcttgaaagaactactgcgctcacatttttgggatatgtgctttgccctagagcctcaaggctgcgggtcctcagctcgaaactactc

SEQ ID NO: 126357 - DNA, 675 bp, Zea Mays
atggaggcgcaggcgacggcgacggtgaaggaggcgcttgcggcgctgtaccaccacccggacgacgccatccgcaccgccgcggaccgctggcttcaggagttccagcacacgctcgacgcctggcaggtagctgacagtttgcttcatgatgaaagcagtaatttggaaactctcatattctgttctcagacccttagaagcaaggtacaaagggactttgaagagttaccctcggaagcttttcgatcattacaggattctttatacgtattgctaaaaaagttcaataagggaccacaaaaagttagaacacagatttgtattgcaattgctgctctggctgtgcatgtacctgtagaggactggggagctggtggaattgtgaattggctaagtgatgaaatgaaaactcatccagaatttattccaggcttccttgaactgcttatagttttgccgcaggaaacttctagttataaaattgcggctcgtcctgaaaggcgcagacaatttgaaattgacctttgttcgtctgctaatgttgctattgatttattaactgcttgcatggccattgatcagctgaaagagcaggttttggagggattttcttcttggcttcgtttctgtcatgggtatggagtttctgttgttctgatagtgatagtgtga

SEQ ID NO: 126358 - DNA, 384 bp, Zea Mays
atgggtgaatcctatgttgacttgattgccacaggctcagacgattcaattcaaatagtgaacgcattactagaagttacttctcttctcgaatttgccatttcctccatgacgtttaatttctggcattgccttaagcgtaacctcattcgaagggactctgatgtatcatatggattagatgtgacggttgaaattgagaaaaacagaagattacaaatatttcgtccaaagtttgaaactctggtgtctctgatacaccaaggaattaaaaccatctttgaggtctttaggaacaagctcggccgatctgctccaccaatcttcaaaacacatttcatccagtcccggggaaagggcagccaagcgcccaagcccacatag

SEQ ID NO: 126359 - DNA, 397 bp, Zea Mays
atagctgatgattgctatttgttagcatcaagatgtattcgttactgtcctgatctgtttatacctacagaaacgtttcaaagattggttgactgcgcaatggctggtataactatacatcacagggaagcctgtaaatcgatcttgtcttttctatctgatgtcattgatcttccaaactcatctggcgggggacagtaccgtgaagttattaacacaatcatacttcagcgtggtacaacccttactagaataatgattgctgccttaacaggggcgctaccatctggtcgtctggaggaggtttcatatgttctgctgtcacttagcagagcctttggtgaggatatgctgaactgggcaagggaaagcattaatcttataccaccacaagcct

SEQ ID NO: 126360 - DNA, 177 bp, Zea Mays
caacttctatataactatgtccaaaaatctgttaaacaaacaatgattgcaactgctgtctggtgtaattgcaactgctggtctggtgtgattgcaacttctatataactatgtccaaaaatctgttaaacaaacaatgattgcaactgctgtctggtgtaattgcaactgctggtc

SEQ ID NO: 126361 - DNA, 2832 bp, Zea Mays
ctatacatcgcacgggccagacgtggagcaggccagggtcgaggcccaactggagctccaggaaggcacacaggccgaaagccgccaccgtttcttcatctcccatctgccggcgctccatcttcgactccctccccgactcgcgctcggcacgcaggcgacgacggcggcgctcaggctcgggctcgggctctcagcgacggcggggcagtcccaatttcggcggcggcgtcagcggctccccctcccgcctcttgccaatcgcctcgcgccctcgcctccggtcctccgcacaccggccggtgaccctgcgtgcgcgcctcccgctcccctcccgcctccggtggaccgttgacagcgcccggccccggcggctgcactgcgcgccgcgtacggccggcgggcagcgggagccagcagccgctgctctaccaaggcggccgcaccgctttggtagcgcttatgccccaacgaagcgttacccgtccgcttagcgctgaagcgtgcgcttagtgccgcctgttggaaccctgatctatagttggtcttcttataacttctcatagtacactttcagcaacacattggactacaatggagaatatgcgttatgctgaggagctcgtgagggagtttctagttttcaggggtttcacaagtacgctgcaagcgtatgagacagagttgtctactgagattggcaggaactttcaaggagacaagatcgtggatttagtgttctcagagtatgtaccgaaataccaactggacaagttgctcggtctgtttgcctttttcaagcagtgtttcatgtcacctgcggacacagagttgttctcaacccttgttaagttggagctgtcagtattaaggtactatgttattaatgctttgaaatctggaagacaagacaaagtaattgaattctttggtgagagtggcaattatctgatgcaaaagcgtggagattggctggcatggtttgctattccatatattaagaacccaagcttggatccacaattccgtctatatttctccaaagagtggctggacactttggttctttcatttaggaattttttgagtgggatattcaatgatactcctcttatgagaattagtagtgaaaagaataccatcaaatccctcaagaatgacataaaacaactgaataataaattggcagagctacaagcatccttagaggagaaggaagatgaaatctctctgttgaggaggaactataatagtggtggttatggaaacaagaatgtagttggtactagtacagctggttcccctcatgaagagatgtcagaaaactatgaagaatcctcggcctcgagtagcatgatacagggttttgattctcggtcctcaagttcagtgaaatcttatacaagaggtggaaaattccatgaatcttctgagatcaaccatacagaggatcagcaggttttggtgactgaggaagagtttcctgaggtgaaagtagatttccaggaaacatttttaggccataacagtccaattagccgatgtcgattttctgcatctgggtcaaatattgctagttcatcaattgatggcacagttaggatttggacatatgattcgtcaactgcatcatccagaaatgctactatatactgtgggtctgaagtcagtgcactttcatgggaatgcagatctgacagattgctgctcataggcacagctaatggaggaattaaagcttggaatgctgatgcaaagagagttgtttgcgacctgagtacatctagaaactttccaagcatcttagatttgaaatgcagccctgttgaacctgtgtttgtctctgcagctgcatcaagacggcatggatcaactacatttgagagaacaggatttgccaacttgacagtgtggcatatgaaaacatggaagccattgactgtcctccctcttggtgaggatccacctgccattacttctctttgcttcaatcacaatgggaagattttggcagcttctgctacagatggaatgattcacatgtttgacatgtctgctggtcttcaaattacaggatggcctgcccatgattcacctgtgagctctgttctttttgggccagcagaaactagcatcttcagcttaggctcggacggaaagatacttgaatggagtttgcacaatcaaggtcagattctttggtcaagagattgcagcagattctgcaatccggagagctttaaaacacgaatgcatgaaatagcattggattcaaatggcaagaggctgctggtcacctccggtttggttcgggccccaatataccaggtacaaggccatgaaagcgaactgaggacactgccgcacagttcatctatcacaagtgtggattggcatccaacactgccaatgtacatcactggatccgcagaccactctgtccgggtcacgtctatcttatgatgatctataaaacaaggtgctggcaacaacctttcccagctagctagcatgcatcaacccttattgacagtcttatccatgcgtgaggctcggtgtcacgctatttcctcgcatggaagatgagctgtgttcttgttttgtggctttggtgtgcgtctaattctgtaccctttggtgggttgctccaacatttttttttcttgttgtaaacaggcatagagttctgtggtcatttgctttaaaatgagtgatagatcaaaataagtaaactttgtagcccgtctctcgaaatctcacgtctgcatacgcagatatgctatatactgtatgtacttgtaaatgaatttgtagcccgtctcagatagtact

SEQ ID NO: 126362 - DNA, 1647 bp, Zea Mays
cctaacttaccttgtttctgtaacacacacgttagtcacaataatattatgttgtcattaatcaccgaaaccaaattggggcctatatgctttcagtgttagttcaattttacatcatctgaaatgaaaagtcggttttctgggcacctggagatggtctaatgcttccgtagtttagattgttttaatgtgtgcaccaatatatttttcctatttcatattcttcaatttattcttctgttgtgctttatgtatagtacatgttttccatatctttggtaccctttcttttgctgcagaggatcagcaggttttggtgactgaggaagagtttcctgaggtgaaagtagatttccaggaaacatttttaggccataacagtccaattagccgatgtcgattttctgcatctgggtcaaatattgctagttcatcaattgatggcacagttaggatttggacatatgattcgtcaactgcatcatccagaaatgctactatatactgtgggtctgaagtcagtgcactttcatgggaatgcagatctgacagattgctgctcataggcacagctaatggaggaattaaagcttggaatgctgatgcaaagagagttgtttgcgacctgagtacatctagaaactttccaagcatcttagatttgaaatgcagccctgttgaacctgtgtttgtctctgcagctgcatcaagacggcatggatcaactacatttgagagaacaggatttgccaacttgacagtgtggcatatgaaaacatggaagccattgactgtcctccctcttggtgaggatccacctgccattacttctctttgcttcaatcacaatgggaagattttggcagcttctgctacagatggaatgattcacatgtttggatggcctgcccatgattcacctgtgagctctgttctttttgggccagcagaaactagcatcttcagcttaggctcggacggaaagatacttgaatggagtttgcacaatcaaggtcagattctttggtcaagagattgcagcagattctgcaatccggagagctttaaaacacgaatgcatgaaatagcattggattcaaatggcaagaggctgctggtcacctccggtttggttcgggccccaatataccaggtacaaggccatgaaagcgaactgaggacactgccgcacagttcatctatcacaagtgtggattggcatccaacactgccaatgtacatcactggatccgcagaccactctgtccgggtcacgtctatcttatgatgatctataaaacaaggtgctggcaacaacctttcccagctagctagcatgcatcaacccttattgacagtcttatccatgcgtgaggctcggtgtcacgctatttcctcgcatggaagatgagctgtgttcttgttttgtggctttggtgtgcgtctaattctgtaccctttggtgggttgctccaacatttttttttcttgttgtaaacaggcatagagttctgtggtcatttgctttaaaatgagtgatagatcaaaataagtaaactttgtagcccgtctctcgaaatctcacgtctgcatacgcagatatgctatatactgtatgtacttgtaaatgaatttgtagcccgtctc

SEQ ID NO: 126363 - DNA, 788 bp, Zea Mays
taacgtgaatgattttatacaaatatttaatttaataacaatccattaatttgcatggtttcatccgaatgttaactttattgactctagatacttgaatggagtttgcacaatcaaggtcagattctttggtcaagagattgcagcagattctgcaatccggagagctttaaaacacgaatgcatgaaatagcattggattcaaatggcaagaggctgctggtcacctccggtttggttcgggccccaatataccaggtacaaggccatgaaagcgaactgaggacactgccgcacagttcatctatcacaagtgtggattggcatccaacactgccaatgtacatcactggatccgcagaccactctgtccgggtcacgtctatcttatgatgatctataaaacaaggtgctggcaacaacctttcccagctagctagcatgcatcaacccttattgacagtcttatccatgcgtgaggctcggtgtcacgctatttcctcgcatggaagatgagctgtgttcttgttttgtggctttggtgtgcgtctaattctgtaccctttggtgggttgctccaacatttttttttcttgttgtaaacaggcatagagttctgtggtcatttgctttaaaatgagtgatagatcaaaataagtaaactttgtagcccgtctctcgaaatctcacgtctgcatacgcagatatgctatatactgtatgtacttgtaaatgaatttgtagcccgtctcagatagtacttcgcattacaatctatcatccttcac

SEQ ID NO: 126364 - DNA, 1798 bp, Zea Mays
caaaatgctgacgcggcacaccattaaatatgcatgaaacttacattgagaatagcctaataaaaactctggtacgaaatacacaaatgccatgttagtgttaatccaaaattaaaaaaaacacggatatgaaatgcacaaataccttgtttccgtacataaaaagccacatgcagaagaaaactaaaaggaaaaaatatagaaagacatagatcaaaattatcccaaaaggaaggacaaaatcgtaaaacgtgacaatctgatttgtgcattcctcctcccccaccttccacccttcgatcccacgtcttctcaacctttcttcttctctcctcgagaaccccaatccaaacccccaaccgccaaaattcctacgagatatatcacagaaatatcgtcttggctcagatcgtgcccgaggtgatccagatctctactggttcattttcctctcgtcgtaacctggtcccgttaccattacctgtttttggattgcatcagtgaggaggcagtgagttttgaggggacgcaggatcatggcgtcgtcgctggccgaggaggaggaggccttcgagcacacgcttctggtggtgcgcgaggtgtcagtgtacaagatcccgccgcgcaccaccagcggcggctacaagtgcggcgagtggctgcagtcggacaagatctggtccgggcgcctccgcgtggtgtcctgcggtgaccgctgcgagatccggctcgaggacccggccacgggggagctcttcgccgcctgcttcgtgctgccggggcagcgggagagcgccgtcgagaccgtgctcgactcctcccgctacttcgtgctccgcatcgaggacggcagggggaagcatgccttcgtcgggctcggcttcaacgagcgcaacgaagcattcgacttcaacgtcgccctctctgaccacgagaagtacgtcaagagggagcaggagaaggagaccacgggcgctggcggcgaggagactggcggcggtgagattgatatacatccggctgtcaatcgccgactcaaggaaggtgaaaccattaggataactgtaaaaaacaagccatcaactggaagtggtatgctttcagctgctggtttatctggagggaccactgcaaaacccaagacaagcatgcttcttgcgccacctccaggcgcagctgggaagcttagatctccacttccaccaccacctaacgaccctgcagctgcaaggatgaattctggacatactgcaggaatcagggctccaaaagaacccaccaagagaaataacgatcctttttcagatctttctgctataaagcaaaatctaccttcatctgctgaacccggacaaacaaagagcacaggagctggatgggcagcattctgacgatggatgcatgatctactgctactattggcatttgtttatctgaagaaggggaatgggtagttgaagcaccgaacaaggatctggaactgctggatgcctctacccctttcgaaactgaatggttaaaatgattgatcaacctaccagttccagttgtcacttgtcagtcgagaaataaacctttcccagagttgtattacccgtctcaccacatgaatggatgctcacattttctggatttagatacagcgtcccatcttgtttttatgttattcgtgctatgtttcacaaagcaataccagaatcatactgacctcgatgtgtattttgcggcgaaagattggaaatactgttacaagtgtgtcaaaagactgtttgcaatggtcttcaggcctgtttggatt

SEQ ID NO: 126365 - DNA, 1717 bp, Zea Mays
caaaatgctgacgcggcacaccattaaatatgcatgaaacttacattgagaatagcctaataaaaactctggtacgaaatacacaaatgccatgttagtgttaatccaaaattaaaaaaaacacggatatgaaatgcacaaataccttgtttccgtacataaaaagccacatgcagaagaaaactaaaaggaaaaaatatagaaagacatagatcaaaattatcccaaaaggaaggacaaaatcgtaaaacgtgacaatctgatttgtgcattcctcctcccccaccttccacccttcgatcccacgtcttctcaacctttcttcttctctcctcgagaaccccaatccaaacccccaaccgccaaaattcctacgagatatatcacagaaatatcgtcttggctcagatcgtgcccgagtgaggaggcagtgagttttgaggggacgcaggatcatggcgtcgtcgctggccgaggaggaggaggccttcgagcacacgcttctggtggtgcgcgaggtgtcagtgtacaagatcccgccgcgcaccaccagcggcggctacaagtgcggcgagtggctgcagtcggacaagatctggtccgggcgcctccgcgtggtgtcctgcggtgaccgctgcgagatccggctcgaggacccggccacgggggagctcttcgccgcctgcttcgtgctgccggggcagcgggagagcgccgtcgagaccgtgctcgactcctcccgctacttcgtgctccgcatcgaggacggcagggggaagcatgccttcgtcgggctcggcttcaacgagcgcaacgaagcattcgacttcaacgtcgccctctctgaccacgagaagtacgtcaagagggagcaggagaaggagaccacgggcgctggcggcgaggagactggcggcggtgagattgatatacatccggctgtcaatcgccgactcaaggaaggtgaaaccattaggataactgtaaaaaacaagccatcaactggaagtggtatgctttcagctgctggtttatctggagggaccactgcaaaacccaagacaagcatgcttcttgcgccacctccaggcgcagctgggaagcttagatctccacttccaccaccacctaacgaccctgcagctgcaaggatgaattctggacatactgcaggaatcagggctccaaaagaacccaccaagagaaataacgatcctttttcagatctttctgctataaagcaaaatctaccttcatctgctgaacccggacaaacaaagagcacaggagctggatgggcagcattctgacgatggatgcatgatctactgctactattggcatttgtttatctgaagaaggggaatgggtagttgaagcaccgaacaaggatctggaactgctggatgcctctacccctttcgaaactgaatggttaaaatgattgatcaacctaccagttccagttgtcacttgtcagtcgagaaataaacctttcccagagttgtattacccgtctcaccacatgaatggatgctcacattttctggatttagatacagcgtcccatcttgtttttatgttattcgtgctatgtttcacaaagcaataccagaatcatactgacctcgatgtgtattttgcggcgaaagattggaaatactgttacaagtgtgtcaaaagactgtttgcaatggtcttcaggcctgtttggatt

SEQ ID NO: 126366 - DNA, 1380 bp, Zea Mays
gtcttctcaacctttcttcttctctcctcgagaaccccaatccaaacccccaaccgccaaaattcctacgagatatatcacagaaatatcgtcttggctcagatcgtgcccgaggatcatggcgtcgtcgctggccgaggaggaggaggccttcgagcacacgcttctggtggtgcgcgaggtgtcagtgtacaagatcccgccgcgcaccaccagcggcggctacaagtgcggcgagtggctgcagtcggacaagatctggtccgggcgcctccgcgtggtgtcctgcggtgaccgctgcgagatccggctcgaggacccggccacgggggagctcttcgccgcctgcttcgtgctgccggggcagcgggagagcgccgtcgagaccgtgctcgactcctcccgctacttcgtgctccgcatcgaggacggcagggggaagcatgccttcgtcgggctcggcttcaacgagcgcaacgaagcattcgacttcaacgtcgccctctctgaccacgagaagtacgtcaagagggagcaggagaaggagaccacgggcgctggcggcgaggagactggcggcggtgagattgatatacatccggctgtcaatcgccgactcaaggaaggtgaaaccattaggataactgtaaaaaacaagccatcaactggaagtggtatgctttcagctgctggtttatctggagggaccactgcaaaacccaagacaagcatgcttcttgcgccacctccaggcgcagctgggaagcttagatctccacttccaccaccacctaacgaccctgcagctgcaaggatgaattctggacatactgcaggaatcagggctccaaaagaacccaccaagagaaataacgatcctttttcagatctttctgctataaagcaaaatctaccttcatctgctgaacccggacaaacaaagagcacaggagctggatgggcagcattctgacgatggatgcatgatctactgctactattggcatttgtttatctgaagaaggggaatgggtagttgaagcaccgaacaaggatctggaactgctggatgcctctacccctttcgaaactgaatggttaaaatgattgatcaacctaccagttccagttgtcacttgtcagtcgagaaataaacctttcccagagttgtattacccgtctcaccacatgaatggatgctcacattttctggatttagatacagcgtcccatcttgtttttatgttattcgtgctatgtttcacaaagcaataccagaatcatactgacctcgatgtgtattttgcggcgaaagattggaaatactgttacaagtgtgtcaaaagactgtttgcaatggtcttcaggcctgtttggatt

SEQ ID NO: 126367 - DNA, 112 bp, Zea Mays
ctattcccggcctgggattccgaaggtggtggtgtcctgtcttcggggacttctacctcttcttcacgttctaatcataaccatacataagtataagaatggatgccatggg

SEQ ID NO: 126368 - DNA, 522 bp, Zea Mays
atggatcgaatagttcatcgccggaggacgatcccgagggatcaaaggacgcctcaaaggtcatcggatcaaaggtggtcgtcaaaggaggacgccctccggtgcgccgcatcggatgagatcgttgtcttcggatgccaccaaagacggtctccgcagcaatcacagctcgcgcctcagaaggtcgtcgccaccgccaccgatcacgcctcgggaggtcgccgtcgctgcaaccgctcgcgcctagggcagacgtggccaccgatgctcgctcctagggcagtcatcgccaccgcgacgctcacgtctcgggccgccactcaccgacattacctggggccatcgctcgccgatgtcggctgggaccaccactcgcgtcttgtgccgcaggaagtcgtcgtcgacgttcggccgtcgctcgcacctcacacgtttgtagctgccgccagacccgaaaccctaatccctagggggctgggtatttttatagacgtccggacctggtccggctcaattggatag

SEQ ID NO: 126369 - DNA, 741 bp, Zea Mays
atggcggcggcggtgatgacagtttcgggcacggacgtggccgcggctagccgacctctgggcaaccgtgcgctctcgggaagcccatttccaacgacgatgccactgctccgcccgttcctgttctctggcgacgagagcgggttagggtttctatacttggagccaccacctctctgttgtgtcctctgccgcctccaccttatggttggtgctcaggccttctggacttatgccggcatcgcgtacccaccagtaattacaacagatgggcaggacatgtacttagttcagcaaccacagttcctctctatcgacaattgtaggtcatggttatctgcatttcctgttcggtgcgttatctgggtgcctcaattgagtgttaggagagtttgtgagggctgtggaatgtcgaaggtgaagaacaataatggttatcttggagtcactgagccaatctcaccaagtcgaccgactgagaaggaccttatgcagacagctgaggttaaaaaggtacatggctctggtgccgacattgacaccatgtgtgttggtccaagacatgcaactcaaaatgtaagaggggctccctttgaaatcctagagttattgtattactatgatgctcatgtggcggttttgggattcaaaattaatggggtctcaattgaccttttgtatgctaatcttgctcatgtagtgattcctaaggtaagtttgtcttactgcattgctgtttga

SEQ ID NO: 126370 - DNA, 107 bp, Zea Mays
gcaataatgaaaatgtcaacgttttacacttattaccaactcgcctttacaatgaagacgacaaggccgcctctcccagccgtatactagctagtagtagtgtacac

SEQ ID NO: 126371 - DNA, 115 bp, Zea Mays
ataccacaaaaggacccttcatgcatctgcacaagcatgcctaaacaagcataggatggtgatgaaacaaggcatcccagtgcaacaacagcacatggaacaatgcaatacgatt

SEQ ID NO: 126372 - DNA, 2681 bp, Zea Mays
atggccggctctggagagtcgccggcgaaggaaggagatggcgttcgtcttgatccagagacagagggaggagttggtggtaactcactggtgacaccacctcctgctctaatgggtcctgagatcaccgagatgagcataggggaagaaggagaacaaagggttcgacctcctatgtccaatattagctccagggagatggatacgccacaaatactgcattcacatgcaaaaaacattgatccaactatagtgccaacggtagggatgactttcaaggatgttgatgatgcatataaattctataaaaggtatgcatatgaagttggatttccactgaagaaatacagagagaagacattcagtaagtggataaattgttcacatgaagctgcaaaaattgaactggtaaacttggagcataaccatgagttcataactgacgaagcagagaaacaacatttacgttgcaacaaaattagggatgctgagttcataaattttgtggatgcaatgcatgatagccgagtgccgcagcattgcatagttgattttatatcagaaatacatgatgggccagagaacgtaccggtaactgctcaagatctgaaaaacatgagggcagccaggagaagagaaaactgcacaaatgatgtagccaaacttttggctttctttagagaatgcaagaaacagaatccacaatttttttgtgatttccagctagacaatgatgggaaaatagtgagtattttttggtcacacgcaagtatgtagggggaatacgcagattatggtgatgctgtgacatttgatacaacacacaagacaaatatatatgataaaccactgggcatgtttgttggagctaacagccatctgcagtgtacagtgtttggatttgttttgttgggagatgaaactgtacatacttttgaatgggctttcaattcattcaaaacatgtatgggatgcgagggtctaagagttatgcttacagatcaagatcctgcaatgccaattgctctaagaactgtatttccaaaaacagttcacagactgtgcttatggcatgtacagaacagatttatgccattcttaaatgagatatatgcaaggtttgctgttaaggattttaaaacaacattccagtctattatacatcatccattaactcctcatgagtttgaatgtgcctggcaaatgatgctagaggagttcaatcttcatgaagatatgactctacgtaaattatatgaaataagaaaagaatggatacctgcattttttaaaaatgacttctgtggggtaatggtatctacacaacgaagtgagagcatgaacagattagtgaagcaatcacatgtagatgcgaacaccccactgcatgagttcgctaaacaaatgatgaaaatgttgcacagcaggaaaatgaaagaatcaaaggaggcattggtgagcaaggcaccaaggacaacagatacattatataggttcgaagtgagagtctctagagcatacaccagagctgttatgaatagatttgaggaatcaatgaaatacgccactgcatacaaaatattaaaggacccagacggatgtgataatgaatggatcgtacagcatacaaaacggtctaataaaattgtgtggggacaacatcaattcaagataacagcagacatagaagttggggagtatacatgcgagtgcaaacagtgggaacatacaggtctattgtgtgttcatcttttaagagccttcatgcatcttcaagttgaaaagataccttcaaagtatatattgcaaaggtacactgtctcatcaagaaaagatgttccgtttgaaagaattgataagagcttcagggggaaggatggagttactaaatcatacagacagaaaatgttgttaacgaaaacaatgaaagtagttcgccaggcgtgtatgtcaaaagcagggtacgataaggcgatggatgtgttggatgagctcgatgtcgttctaagccgattagagccagatattggatgtaatgagtcaacagatgttagtgatgatgaggaagacaaggaagaagagttgaataaaaataatgatggcgatgggatggaagatgacaatacaattacatgtcataataaggattcgcataacaccaggactggatgtgaacatgcgttaacaataataacaactggtaaccaggaggacaacaagagaatttcacatgaggttggtgatacaagttctccgtgtcacgtagcacatgaacaaatggaacatattgctgcatcctcagaagctaaaaataggttgaattttaatgtggatgttataaatctgagtatgccggatcgtgcaagaccaaaaggacggacaatcaaaaattcagaagataggattatgagactaggtgcgaaaggagagaaaaagaagaataggagatgccatttgtgtggaatagcagatgggcataacagcagaacatgtctatctgtggaagagaatagggcaaggctagcagaactgtctaatcgaaagagaggacggccagccggatcaagactaaacaataaaataactgctccacagtggaatgaaacatcgactgcaaaaaacatcgtattgatgaagaagtggaaaatgaagaagccgatgagcatatggatttgggtgaa

SEQ ID NO: 126373 - DNA, 2489 bp, Zea Mays
ctaggacgagatcagttggtagttcaccagagttcacaaaaaaatcacaagcaagcagttgcgggtgtagctcgcaacaatggcgacgaaccccggcctcttcaccgagtggccgtggaagaagctcggcaacttcaagtacctgctgctggcgccgtgggtggcgcacggcggctacctagcggcgaccaaggggtggagggcggccgacctggggtacgtggccatcctcccgtcgctgctcctccgggcgctgcacaaccaggcgtggatcacggcgtcccgcctgcagagcgcgcgcggccggcggcaggtcgtggaccgcggcatcgagttcgagcaggtggaccgcgagcgcaactgggacgaccagatcctgctcagcggcatcctcctgtacctgggctccacctacctgccggggggccagcacctgccgctgtggcgcgcggacggcgccgcgctcatcgcgctgctgcacgccggccccgtcgagctcgtctactactggctgcaccgcgcgctgcaccaccacttcctctactcccgctaccactcccaccaccacgcctccatcgtcaccgagccaatcacctccgtcatccatccatttgctgagctcgtggcgtatgaactattgttctcaatcccattgattgtgtgcaccttgaacggaactgcttcaattattgcatttgagatttacgtgatctacatcgacttcatgaacaacatgggccactgcaactttgaattggtgcccaattggctcttcaaatggttccctcctctcaagtatctcatgtacacaccctcgtttcattctcttcaccacactcagttcaggacaaactactccctgttcatgccattctatgactacatatataacaccatggacaagtcatcggacacgttgtatgagaagtcactcaagggaaaagaagaaacggcagatgtggttcaccttacccaccttaccagcctgcactccatctatcatatgaggcccgggtttgcagaatatgcttctagaccttacactgccaagtggtatgtgcggatgatgtggccgatgtcatggctctccatggttctgacatggtcatatggttcttcatttactgttgagaggaacgtcatgaagaaactcaaaatgcaatcatgggtcatcccaagatacagtttccattatggattgagttgggagaaggaagcaatcaatagcctcgttgagaaggcaatatgtgaagctgacaagaaaggagctaaagttgttaccctcggactccttaaccaggcacataacctcaacagaaatggagaactttatcttcagaagtgcccaaagttgggagtaagactcgtagatggcaccagcttagctgctgcagtagttgtgaatagtgttcctcaaggcacagatcaagttgttctcgcagggaatatttccaaagttgctcgtgctgttgccgcagcattgtgtaggaagaatatcaaggtagtaatgaccaacaagcaggattaccattttcttaagcctaacatggcagaagatgcagctgagaaccttttgttttcaaagacaactactgcaaaggtgtggttaattggggatggtctagatgcttctgagcagtttaaggcacagaaagggacccagtttatcccatattcacagtttccaccaagaatggcacgcaaggacacctgcacctactcgacaactcctgcaatggttgtacctaaaacactacagaatgtgcactcctgtgagaattggctgccaaggagggtcatgagtgcatggcgcattgctggaatggttcatgcattggagggatggaacgagcatgagtgtggggacatcgtgctagacatggagaaaatgtggtctggtgctcttctgcatggtttccgccctgtggctcaagtttgattctccagttgcaaatgcaaggcagcacaataagttattgaaagttataacataatgctcgcgagaactatgctacatacatatcagtatgttggtgttctgtacttctgtttgtccatgctctgcctcttatcacttaagacatctgctatctatgaagttaagatgaactcatgtagtgtaaaaaccattctgcagaagcagggtgaaaaatagcatctctacaatggtaagaggggatgggatgtagtatataagtgagtctgatctactgctagatgtttactactttattcacaccctacgctcaaagatcaacgatgaattaattatgcgtcgatatttctccatgcatcaatgcatatttcaacaaggaaaagtatgagaaatgctattcattctccatgtagagatgtggatgaaagatctgcttcaatgcttcattttgttcatgatccagagaaagtagagatgtcatgtaagatgtaacagtggcccatattgcccatgacgaaaggcaataaaacgtgaccaacatatgctctgctgg

SEQ ID NO: 126374 - DNA, 3143 bp, Zea Mays
ctaggacgagatcagttggtagttcaccagagttcacaaaaaaatcacaagcaagcagttgcgggtgtagctcgcaacaatggcgacgaaccccggcctcttcaccgagtggccgtggaagaagctcggcaacttcaagtacctgctgctggcgccgtgggtggcgcacggcggctacctagcggcgaccaaggggtggagggcggccgacctggggtacgtggccatcctcccgtcgctgctcctccgggcgctgcacaaccaggcgtggatcacggcgtcccgcctgcagagcgcgcgcggccggcggcaggtcgtggaccgcggcatcgagttcgagcaggtggaccgcgagcgcaactgggacgaccagatcctgctcagcggcatcctcctgtacctgggctccacctacctgccggggggccagcacctgccgctgtggcgcgcggacggcgccgcgctcatcgcgctgctgcacgccggccccgtcgagctcgtctactactggctgcaccgcgcgctgcaccaccacttcctctactcccgctaccactcccaccaccacgcctccatcgtcaccgagccaatcacctccgtcatccatccatttgctgagctcgtggcgtatgaactattgttctcaatcccattgattgtgtgcaccttgaacggaactgcttcaattattgcatttgagatttacgtgatctacatcgacttcatgaacaacatgggccactgcaactttgaattggtgcccaattggctcttcaaatggttccctcctctcaagtatctcatgtacacaccctcgtttcattctcttcaccacactcagttcaggacaaactactccctgttcatgccattctatgactacatatataacaccatggacaagtcatcggacacgttgtatgagaagtcactcaagggaaaagaagaaacggcagatgtggttcaccttacccaccttaccagcctgcactccatctatcatatgaggcccgggtttgcagaatatgcttctagaccttacactgccaagtggtatgtgcggatgatgtggccgatgtcatggctctccatggttctgacatggtcatatggttcttcatttactgttgagaggaacgtcatgaagaaactcaaaatgcaatcatgggtcatcccaagatacagtttccattatggattgagttgggagaaggaagcaatcaatagcctcgttgagaaggcaatatgtgaagctgacaagaaaggagctaaagttgttaccctcggactccttaaccaggcacataacctcaacagaaatggagaactttatcttcagaagtgcccaaagttgggagtaagactcgtagatggcaccagcttagctgctgcagtagttgtgaatagtgttcctcaaggcacagatcaagttgttctcgcagggaatatttccaaagttgctcgtgctgttgccgcagcattgtgtaggaagaatatcaaggtagtaatgaccaacaagcaggattaccattttcttaagcctaacatggcagaagatgcagctgagaaccttttgttttcaaagacaactactgcaaaggtgtggttaattggggatggtctagatgcttctgagcagtttaaggcacagaaagggacccagtttatcccatattcacagtttccaccaagaatggcacgcaaggacacctgcacctactcgacaactcctgcaatggttgtacctaaaacactacagaatgtgcactcctgtgagaattggctgccaaggagggtcatgagtgcatggcgcattgctggaatggttcatgcattggagggatggaacgagcatgagtgtggggacatcgtgctagacatggagaaaatgtggtctggtgctcttctgcatggtttccgccctgtggctcaagtttgattctccagttgcaaatgcaaggcagcacaataagttattgaaagttataacataatgctcgcgagaactatgctacatacatatcagtatgttggtgttctgtacttctgtttgtccatgctctgcctcttatcacttaagacatctgctatctatgaagttaagatgaactcatgtagtgtaaaaaccattctgcagaagcagggtgaaaaatagcatctctacaatggtaagaggggatgggatgtagtatataagtgagtctgatctactgctagatgtttactactttattcacaccctacgctcaaagatcaacgatgaattaattatgcgtcgatatttctccatgcatcaatgcatatttcaacaaggaaaagtatgagaaatgctattcattctccatgtagagatgtggatgaaagatctgcttcaatgcttcattttgttcatgatccagagaaagtagagatgtcatgtaagatgtaacagtggcccatattgcccatgacgaaaggcaataaaacgtgaccaacatatgctctgctggcactgaaatggagtagcatagcacaagctcttctaaaacatgtaaggcacaattgcacagcatactaatcattgaaacaaagtacaaagtatcaagtatggtatcttatcatacaaacaagattgttaaaatggggaacttcgaaaaccttacctcagtgttgtaatcctagccatttatcaactgtttgccagtacattcatctaattttggtttgcaccatataatgactgtaggccatcattgatagtgacgacaaattcctaccgtttcatccttgtcaaattccacattaacattttcctcgttttctattctcctggccacagcacatttctgaatcggaacatgctgtacttctcgggttttctcacagcacaaggaagtgaagttaatagaagtagaccaaacaaactcgcttagcagggaaaaaacaacacagaatgccgagagcgaaaacatctcactgtgtacgccagcgacgggcggagcagacaaggccgcgcagacggctcgaagaattccacgagtggcgcgatgatgccggaaacggaagccgaggagggcaaccgccgatgcacgacatctcccctcctctatagactacggtggtcgccgccagcggccgccgggccgggccgggcacggatgcac

SEQ ID NO: 126375 - DNA, 1347 bp, Zea Mays
atggcgacgaaccccggcctcttcaccgagtggccgtggaagaagctcggcaacttcaagtacctgctgctggcgccgtgggtggcgcacggcggctacctagcggcgaccaaggggtggagggcggccgacctggggtacgtggccatcctcccgtcgctgctcctccgggcgctgcacaaccaggcgtggatcacggcgtcccgcctgcagagcgcgcgcggccggcggcaggtcgtggaccgcggcatcgagttcgagcaggtggaccgcgagcgcaactgggacgaccagatcctgctcagcggcatcctcctgtacctgggctccacctacctgccggggggccagcacctgccgctgtggcgcgcggacggcgccgcgctcatcgcgctgctgcacgccggccccgtcgagctcgtctactactggctgcaccgcgcgctgcaccaccacttcctctactcccgctaccactcccaccaccacgcctccatcgtcaccgagccaatcacctccgtcatccatccatttgctgagctcgtggcgtatgaactattgttctcaatcccattgattgtgtgcaccttgaacggaactgcttcaattattgcatttgagatttacgtgatctacatcgacttcatgaacaacatgggccactgcaactttgaattggtgcccaattggctcttcaaatggttccctcctctcaagtatctcatgtacacaccctcgtttcattctcttcaccacactcagttcaggacaaactactccctgttcatgccattctatgactacatatataacaccatggacaagtcatcggacacgttgtatgagaagtcactcaagggaaaagaagaaacggcagatgtggttcaccttacccaccttaccagcctgcactccatctatcatatgaggcccgggtttgcagaatatgcttctagaccttacactgccaagtggtatgtgcggatgatgtggccgatgtcatggctctccatggttctgacatggtcatatggttcttcatttactgttgagaggaacgtcatgaagaaactcaaaatgcaatcatgggtcatcccaagatacagtttccattatggattgagttgggagaaggaagcaatcaatagcctcgttgagaaggcaatatgtgaagctgacaagaaaggagctaaagttgttaccctcggactccttaaccagtctaaaggaatattcatcagtcacaaactcattttttgaaacgaaccggcaggagatctgcccgttatattaaaaaaagaggagcccaagtggcgaggattaaaatacaaagacactccacaaaag

SEQ ID NO: 126376 - DNA, 233 bp, Zea Mays
atttccatatttcattatcccaaatcaatctgattttaaattttactaccgtatttatatacacaaccaaaacaccaacatgaatacaaatattttacatttatttactccttatttactttgctcaaataagtatttgtatgcatgaaatttaataagcatataattcacatatttatataacataattggagtaatttatatagaatagctcactatcctatttattatag

SEQ ID NO: 126377 - DNA, 603 bp, Zea Mays
gccgatataggcctttcaatgggtatttcagagacagaagttgctaaagaaagctctgacattataatcttggatgatgacttcacgtcagttgtcaagaagtctacctgggaacctcttgttacaaatatcatgtggagaaacttgtttgttcaggccctttaccaagtagcaattcttctgattttcgattttgatggaatcttcaatgagttcaatgcacgaaaacccgaggaaaagaatgtcttcaaaggggccacgaagaatcacctgttcatgggaataatcggtataacgacagtatttcagatactgataattcagttcctggggaagttcttcaaaatagtgaggcttggttggagactatggttggtttcaattgctatcggccttgtgagttggcccctggcttatgtgggtaaatttattcctgtgcccgtaagacctctcccggactatttcaagccccgctgttgtcggaaaccgccgcgccgaggtgagtctctggatgttggctttgttccttttctgcgtcagtttcgatccagaactcaggtattaatcggtaatgcagacgaggaggaaggtgggcaaagttaa

SEQ ID NO: 126378 - DNA, 2070 bp, Zea Mays
ccttccggtcccccaccacgcgccggacatgaaatatcccactcaaaccaacctaccgcccacagacccaaatcggcaccccggaagcctcaaatccgctctattcctctctccccctctctcccccatcgcaccagcaggcgagcgcgaggcggaggagtagagatggagtcggaccagggcaagcttttcatcggcggcatctcctgggaaacgacggaggagaagctgagcgagcacttctccgcctacggcgaggtaacgcaggccgccgtcatgcgcgacaagatcaccggccgcccccgcggcttcgggttcgtcgtcttcgcggatcccgccgccgtcgacagagcgctgcaggacccccacaccctcgacggccgcacggtcgatgtgaagcgggcactctcgcgggaggagcagcaggcctccaaggccgcgaaccctagcggtggaaggaactccggtggcggaggaggcggcggtggcggcagcgatgcaagtggtgctcggacgaagaagatctttgtgggcgggctgccctctactctgactgaggatgggttccggcagtacttcgagacctttggcatagttactgacgtagttgtcatgtatgaccagaacacacagcgcccacgtggtttcgggttcatcacctttgattcggaggacgcggttgaccgcgtgctgcagaagaccttccatgatcttggtgggaagctggttgaggtgaagcgcgcattgccccgtgaggcgaatcctggcggctctggtggtggtcgttctgggggaggtgggggttatcagagcaacaatggccataacaccagctctggtagctatgatggtagaagtgatggtggcaggtacgggcagacacaacagggtagtggtggtggtggctatcctggctacggtgcaggaggctatggtgctggggcagctggatatggatatggtgctaaccctgcagttggatatggaaattatggggctggagggtatgggggtgttcctgctgcttatggtggacattatggaaacccaggtgcagctggttctggttaccaaggtggacatccaggctcaaatagaggaccttggggcagtcaagctccatctgcatatggaactggagggtatggtggcagtgctgggtatagtgcttggaacaactcttctggtggcggcaatgctctgaatagtcaagcccctggtggacctgcaggctatggaagccagggctatgggtatggtggatatggaggggatccatcatacgctagtcacggaggatatggggcttatggagcacgtattgatagtgctggcaatcctgctactggtggatcatctggatacaatgcaggctatggaagtggtggtgccaactctggctattcaagtgcttggagtgatccttcgcaaggtggtggatttggcggttcggtcaatggaggtgctgaaggacagtcaacttatggcactggctatggcagtgtgcagcccagggttgctcagtaaagagaggcattttgagtgtgcgaaatgaaccagtgcatctgggcagtctatgtattgatttgtcattccagtctctctggttgctctcagcattttgaagattgcccatttgctgcttaaatcagtatttatccgggttgaatgggatggcattctttttttagatatgcccaagcaaggtctatgaaatcaggcatttgaaaaaggcattttgcacagtgatttacatgaactggcgagaagttccaatatcggggttctgacagaatgcaagataccagcttaagtgcttcattttctgaagggtcttgtgctgtgctacaagatagtgggtatgtggatcaaagattctatattcacgttttgtttagcaaaatccttttgactctggtacttgtcaaagtgaaattctagacaactcttagtttgttcatttagatttactgtgtaccatatccatcggtgacaggaaaattgaccacaaacgtgtcagtttttacttttgagcaataatattgtgctagacatttatattgaccacac

SEQ ID NO: 126379 - DNA, 2914 bp, Zea Mays
ccttccggtcccccaccacgcgccggacatgaaatatcccactcaaaccaacctaccgcccacagacccaaatcggcaccccggaagcctcaaatccgctctattcctctctccccctctctcccccatcgcaccagcaggcgagcgcgaggcggaggagtagagatggagtcggaccagggcaagcttttcatcggcggcatctcctgggaaacgacggaggagaagctgagcgagcacttctccgcctacggcgaggtaacgcaggccgccgtcatgcgcgacaagatcaccggccgcccccgcggcttcgggttcgtcgtcttcgcggatcccgccgccgtcgacagagcgctgcaggacccccacaccctcgacggccgcacggtcgatgtgaagcgggcactctcgcgggaggagcagcaggcctccaaggccgcgaaccctagcggtggaaggaactccggtggcggaggaggcggcggtggcggcagcgatgcaagtggtgctcggacgaagaagatctttgtgggcgggctgccctctactctgactgaggatgggttccggcagtacttcgagacctttggcatagttactgacgtagttgtcatgtatgaccagaacacacagcgcccacgtggtttcgggttcatcacctttgattcggaggacgcggttgaccgcgtgctgcagaagaccttccatgatcttggtgggaagctggttgaggtgaagcgcgcattgccccgtgaggcgaatcctggcggctctggtggtggtcgttctgggggaggtgggggttatcagagcaacaatggccataacaccagctctggtagctatgatggtagaagtgatggtggcaggtacgggcagacacaacagggtagtggtggtggtggctatcctggctacggtgcaggaggctatggtgctggggcagctggatatggatatggtgctaaccctgcagttggatatggaaattatggggctggagggtatgggggtgttcctgctgcttatggtggacattatggaaacccaggtgcagctggttctggttaccaaggtggacatccaggctcaaatagaggaccttggggcagtcaagctccatctgcatatggaactggagggtatggtggcagtgctgggtatagtgcttggaacaactcttctggtggcggcaatgctctgaatagtcaagcccctggtggacctgcaggctatggaagccagggctatgggtatggtggatatggaggggatccatcatacgctagtcacggaggatatggggcttatggagcacgtattgatagtgctggcaatcctgctactggtggatcatctggatacaatgcaggctatggaagtggtggtgccaactctggctattcaagtgcttggagtgatccttcgcaaggtggtggatttggcggttcggtcaatggaggtgctgaaggacagtcaacttatggcactggctatggcagtgtgcagcccagggttgctcagtaaagagaggcattttgagtgtgcgaaatgaaccagtgcatctgggcagtctatgtattgatttgtcattccagtctctctggttgctctcagcattttgaagattgcccatttgctgcttaaatcagtatttatccgggttggaatgcttgatcctttagcggcttactactagaacgtctagtcaataagtagctaaaatgtggagtagcagtatcttgcggaatgcttttattaatttttacatttagctttatccatctgtgtggtttgccatgagtggagtttcaggttgcttcatctctagttataagctagagtagcttgactacttatgggcaaaattatctagttgtacctctattctacagatcatatatttgtgtttgacattagtatttatgctggatcttgctctacctatattctggaatgttctctatttggtggctgtattgacatgtggtattatcaacattgatgggtttgaaacagatgcaaaccctgaaatatgcaatcatagttacttgatgctgtagctgcttctaacagtattttcaactgtagtgcaagtgtttttatgtagctggaatggtacacccttcaagtatatcaccaagctatgaattccatccatttggtcctagatttcaatattttcaaagcagcagtaagcttattagcagcaagattgtagcgccaagtttctgaggtagtatagataactgggttatctgtgaagctacctgaatgtttaggggtagaaatgtattgtagaacagtcaaggctcggcaactaaagtaattgtccttcctcctaccttcctttatgtacaggttgaatgggatggcattctttttttagatatgcccaagcaaggtctatgaaatcaggcatttgaaaaaggcattttgcacagtgatttacatgaactggcgagaagttccaatatcggggttctgacagaatgcaagataccagcttaagtgcttcattttctgaagggtcttgtgctgtgctacaagatagtggacgaagtgcaacatgttggctggatccactttggctgggtctgagggagcatgggccaagatcttgggggctcggctgtgtggtgcaacgggcagcttgcttgcatactggtgatcgtggatgcttgtgatatagcattgccccccaatgtataagtgaacttttagtgctagaggcttccttttgttggcatgatgtctatggtttataggtgcagtagttgcataacacatagtatactcagtatactttgtgtggaagctattgatgcttttctttttgtttagcatgaatgccatataattgtacattgaattgacatattaagttattgctaaaacacacttcagtgaattt

SEQ ID NO: 126380 - DNA, 2216 bp, Zea Mays
ccttccggtcccccaccacgcgccggacatgaaatatcccactcaaaccaacctaccgcccacagacccaaatcggcaccccggaagcctcaaatccgctctattcctctctccccctctctcccccatcgcaccagcaggcgagcgcgaggcggaggagtagagatggagtcggaccagggcaagcttttcatcggcggcatctcctgggaaacgacggaggagaagctgagcgagcacttctccgcctacggcgaggtaacgcaggccgccgtcatgcgcgacaagatcaccggccgcccccgcggcttcgggttcgtcgtcttcgcggatcccgccgccgtcgacagagcgctgcaggacccccacaccctcgacggccgcacggtcgatgtgaagcgggcactctcgcgggaggagcagcaggcctccaaggccgcgaaccctagcggtggaaggaactccggtggcggaggaggcggcggtggcggcagcgatgcaagtggtgctcggacgaagaagatctttgtgggcgggctgccctctactctgactgaggatgggttccggcagtacttcgagacctttggcatagttactgacgtagttgtcatgtatgaccagaacacacagcgcccacgtggtttcgggttcatcacctttgattcggaggacgcggttgaccgcgtgctgcagaagaccttccatgatcttggtgggaagctggttgaggtgaagcgcgcattgccccgtgaggcgaatcctggcggctctggtggtggtcgttctgggggaggtgggggttatcagagcaacaatggccataacaccagctctggtagctatgatggtagaagtgatggtggcaggtacgggcagacacaacagggtagtggtggtggtggctatcctggctacggtgcaggaggctatggtgctggggcagctggatatggatatggtgctaaccctgcagttggatatggaaattatggggctggagggtatgggggtgttcctgctgcttatggtggacattatggaaacccaggtgcagctggttctggttaccaaggtggacatccaggctcaaatagaggaccttggggcagtcaagctccatctgcatatggaactggagggtatggtggcagtgctgggtatagtgcttggaacaactcttctggtggcggcaatgctctgaatagtcaagcccctggtggacctgcaggctatggaagccagggctatgggtatggtggatatggaggggatccatcatacgctagtcacggaggatatggggcttatggagcacgtattgatagtgctggcaatcctgctactggtggatcatctggatacaatgcaggctatggaagtggtggtgccaactctggctattcaagtgcttggagtgatccttcgcaaggtggtggatttggcggttcggtcaatggaggtgctgaaggacagtcaacttatggcactggctatggcagtgtgcagcccagggttgctcagtaaagagaggcattttgagtgtgcgaaatgaaccagtgcatctgggcagtctatgtattgatttgtcattccagtctctctggttgctctcagcattttgaagattgcccatttgctgcttaaatcagtatttatccgggttgaatgggatggcattctttttttagatatgcccaagcaaggtctatgaaatcaggcatttgaaaaaggcattttgcacagtgatttacatgaactggcgagaagttccaatatcggggttctgacagaatgcaagataccagcttaagtgcttcattttctgaagggtcttgtgctgtgctacaagatagtggacgaagtgcaacatgttggctggatccactttggctgggtctgagggagcatgggccaagatcttgggggctcggctgtgtggtgcaacgggcagcttgcttgcatactggtgatcgtggatgcttgtgatatagcattgccccccaatgtataagtgaacttttagtgctagaggcttccttttgttggcatgatgtctatggtttataggtgcagtagttgcataacacatagtatactcagtatactttgtgtggaagctattgatgcttttctttttgtttagcatgaatgccatataattgtacattgaattgacatattaagttattgctaaaacacacttcagtgaattt

SEQ ID NO: 126381 - DNA, 794 bp, Zea Mays
caacattgatgggtttgaaacagatgcaaaccctgaaatatgcaatcatagttacttgatgctgtagctgcttctaacagtattttcaactgtagtgcaagtgtttttatgtagctggaatggtacacccttcaagtatatcaccaagctatgaattccatccatttggtcctagatttcaatattttcaaagcagcagtaagcttattagcagcaagattgtagcgccaagtttctgaggttgaatgggatggcattctttttttagatatgcccaagcaaggtctatgaaatcaggcatttgaaaaaggcattttgcacagtgatttacatgaactggcgagaagttccaatatcggggttctgacagaatgcaagataccagcttaagtgcttcattttctgaagggtcttgtgctgtgctacaagatagtggacgaagtgcaacatgttggctggatccactttggctgggtctgagggagcatgggccaagatcttgggggctcggctgtgtggtgcaacgggcagcttgcttgcatactggtgatcgtggatgcttgtgatatagcattgccccccaatgtataagtgaacttttagtgctagaggcttccttttgttggcatgatgtctatggtttataggtgcagtagttgcataacacatagtatactcagtatactttgtgtggaagctattgatgcttttctttttgtttagcatgaatgccatataattgtacattgaattgacatattaagttattgctaaaacacacttcagtgaatttt

SEQ ID NO: 126382 - DNA, 462 bp, Zea Mays
atggcggagaggctggaggcgggcgctggcgacgacgatgagtacacgcaggacggcacggtggacctccacgggaacccggtgctccggtccaagcggggagggtggaaagcatgcggcttcgttgtaggtacgaacaggatccatggcggtaggcaggcagtcaggctgaagcctgccaatcacagtcagccatgtggttggctttggatccagagcgctagctgctgtgctgcccatcggaccgtcaccccggccgcattctctgcggtagtaccagtcgacctccgtcgagcggccgcgcccaagcgcgagacacgccatgtacgtgagcatgagagctgtttctccatggatgatggacggaggatgctgagccagagtagcatcacagaaggcctatgcgcgctgggacactgggagtgtctgtctgtctgtctgtctccgtgcaagctgagctga

SEQ ID NO: 126383 - DNA, 912 bp, Zea Mays
ctgctgctgctgcgagttccttggtggcagatgggttgctccatctctaaagtggataatgaggagcccgtgaggcgctccaaggacaggaggcagctcatgaagcagctggtgcgccgccgccctgatcttgcagctgtgcacattgcatacctgcacatcctccgcaacacaggagccactctccggcaatttgtggagctagagtctgcattgtcacagcagcctcccgtagaccttgtggcgccgccctcgcctactccacagcctcctcctcctcctgaactctcggtgacatcctcattgccaccctcgccatgccccccgccgcctgtcccttttagtccattaaccaccacaagaaagatggagaagagggatgatgagctcccaccaccaccacctctggttttgagtccaataagattaaggaagagggaggatgagttccatggggatgattttactgatgatgacgacaccgatagctgctcgactcctcaaccaccacccctgccacccggcatagattgggaggacttggatccctacaatgtgcgccccttgagtttcccatctccatttgctgataggaatgataaagaagtggcctcgcatgtgaccatggacaatgatcttgaagtagacacaagatctgatggagaggaggatgaaagcatgcttggtaataacgatggcattgtggatagggtccatgtgaatccagccaagggtagggctctgggtgatggcaactcttcaacggtgagctaggtgacaaaggattcagactctatggcggtgccttggaggagtaagaagtcgcttgtagagattgttaaagagattgatgattacttcttgaaagcagcagcaagtgggaaggacgttgtgattttttggactctgctg

SEQ ID NO: 126384 - DNA, 100 bp, Zea Mays
ttggctaagatttattctgcagacttctctcaatatgaccattttcaagaattgaagagtccaatgaaaaagctaccttcgcaaagttcaagtgatatat

SEQ ID NO: 126385 - DNA, 2598 bp, Zea Mays
aagaaggaatgccttgcgcatcgccgcagagccctaggttcccgatgtaggcctccgccgaggagttctggaaaacattgcctgacggtacctcaccggtgagctgattgtaggagaaatcaacagtctccaggctcgacatgcgagagaagcttgctggaatcgaaccgttgagctcattgcgtgacagattcagtttctgaaggttggacagcttcacgaggtttgaagggatagggccggacagtgagttgctgctcagatcaagcagggcctgcagctgaaacaggttgccgatttcacttggtatctgccctgacaacttgttcttgctcaaatcaagatacgtcagtgacccaaggttgccaacgctcactggtatggtcccattaagcatgttctccgacaaatcaactttctgcagtttggaactgtgccccagacttgtcggaatcggcccggagaaggagttgtggctcaggttgagatcgaacaagaagttgaggtcacccagctcaggtggaatagctcctgtcaggttgttcgcagccaagctgaggtcctgcaagcttgtgatgttcccaaacgcctctggaatggcgcctgatatgctgttgccatccatcttcaggcgtgtgagcttggtgcactgtccccagtcatctgaaagccgaccggtcagcttgttcccggagatgtccaggtagtccatgatggggtggaccccaaacgcctccgagatgtcgccggtgaaatggttgccctccagccgcacccggtacagcccggagcagttcttcaagcacggcggtaacttgccgctgaagttgttgtggtgcgccgtgaagttagtcagcgcgaagccgtcgcagagcctctgcggaagctcgccggagaaactgttgttcgcgaagctcacatcggtcagtgccagccctgcgccgaggtccggcgggacggtaccagtcatgttgttgtcgaacactgacaggtactggaggttcctaagcaacgagatggtgggaggcagctcgccttccaggttgttggtgttgaggtccaaggtttgcagcgccgtcatgttgccgatctccgacgggatcttgccggtgagctcgttgaagaagagcgccagccgcgtgagttgcttgaggttgccgaacgtgctgggtatgggtccgatgagcgagttgacagataaatccagttcaaccaggttcaccaacctgccgagctccgacgggatctcgccggtgaggttgttgctgaagagatacaagaatcggatcttcgtcaccttgccgagctccggtgggattttgccccttagcgagttggtctgcacttggaacgatatgagctccggccagctcatgaacagctgtcctgggatctcgccggtgaggttgttggacgatatgccgaactcccgcatcctctgcatcccagcgaatgacgccggcaagctcccatagagctggttaattgagagatcgaggaagtcgaggttgctcagaccgccgagctccggcggcagagtggagaccagactggcgttcttcacgtcgagttgttgcagcatcttgagctggccaagaaccggcgggagcgccccgccgagtgggttgctgccgagctcaaggaccctcagctgcgacatggacccgaggaagtcgggaacgccgccagtaaggttgttgccgccaaggtgcaggtctctgagcctcgtcagcctcgcgagcgacgctgggatccggccggagaacgcgttggctgacaggttgagccaccgcaggttcggcagccgctccggaagcgcgtccgggattggaccggagaagccgttctgcgataggtcgaggtaggtgacgttcccgctcctgagcacgaactccgggaagctgccgttgatgtagttgacagagagcgagaggaactccaccgtgggcatcggtgagaacgggacgctagtcaggtagttggaccccaggtccatctggacgatctttggcagtttactcagctggttcgggattgcgccggccaggttgttgttgaagagccggagttcgacgaggcccgagaggtcgccgagctgcggcgggatggtgccgttgagcccgttgctgcccaggtcgagcgtggccagagtgcgcagttgcgagagcgacggagggatggcgccggccaggttgttgtccttgaggtcgagggaagtgaggctcgggaacgcggccgggtcgagcgcatccaggccgccggtgaggccgagcccgcgcagacggagcgacacaacgcggccggcagcgtcgcaggcgaccccacgccaggtggtgcagatggatacctgggtggcgttcgtccacgtggatagcatcgccgggtcgcccaggctcgatttccacgccagcagggcctcagccggcgatggtggcgccgcagcattggcagagacggcagcgagggcaaggatggcgaagagtagggacgcgaggaggaagcgggcgggggcggatggcggcgtcggcattggcagggtgtcagagcggagcgctgcgtgcccgttcgtgcgggcaggggcggccgtgcgggctggcg

SEQ ID NO: 126386 - DNA, 2600 bp, Zea Mays
aagaaggaatgccttgcgcatcgccgcagagccctaggttcccgatgtaggcctccgccgaggagttctggaaaacattgcctgacggtacctcaccggtgagctgattgtaggagaaatcaacagtctccaggctcgacatgcgagagaagcttgctggaatcgaaccgttgagctcattgcgtgacagattcagtttctgaaggttggacagcttcacgaggtttgaagggatagggccggacagtgagttgctgctcagatcaagcagggcctgcagctgaaacaggttgccgatttcacttggtatctgccctgacaacttgttcttgctcaaatcaagatacgtcagtgacccaaggttgccaacgctcactggtatggtcccattaagcatgttctccgacaaatcaactttctgcagtttggaactgtgccccagacttgtcggaatcggcccggagaaggagttgtggctcaggttgagatcgaacaagaagttgaggtcacccagctcaggtggaatagctcctgtcaggttgttcgcagccaagctgaggtcctgcaagcttgtgatgttcccaaacgcctctggaatggcgcctgatatgctgttgccatccatcttcaggcgtgtgagcttggtgcactgtccccagtcatctgaaagccgaccggtcagcttgttcccggagatgtccaggtagtccatgatggggtggaccccaaacgcctccgagatgtcgccggtgaaatggttgccctccagccgcacccggtacagcccggagcagttcttcaagcacggcggtaacttgccgctgaagttgttgtggtgcgccgtgaagttagtcagcgcgaagccgtcgcagagcctctgcggaagctcgccggagaaactgttgttcgcgaagctcacatcggtcagtgccagccctgcgccgaggtccggcgggacggtaccagtcatgttgttgtcgaacactgacaggtactggaggttcctaagcaacgagatggtgggaggcagctcgccttccaggttgttggtgttgaggtccaaggtttgcagcgccgtcatgttgccgatctccgacgggatcttgccggtgagctcgttgaagaagagcgccagccgcgtgagttgcttgaggttgccgaacgtgctgggtatgggtccgatgagcgagttgacagataaatccagttcaaccaggttcaccaacctgccgagctccgacgggatctcgccggtgaggttgttgctgaagagatacaagaatcggatcttcgtcaccttgccgagctccggtgggattttgccccttagcgagttggtctgcacttggaacgatatgagctccggccagctcatgaacagctgtcctgggatctcgccggtgaggttgttggacgatatgccgaactcccgcatcctctgcatcccagcgaatgacgccggcaagctcccatagagctggttaattgagagatcgaggaagtcgaggttgctcagaccgccgagctccggcggcagagtggagaccagactggcgttcttcacgtcgagttgttgcagcatcttgagctggccaagaaccggcgggagcgccccgccgagtgggttgctgccgagctcaaggaccctcagctgcgacatggacccgaggaagtcgggaacgccgccagtaaggttgttgccgccaaggtgcaggtctctgagcctcgtcagcctcgcgagcgacgctgggatccggccggagaacgcgttggctgacaggttgagccaccgcaggttcggcagccgctccggaagcgcgtccgggattggaccggagaagccgttctgcgataggtcgaggtaggtgacgttcccgctcctgagcacgaactccgggaagctgccgttgatgtagttgacagagagcgagaggaactccaccgtgggcatcggtgagaacgggacgctagtcaggtagttggaccccaggtccatctggacgatctttggcagtttactcagctggttcgggattgcgccggccaggttgttgttgaagagccggagttcgacgaggcccgagaggtcgccgagctgcggcgggatggtgccgttgagcccgttgctgcccaggtcgagcgtggccagagtgcgcagttgcgagagcgacggagggatggcgccggccaggttgttgtccttgaggtcgagggaagtgaggctcgggaacgcggccgggtcgagcgcatccaggccgccggtgaggccgagcccgcgcagacggagcgacacaacgcggccggcagcgtcgcaggcgaccccacgccaggtggtgcagatggatacctgggtggcgttcgtccacgtggatagcatcgccgggtcgcccaggctcgatttccacgccagcagggcctcagccggcgatggtggcgccgcagcattggcagagacggcagcgagggcaaggatggcgaagagtagggacgcgaggaggaagcgggcgggggcggatggcggcgtcggcattggcagggtgtcagagcggagcgctgcgtgcccgttcgtgcgggcaggggcggccgtgcgggctggcggt

SEQ ID NO: 126387 - DNA, 551 bp, Zea Mays
atcttcagaagctacagctgcagcacacagattcacagatacgtacgtactccagctcgaagcagacagcgtctagctagctaattggttagcggcaaagagcgtccgtgacttgtgagaaccgaccgagtgaacgatcatggcggcggcgtctctgctaggcccgtacaccgggggcagcggcttgggcgggcggctcgtccacgccaggagcggcggccgccggccagctgcggcggtgaagcgactgctgtcgaggttgaggcgctcttggagaagacgcgcggcgcggccgaggcgaaccgcggtgaggttcgggtatgacctgcatagctactaccagaacttcgacgacggcactgcctcctgcgcccaccaccgcttgtagttgtagctcgtgcagcagtgcttatatgactatactaattgccggtgactattactagctagctgttgcagccatagactcactgtacaggatgatgctttattgtgtggagctatatatttgaagcttggaatagaaatgggtttctgtatattattataaa

SEQ ID NO: 126388 - DNA, 208 bp, Zea Mays
cgattattgtgttttatgactaccacatgtattatttacgctaaaaattgtacgattttatgcttgaacatggagttcgtatatcagtttactgcatgcatattttttgcatgcacattggaaaagcaattccttaattcatgttgttcgtaattatcataagaaatcaaatcatttattttcgtaaatatcagatttgtacgtctgt

SEQ ID NO: 126389 - DNA, 118 bp, Zea Mays
atgttcctcttatcggaaactctgaatgatgtggcatgtaaatcctcaacgttaaccacgagaagttattatattacacctatttgaatgcaattcgtatttgcagcactaaaatttt

SEQ ID NO: 126390 - DNA, 520 bp, Zea Mays
agaaggaacagattcatcgagccagcgcaaaccctagccggcctcttctcctcgcgccgccgccatgtcgaagcgcggtacgtacgctccggtcccccattcgcttcggacgatccgactcgtttttctgttccttccctcgcttaccggcgaactcagcccgcttctgcgtcgaaatggatgaactgccgcagggaggggagggacggcggggaacaagttccgcatgtcgctgggtctccccgtcgcagcgaccgtgaactgcgcggacaatacaggcgccaagaacctctacatcatctccgtcaagggcatcaagggtaggctcaaccgcctgccgtccgcctgcgtcggcgacatggtcatggccaccgtcaagaagggtaagcccgacctcaggaagaaggtcatgcccgccgtcatcgtccgccagcgcaagctgtggcgccgcaaggacggagtctacatgtacttcgaaggtaactgtcgccactttccctagtactacaacgccggacct

SEQ ID NO: 126391 - DNA, 801 bp, Zea Mays
agaaggaacagattcatcgagccagcgcaaaccctagccggcctcttctcctcgcgccgccgccatgtcgaagcgcgggaggggagggacggcggggaacaagttccgcatgtcgctgggtctccccgtcgcagcgaccgtgaactgcgcggacaatacaggcgccaagaacctctacatcatctccgtcaagggcatcaagggtaggctcaaccgcctgccgtccgcctgcgtcggcgacatggtcatggccaccgtcaagaagggtaagcccgacctcaggaagaaggtcatgcccgccgtcatcgtccgccagcgcaagctgtggcgccgcaaggacggagtctacatgtacttcgaagataatgctggagtcattgtgaaccccaagggcgagatgaaaggatctgccatcactggacctattggcaaggagtgcgctgacctttggcctaggattgctagtgcagcaaatgctattgtctgatactactggttgggaggctgggttgagatagttttattgtgatccattttaaccttttctgtacttcaacatctgtggaaatttacttgattaatgtactaagggaaaagacgcttaggcgcacaattaaaataggccgaactgtgcacttctgtagtcagtttagtgatgtgctggcgttgtgatcttgtttggatttgtgcttttgtatgatggttccagtattaagccctgtaccactattcttttttaggccgaactgtaccaccattcttttttaggaatgtttgaagtaagatttttcttgactcaaa

SEQ ID NO: 126392 - DNA, 2333 bp, Zea Mays
gaaataagtcccaaagaacatgtttggagcctaaaccgaaaaggaggacaaaatttctcctctcgaagaaccctagcggcaaaacctttgctccgtcccgccgtcgcctgctcccatcccgccgccggcgctgccacccgcatctgccaaggggctcgccgccggggaggctgctcgcggtgccgcgctctctcccgcgcccgaccttggccctcccctcctccatgatctgcgcgatctccggcgaggtgccggacgagccggtcgtgtcgaagaagtcggggctactcttcgagcggcggctcatcgagcgctacattgaggaccatggcaagtgtcccgccaccaaggaggacctcaccatggatgatatcgtgccggtcaagaccaacacgatcgtgaagcccaggcctttgcaggctgcaagcattccaggactccttgggatttttcagaacgagtgggatgctctcatgctttctaattttgctttggagcagcagcttcacacagcaagacaagaacttagtcatgcactctaccagcatgacgctgcctgccgtgttatagccagattaaagaaggaaagagatgacgctagagcacttttggctcaagctgagagacagattcctgcgtcagttgcaggagctgctcctgcagctgttgtttccaatggaaaaagagtaattgaagatgaaattggccctgacgggaagaagatccgtcctggtatcaaccctgtcatgattgatgaacttacagagtgtaatgccatgctttcagcacagcgcaagaaaagacaggttcctccaactctggcaccgatcgatgcactcgagagatacactcagatctccagccatccccttcataagacaaacaaaccaggcattttgtccatggatattcatccttcaaaggacattgttgcaactgggggtatcgatacaaatgcagtaatctttgatcgttcatctggtcaaatcttgtgcacgcttgctggtcactcaaagaagataaccactttgaagtttattccacgggatcaactctttgtaactggatcagcagataagactgttcgcatctggcaagagaatgagaatggaaactataactgtgtccatacactgaaagatcatactgatgaggttgaagctgttacagtacatgtgactcagaagtattttgtgagtgcttccaaggataactcttggtgcttctatgatatttcaacaggatcttgcctgacacaggttggcgatgcttcaggacaagagggatatacatctgcgtctttccatccagatggtcttatccttggaacaggaactactgatgctgttgttaaaatttgggacgtgaaggctcagtcaaatgtcgcaaagtttgagggtcatgtcggaccagtcactgctatgtctttctctgaaaatggttacttcctagcgactgctgctcatgatggtgttaagctttgggatcttcgtaaattaagaaattttaggactttctctccctatgatttggacacgccaaccaatactgtggaatttgattttagtggaaactatcttgccattggtggttcagatataagggtctaccaagtagctaatgttaaggccgaatggaatcttatcaagacattacccgatttatcaggaacagggaaagtaacttccgtaaaattcggagtagacgcgaaatacatagccataggttctatggaccgcaatctacggatatttggtctccctggagatgatcaaatggaggaatcaaacacagcggccgagtgatgggaattcatggtgcctaatttgtttcttctgccatcatcctcattatactgtggtgatggatagactgattgcacatggatacatcaccgtcacaagagggaagggtcctggcggggattactggtctgagcttcggctggtgtaaaacaagctgtgatattgttgtactgtaggccttactaattcttctgatgaggatacaatttgttttgttgactacgatgctaaacagctaaagttctctgcgcagattccagtgattcaaaacgaactacttgcttcttagcttctttattacataggtcaatggaagcactataagatgtgcccatgcgagtgtgtccagcgtgatctgtgaagattggtgatttgtacaattcattttgtttctgagtttcttaggttgtgcgtgtttaggatcagttacaggttaagccgctgtctttcatttgtgtatctggccactatcgagacaagatacatggcgtgcctctagaagtcaaaagtctgaacagttactcagaa

SEQ ID NO: 126393 - DNA, 1569 bp, Zea Mays
agttccaccggacactaccctaaccttttcactgctccagcgagggcactagccgccgccgtttccatctccccggcgctccatcgctgggcacgcaggcgacggcgacggcgctcaggctcgtgctctcaggaacggcgtcagctgcttcctttctcgcctcttgccagtcgcctcgcgccctcgcctttggtcctccgcacggctggtgagctctgcgtgcgtgcctctctctctctcctcccttctccggtggatcatcaacggcgcccggccccggcggctgcgccgtgcgcggcctgagggcagcgggagccagcagccgctgcttagtgccgctttttggaaccctgctatttgttcagacagttgttatatatatctgaagaataacatctttcattgaaaggtagaataatatttctgtttgaaggtttttacgagtgattgctctttgcgcttgccatgcggtatttctgtattaggttcactgtagccaatgcttttttttaatttttttttctattagatggctagttgaacttgttgttttgaactctgatttagataatttgcaagtactgttattttctgacatctgagttaaactgaactggatcaaattgtaaatggaaatacagggcagacagcttcaggaaatttttcatgctaaacttgtttctttgtatagcacaccatctttctgttactctggacatcaatcgaagcacagaccttaaaggcacttagtgggatgtcattttcagctactgctttattggctagtgttacactgtttgatggaagctcttgttataatgcagacatacgtagaccgatggcaacactgaaagatgcagcggcaaggaagtctatactggcaacaatccgtcttgttgtcccagccggtgcagcccgtcctgcacctccagttggtccagcacttggtttctaccggctcaatttgatggccttttgcaaggacttcaatgccaggacccaaaagtacaaggcagaaactccaatgcaagtcaccctaactgcctacaaggatagcaccttcgagttcgtggtcaagtcgccctcggtatcatggttcctcaagaaggcagcaggaatcgaaaccgccagcactcgcccaagccacgtgaatgtatcgtccctcaccctccgccacgtatacgagattgcaaagttgaagcaggctgaccccttctgcaagcacatctctcttgaggcgctgtgcaagtccatcattggcacagccaactctatgggtattgcgattgttaaggatctatgagcagcaatgccagccttttagtcatgaagaaatctgtgacattttgtatgttcctagtttgtagttggtgctggagaggatacaactcatctgtctcacagagcttcctgccactgccatttcaggagtatgaaactctatgcaattcctgggagagccttcagcgcagcctttttctcttcctttgttcattttgtgacttaactggtactatgtggttttacgttggtgctttaaataataaattgtagttttggtttcttcca

SEQ ID NO: 126394 - DNA, 972 bp, Zea Mays
agttccaccggacactaccctaaccttttcactgctccagcgagggcactagccgccgccgtttccatctccccggcgctccatcgctgggcacgcaggcgacggcgacggcgctcaggctcgtgctctcaggaacggcgtcagctgcttcctttctcgcctcttgccagtcgcctcgcgccctcgcctttggtcctccgcacggctggtgagctctgcacatacgtagaccgatggcaacactgaaagatgcagcggcaaggaagtctatactggcaacaatccgtcttgttgtcccagccggtgcagcccgtcctgcacctccagttggtccagcacttggtttctaccggctcaatttgatggccttttgcaaggacttcaatgccaggacccaaaagtacaaggcagaaactccaatgcaagtcaccctaactgcctacaaggatagcaccttcgagttcgtggtcaagtcgccctcggtatcatggttcctcaagaaggcagcaggaatcgaaaccgccagcactcgcccaagccacgtgaatgtatcgtccctcaccctccgccacgtatacgagattgcaaagttgaagcaggctgaccccttctgcaagcacatctctcttgaggcgctgtgcaagtccatcattggcacagccaactctatgggtattgcgattgttaaggatctatgagcagcaatgccagccttttagtcatgaagaaatctgtgacattttgtatgttcctagtttgtagttggtgctggagaggatacaactcatctgtctcacagagcttcctgccactgccatttcaggagtatgaaactctatgcaattcctgggagagccttcagcgcagcctttttctcttcctttgttcattttgtgacttaactggtactatgtggttttacgttggtgctttaaataataaattgtagttttggtttcttccacttcgaca

SEQ ID NO: 126395 - DNA, 1239 bp, Zea Mays
agttccaccggacactaccctaaccttttcactgctccagcgagggcactagccgccgccgtttccatctccccggcgctccatcgctgggcacgcaggcgacggcgacggcgctcaggctcgtgctctcaggaacggcgtcagctgcttcctttctcgcctcttgccagtcgcctcgcgccctcgcctttggtcctccgcacggctgacatacgtagaccgatggcaacactgaaagatgcagcggcaaggaagtctatactggcaacaatccgtcttgttgtcccagccggtgcagcccgtcctgcacctccagttggtccagcacttggtttctaccggctcaatttgatggccttttgcaaggacttcaatgccaggacccaaaagtacaaggcagaaactccaatgcaagtcaccctaactgcctacaaggatagcaccttcgagttcgtggtcaagtcgccctcggtatcatggttcctcaagaaggcagcaggaatcgaaaccgccagcactcgcccaagccacgtgaatgtatcgtccctcaccctccgccacgtatacgagattgcaaagttgaagcaggctgaccccttctgcaagcacatctctcttgaggcgctgtgcaagtccatcattggcacagccaactctatgggtattgcgattgttaaggatctatgagcagcaatgccagccttttagtcatgaagaaatctgtgacattttgtatgttcctagtttgtagttggtgctggagaggatacaactcatctgtctcacagagcttcctgccactgccatttcaggagtatgaaactctatgcaattcctgggagagccttcagcgcagcctttttctcttcctttgttcattttgtgacttaactggtactatgtggttttacgttggtgctttaaataataaattgtagttttggtttcttccacttcgacatggatatgttatactgcaaatgatgagaaaaaataatgattgatgagctcattatgattttgcgtagaggcctggaatgcagtatctgttgataaggagcaggttgaccctaatgtcatggctaaacgtatatgtagctcgtgttgcgtttgcgctatgcttcctcggtagacaaatgcaactgagaatctagctcaattgtaattaggttttaaccaagtttgtagtaactaccatcagtattttgtctacaaataatttttttataaaaatgtatt

SEQ ID NO: 126396 - DNA, 875 bp, Zea Mays
accagcaccccgtcaagccccaatcccacgccacctataataaagccgtcagcacactgaaacccctgcaaaccctagtgcttccccccgatccatttcagccgccgccgcgcgtagcaagcaggagcagcaaggatgccggctggccacgggctgcgctcgcggacgcgcgacctgttcgcgcgccccttccgcaagaagggctacatcccgctcaccacctacctccgcacctacaagatcggcgactacgtcgacgtcaaggtgaacggcgccgtccacaaggggatgccgcacaagttctaccacggccgcaccggtcgcgtctggaacgtcaccaagcgcgccatcggcgtcgagataaacaagcaggtataccacacggatcccttttcgctagctcgctgataggttgctgggcgcaggcagttgaaatcgtttgtgcacggcgcttacgtttagtgcgcggacgtatcttctgttcgtgccattctaggaattcgaatgtttagagtgacgacaatttgctggtgtgttgtttgatttggatctctgtagaatttgtggaagcccagggcgcgattagttttgtagcggcaggaatgggcaatcataaccatttctttgtatgatctggtagtgatagatgctgtaattaggttgattctagtttcatgtatgattgggttcttggtactgcaccggtgtaatacaattctagtttaactaaagggaaatttggattcataccattaaaagatcaccactttggattcataccattactatctcacttacatgtgggtccacatgagtcaatgacatgtggggtccatggtatatatctaaagtttggatcttttaatggtatagat

SEQ ID NO: 126397 - DNA, 985 bp, Zea Mays
accagcaccccgtcaagccccaatcccacgccacctataataaagccgtcagcacactgaaacccctgcaaaccctagtgcttccccccgatccatttcagccgccgccgcgcgtagcaagcaggagcagcaaggatgccggctggccacgggctgcgctcgcggacgcgcgacctgttcgcgcgccccttccgcaagaagggctacatcccgctcaccacctacctccgcacctacaagatcggcgactacgtcgacgtcaaggtgaacggcgccgtccacaaggggatgccgcacaagttctaccacggccgcaccggtcgcgtctggaacgtcaccaagcgcgccatcggcgtcgagataaacaagcaggtgaatggtcgcatcatcaggaagcgtatccatgtccgcgtggagcatgtgcagccatcccgctgcacagaagagttccgcctgaggaaggtgaagaatgaccagctgaaggcggatgcaaaggagcgcggcgaggtcatcagcaccaagaggcagccgttgggccccaagcctgtcttcatggttgaggggactaccatcgagaccgtcactcccatcccgtacgatgtggtcaatgatcttaagggaggatactaggttgtttgtttggtctttctacctgttctacatctgtgttactctagtgcgtacaattttgctcacactgagcagtagtatgaacctattgtgtgttcatgttgaaatttttcccgttctgtgcaaacctgagtttagaagaacgctatgccttgatctttgcttctgagaacaaagatttgcctttttcaacctcatacggtgcttatgtatttatgttgtttgaaccgtgaagtggaaattgggaaagtatgtcacactagtaccaaccgtctttagccaacgtattttaattggtccatgtcgttttgaactggttgaagttaagcttttttgaaaagaattaaaaaaaaga

SEQ ID NO: 126398 - DNA, 488 bp, Zea Mays
ttttctgcggatttctaataggaaatcgatatattccccgcacaaactccggcgatggccagagcctgaaacgtgacaaaacatctttgtcctcccctccctgctttccctcccggcttggtcacaatacaatctcgtctacgctggagctgcagtgcactgcactgcactgcacgagagactgctcgctggctctcgactgcgctccctcgctctccacccaaaggaaaacccaacaagaacccgagctccctcccaagtcccaacccctgtatgtacagtcgatcgtaggcttccgttccgtcccggcccggccggtcagctccgcagcgcgacggcggcctcgtgcaccagcgacccggtggcctgcgcgacgccgtgcgcctcccgctccgcggcctcccggcacgacccggcgccgttcatgcggcgcacgaaggcggcgaagcgccgccagttgtccgggtggaagaggtcgggccccatgc

SEQ ID NO: 126399 - DNA, 2178 bp, Zea Mays
atggcgccggcgtgggagcgcgccaggcgcgcgctcgccaccaggttctgcatgcgctttgcggcgaggcgcgtggtcgtcgaggatgcgccacgtgggatggacgacatagaggcagaggaggaggaggagcaggagcagcagcagcaccaagaggagccggccgaggatgagagggagatgtcgctggccgcggagtccgaggacctggcgtcgtcgtggtctgggagccggagttcagaggtttcgcaagctcctgtattcgtattttggactttcttggtcatcgatcgaactgatattgaatttacatgtgcaatttgcctcagcggcatgaggtccggccgcggccaagcgctattcactgctgaatgctcccacaagttccatttcaactgcatctcctcaaacgtgcagcacggcaacaagatctgcccaatctgccgtgctgtgtggaaggagctgcctttccaggggcatgtggctacatctgctgctgctcatgtggtttggccccagatgagcatgcagtcagtgagtccgctggatgagctcccggtctttggctatcaggatacagcagttatgaacgacgatgagcagatacagcctactgaaacagcagttggtgatgaggctcctcctcctcctcctcctctgcttgagatcacgacgtacactgaattcccagccgtccaggagtccgtggcacacgaggaattcgccatcgtcatccatctcaaggctccgtcgtgggtgagcacccgagcgccactggatctggtgactgtgctcgacgtgagcgggagcatgtcgggccccaagcttgcactcgtcaagcgcgccatgaggttcgtgatcgagaaccttgaccccagcgaccggctctccgtcgtcgccttctcctcggcggcttggaggctgttcccgctccggaggatgaccgcctccggacagcagcagtcgctgcaggctgtcaactgcctcgtcgccgacggcggcaccaacatcgccgacgggctgcggaaggctaccagggtggtgcaggacaggcatgccaggaacccggtctgtagcatcatgctcctctctgacggcgtcgactcccacgtcctcccgccgcggcgcggctcggcgccggactacggccggctcgtcccgcgctccgccctccttcccgggagcgagcaccacgtgccgatccatgcctttggcttcggcatcgaccacgactccagggcgttgcacgccgtggcccagatgtccggcggcaccttctccttcatcgacgtggtggggtcgatccaggacgccttcgcgcagtgcatcggcgggctcctcagcgtcgtggcgcaggagacgacgctcagcgtcgagtgcgccgaccagggcgtgctcctcacgtccatcaagtctggcagctacgccagcggagcggacggtgacggccgcggcgggttcgtcgacgtcggccgcctctacgccgacgaggagagggacttcctcgtcaccgtgcgcgtcccgccgtcacgcgggaccatcgcgctcgtccggccgagctgcacctaccgcgacgcggtcaccacggagatggtgcgggtggggggcgacccggtgacgctgctccgcgcggcgagcccggtgagcgcggcgatgtccctgcaggtggagcgcgagtggcaccgcgtccacgccaccgaggacatggccgcggcgcaggccgccgcagaggagcacgactacgcccgcgcggcttcgatcctcgaggcccgccgccggctgctggagtcgtgcgcgtcgctgtcctcggaccagcagacgcaggcgctggtggccgagctgcgggagatgcaggagcgcgtgctgaacccgcggctgtaccaggggtttggccgcgcctacatcctgtccgggctcagctcccactcgtggcagcgtgccacggcgcgcggtgactccacggagctcacgggcctcgtccacacctaccagacgccgtccatggtcaacatgctcaaccggtcgcaggcgctccagccagaggtagcggaggcgctgacccggtccccgacgatcgcgccgttgcgcagcccagcccccgcctccggctcgcgggggacgcgacgcgggccccggtcgttcaggccggcaaagtccttcactgggcggtcatcgtga

SEQ ID NO: 126400 - DNA, 2660 bp, Zea Mays
gtttcggaaggcacaaacccgcatctctcctgatttggcataacctcgcgcaactatcacagcacaggcaaccctgaggcccagacctgatctcgccggcggcgagcttgtgtccatggctgacggggccgagatggacgaagaggctatgcgggccttcttcccgctctccttcggaaaggcggctccgcggcccagctctgctacctcctccgcccactccaacacccttcgcaagcctcaaaaccctagtaaccccaagccttccgcctctaccgccgcggacgacgatggggccgctatgattggtcctcctcgcccgccgccggcgcccgcgggggaggaagacgatgaggacggcggcggtatcatgatcgggccgcctcggccaccgccgccctccgctcgcggcgagggggacgacggcgacggcatgattgggccgcctaggccgccgccagcggatgatgaagacgtcgatgatgatgaggacgacgacgaggaggagatggaggatgatggggagggtggattcaatcggatccctcttagcaacgaaattgttctgcgggggcacaataaggttgtctctgcccttgctgttgaccatacaggatccagagtgctctctggtagctatgattatacagtgcgtatgtacgacttccagggtatgaattcaaagcttcagtcattcagacaattggaaccatttgagggccatcaagttcgtagcctaagttggagtccaacgtctgatcgattcttatgtgttactggttcagctcaggccaagatttacgacagggatggacttacactaggcgagtttgttaagggtgatatgtatattcgtgatctgaagaatacaaaaggtcacatctctgggcttacaggtggtgagtggaatccaaagtcaaaagaaaccattttgacatcatctgaagatggctccatgcgtctctgggatgtgtctgattttacaagtcagaagcaggtcatcaaacctaagctggtacgaccaatgcggattcctgttacatcatgtgcatgggaccatgaagggaaacgaattgtgggtggcataggggatggttctatacaggtctggaccataaaagctggatggggtagcagaccagatatccacgttgagaaaacacacacagaggatattactggggttaagttctcaacagatggacagagccttctgtcaagaagtatggatagtactcttaagatatgggatttgagaagaatgaaaactcctttgaaagtatttgaagatctgccaaatcactacgctgagacaaatgcagcatttagctcagatgagcagcttatttttacaggaacatctattgaaaaagatggtgacaatgggggattactttgtttctttgatagaaagaaacttgagcttgtatcaagggtgggaatttcagcacattacagtgtgataaggtgcctctggcatccaagaatcaaccaggtgtttgcaacagttggagacaagaaagaaggtgggactcatatcctgtacgatccttctattagtcaaaggggagctcttgtatgtgttggacgagcaccaaggaaaaagtctgttgatgattttgaggtgcaacctgtcatacacaatccacatgcattgccacttttcagagatcaaccaagtcgtaagcgtcaaagagagaagatactgaaagacccactcaaatcccacaaaccagaagcacctgttaatggtccaggttttggtggaagagttggtactacaaaaggcagtttgctgacacagtatctcttgaaggaaggtggtttaattaaggagacctggatggatgaagatccaagagaagccattttgaagtatgctgatgctgcggagaaagacccaaagtttattgcgccagcttattcccaaacccagccgaaacctgtttttgcggagtctgattcagacaatgaagagaaataaccatgcgcctggttacctaagctagcatgcacctgcattctgttttctgacagatgtctcttgatgagcttgttgcacatgccctgtaacctgcttttcaacagtggagaaacaaaagagcatcttcaagggtcttgatgataggagctctgccccttcattacagatggatatgattagtatctacgacacttcagcactagagctctatgatttgttggatgttgtacccactgtatgtacttagtcctgaaacagtggccaatctatattatactctgttctttcttttttatttgtcgcggtctagtttaaaaatgaactagcgggcgacaaatattcaagaacggaggtagtatatgaggtagtatatgacttagacgtaactttagtgcaccgaatgtagtcaacctttgtttgctttggagaatgaggatttgttgttctagtatcagtctctttgatgttcctaatgggctagttggaagatattttgaggattttgaaaggcaaatgctgtttttgtgtggtttgggctgtacggtccaaacaagttgtgaaacagtggcgtatcagccttgttattactatgatccaacaagccaatggtcctggatatagcaagatttggataacacaatcctgaaatatcattgctatctattttctttaataa

SEQ ID NO: 126401 - DNA, 1819 bp, Zea Mays
cgactgtcctctctcaattcacgaggaaaaaaaagaataatctctccactttccttcaggatccagcccgcaccaccgcacgtctcctcctctctcaacaccggccaccgtaacaggaataatccagctcgtgattgaagaatccgatgacgacgccatgcctgggcgccgcggccttaagcgccagctggacggcgccctccctgacgggggcgtttctcgatctgacgctcgcctgggcctgcctctgcctcgccgcgctcgccgccgtcgccgcgcgcctcctcgcgctcctcggcctcccgctcccctgcacctgcgcgcgcccgcacctgccctgcctcctcgccttcctggcgcgctaccctccccgcgccgtcggatcccttcacgccgccctccgcgcccgcttccccttcgccggccccaccgacgacgaggcacgccttcagaaaggggtggaggaagagggggaggaggaggccatcgacgcgccgaaggaggaaggggattttcgtcgccgcgtggaggcgcgcgccgagctgcagatggagctcgagaaagagcgcagcgccgcagcgtcggcggccgaggaggccatgtccatgatcctgcgcctgcagaaggagaagtcggcgcttgagattgaggcgcgacagcagcgccgaaccgctgacgagcgctgcgccttctacgaggacgaggtcgaggagctccgggacatcgtgctcgtgcgggagcgtgaggtgcgcgcgctgcgcaaggaggttgacgcctaccgacgcctgctcggttttagcgctaccgaggaggacgaggaggaggatgacgagcaggagatggtcacgccgcatagtttccccatgtacgaaggagagcccagctcgtccaaatcggtcgatgcgaatcggatgcaacattttgggaatgattctgggttcagcttcaagacgccatcaccgcgtgaacaaccaacggtgccgcctcttactgcagggcaaatcaatgtgggaagcgatgattgtgttgctgttcagacgccggccaaagttcccgtggttcaatcaagactggagctagatagctctgaggatgaggacgaggatgaggatgatggagcagagacggtggaaatcctccccctatccgcccggagccaagatttggatcaaggtagccatttccatgctgatactgcacaaggtatggaatcgacttgtaccaaggaacagacagctcatgcatttcaggaaatcgagtgtccaggtatagacaagattgttaatgaccagataggaagcaagaatgatgccaatgtgtatgatgtgcatgtggtcgatgacatacgcttctcaacagaagtcaagggcctgattggccgaagcttctcagaggcaacaatgcaagcagagagattacagtctcgagctgttgcagatgatctccttgagaaaagcctgaatgccatcaaaggtgcacaggacaagataagaaatgcagctaatgaaaggaggcagtcattacagttgcaactcttagaggacatagctgatcaacttcaaggaatcaaggatgctgcagaagcagggaggcaagtgttctgtgctgctcctaaaagctccaagaggagctagggacttgtgttacgccactaatgcatggttggcgtcgtacataagttgtttcgggtttgtagaccaggtctgttgatttgttgattcaacaagtttgcttcttcttctttaaataagtagtggctattgctttgtacatgtatatatataaacaacatgggattcatcccagtctttataaaacg

SEQ ID NO: 126402 - DNA, 160 bp, Zea Mays
tcttgtgcctctgacatctggtcttatgtttgtctcttatcattcactcctctctatccagctattttgccttctttgttgaaaacaagagggcaggtatttttccatacgcaaggcaaaagactttttgcctgcccattttacctattggctgttggag

SEQ ID NO: 126403 - DNA, 1738 bp, Zea Mays
ctgtcagtaggtgaccggcgcatgctacgtacctcctcggatcctactgcaaatgtcccctggtcgtccacacaaaaaccgtagtgtactggagtagcgtagcgaactagtcatcatcactggtcgtaccgtacgctgggccgctagccgatgcgcaccgcggcaccggcacggtaaactcgagtgcctgacgcgaccgagacggccgaaacaccacgccagttcgcagcccaaaacgagcggaaacaaccaccaaaaaaacccgcactgctccagccgcgatggaacagtcccagacgaaacaagcctggtggtagtgggtaccttgccgttgccggcctggccggctggccctcgtgtgcgttcctcgctcgatctccctccttcggtcaaaagccaacatgacaacacacgagtctgggtagctgtcccccgcgcggctcgccccctcgctcctcggcgccgctgccggcccgcgcctgcgcctgcggctcgcgccctctatacctccgcccgcccgtccccctcgtgccgctctgcctgccccccgcattccgcgccgcctcgccaccgaactgggaggaatctgcggggaagggggatatggggtcgccgggtgcggggagcagcggcggccacgagtgctccttcaagttcctcctcatcggggactcgggcgtcggcaagagcagcctcctcgtcagcttcgtcgccgcctcctacctcgacggcgacatcgcccccaccatcggtgtggattttaaaatcaagttccttacagttggtggaaagaaactaaagttgacaatatgggatactgctggccaggagaggtttaggacaattactagttcttactacagaggtgctcagggaattattctagtatatgatgtcacaaagagagaaagtttctcaaatttggctgatgtttggactaaggaaatagaagcaaactcaacaaacaaagactgcataaaaatgcttgttggaaacaaagttgacaaggatgatgaaagaatggtcacaaaagaggaaggtcttgcttttgctgaagaatatggatgtctgtttcttgagagcagtgcaaaaacacgagaaaacgttgagaaatgttttgaggaacttgcattgaagattcttgaggtgcctagtctcctagaggaagggtcttcttcggttgtcaagaggaacatcctgaaacagaagcaggaaagtgatgcaaagaacggtagtggatgctgtcaatagatgtatgtgctgatccacaccacacggttggctttcttcgtgtgagctgccctgattgtctgctgtacatgttcttgtgagtaagaagggcgagcataattgatttgtacaaaggacatgtcagtttggtgtcatagttttcctcatctccagtttagtatagcaattttgttgtcgccctagcaatggtaatatggaatcctctctctacagtattgctatctggccggctggcccttagaaaccgggaccgtggaacttgttcacattcctcgttccagaaatgttcgttctgttccaaaaacgtgggaacaattttgtttccgtagtgttaaaatcttgtttaaggattagtttggcaacttcattttttcatgggatttctaattttccttgaaaaaatggacaaaaaaatggactaatttccttgagaaaatagagtttccaaactagccttaagtatgtatgttcctatcctcgaccttag

SEQ ID NO: 126404 - DNA, 285 bp, Zea Mays
atggcggagacgtacggcgatctcagtggttctgtccaagctcggggagctagcgagacgaacgaggcgaccatactgcttgaggtgggcgacaacatggcgcagcttcgcgaccgcctcgagtggctgcaggccttcgtccgcgacgccgacaggaagcgccgggccggcaccgaccagctcacccgcgtgtgggtgcgccagacgcgcgacgtcgccttcgaagccgaggatgcactcgatgacttcttttacgaggctaaccgaacaaggggatttacctaa

SEQ ID NO: 126405 - DNA, 1186 bp, Zea Mays
gcaatgcagcgggtcatcatcgactccacctggactcgctcactggcaatggctaccaccagcaccaagctcgtggcccttggcttggccgtcctcgtgagcgttgggttctccgatgcagcgagggtagttaggctagggagctatgcgtctgccggaggaggcggaggcggtggaggcggcggctccggatcgaccggggctgctgggtacggcggtgggtctggcggtggcggtggctacggcataggcaagggtggcggggactggtggaacaatttcgtctccagcgtagcgggcggcggtggtgggggacagggcggaggaggtggcaccaacggtggatccgggtccggcggtgggtcgggctatggttctggcaccagttccaccgcagcctctggccccagcagtggcaactacgccaacgctgagggcaagggcgccggtgggggcatgggcggtggtgccgacggcgcctacggttctggtgccggtggaggcgttggcaagggccagggcgagagtggcgtcgcattggcaccgtcgtccgatggctactacaatggcggcgccgctgatgctaccggtggtggttccggcgctggcggtggacatggcggtggcgcagccggagctccaagctacgggactggaggtggccttggcggaggcaagggcgaggccggcagcgacgggtcctggggttcaggttacgcggcgggaatcggtgccggcggtggcggcggcggtggcggcggatcgcaaggcggctctggtggtggcggtggctctgggtccggatccggcagcggtggaatccactgagtttccttgcggcatgcagctggatggagcgctcggcgttagtgtcagtccattttggagtcggttcgtgtacctgagttttccttgaggagatgctggttttcgctttctttgttgcaagaattattagtcaggaataatgggcttcgtgattgtagttcgggtaggtaggtagtccagcatgcaactgacatgtaatggctacactctacaggctactacgagtatatgcttgcatcgccatcttttgctgtgccccttgttgttactgtgttcctcgtcgatctttagaggtcgttgctaccggtttttatcttccaaaacacaaaatatactggaacgactcttgcagtctctt

SEQ ID NO: 126406 - DNA, 675 bp, Zea Mays
atggagagtaagaggctcctatcctttagccttgtagccctgttgaccattggtgtatccaaagctagggagttcccttgggagcacccaatgaccgacgctgctggtcagggagggggaggaggggaaggtggaggttccatgaatggctatggttcaggatctggctccggctacggatccgctggagctaccaacactcctggtgggccatatgggaccggtagctccatggctagtgtagacggtggcgggagcggcggcggcgataatggtgggtctggagctggttccgggtcttcggcaagtcgtagctacactgttggcttctatggtggagggtactcagatgcacaaggcagtggtggtggtggtggccgtggaggaggtccacaaaacgggagtggttccggctctggttctggaagagggatctcttctagctacgttgctggtccaaacggtggaagttctgccaatggcgggggaagcggtggcggtgaaggcggtgggcatgacggtgggtatgccggtggatacggaggtgcatcaggctctagctctggccaaggtggacaaggctaagtaaattaagatgctatcgatcgctcaataaaacccactttttttatcatttcctccaggcgttataaattatgtattggtttcaataaa

SEQ ID NO: 126407 - DNA, 546 bp, Zea Mays
atgccgccctcgctccctgcttgtgtcgaacccgaggaggacaaggacgaggatgaggagggcagcgacgctaaggtggaagggataggcagcgctcgcggtccatcggtgttggtgcgggagcgcgtaccagggtcggagggcgtcctggatcggctctttcgtcgaaaggttgcaggcggtgatgcgcacattcatggagcgggtctgcgtcgagaaccgaaggccttcgccgaggagggtgtggtcgccggtagctacaagagttgtaatgactgttgtacacagaagtttggcagtcacacaaggtctcagctgttcactaagatggaatgcttttcagatttggatgttaatgttcacttagttgaagtctatgctggactcctgagacccgagctcatatatgtcaacattttcaaattgaggaatggtggatgtgattattttggcaagggtgttcttaaggttgtgaacaatgtaaataatattattggaccagcaattgttggaaagatttgtatctcaattataaagttacattga

SEQ ID NO: 126408 - DNA, 792 bp, Zea Mays
atgtgcgcatcaccgcatgcaacctttcgacgacagagccgatccaggacgccctccgaccctggcacgcgctcccgcaccaacaccgatggacctgcaacagtccacaccgccgcacccaagccggactacacaccgcggcgattgcctccctgctcagagatttcacagcaaccgcgagcgctgcctatcccttccaccttggcgtcgctgccctcctcatcctcgtccttgtcctcctcgggctcgacacaagcagggagcgagggcggcacgaaggtggattggagccgcgaaggccatcgtcacgcgggcctcgtcgacgtcctcgactcctcgtcatcggacttagcgcgggtgggaagcgggggcggcgcggaggcggatcggagccgcggagggttggagacttgtgagggagaaagaggaggcgtcggcgtgctagcggttgggagcattgcgaggttagggtttgggtacagccgtgcgggtgggtcgcgggatcggacgactgaatttggcaatcgcttatctttgactcaataccttatgacctcggaaaggttgaagaagggtcacgagcaaagagggcatttactatcctttgcgatcttcaccgttggaagggctgatgagctatcccctgatgagcttgagcgcctcatgaccatgttcaaggtccctacctggttcctcaacagaaaaaaggactacaaggatggtagattctctcagattgtttccaacgcccttgacaagaagctcagcttatggatgaccttgagaggctga

SEQ ID NO: 126409 - DNA, 934 bp, Zea Mays
cagcctaccgggagcgactgagcgtacgggttatccccgtttctacgcgctcgctcctgtacctctccccagtgcccaagaatccaagatctggaagggccaggtgggaggaccaagcttcgtcgacgtcgactcctcgtcctccctcacctcgctcgcttctctgcaattctccgcagccctcctctttcggtctttcccgctggcctcctcttttcaaaaccctcgctaatctcgtgccccgtcccacccacctctagcttcgaatcctagcgcctcgcctccgcattctagggtttccccgcctccggcgccggccatggaggcggtggtcgtcgacgcgggctctaagctgctcaaggccggcatcgcggcgcccgaccaggcacccccactggtaatgccgtcgaagatgaagctggatgttgaggaccaggagatggctgacggcgcggtggtagaggaggtggtgcaccctgtggtgcgcggcttcgtcaaggactgggacgccatggaggacctactcaactacgtcctgtacagggacattgggtgggagattggggacgagggtcagattctcttcaccgaacccctcttcacgccaaagactcttcgggagcaattggtgcagcttatgtttgaaaagttcaatgtttcaggcttttatgcctctgaacaggctgtattgtcactctatgctgttggacgcatttcaggatgtaccgttgacattggtcacgggaaaataggtagtaccttaaaatcaaagcatctttaactttggatgattcagattcagatttcaattatgtttattcaattattccacgtctggcttttgtttgtgtagtaatggtctgaagctattgaccttttccttcatttattttggtagaagggccatcctttacctgtagattttgactcagcg

SEQ ID NO: 126410 - DNA, 1699 bp, Zea Mays
cagcctaccgggagcgactgagcgtacgggttatccccgtttctacgcgctcgctcctgtacctctccccagtgcccaagaatccaagatctggaagggccaggtgggaggaccaagcttcgtcgacgtcgactcctcgtcctccctcacctcgctcgcttctctgcaattctccgcagccctcctctttcggtctttcccgctggcctcctcttttcaaaaccctcgctaatctcgtgccccgtcccacccacctctagcttcgaatcctagcgcctcgcctccgcattctagggtttccccgcctccggcgccggccatggaggcggtggtcgtcgacgcgggctctaagctgctcaaggccggcatcgcggcgcccgaccaggcacccccactggtaatgccgtcgaagatgaagctggatgttgaggaccaggagatggctgacggcgcggtggtagaggaggtggtgcaccctgtggtgcgcggcttcgtcaaggactgggacgccatggaggacctactcaactacgtcctgtacagggacattgggtgggagattggggacgagggtcagattctcttcaccgaacccctcttcacgccaaagactcttcgggagcaattggtgcagcttatgtttgaaaagttcaatgtttcaggcttttatgcctctgaacaggctgtattgtcactctatgctgttggacgcatttcaggatgtaccgttgacattggtcacgggaaaataggttataacaattgaaaaagaggggtacattgttggtgaagctttatttcaaccacgtatattgggcttggaagattatggtatcgttcaccagctagttactagtgtctcaaatgtttcatcagagtaccatcgtcagctgcttgaaaataccatgttatgtggtggcacctcatcaatgactggctttgaggacaggttccagagagaagcaaatctgtctgcttcagcaatctgtccatcacttgtgaagcctcctgaatacatgcccgagaacctagcaaggtactcggcctggctgggtggtgcgatattggctaaggtcgttttccctcaaaaccagcatgtgaccaagggcgagtatgatgagacggggccgtccattgtgcacaagaagtgcttttagagacaaatgccttgaactagcacggttggtgcaccatttgctgctgttcatgtcgcaggtgtcctcgtacctgaacgttgcggccttgcgggtgctgatgcagcgatgcttgtgtctacaccttactccagccacagttcatacctgacggttgctaagtgttgatgcatctagctagctcggttaggatggattggcccttaggtttatttagagtggaatggagtgtagcctcggcatgtattccttaggagttttagccaattgctcatttgtacctgtagtaccagagaatttcctgagttgagatttccttttaaatttacattatgatccattacctgttcagctgctactagtgaaagagttcttcgaagcatgctcacaaactaagcgcgtcacagtttcttagtcataatatatgtttagttcaggccacataagttgtacgtcaagctttgtatccctgcgccccgttcatagctctttttttggctaaactttgtcataggtgtgttcaatttattcgccacacttctttt

SEQ ID NO: 126411 - DNA, 1944 bp, Zea Mays
cagcctaccgggagcgactgagcgtacgggttatccccgtttctacgcgctcgctcctgtacctctccccagtgcccaagaatccaagatctggaagggccaggtgggaggaccaagcttcgtcgacgtcgactcctcgtcctccctcacctcgctcgcttctctgcaattctccgcagccctcctctttcggtctttcccgctggcctcctcttttcaaaaccctcgctaatctcgtgccccgtcccacccacctctagcttcgaatcctagcgcctcgcctccgcattctagggtttccccgcctccggcgccggccatggaggcggtggtcgtcgacgcgggctctaagctgctcaaggccggcatcgcggcgcccgaccaggcacccccactggtaatgccgtcgaagatgaagctggatgttgaggaccaggagatggctgacggcgcggtggtagaggaggtggtgcaccctgtggtgcgcggcttcgtcaaggactgggacgccatggaggacctactcaactacgtcctgtacagggacattgggtgggagattggggacgagggtcagattctcttcaccgaacccctcttcacgccaaagactcttcgggagcaattggtgcagcttatgtttgaaaagttcaatgtttcaggcttttatgcctctgaacaggctgtattgtcactctatgctgttggacgcatttcaggatgtaccgttgacattggtcacgggaaaatagatattgctccagtttgtgaaggagctgttcaacacatagcttctaagagattagagattgggggagttgacttgacaaacctgtttgcacaagaactgaaaaaatccaacccatcagtaaaccttgatgttgctgatgttgagctgctgaaagagcagtatgcgtgttgcacagaagattatttgacttttgaaagtatagaaagctcttgccaaccagaaaagcacactcttcctgatgggcaggttataacaattgaaaaagaggggtacattgttggtgaagctttatttcaaccacgtatattgggcttggaagattatggtatcgttcaccagctagttactagtgtctcaaatgtttcatcagagtaccatcgtcagctgcttgaaaataccatgttatgtggtggcacctcatcaatgactggctttgaggacaggttccagagagaagcaaatctgtctgcttcagcaatctgtccatcacttgtgaagcctcctgaatacatgcccgagaacctagcaaggtactcggcctggctgggtggtgcgatattggctaaggtcgttttccctcaaaaccagcatgtgaccaagggcgagtatgatgagacggggccgtccattgtgcacaagaagtgcttttagagacaaatgccttgaactagcacggttggtgcaccatttgctgctgttcatgtcgcaggtgtcctcgtacctgaacgttgcggccttgcgggtgctgatgcagcgatgcttgtgtctacaccttactccagccacagttcatacctgacggttgctaagtgttgatgcatctagctagctcggttaggatggattggcccttaggtttatttagagtggaatggagtgtagcctcggcatgtattccttaggagttttagccaattgctcatttgtacctgtagtaccagagaatttcctgagttgagatttccttttaaatttacattatgatccattacctgttcagctgctactagtgaaagagttcttcgaagcatgctcacaaactaagcgcgtcacagtttcttagtcataatatatgtttagttcaggccacataagttgtacgtcaagctttgtatccctgcgccccgttcatagctctttttttggctaaactttgtcataggtgtgttcaatttattcgccacacttctttt

SEQ ID NO: 126412 - DNA, 138 bp, Zea Mays
atggagacctcttgttatgccgcggatgggctacaggttgaggcagcgatcgtccttggtgggcatgtgtggggcagcgatggccccggtgttccacagtccgagcagcaaggatcactcaaggcatggaggagatga

SEQ ID NO: 126413 - DNA, 319 bp, Zea Mays
agaatcctgccatttcatctcctcagtgctgtctctcaaggtttgagatctggcagcagcataaggaatctgtttccttcatcacgccgcgtgtgttcatcatttttttagagttgccagctattctctcagtgatccatcacattgtcatgcttcaactgttggcgacaataatcaacaggttagttactctccactggacaatcttgacacaattgcttgctcctgtgattagtttagtcatcgctaaccaagtattattggtgaaatacgtgttatacagttattgcgcatgcagtaggtatttgaaaacagcgcg

SEQ ID NO: 126414 - DNA, 420 bp, Zea Mays
atgtcgacggggctcaaccggattggggaggccggagtggcggaggccggggaggacccggacacatcgacgatggacgatgccgatgcgaggcgcggcaacggggaggccgacaagggcgcggcggtggggatgacggcgaggctcgcccggatcgggaaggcgaccgtgggtgaggccacgccggtggacgcggcagagactggggatggggaggccagcaagggcgcgacagtggggatgtcgacggggctcaaccggattggggagaccggagtgggcggaggccggggaggaggacccggacgcatcgacgatggacgacgccgatgcgaggcgcagcgacggggaggccgacaagggcgcgacggtggggatgacggcgaggctcgcccggatcgggaaggcgaccgtgggtga

SEQ ID NO: 126415 - DNA, 2199 bp, Zea Mays
tcgacgtaaataaaacaaaaccaaaatacttgcttgactacttgagcaagcgcgtgcgcgtcttcggtcatcgcagtcgtcgccgggcgccagcggccagccgcaacccacaagcagagcaaaatattccgccaaggatccgtggaccgagcagcatctggcactgagctacatatacccgttgttcagccaccaccactgtccccaagcatcaagctaggcaggcctggtcccgaagaacacccttctctggtcgtcgcatcgcagggcagctagctaggtagctaacatccgccatggcgcgcgggggagacggcctgcaggtgctgagcgcgctggacgcggcgaagacgcagtggtaccacttcacggccatcatcgtcgccggcatgggcttcttcacggacgcctacgacctcttctgcatctccctcgtcaccaagctgctgggccgcatctactacacggacaccagcaaggacagccccgggtcgctgccgcccaacgtcgcggcggcggtcaacggcgtggccttctgcggcacgctggcggggcagctcttcttcggctggctgggcgacaagctggggcgcaagagcgtgtacgggatgacgctcatggtcatggtcatctgctccgtcgcgtcgggcctctcgttcggccacacccccacgggggtcatggccacgctctgcttcttccgcttctggctcggcttcggcatcggcggcgactacccgctgtcggccaccatcatgtccgagtacgccaacaagaggacccgcggcgccttcatcgccgccgtcttcgccatgcagggcttcggcatcctcgccggcggcatcgtcacgctcgtcatctccgccgccttccgcgcggcgtacccgtccccggcgtacagggacgaccacttcacctccaccgtgccgcaggccgacatcgtgtggcgggtcatcgtcatgctcggcgccgcgccggcgctgctcacctactactggcggatgaagatgcccgagacggcgcggtacacggcgctggtggccaagaacgccaagcaggccgccgccgacatgtccaaggtgctgcacacggagatcgtggacgagcaggagaagctggacgccgccgagggcgccaacagcttcggcctcttctccagggagttcgcgcgccgccacggcctccacctcgtcggcaccgccaccacctggttcctgctcgacatcgccttctacagccagaacctgttccagaaggacatcttcaccagcatcaactggatccccaaggccaacaccatgagcgcgctggaggaggtgtaccgcatctcccgcgcgcagaccctcatcgcgctctgcggcacagtcccgggctactggttcaccgtcgcgctcatcgacgtcgtcggccgcttcgccatacagctgctgggcttcttcatgatgaccgtcttcatgctcggcctcgccatcccctaccaccactggaccacgccgggcaaccacatcggcttcgtcgtcatgtacgccttcaccttcttcttcgccaacttcgggcccaacagcaccaccttcatcgtgcccgccgagatcttcccggcgcgcctgcgctccacctgccacggcatctccgccgcctcggggaaggccggggccatcatcggcgcgttcggcttcctgtacgcggcgcagaaccaggacaggagcaagacggacgccggctaccccgcgggcatcggcgtgcgcaactcgctcttcgtcctcgccgccagcaacatgctcggcttcgtcctcacgttcctcgtgccggagtccaagggcaagtcgctcgaggagatgtccggtgaggctgaagactcagaggaggagcccgtcggcgcccgtgcggtgcggccgtcggagacccagatggtgtagagaatcgatcgatcgacgcgtgttccttcctgcactgcacatggtgggctatcatgtcctcaattgtttttttccacgttaaagtcaaccctggctgtgttttgatgtgcacaagtcgttcgcatacgtagtacgtgtgtgatagtctggtagagcaggtgaatcgcatcgcatgtggcagtctggtagaggtccacgtgtgataataaataggcgggaaagtagctaggtgaactttacactcgtatatccaaccatatataatcggttacgcgcgtttagc

SEQ ID NO: 126416 - DNA, 106 bp, Zea Mays
gtggccacatcctgttcctaacagattatgacagcagaaaaaggcaaacagggattcatttacatcaaattgccaattcatctaggacggtaggaaacagacttgc

SEQ ID NO: 126417 - DNA, 996 bp, Zea Mays
atggagcgctactcttgctgccgttgggtgcttgcgtgttctatccttgccctgtgcctcggtgggcagggcgcgaggtgccagctgacgtcggatttctacgacagcacctgccctcagctgtactacgtcgtgcagcagcacgtgttcgacgccatgagagaggagatgaggatgggcgcctccctcctcaggctgcatttccacgactgctttgtcaatgggtgtgacgcttcgatccttttggacggcgacgacggcgagaagtttgcgctgcccaacctcaactccgtcagagggtacgaggtcatcgacgccataaaggctgacctcgagagcgcgtgccccgaggtggtgtcgtgcgcggacgtcgtagccctcgcggccagctacggagtactcttcagcggagggccttattacgatgttcttctcgggaggttggacgggcgggtggccaatcagtccggagccgacaacggtttgccgtcgccgttcgaacccgtcgactcgatcatccagaagttcgccgccgtcggcctcaacacgaccgacgtcgtggtcttatcaggagcccacaccatcgggcgagcccggtgcgcgctgttcagcaaccggctgtccaacttctcggccacggattcagcggacccgacgctggaggccagcctcgccgacagcctccagagcctctgcgcgggcggcaacggcgacggcaacgagaccgccgcgctcgacgtcagctccccctacgtgttcgacaacgactactacaagaacctgctgacggagcggggcctcctgtcctccgacctgggcctcttctccagccccgaaggcgtcgccgccagcaccaaggatctggtggaggcctacagcagcgacggcgaccagttcttctacgatttcgtctggtccatgatcaggatggggaacatcccgctcgccgccggctccgacggggaggtccgcaagaactgcagagtagtcaactaa

SEQ ID NO: 126418 - DNA, 256 bp, Zea Mays
agatgccatgtctgatgtatgcagccacgccacttcgcaactacaactggcagagcttacaccattctactacggtttagtttaatcacctgtatcatcatcacaacagtgagagatccatccatgccacaaacgggcatatgagagagctggagtgtgccttttcatcaccttcttgacactggcagcagctactaataaaaaactactaattaactactactaatactattatttatgcctactactcactcac

SEQ ID NO: 126419 - DNA, 1774 bp, Zea Mays
agcgtgctcgctacgctaggacgacgaggaggaaatggcgcaaggggccgccggcgtagtagacacgaggaggcatggcggcaagccgcacgcggtggtggtggcgtacccgctgcagggccacgtcatccccgtggtgcacctggcgctgcggctcgcggcgcggggcttcgccgtcaccttcgttagcacggaggccgtgcacgaccagacggcgcgcgcgctgggcgtggacccggacgggtacgaccccttcgcggccgcgcgcgctcgggcgcaggaggaggggccgccgccgccgccgctgggcgacgtgtcatacgcgctggtgagcgacggcctccccgtgggcttcgaccggtcgctcaaccacgacgacttcatgggcgctctgttccacgcgctgcccgcgcacgtcgagcagctgctccgccgcgtcgtcgtcgaacccagagccacgttcctcgtcgccgacaccttcttcgtgtggcccgccactctggccaggcgcctcggcatcgcgtatgtgtcgttctggaccgagccggcgctcatcttcaacctctactaccacatcgacttgctcacccagaacggacactttagatgcaacgagcctcgcaaggacacgatcacctacatcccgggcgtggcggccatcgagccgagcgagctcatgtcgtacctgcaggagacggacaccacctccatcgtccaccgcatcatcttcaaggcgttcgacgaggcccgcggcgccgactacgtgctctgcaacaccgtggaggagctggagccgtcgaccatcgcggcgctgcgcgcctacaggcccttctacgccgtggggcccatcctcccggcgggcttcgcgcgcagcgccgtggccacgtccatgtgggcggagtccgactgctcccggtggctggacgcgcagccggtcgggtccgtgctctacatctccttcggcagctacgcgcacgtgaccaagcaggagctgcgcgagatcgcgggcggcgtgctggccagcggcgcccggttcctgtgggtgatgcgcccggacatcgtgagctccgacgacccggacccgctgcccgaggggttcgccgaggccgcggcggggcgcggcctggtggtccagtggtgctgccaggtggaggtgctctcccacgccgccgtcggcgccttcctcacgcactgcggctggaactccgtcctcgagagcgtgtgggcgggcgtgcccatgctgtgcttcccgctgctcacggaccagctcaccaaccgccgcctcgtcgcgcgggagtggcgtgccggcgtgtccgtcggagaccgcggcgcggtgcgcgccgacgaggtgagggcgcggattgaagcggtcatgggcggggaagacggcctcaagctcagggagcaggtgaagaagctcaggggcacactcgaggctgccgtggcgtccggtggttcgtcgcggcacaacttcgacgagttcgtcgaggagctgaagcgccggtgcggaggccgctgatccgaaagctcgaggacggcagctgaggtagccccagaatacgtgtgcgatgtacgccttgtatcgtgtgcgtcacataaaaaactgtcttcaatcttgatcgaagcgtgtatgccgtgtacggtgggcattattgttgtgcagggttgatgtgatgtctacctttggcccctttggctgaagtgtatacttgtatctgctccaagcctccaaggttaacaatttcaacaagattggaaatccagtaatagaccg

SEQ ID NO: 126420 - DNA, 1415 bp, Zea Mays
cccccccccccaaccccccaaaaaaaaatccggtcgatcctagctcgcgatgttctccggcaccggaccctccggcggggcagcccactctacgtccaccggtggtgggggtggctcgccttccgacaggggcggccccgcgccctcggcctcggcgtcggtctccacgccagccagcgagagcaccgtcgcccgccgcctaaacggacttgacccccacggcgacgacgctccatcgtcgcagccagccacgagcaagaagaaaaagagaggggcacgagcagttggtcctgacaaaaatggccgtggattgcgtcaatttagcatgagagtatgtgagaaagtcgaaagcaaagggagaacaacctacaatgaggtggcagacgaactggttgctgagttttcagatcccaatattaatattgactctccagatcctgataattcgtctgcgcaacaatatgatgagaaaaatatccgaagaagagtttatgatgcgctgaatgtcctaatggctatggaaattatatctaaagataaaaaggaaatacagtggagaggtctgcccaagacaagtatgaatgatattgaagaactgaagacagaggtcaatggactgaaaggtcggattgacaagaaaaatgcatatctgcaggatttacaagatcaatatgcatgtctgcaaaacttggttcggcgaaatgagcagctatatgggtcaggagatgcaccttccggtggagtggccttgccatttatactagttcagacacgtcctcatgcaactgtagaagtggagatatcagaagatatgcagcacgtgcattttgatttcaatagcactccatttgagttgcaggatgattcatttgtactgaaagcaatggcattatctggcgaagaagctgattgtacccaagctcctggtgcgaatggaggcgagtgctcaagtacacggaacaattattggcaccaccaccaacaaccgcagcctccagggccaagagtagttagggtaccaaactcgcctcctattccagggatactaaaagggcgtgtcaagcatgaacactaggcttcaatatgcttagtggtgtcaaatgagctatttactttattgtccccagctagttttacctgtagaaaatgcatgtaaattatgcctgtaggggcagccgcagtctaatttgacttcgctgatggatagttcgatttgtgtcatgatatgccatacgcctagctcacgttaactcctagtattcagttgtttggtcgaggaaaagagtctgtggttaagtgtaattgtgtagtttatcttcaaacagtcggcatatcgtatctatgggacgatttgaggaacagtgttgtcagtacactccaattgatatacaataaaatgcaaatgtttgtttaca

SEQ ID NO: 126421 - DNA, 997 bp, Zea Mays
cacgtgtctctctgtggcctggcatcgtggcgcgtggctggtgtcgtcgttcacgccgctcaccacgagccttgcttcttcacgtcacctcctcctcacacattttccctctcacctctcaatccatggacaccctccctgctctgatcccccccgatgctcgctgtgggtgccgtttgctgccccaacgccgttccgcgccccctccactccggccatgagctcctcccagtgaatccctctagtcccctgctcatctcccatggtggccgcagggagctctggatccatggccgtcggcctctgggcgtgagcagcccttggctctctcccctgcgacagacttcctccacggtgtctttttccccaaccatggtggccggctccctgctcctccattcggtgcccctggttcagggccggtcgacctccggcgacctcctccccatggcacagcaggccgacgcccctgcctctactccatcttccccattggacagcacgagctcctcctcgccgatacgccagcaaccctgcagcagcgccactcgatctcctctatacgtgaacaacagcaacccggatcccatccacgtcgtatgcgtcgatccgatctgtgcagtcccaacccacgacgtcgcaacacccttgccctccgtcgatgtcacgcttcgctcatcgctcctcgacgaagagccgtaaccgtggtagacatgcatgtgcgatccgaactgatttcaccaggttgttcgctttatatgattctagtttgctctaattaggtgtgatcgatggcgtgaatatgtgtgtgaaaatgtatgtgtataaatggggataagtttagtatattaaatgggatagttgatagtatttgtttgtgctatcatgttaatgttatggtatggtgaatcaatgcttcactttaacaaccctcacctgttgtacgtggcgagtggttaaatgtttttttaatcgattaaaggctccgtacgagtgt

SEQ ID NO: 126422 - DNA, 1875 bp, Zea Mays
cacaaacagatcaagcttattatatacgcaattaagtaggtagccacgatggaggacaaggtgctcctcgccgtggccatggtggcgctgatcgccgtcctctccaagctcaagtcgttgctcgagaccaagccgaagctgaacctgcccccagggccatggacgctgccattgatcggcagcatccaccacctcgtcagcagcccgctgccctaccgagcgatgcgcgagctcgcacacaagcacgggccgctcatgatgctgtggctgggcgaggtgcccacgctggtggtgtcgtcgccggaggccgcgcaggcgatcaccaagacgcacgacgtcacgttcgccgaccgtcacatgaacagcaccgtcgacatactcaccttcaacggcaatgacatagtgttcgggacgtacggcgagcagtggcgccagctccgtaagctcagcgtgctggagctgctgagcgtggcgcgggtgcagtcgttccagcgcatccgcgaggaggaggtggcgcggttcatgcggaacctggccgcgtccgccggcgccggtgccaccgtcgacctgtcgaagatgatatctagcttcatcaacgacaccttcgtcagggagtccatcggcagccggtgcaagcatcaggacgagtacctggatgcactgcacactggcattcgggtggccgcggagctaagcgtagctaacctcttcccgtcgtctaggctgttgcagagtcttagcacggcgcgacgcaaggcggtagcggcccgcgacgagatggcgcgcatcctcgggcagatcatccgcgagaccaaggaagccatggactggggtgacaaggcttcaaacgagagcatgatctccgtcctgctgaggctgcagaaagaggccggcttgcccatcgagcttacggacgacatcgtcatggcgctcatgtttgacttgtttggcgcgggcagcgacacctcgtcgacaacgctaacctggtgcatgacagagatgatccggtacccggccacgatggccaaagcgcaggccgaggtccgggaggccttcaaggggaagaccacaatcacggaagacgacctgtccagggcaaaccttagctacctcaagctcgtggtgaaggaagcgctcaggttgcactgcccggtgccgctcctgatcccacgcaaatgccgcgagacatgccagatcatgggctacgacatccctaaagacacatgcgtgctcgtcaatgtctgggccatctgtagggactctaggtactgggaagatgccgacgaattcaagccggagcggttcgagaactccagcctagactacaaagggacaagccacgagtacctcccgttcgggtctggccgtcgaatgtgcccaggagggaaccttggagtggccaacatggagcttgcactagccagccttctgtaccatttcgattggaagctaccaagtggacaggagcccaaggatgtggatgtttgggaggctgcaggactggttggaaggaaaaacgcaggcctggttttgcacccggtcagccgctttgctccggttaatgcctaattgacgccgtcggcgccatatataagctgcacgaaccagtatgcgcgtgctttagtgatatattatgagaaaataaatccaaccagtttggcctcgtttgtattagaaatactcgtttgctacatctctttgtgtgtctatctatctatgtatctatacttatctacctaatattaaagagtcataacattttcccctttttttttcttggtcgtccgtattctcctaacttactttgtgaatgtgaaaaacagtctttgttcatctctatatacaagtctcctgttttatatgacagtagggaat

SEQ ID NO: 126423 - DNA, 417 bp, Zea Mays
atgatgctggccgtgacagtgagccaggtcgtggcgctgctctcatcggctctctccggcaccgagggtggcagcggtgtggcggttgcggtcggtacggcaaaggcggtgggagccgagcagggcgagcgctggcggcggcgctgcggcgggcacgacgaccacccggcgtcggcggcggggtactgctgcgtgtgcatatcggcgtgccgcgacggggacgacgtccggagcctgccctgcggacacgccttccaccgggactgcgtcgaccgctggctggcgctttgccggcggacgtgcccgctctgccgtctccacgtcggcggacctgccgtcggtttggccgagcagcagcagcagctcagcgaggacctcgtcatctggttctcttcgctctttgtcgctggcttgtag

SEQ ID NO: 126424 - DNA, 633 bp, Zea Mays
atgcaacaacaactaagaatagcaaatttggtgttcgtaccgttgctcgagtctaagagaaacaaagaatttcaggataagctagagcaagttgtagcacaaatgctcctatatcagttcgttggtgccaagcggaagagccaaaactcagaatcagtcgattcatctggagaagagcttgttattcaaaggctagagattgcgaagaatgatctacaaaacagagttgccaaagaggttacagggaatgcaattctacatgcgagtttgcaaagaagaaaacaagcactacatgaacgcatattagctttggaaaaggatgtctccatgttgcaagaacagttacaagctgagagggatctgcgagctgcattggaagttggcttgagcatgccttctggacagttttcaagtgctcgttcgatggacatgaagacaaaggcagaacttgaggagattgctcttgctgaagctgatgttgcaaggttaaaacagaagccacagttcaagctatctaaacatccaaagttacaacaacgtcaacttgagggcaagctaaatcttcaggggacggtaatgtcatatacatatgatatcaggatcggcgatgaggccaatgtcagttcgttgtga

SEQ ID NO: 126425 - DNA, 654 bp, Zea Mays
ggatccaatctgatttcaagctcactttattatgtgatatatacagactcatggaataaaagcaaactccatacttatgactggtataagatagtctagcactagtctaaaacctaacctgaccacaataatctaagatgccagtttaggagctggcagacaaaactcatactactatgggcttgacatagataagctatacactaaagatgaaagcgatgcactttttggatcttcagagaagcttgttctgtgccaccgcttcgcaaagctcctcctcgtaccgtaaaactctgggcgatgaagcagctttacacgcatgtcttggcagccacggtggcacccagcgtcggagacgcttcgaaggaaaaggtgtcgaagactccgggaagagaacagccgtgattggcttcacgtcgaccagcttgaggcgtgaaaggcgagcagcgtgttttggagccctcggtgtccttggggtggaaacgtgcacgtccttgccgttgattctaatgggcacgcaatgttattggatgaaattagtgttaccaaatcagcactatctgttgagaagataaaaatgcagctataccttaagaaaggccaatgctccgttggaagaggggttctattcaggagcaactcctgtctgcttct

SEQ ID NO: 126426 - DNA, 283 bp, Zea Mays
ttttttttgccagttggctatgatttttcttgttgcacttaagtcggagctggcggcggaggtgtacgctaagcagaaggtggatgaccagtgggcactgcacgtgtcgcaccacacatcggacatcctccactgctggatggagcagagctggctgcccacctccacggtggtgcaggctggcaccacgccgcagcccaacaagcgatgcctagatctagagcaagatgaaggcggatgacacgttccagcagaaatccatgggtcctactacctttctcta

SEQ ID NO: 126427 - DNA, 262 bp, Zea Mays
gataaaagaagtaggcgcaatgaggagtcatgttcattcacaagctctaacagagaaagttggggcagatgttcatatttaggtgcagccagtgatgaatcattctcaggcgataataatgataagcagttatccagtgtctgcattgatcgtatctgttatggtgtctgttaggtggattggctatgagtgtttgtagctggagatcaggagaataactttaaactacacctttctactttcaagaatctactcctggctg

SEQ ID NO: 126428 - DNA, 414 bp, Zea Mays
ttaagtagtattccagaaagatataacagcagatcagatatgacaattcttgccatatcgtaattcagtgcttgctctgctggaaggttggcagcttgatcattccaccctgaattaacattattaaactgggatgcctgatcataggacgttccagcacccccgttcggatacagcgtcgcctgttgcgactagaaaggctgctgagttggagtgttgtatgcctgagatcctggaatagcagaacttagattgagaccaaaggggtcagctgcttgagttttgctgttaacggtgctgttctgtgaaaatattcgtttgacatcagttcattccatttaagtcggtgtatctataataatattacatatttatatcatcaatataatattaaagttacgatgatatttggtc

SEQ ID NO: 126429 - DNA, 1074 bp, Zea Mays
gcaggctctcgtttcagggagagggagcaaaagaaagcagaggaaatagaaatgcaagcggcggcggcgcggcggcctcgcgtgctcaccgagatcgacccgcacagcgagtgggtgcacgggcgcgcgctcgacgcgatcatgctggacgtcacagggttcagcaaggaccagctgaaggtgcaggtggagccgtgggggagcctcaaggtcagcggcgaccagggcgccgtcgacgggggtggcggcatgcagcggcgccacttcaccaagcggttcgacctccccgcaggctgcgacgtcgccgcgatcacggtccagctcgacaagggcatgctctacatccaggtgccgcgcccagcgggcgccgccgccgcctggtggggcacccagcagcagcagcagcagccggcggaggaggaggtgtacgaggacgcggttcggggagtggacgagaccggcgacgacgcccacggcggcggcggcctggcagcgcggcgagacggcgggcgtcacccgctgaggcggctcgcgaggggcctcagcaggcaccggcaggtggttctgaacgtcgtgctcgccgtcgtcctcctctggctcgtcgcgttcgccaagcacaagccgggcggcgggcaagccatgcatgacggctgaggcgaggcgctaggttgccgtggtgtcacggaagcaataccgtaccactcaaacatccaaaagcgtacctgggcccaccttgttgtatttgtgtctaatccttcttaattttatgatctaaaataagtttcacactgaccacgcatattgagacataggaaacgacagaaaattagttaaatctgtaaaaaaaaatcacgatctctttggcatgtacaacgagtaaggatatgtcattcaaaactgttattagctgcagcaatgccagcggcaaaacaggtgaccaagcaaaccaagcaggacgaggtagaagaagatatctctcacaaaccagcagagagaccaaccgtaacgctggcatgcgcctgcgagctggacgacgaaatcacatgacccacgacgagcgcaggaacagcgccg

SEQ ID NO: 126430 - DNA, 1486 bp, Zea Mays
aaaataatcatacctggtatgctaaatcgaaacaggagggagtctgtagtagtccagttcacaagtagcggcagctagctgctgttggctgttgcccttctccgaaagaaaactactcgagctgaggcggagtagccaaggagaagtcaatgccgttctagcagtccagctttcacatggagcaggtcaaacaccttattacgcttgacgctttgcagcagcgatctcgatctgtggaggattgcatcaacctgacaatctctcgagttcttcacctcctctctcccaacggcatccattcagcccttggatgaccaggcatggccgtgggaggcccctcctggcccaatttgcagtgcctggtgcggcggaagccggcgaccgctggctgggccgaagacgctgacaggggaggtgtccagcgcctcgccaagacgctatctattccccacctcgtcgccatcggtgtcggctcgacgattggcgccggcatctatgtcctggttggaaccgtggctcgtgagcacaccgggccgggactgacgctctcctttctgatagccggcgtcgccgcggctctttcagcattgtgctatgccgagctctcctgccgtttcccttcggcagggagtgcctatcactactcctacatctgcattggggagagtgttgcttggctgattgggtgggccttgatccttgagtacaccattggggggtcatcagtggcacgtggcatgtcaccaaacttggctctatttttcggtggccaagataagttgccattctttctagcacaggtgcatgtcaaaggcctcgacaccccagttgatccatgtgctgctattcttgtcctgatagttactgcattactctgtctgggaattaaagagagctcatctgtggaaggcatcatcaccactgcaaatatcatagtgatgctctttgtcatctgcgctggtggatggctaggattcaggaatggctgggttggttataaagtgccagaaggttatttccctaatggtatcagcggagttctctctggatcagcaaccctcttcttcgcattcattggcttcgacacagttgctagtacggccgaggaggtgaagaatcctcgacgcgatcttccattgggtatgggcctgaccttatccctgtgttgcttcctatatatgatggtttctgctgttgtggtcggtttggtgccgtaccacgcgatggatccggacacccctatttcttctgtgtttgcgcgatatgggatgcagtgggccgagtatgttgtttccagtggagctgttcttgctcttgtggcatccttgataggtggtattcttccccaggtatatgtatgaaccaaagtattgtcgagtctcctgtttcatttcagttgctttcctgcttctattaggactgagtaaaattaatgcaaaaactactgttttgaaatatgctggagctacataaaatatgtgagtcg

SEQ ID NO: 126431 - DNA, 2308 bp, Zea Mays
aaaataatcatacctggtatgctaaatcgaaacaggagggagtctgtagtagtccagttcacaagtagcggcagctagctgctgttggctgttgcccttctccgaaagaaaactactcgagctgaggcggagtagccaaggagaagtcaatgccgttctagcagtccagctttcacatggagcaggtcaaacaccttattacgcttgacgctttgcagcagcgatctcgatctgtggaggattgcatcaacctgacaatctctcgagttcttcacctcctctctcccaacggcatccattcagcccttggatgaccaggcatggccgtgggaggcccctcctggcccaatttgcagtgcctggtgcggcggaagccggcgaccgctggctgggccgaagacgctgacaggggaggtgtccagcgcctcgccaagacgctatctattccccacctcgtcgccatcggtgtcggctcgacgattggcgccggcatctatgtcctggttggaaccgtggctcgtgagcacaccgggccgggactgacgctctcctttctgatagccggcgtcgccgcggctctttcagcattgtgctatgccgagctctcctgccgtttcccttcggcagggagtgcctatcactactcctacatctgcattggggagagtgttgcttggctgattgggtgggccttgatccttgagtacaccattggggggtcatcagtggcacgtggcatgtcaccaaacttggctctatttttcggtggccaagataagttgccattctttctagcacaggtgcatgtcaaaggcctcgacaccccagttgatccatgtgctgctattcttgtcctgatagttactgcattactctgtctgggaattaaagagagctcatctgtggaaggcatcatcaccactgcaaatatcatagtgatgctctttgtcatctgcgctggtggatggctaggattcaggaatggctgggttggttataaagtgccagaaggttatttccctaatggtatcagcggagttctctctggatcagcaaccctcttcttcgcattcattggcttcgacacagttgctagtacggccgaggaggtgaagaatcctcgacgcgatcttccattgggtatgggcctgaccttatccctgtgttgcttcctatatatgatggtttctgctgttgtggtcggtttggtgccgtaccacgcgatggatccggacacccctatttcttctgtgtttgcgcgatatgggatgcagtgggccgagtatgttgtttccagtggagctgttcttgctcttgtggcatccttgataggtggtattcttccccagccaagaattataatggccatggctagagatggattgctcccgccactgttctcagatgttaatcgaaaaactcaagtgccaatcttgagcacagtcttaattggcacatgtgcttctgtcctggcctttttcatggatgtctcccaattggcagggatggtaagcgtgggaaccttattggcatttactgcggttgccatttctgttttagtagtaagatatgctcctccgtatgagatgccaatggaagtggcccttgcagtagcttcattctctgggcacttagagcatgatgagcaaaattcagaagatccttttagcaatgttcaagaagcgcttgatgtcagtgaggtagccagagaagtaaggcgacagaaagccattggaagcatagtgttgatatgcgttggagccatcatcttgatttctgcggtttctgtctcctttttgccattttatgtgcaaaggatcgcatgcactgtaggcgggctggcagtgttgggttcttctattgtgcttttgtgcattggacaagacaagaagttcttgggacaaactggaggtttcatgtgcccgttggtcccatttcttccagtctgttgcatcatggtcaacttatacctgcttatgaacgtcgggagtcacacgtggattcgtgtttccatatggctggtggctggggccctcatatacatcttctatggcatgaagcatagttcactggcaagcatggcctaccatcgcatatcacctttgtagttcaacgtttggctagaggtcttttgcattttgatagcagaaaatgagaacacgtggcggctacagaagctgtttctcaaaggtgtcgggggcggggatagtcttatccctgcagttttgaaggacaagatgaccaggagaatgaacatatatagtcacatgtaccgaaagtacagaaattctgtctggttggaacgaga

SEQ ID NO: 126432 - DNA, 2028 bp, Zea Mays
ctcgagctgaggcggagtagccaaggagaagtcaatgccgttctagcagtccagctttcacatggagcaggtcaaacaccttattacgcttgacgctttgcagcagcgatctcgatctgtggaggattgcatcaacctgacaatctctcgagttcttcacctcctctctcccaacggcatccattcagcccttggatgaccaggcatggccgtgggaggcccctcctggcccaatttgcagtgcctggtgcggcggaagccggcgaccgctggctgggccgaagacgctgacaggggaggtgtccagcgcctcgccaagacgctatctattccccacctcgtcgccatcggtacctttttttttgtggcatgcagtctctggagctggagaggggttttgtgctttcactgaatctacatctactactgctctgtcagatttagacaatgcaatacgtgcctcacttgaacatgcatgatcctcaggtgtcggctcgacgattggcgccggcatctatgtcctggttggaaccgtggctcgtgagcacaccgggccgggactgacgctctcctttctgatagccggcgtcgccgcggctctttcagcattgtgctatgccgagctctcctgccgtttcccttcggcagggagtgcctatcactactcctacatctgcattggggagaggtacatgtgcaaatgcacactggcaacggtttcttgttattttcccatctgtattatactcagtgcacatcataattaaggaggaaccgtgggttccttgctcaccttagccttttgatcttcatgacaaactccggaaaactgtgcccagtgttgcttggctgattgggtgggccttgatccttgagtacaccattggggggtcatcagtggcacgtggcatgtcaccaaacttggctctatttttcggtggccaagataagttgccattctttctagcacaggtgcatgtcaaaggcctcgacaccccagttgatccatgtgctgctattcttgtcctgatagttactgcattactctgtctgggaattaaagagagctcatctgtggaaggcatcatcaccactgcaaatatcatagtgatgctctttgtcatctgcgctggtggatggctaggattcaggaatggctgggttggttataaagtgccagaaggttatttccctaatggtatcagcggagttctctctggatcagcaaccctcttcttcgcattcattggcttcgacacagttgctagtacggccgaggaggtgaagaatcctcgacgcgatcttccattgggtatgggcctgaccttatccctgtgttgcttcctatatatgatggtttctgctgttgtggtcggtttggtgccgtaccacgcgatggatccggacacccctatttcttctgtgtttgcgcgatatgggatgcagtgggccgagtatgttgtttccagtggagctgttcttgctcttgtggcatccttgataggtggtattcttccccagcgatccaagcaagatgacgtgagaggcggtggccgcaaccacaagcggagaggagctcgacggggcgcgccgcagggagatctctgggcgaggagaggacctcgacgaggcgttggcgtctcggtggccatgaagccgtggaggtctctgggagctggcggcagggcgacgaggagctggcggctgggtggaatcgcgacgaggagctggtgaaggagcggcctagcggcggtgtggactggcggcgaggagctagtggtggagcctggcagtggggcggccgacgacgatgaaatggggatggggatcgatttctaggaacatagaagatggggatgttcgttgtgggctccacctgtagcaacaaacgtgggcccatgctgtcaggcacgttaactgtgatggagacggtgtgcgagtgtttctctgagcaaaggaacgggtccgtgggcaaaactaagcaagaagaaaaactaagggtagagttgagtaacaaggcacaactaa

SEQ ID NO: 126433 - DNA, 1921 bp, Zea Mays
gctttcactgaatctacatctactactgctctgtcagatttagacaatgcaatacgtgcctcacttgaacatgcatgatcctcaggtgtcggctcgacgattggcgccggcatctatgtcctggttggaaccgtggctcgtgagcacaccgggccgggactgacgctctcctttctgatagccggcgtcgccgcggctctttcagcattgtgctatgccgagctctcctgccgtttcccttcggcagggagtgcctatcactactcctacatctgcattggggagagtgttgcttggctgattgggtgggccttgatccttgagtacaccattggggggtcatcagtggcacgtggcatgtcaccaaacttggctctatttttcggtggccaagataagttgccattctttctagcacaggtgcatgtcaaaggcctcgacaccccagttgatccatgtgctgctattcttgtcctgatagttactgcattactctgtctgggaattaaagagagctcatctgtggaaggcatcatcaccactgcaaatatcatagtgatgctctttgtcatctgcgctggtggatggctaggattcaggaatggctgggttggttataaagtgccagaaggttatttccctaatggtatcagcggagttctctctggatcagcaaccctcttcttcgcattcattggcttcgacacagttgctagtacggccgaggaggtgaagaatcctcgacgcgatcttccattgggtatgggcctgaccttatccctgtgttgcttcctatatatgatggtttctgctgttgtggtcggtttggtgccgtaccacgcgatggatccggacacccctatttcttctgtgtttgcgcgatatgggatgcagtgggccgagtatgttgtttccagtggagctgttcttgctcttgtggcatccttgataggtggtattcttccccagccaagaattataatggccatggctagagatggattgctcccgccactgttctcagatgttaatcgaaaaactcaagtgccaatcttgagcacagtcttaattggcacatgtgcttctgtcctggcctttttcatggatgtctcccaattggcagggatggtaagcgtgggaaccttattggcatttactgcggttgccatttctgttttagtagtaagatatgctcctccgtatgagatgccaatggaagtggcccttgcagtagcttcattctctgggcacttagagcatgatgagcaaaattcagaagatccttttagcaatgttcaagaagcgcttgatgtcagtgaggtagccagagaagtaaggcgacagaaagccattggaagcatagtgttgatatgcgttggagccatcatcttgatttctgcggtttctgtctcctttttgccattttatgtgcaaaggatcgcatgcactgtaggcgggctggcagtgttgggttcttctattgtgcttttgtgcattggacaagacaagaagttcttgggacaaactggaggtttcatgtgcccgttggtcccatttcttccagtctgttgcatcatggtcaacttatacctgcttatgaacgtcgggagtcacacgtggattcgtgtttccatatggctggtggctggggccctcatatacatcttctatggcatgaagcatagttcactggcaagcatggcctaccatcgcatatcacctttgtagttcaacgtttggctagaggtcttttgcattttgatagcagaaaatgagaacacgtggcggctacagaagctgtttctcaaaggtgtcgggggcgggggtttcttaggctatccgcaagcgttaaccctaaatttttcttctatatcacttttttgggtcacatcatcagcatttcatcccctatgtttttatc

SEQ ID NO: 126434 - DNA, 247 bp, Zea Mays
taataataataataataataataataataataataataataataataataataataataataataataataataataacaacaataacaataacaacaacaacaacaacaacaacaacagcaacaacaacaacaacaacaacaacaacaacaacaacaataataataataataataataataataataataataataataataataataataataataacactgtgtacggcctcgtcacatgtctc

SEQ ID NO: 126435 - DNA, 1095 bp, Zea Mays
atcgctggagaaggaggtccaagtgggccgggtcgaaagaaacttcgactgccctgctccaagcggccctccctcctctccttatccctcgtgcttatccaacgaacgaaccaatcccattccgtcggccatggcgaccgccacgctgctgggctcctcctttgccattcccgccgcagcccgtagggcgtcctcctctgcctccacctccttgggcttcgccacgtcgcagctcgccggcctctccctctccgcgggcgccgcaactccaaccgccgtcgccttcctcccaaagaggcagcagctccagcccattgtcgcgcggcgggtgtgccctttcacgggcaagaagacgaaccgggcgaacaaggtgtccttctccaaccacaagacgaagaagcagcagttcgtgaacctgcagtacaagaagctgtggtgggaggctggcaagcgcttcgtcaagctgcgcctctccaccaaggcgctcaagaccatcgagaagcacggtctcgatgctgtcgcgcgcaaggccggcatcgacctcaacaagaagtgagaacagccaaactatggtgtggtggcacactggcatcgaccccagtttgatttgtgtaccataccaatcagtgtaggcagatcgaggttgcacatgctgtgggtctgtttagttcagcttttttctgaccaacttttctgaaaatctggatacgaggagaatctagctgtggggagaacctgagtatcattacgattacgtgtgaagaaggataaagttgttcatagggctcaagatctagaaattgacggattcctactattacaacaactcaaccgattatgtatttatattgattttggatggtttttgtcccaacgaattttatagaagctagctgaaaagctgagcgtttggcagtccgcagcagtttttggtggccagaagctgccagaagccgaaacaaacagggcctatatgtttttggtctcgtgttgcgagctaagtgtgtgtttggtctgaggaattaagttatctgtcttcttgtttcttatttttatttagtttatagaatatttgatttaatccatcaccacctc

SEQ ID NO: 126436 - DNA, 207 bp, Zea Mays
cctaaccactcgttcctcgtggcctccaccatccccttcgtgggatccgcatccacggccgggccagcctccctcatcatcggcccctactcggtaccgttccttctccccactcccgcctccgcctcctctcgtcgtgttgtctgcggcgagctctacgccccatcccacgccgcgctcgccgagctcgatgccttcgaggcaagc

SEQ ID NO: 126437 - DNA, 604 bp, Zea Mays
cctagattcttttattatctgtctccgcctagcaaagaaactaacctagaattagagcaaagagattgcataaaggagggagcactggagcagtgacaacagtatagagatcgccaggtctgcttgcctgtctaaagagaggaaggcaacaagagatggacgagaccatgaacaaggtgggtgcttactggctagggtcgctggccaacaatgagatctccttggcaggcgacgaccttgaatcgctctcgaccaacgtcggggatggagcgaaatggctggtgaacaagttaaaggggaagatgcagaagcctctagcggacctgcttagcacaaccttcctatgggcattctcccaagcaagacgaccaaatacgagttcgcgtcgactctgagctgtggtttgattccacgatgtcaggtatgctgggcgagggccgcctcacgcgaaggtggacgagatcaagaccaaggtgctcgtctgggctagggtcaccattgtcaaggccgccgtcgccaaggtcttcactatgaggagatcaagtggtcgcacaaccaggacgcctacgaggtcatcaggggcggcatcaccgtcgacgagttc

SEQ ID NO: 126438 - DNA, 462 bp, Zea Mays
atgggactcacgcctggcactgcccgcggcacagtatcccgcccgccgctccgacgcagacccgcgcggtcgacgtacgacggggtagccgaatccgccgtagatcagggtgccatgcagggtgagggatcccatgcgccgcccggtggtcagatcaggggcgccttgcagggtgagggctcccatgcgccgcacgggtcagcatcacgagatcaaggacgtgcaagtcaggaactggacaacgcagcgcagggacgcgccggtcgtggcactagttctgtgaaacgtggtgtgatacgcggtagtaggagtgccggaaggagcattcgtggtggccgaagtgttggtattgacatcgatttaaatgctcaaggtcaggaagatgatgaaccaattgaagttgaagctgaaattactgcaaataattcggtgagtaattttctaacatatggccattgctaa

SEQ ID NO: 126439 - DNA, 794 bp, Zea Mays
aagagaacgccttgatatacgacagtattaacgcattaaactagccagaatggcctcatttagacaggaaaacaaaaaatttatttcaaaaataaaagaaaaaagatactaaaatgctaactcaattacaaagggatcctaggaacaccacctcctcttccaatgcacaggcgacacttagccaaccacttggaggtgcaggtcgattttgttttatttcttgatttcggactacggctaccacttggaggtgcaggtcgaacaaaaagaaaggctacggctctgttcttgatttcggacgaacacaaccacagaacgggaccctcttctttttcttctgcccgccaccgcggtccttcctcccatacagatagtccctcaaaagcacgcgagtgcgcttatcagagactttgagccttctgtactcgtgctcttcctcaagcttcagcaagacatactgaatcttctgaagctccagttccaaccttgccacattctccgaccctttctgcacctgctcggagatcttcctcctgctggaatacccttctcgctcggtgctcatattatctgacagtgtggggtagttctcagccgtcctagtcaatttgttgttcagattgatctgttccaagacatggccctctgtctcatgcacctgagcgctcacactgctgtactcagagttcataggggattttccctttgactgcccctccattttctgcttcagctcttcaatgctcgcttggatgctcaacagcctctgagcatcagaagtgagcctctcaagt

SEQ ID NO: 126440 - DNA, 1299 bp, Zea Mays
atgccagccaactttttctgcaactcctcaatcttgttgaggttcatcgctcaaccccgtcgcaaccgcaacgtccatctccccgtcctcgctgcccggaggcctggcacacctcccagtagcagcggcctcccgaagcattgtttcaagtggttattaggcttcatggatatgtctcaagagcaagaacaggattttggcgtactgctgaagcaaggtgcagaagggagggtatttgcttcgacatttgtgggacgaaagtgtgtaatcaaagagcgtttttcaaaaaagtaccgacacccattgttggactcgaagttgactctaaagcgcttaaatgctgaagctcggtgcatgacaaaagcaagaaggcttggtgttcctaccccagtactttatgctgtggatccagttctgcatactttgacctttgagcatgtggatggcttgtctgtcaaggatatacttcttaggtttggttcagatggggtcaatgaggaacgcctgaatgatattgccacacaaataggaaatgccattggcaaactacatgatggaggccttgttcatggtgattttgaccacgtcaaacatgataattaagaacagtaacaatcaattggttcttattgattttgggctgagtttcacttcgacaattcccgaggacaaagcggtggacctatatgtgctagagagagctttgatttccatgcattcgtcctgtggggatgtgatggagaaaatcctggctgcgtacagaaaggcttcgaagcaatggtgctccacccagaacaagctggctcaagtgaggcaacggggcaggaagcgcaccatggtcggatgaatggagaagaagaaaaatatgtggcatggaatggatgtatgttattagaaagaccgtcgtctaaaacgagagtgatgtaccaccattgctgtatttttttagcggtgagtggctttggctgctgtaacgtttgtgaaatctggaaatatgttgcctggctgcaccatttggtcagaactcagaagcagagtgtcgtttcatccggaagtgggagaagttttattcgtttctcatgcatgataactggaagacatggttggggtatggcttgcttgtttgtgccctccattgacatgatcatcatggcaaatgtgttgccagtgttgtgggtgagggtggacccctaccgcacggtggagtgggtggagtggcgataggtcaaagaaacgacaggctgcttctgagatgagtatcttgcatccctagggtttattttaagttgtattgcctct

SEQ ID NO: 126441 - DNA, 1438 bp, Zea Mays
ccctgatttcccctgcgcactgcttctccccacggcgcacgcgcaccatctcctgcgcgccgccagtccggcttctcctggctcctgcgcgccgccagccgtcagcccgtcaccgattggagatccttggaaacctgcgcgccgccagcccgtcaccgcttggagacccgctcagccgcgcttccctgcgcgccgccagccgtcgccgatccgtggccgcgtccgccgccgccagctctgaggtcgcgccgtcagccagcccgtctgccgtcgtgagcattgtttcaagtggttattaggcttcatggatatgtctcaagagcaagaacaggattttggcgtactgctgaagcaaggtgcagaagggagggtatttgcttcgacatttgtgggacgaaagtgtgtaatcaaagagcgtttttcaaaaaagtaccgacacccattgttggactcgaagttgactctaaagcgcttaaatgctgaagctcggtgcatgacaaaagcaagaaggcttggtgttcctaccccagtactttatgctgtggatccagttctgcatactttgacctttgagcatgtggatggcttgtctgtcaaggatatacttcttaggtttggttcagatggggtcaatgaggaacgcctgaatgatattgccacacaaataggaaatgccattggcaaactacatgatggaggccttgttcatggtgattttgaccacgtcaaacatgataattaagaacagtaacaatcaattggttcttattgattttgggctgagtttcacttcgacaattcccgaggacaaagcggtggacctatatgtgctagagagagctttgatttccatgcattcgtcctgtggggatgtgatggagaaaatcctggctgcgtacagaaaggcttcgaagcaatggtgctccacccagaacaagctggctcaagtgaggcaacggggcaggaagcgcaccatggtcggatgaatggagaagaagaaaaatatgtggcatggaatggatgtatgttattagaaagaccgtcgtctaaaacgagagtgatgtaccaccattgctgtatttttttagcggtgagtggctttggctgctgtaacgtttgtgaaatctggaaatatgttgcctggctgcaccatttggtcagaactcagaagcagagtgtcgtttcatccggaagtgggagaagttttattcgtttctcatgcatgataactggaagacatggttggggtatggcttgcttgtttgtgccctccattgacatgatcatcatggcaaatgtgttgccagtgttgtgggtgagggtggacccctaccgcacggtggagtgggtggagtggcgataggtcaaagaaacgacaggctgcttctgagatgagtatcttgcatccctagggtttattttaagttgtattgcctct

SEQ ID NO: 126442 - DNA, 1446 bp, Zea Mays
ccctgatttcccctgcgcactgcttctccccacggcgcacgcgcaccatctcctgcgcgccgccagtccggcttctcctggctcctgcgcgccgccagccgtcagcccgtcaccgattggagatccttggaaacctgcgcgccgccagcccgtcaccgcttggagacccgctcagccgcgcttccctgcgcgccgccagccgtcgccgatccgtggccgcgtccgccgccgccagctctgaggtcgcgccgtcagccagcccgtctgccgtcgtgaggtactgagcattgtttcaagtggttattaggcttcatggatatgtctcaagagcaagaacaggattttggcgtactgctgaagcaaggtgcagaagggagggtatttgcttcgacatttgtgggacgaaagtgtgtaatcaaagagcgtttttcaaaaaagtaccgacacccattgttggactcgaagttgactctaaagcgcttaaatgctgaagctcggtgcatgacaaaagcaagaaggcttggtgttcctaccccagtactttatgctgtggatccagttctgcatactttgacctttgagcatgtggatggcttgtctgtcaaggatatacttcttaggtttggttcagatggggtcaatgaggaacgcctgaatgatattgccacacaaataggaaatgccattggcaaactacatgatggaggccttgttcatggtgattttgaccacgtcaaacatgataattaagaacagtaacaatcaattggttcttattgattttgggctgagtttcacttcgacaattcccgaggacaaagcggtggacctatatgtgctagagagagctttgatttccatgcattcgtcctgtggggatgtgatggagaaaatcctggctgcgtacagaaaggcttcgaagcaatggtgctccacccagaacaagctggctcaagtgaggcaacggggcaggaagcgcaccatggtcggatgaatggagaagaagaaaaatatgtggcatggaatggatgtatgttattagaaagaccgtcgtctaaaacgagagtgatgtaccaccattgctgtatttttttagcggtgagtggctttggctgctgtaacgtttgtgaaatctggaaatatgttgcctggctgcaccatttggtcagaactcagaagcagagtgtcgtttcatccggaagtgggagaagttttattcgtttctcatgcatgataactggaagacatggttggggtatggcttgcttgtttgtgccctccattgacatgatcatcatggcaaatgtgttgccagtgttgtgggtgagggtggacccctaccgcacggtggagtgggtggagtggcgataggtcaaagaaacgacaggctgcttctgagatgagtatcttgcatccctagggtttattttaagttgtattgcctct

SEQ ID NO: 126443 - DNA, 1552 bp, Zea Mays
ccctgatttcccctgcgcactgcttctccccacggcgcacgcgcaccatctcctgcgcgccgccagtccggcttctcctggctcctgcgcgccgccagccgtcagcccgtcaccgattggagatccttggaaacctgcgcgccgccagcccgtcaccgcttggagacccgctcagccgcgcttccctgcgcgccgccagccgtcgccgatccgtggccgcgtccgccgccgccagctctgaggtcgcgccgtcagccagcccgtctgccgtcgtgaggtactgagcttgttgaggttcatcgctcaaccccgtcgcaaccgcaacgtccatctccccgtcctcgctgcccggaggcctggcacacctcccagtagcagcggcctcccgaagcattgtttcaagtggttattaggcttcatggatatgtctcaagagcaagaacaggattttggcgtactgctgaagcaaggtgcagaagggagggtatttgcttcgacatttgtgggacgaaagtgtgtaatcaaagagcgtttttcaaaaaagtaccgacacccattgttggactcgaagttgactctaaagcgcttaaatgctgaagctcggtgcatgacaaaagcaagaaggcttggtgttcctaccccagtactttatgctgtggatccagttctgcatactttgacctttgagcatgtggatggcttgtctgtcaaggatatacttcttaggtttggttcagatggggtcaatgaggaacgcctgaatgatattgccacacaaataggaaatgccattggcaaactacatgatggaggccttgttcatggtgattttgaccacgtcaaacatgataattaagaacagtaacaatcaattggttcttattgattttgggctgagtttcacttcgacaattcccgaggacaaagcggtggacctatatgtgctagagagagctttgatttccatgcattcgtcctgtggggatgtgatggagaaaatcctggctgcgtacagaaaggcttcgaagcaatggtgctccacccagaacaagctggctcaagtgaggcaacggggcaggaagcgcaccatggtcggatgaatggagaagaagaaaaatatgtggcatggaatggatgtatgttattagaaagaccgtcgtctaaaacgagagtgatgtaccaccattgctgtatttttttagcggtgagtggctttggctgctgtaacgtttgtgaaatctggaaatatgttgcctggctgcaccatttggtcagaactcagaagcagagtgtcgtttcatccggaagtgggagaagttttattcgtttctcatgcatgataactggaagacatggttggggtatggcttgcttgtttgtgccctccattgacatgatcatcatggcaaatgtgttgccagtgttgtgggtgagggtggacccctaccgcacggtggagtgggtggagtggcgataggtcaaagaaacgacaggctgcttctgagatgagtatcttgcatccctagggtttattttaagttgtattgcctct

SEQ ID NO: 126444 - DNA, 1698 bp, Zea Mays
ccctgatttcccctgcgcactgcttctccccacggcgcacgcgcaccatctcctgcgcgccgccagtccggcttctcctggctcctgcgcgccgccagccgtcagcccgtcaccgattggagatccttggaaacctgcgcgccgccagcccgtcaccgcttggagacccgctcagccgcgcttccctgcgcgccgccagccgtcgccgatccgtggccgcgtccgccgccgccagctctgaggtcgcgccgtcagccagcccgtctgccgtcgtgaggtactgagggttttgacagataacggcaatcttcttccaacacactgacatgatcagccaatgatgctacgagagctagatatgtgttcaactcagcgtttagttctgcatgttcgtcctgaatgccagccaactttttctgcaactcctcaatcttgttgaggttcatcgctcaaccccgtcgcaaccgcaacgtccatctccccgtcctcgctgcccggaggcctggcacacctcccagtagcagcggcctcccgaagcattgtttcaagtggttattaggcttcatggatatgtctcaagagcaagaacaggattttggcgtactgctgaagcaaggtgcagaagggagggtatttgcttcgacatttgtgggacgaaagtgtgtaatcaaagagcgtttttcaaaaaagtaccgacacccattgttggactcgaagttgactctaaagcgcttaaatgctgaagctcggtgcatgacaaaagcaagaaggcttggtgttcctaccccagtactttatgctgtggatccagttctgcatactttgacctttgagcatgtggatggcttgtctgtcaaggatatacttcttaggtttggttcagatggggtcaatgaggaacgcctgaatgatattgccacacaaataggaaatgccattggcaaactacatgatggaggccttgttcatggtgattttgaccacgtcaaacatgataattaagaacagtaacaatcaattggttcttattgattttgggctgagtttcacttcgacaattcccgaggacaaagcggtggacctatatgtgctagagagagctttgatttccatgcattcgtcctgtggggatgtgatggagaaaatcctggctgcgtacagaaaggcttcgaagcaatggtgctccacccagaacaagctggctcaagtgaggcaacggggcaggaagcgcaccatggtcggatgaatggagaagaagaaaaatatgtggcatggaatggatgtatgttattagaaagaccgtcgtctaaaacgagagtgatgtaccaccattgctgtatttttttagcggtgagtggctttggctgctgtaacgtttgtgaaatctggaaatatgttgcctggctgcaccatttggtcagaactcagaagcagagtgtcgtttcatccggaagtgggagaagttttattcgtttctcatgcatgataactggaagacatggttggggtatggcttgcttgtttgtgccctccattgacatgatcatcatggcaaatgtgttgccagtgttgtgggtgagggtggacccctaccgcacggtggagtgggtggagtggcgataggtcaaagaaacgacaggctgcttctgagatgagtatcttgcatccctagggtttattttaagttgtattgcctct

SEQ ID NO: 126445 - DNA, 106 bp, Zea Mays
gccaccacacacaaccactctgaacaagacacaagactatcccctgggtcaagcataaacacaagagttgaaagcaggttcaaccctttcgccccggcactacacc

SEQ ID NO: 126446 - DNA, 930 bp, Zea Mays
atgcatgtcctgattaccaccccattccacccagcttatgtcactgcagagaggataaagaaggcgaagaatcttgagcttcttctcacggcaggaatcggctccgatcatattgatcttccagcagctgctgctgcgggcttaactgtggctgaggtagttcaaggcgaatggaacgtagcaggcattgcccacagagcttatgatcttgaaggaaaaactgttgggactgttggagctggtcgtattggcaggctcttgcttcagcgtcttaagccctttaactgcaacctactttaccatgacagacttcagattgacccagagcttgagaaagaaattggggccaaatttgaggaggacctggatgctatgcttccaaagtttgatgtgattgtgatcaacacacctcttacggagaaaacaagaggcatgtttaacaaagagaggattgcaaagatgaagaaaggtgtaattgttgtgaataatgctcgaggagcaatcatggatgctcgagcagtcgtagatgcatgttctagcggtcacattgctggatatggtggtgatgtgtggttcccacagccagcaccaaaggatcacccctggcgctacatgcctaaccatgccatgacccctcacatctctaggactacaattgatgcgcaggtgcggtatgcggatggtgtgagggacatgctggataggtatttcaagggcgaggacttcccggtgcagaactacatcgtcaaggaaggccagctcgccagtcagtacaagtgaccgcgcgagatgttgctgtgctgtgtaggcttttctggtgagaagctgcgaggaagaaactcatgttgcgtacttgcgttattgtatgagtagctctgagaaatctgtcagtggccacctgtaataaaagaatgccttgctggtatctca

SEQ ID NO: 126447 - DNA, 100 bp, Zea Mays
ctagagagaactatttagctagttcttgtgagcttcctccgctacatctatttaccctactgtctgaaggggaaaccagaaagaatcacagtttttttca

SEQ ID NO: 126448 - DNA, 1415 bp, Zea Mays
gatacaaacagagattgcccgataaaacaggtccgccgagccatcagccatgtcgtccacctcggtgagcggcggcggcggccggaagaggtcgcgatcggcctccgccatcatcgccgacacggcctgcgggcaccacatcctcaggattgacggctattcccgcaccaaggtggttccaaccggagcgtacctcaagtcccgaccttttaccatcggcggtcaccgctggcacatcgactatcaccccaacggccacgaccccgacaccaaagactacatctccctcttcctcgtcctcgaggagcccgcctccggctcaacagcgaagggggtgaaggctcagcagcgttttcgtttcgtcggtgaggtgccggaagaggaggagctgccggcggtgttgttagcggcggaggaggtgagcaactatgggagccaccgtggatggggggatgcgaggttcgtcaggagggaggattttgagaagtcagagcacctaaagaacgattctttcgccgtccggtgtgacatcgtcgtcgcaatcaacgagttccgcggcgaggacgagacggccgccttcgtgtccgtgcctccgcccgacctacaccgacacctcggcgaactcctgcagaccgggcagggcgccgatgtggtgtttgaggccggcggtgagacattccccgcgcataggtgcgtgctcgcggctcggtcgccggtcttcgctgcagagttctttggcgcgatggaggagagtaaaagcggcagtgcggtccacattcacgacatggaggctcgggtcttcaaggctttgcttcatttcacatatactgacttgttttggaaaacgaatgaagttgaagaggaagaggaagacgatgtcatggctcagcacctgcttgttgcagcagacaggtataacttgccaagattgaagctcatatgtgaagataaattatgcaagtacattaatgtgggaacggtggcaaccatattggcactagccgagcagcaccattgccatggattgaagaaggcatgctttcgtttccttagctccccggagaatttgaaggtagccgtggcaagtgaaagcttcgatcatttgagcaagaattgcccctctgttatgaaggagttggttgccatgctcggcaccttacttgagtaaggctgggttttgtgtgttcttgtgttggtgtgtgctaatgtgatgtgatgaatcaaatgctccttattttgtctgggtttctgctacctggtttctgtatgtgttgtttgatacggatgaatccaggtattcaaatcaagaaaactctgttcagtttgcactttcagtatttccggaactgactaccaaatattggttggagtgagcatgtttttttttgacaaacgcactaacagtcctcgaattt

SEQ ID NO: 126449 - DNA, 2036 bp, Zea Mays
catcccgctgatgatctcttggagcttcctcctcttgcccgcgtcgagttcgcgtgccgcgccgtctgaaccgacatacgcagagcagctcgccaagaccatctccgcggcgcctttccagtgcgcggtcagcgcgcccgtcgcgttgtcccttatcatcacgccgctgcgcttcttgtcggagttgaacgcctcgacgtgcaacaccttgcagctcctcttgagcgcgtcggcgtccatgccgagctccgccacggcccaagacagcagggccttctctgtcgggctgcccgatatctccggtggcgagacgttgtccggcttgtacacgcttccggtggtgttgagccctgctccctggcgcagaaaactgacgacggcggcggcgaccgtggccgccgccttgggtcggtcggtgccgacccagaactccgtcaccttcatctgattaagcgtgagagtgcccgtcttatcggtgcagatggcggttaccgagcccatggtctcgcacgccgagagcgtgcgcaccagcgcgtgctccttgaccatccgcttcattgagaaggccagcgtgagcgtgaccgcgagcgggaggccctcggggatggccaccacgatgatggtgatggcctgctggaagatgccgacgagcgcggtgaagacggtgttgaaagagacgtggtgcctgtcgaacgtcgggttgccctgctcatccctggtgctgcccgtgaagtggcgcgcggtgagcacggcgaagacgagaaccgcgacagcaatcccgaccttgccgatgctggaggtgagggcctcgaggcgctcctggagcggcgtgggttcggtcttctccctggtgatgctgcccatcatctcgccccaggcggtgtccgtgccgacggcggtgacgagcatgtggccgcatccgtcgatgaccttgacgccggaggcgaggaacgggttcttctcggcgtcgatgtcgacagggtgcggctcgccggtcatgctggactcgtccacctgcagcgcgtggccctgcatgaagacgccgtccgcgggcacggcgtcgccgatgttgagcacgacgacgtcgcccacgacgacgtcgaagatggagagctcctgcctcctgccgccccggacgacggcgacggtgatgttgtcggactcggtggcgagcctgtcgaagcgcctggcctggccgtggttgctgaccgcggacacggcggcgacgaggaagacggcgaggaagatgctgacgccgtcgtaccagccgtccttgaggccgtgctccttgatgccgaagcccagcgagacggcggcgcagacgagcagcacgaggaggaaggcgtcgctgagcgcgtcccacacgtgggtccagaaccccttgggcttcctccgcgggtacgtgttcccgccgaaggcctcccggcggagccgcacgtcgcggtcgtcgccgcggatgccggtctccgcgtccgacgccagcgcggacgcgatcccggcggcgccgccgaggcggcggaagcagtcgtggcgcttgtccttgaccaggcacctgaagccctcgtcgtgcgcggcgacagagaactccgccggagcggcgtcgtcggaccgcgacgtgctggcggcggcgccggggccgcagccgtcgtcgtcgatcttgatttcgacgtaggagccggtccggcgcaggatggcgcgggagaaactgaggcgggccagcctgtggcacgtccggatgacgttggtggccttcctccactgcttcgtccaccgcagcgggtccgccgccgtcgccattgtgcccaccccgatcaggtagtcggcgcactccatttgttcacacgaattaatgaagacgagccgcctacaccgatgagaattggggggacaaagcaaactctcgtgaatctatagagtgcgcggatatgaagctaggagaggcaatggtttattgattcccaaaacccggtcgcggaaacaactgatcaagtgctcacggcttatacgggaagttgagaacagctgcgggtaatctg

SEQ ID NO: 126450 - DNA, 1855 bp, Zea Mays
acccctccaacgaccatcgagtgccattggagtggctccattgcttggcaagctagctagtctcctgtcctgtcctgtccttccttggcaacaatatatagaatggtgggtagcagggagcagatcggtgcgacgacgcaggcgcccaacaaggtgtcgatgagccgccaggttttccatgtcctcctccttgccgccgtcgtccttttggcctcgctgctatccgcgaaggagaagctgctggggctgagcccggctgcggtggcggtggcctgctgggcgggtgcggtggcggcgtgggcgtacgcggtgtcccgcccgcgtcccgtgtacctggtggacctgtccgggtacgtgggcgggccttcgcacgaggcctcccgcgccaagacgatcgcccacttcgggcggtgcgggcggttcagcgacgagagcatggcgttccagaagcggatgctggagcggtcggggctcggggagcagacccacttcccggcgtcgctcatcagcgtgcccgtggacatgtgcctccgcacggcgcgggaggagtcgcacgccgtcatcttcggcgtcgtggacgaggtcctccgcagggcgcgcgtggcggccgccgacgtcggcgtgctcatcttcaactccagcctgctcagccccacgccgtccttcacgtcgctcatcgccaaccgctacgggatgcggcgcgacgtggtcagccacaacctcagcgggatggggtgcagcgcaggcatcatcgccatcgacctcgccaagcgcctgctccaggtgcacccggacacgtacgcgctggtggtgagcacggagaacatcaccctcaacgcgtacatgggcaacaaccgccccatgctggtgaccaacacgctcttccgcgtgggcggcgcggccatcctgctctccaaccgcggcgccgaccgccggcgcgccaagtaccagctgatccacacggtgcgcacccaccgcggcgcgcacgaccagagcttcggctgcgtgacgcaggaggaggacgacgcgggctgcgtcggcgtctcgctctccaaggagctgatggtggtggccggcgaggccctgcgcaccaacatcaccacgctgggcccgctcgtcctgcccatgtccgagcagctgcgcttcctcgccaccgtcgtcctcaaccgcgtcttccgcgccaacgtgcgcgcctacctgcccgacttcaggctcgccttcgaccacttctgcatccacgccggcggccgcggcgtgctggacgagctggagcgcagcctcaagctcagcgcctggcacatggagccctcgcggatgacgctctgccgcttcggcaacacctccagcagctcgctctggtacgagctcgcctactgcgaggccaagggccgcatccggaagggcgaccgcgtctggcagatcgccttcggctccggcttcaagtgcaacagcgccgtctggaaggcgctccgcacggtggacgccagcgaggagggcaacccgtggacgccggaggtccacgtgctccccatccacgtgcccagggtgtcgcccatcgacgagaccgcatacacgttccctgacggcgccacgtacaaggtctctgtctcccatgcctgaaataatacatatttacatgattgatttctcatcatgtaacttataatcgagataatgaagaagaagaagcagcagctagcagcagcgccgttagtaggagtattagttattagggcttgatttggttactctgtttgccgtcatttgcatccacattgcatttgcatgtggtgtacgtagagctctatgaactcacgcgccaagaattattgatttccacgattcatctgcttct

SEQ ID NO: 126451 - DNA, 2036 bp, Zea Mays
aaagcatccccttctggccttctcaccacgaacacgcgggacacctcggaagcaaccggctcccagatctgccgaagaaccctaccacccaacgttctagaacttcccctctttccccgcatggacggcctcgtggcgccgtcgccatcccactccggcgccacctccggcggcggggcctcccaccgcaagcggaagctcccgccgtcgtcgctctccgacgccaccggcgacgaggacgacgacaccaccgctccgtcatccccctccacggccccatcctcgccctctcgcccgtcatctccatcttcttcgcactccgacgatgacgacgacgactcgctccacacgttcaatgccgcgcgcctcgacggcgcgccgagtgggggctctgcgtccggccgtcctcctaagccggattcctcatcagtgtctgctgctgcggcggcagccgcggctgcggtgggtggaggacctaagccggagcccggctcggcgaacgccggcgacgggaaggaggacacaaaggggctgttcacggacaacctccagaccagcggcgcgtacagcgcccgtgaggagggcctcaagcgcgaggaagattcaggaaggctgaagtttctctgttattctaatgacggcgttgatgaacacatgatatggttggtagggttgaagaatatcttcgcccgacagcttcctaatatgcccaaagaatatattgtacgccttgtcatggatagaactcacaagtcaatgatggttatcaggaacaatattgtcgtggggggcattacttatcgcccttatgcaagccagagatttggagaaatagcgttttgtgctatcacagctgatgagcaagttaaaggctatggaacaagattaatgaatcatttgaaacaacatgcacgggatgctgatgggctcacacatttcttaacctatgctgataacaatgctgttggctattttgtaaagcagggtttcacaaaggagatcacattggacaaagaaagatggcaagggtacattaaagattatgacggaggaatattgatggagtgtaaaattgacccaaagctgccatatgttgatgtggcaacaatgattcgacgtcaaaggcaggccattgatgagaagatcagagagctttctaactgccatattgtttattcaggaattgattttcaaaagaaagaagctggcattccaagaagactgataaagccagaagatatccctggtctcagggaagctgggtggacgcctgatcaattggggcattctaaatcacgatcatcattctccccggactataatacttacaggcaacagcttactacccttatgcagacagcgctgaagaatctgaatgaacatcctgatgcttggccattcaaagagcctgtggattcacgggatgttccagactattatgatatcatcaaagatcctattgatttaagaacaatgttaagaagagtcgactcggaacaatattatgtgaccctagagatgtttgtagccgacatgaagagaatgttcagcaatgcaagaacttacaattctccagatactatctattacaaatgtgcgacacggcttgaaaacttcttctcgggcagaattactgtactgcttgcacaactctcaaccaagagctaggctggcgtgggctcactggactgggcactactgtcgcatgttgtaaaattattattggctcactggactggacactactgtcgcatgttgtaaaattattaagttgtattgatatagttgtcaccttgctgaatgttcggcacggtgatgaacttttagtttagcattattttaaccaggagggacactgattgatctttacatttcggtctcaacctggccggcctaataatatagattgaggagattcttcagtttctagcacctatgggtaaagatgttttgcatccttaaatctctatctcactcaatctagactcaagtgttgagaaaaaaaacgcaaaaaaaaaaaaaaaaactaaactaaa

SEQ ID NO: 126452 - DNA, 1947 bp, Zea Mays
ccttctggccttctcaccacgaacacgcgggacacctcggaagcaaccggctcccagatctgccgaagaaccctaccacccaacgttctagaacttcccctctttccccgcatggacggcctcgtggcgccgtcgccatcccactccggcgccacctccggcggcggggcctcccaccgcaagcggaagctcccgccgtcgtcgctctccgacgccaccggcgacgaggacgacgacaccaccgctccgtcatccccctccacggccccatcctcgccctctcgcccgtcatctccatcttcttcgcactccgacgatgacgacgacgactcgctccacacgttcaatgccgcgcgcctcgacggcgcgccgagtgggggctctgcgtccggccgtcctcctaagccggattcctcatcagtgtctgctgctgcggcggcagccgcggctgcggtgggtggaggacctaagccggagcccggctcggcgaacgccggcgacgggaaggaggacacaaaggggctgttcacggacaacctccagaccagcggcgcgtacagcgcccgtgaggagggcctcaagcgcgaggaagattcaggaaggctgaagtttctctgttattctaatgacggcgttgatgaacacatgatatggttggtagggttgaagaatatcttcgcccgacagcttcctaatatgcccaaagaatatattgtacgccttgtcatggatagaactcacaagtcaatgatggttatcaggaacaatattgtcgtggggggcattacttatcgcccttatgcaagagatttggagaaatagcgttttgtgctatcacagctgatgagcaagttaaaggctatggaacaagattaatgaatcatttgaaacaacatgcacgggatgctgatgggctcacacatttcttaacctatgctgataacaatgctgttggctattttgtaaagcagggtttcacaaaggagatcacattggacaaagaaagatggcaagggtacattaaagattatgacggaggaatattgatggagtgtaaaattgacccaaagctgccatatgttgatgtggcaacaatgattcgacgtcaaaggcaggccattgatgagaagatcagagagctttctaactgccatattgtttattcaggaattgattttcaaaagaaagaagctggcattccaagaagactgataaagccagaagatatccctggtctcagggaagctgggtggacgcctgatcaattggggcattctaaatcacgatcatcattctccccggactataatacttacaggcaacagcttactacccttatgcagacagcgctgaagaatctgaatgaacatcctgatgcttggccattcaaagagcctgtggattcacgggatgttccagactattatgatatcatcaaagatcctattgatttaagaacaatgttaagaagagtcgactcggaacaatattatgtgaccctagagatgtttgtagccgacatgaagagaatgttcagcaatgcaagaacttacaattctccagatactatctattacaaatgtgcgacacggcttgaaaacttcttctcgggcagaattactgtactgcttgcacaactctcaaccaagagctaggctggcgtgggctcactggactgggcactactgtcgcatgttgtaaaattattattggctcactggactggacactactgtcgcatgttgtaaaattattaagttgtattgatatagttgtcaccttgctgaatgttcggcacggtgatgaacttttagtttagcattattttaaccaggagggacactgattgatctttacatttcggtctcaacctggccggcctaataatatagattgaggagattcttcagtttctagcacctatgggtaaagatgttttgcatcctt

SEQ ID NO: 126453 - DNA, 514 bp, Zea Mays
cacagaaattacctttaggaaaagaagccgtacgccttgttatgaatgagactcgcctgcaccaatacaacagcaacaaagccttttagtctcaagcaagtttggggggggggggtaggctagagttaaaatccaacagaacccagtaacccacaagtcaatgtgggcacatggatagctgttttccaagcactccaccgtgcatatttatcttttccttgcgtttgtgctagatagtacagatacaaatgaagaatagtaagatctatcatttataagtatgctcatatttgttcaacaattcctgtaaaaaatatttgttcaacaatcatatttgtttctttatagaaagaagctggcattccaagaagactgataaagccagaagatatccctggtctcagtaagttgttatattcacgacttattttgttgttcacccttgataggttttgacagttaggaaggacattttattgtgatcaggttttgacatttaggaggtctatcttgg

SEQ ID NO: 126454 - DNA, 3022 bp, Zea Mays
cacatgcaaagccgctaaaatccatttggaaccgatgacacagagaaacggacatcccctctactagttttctctctctgccgccgtccgccggcctcgcgcaccccgtccccgccggcaatcgatcccacttgtcccaggacgcctccgccggccgtcaatcgtgcccctccccagaactcgcactgctctccgtcagttcagttaaaacatgactgctcagacaaagaagagaggcgctacagaaaatggggatggtgttggtttgggtcttgctgccttcattgcaaacaatgaggatgtgggtcccgtagtccggcacgctttcgagtctgggaagcctgaagccctcttgcacagcctccagaacatcgtgaagaataaagaggttgagatcgaagagatttgtagactccactatgaggaattcatccttgctgttgatgagcttcgtggtgtcctggttgatgctgatgagcttaagggcacattatctgatgagaacctgcggttgcaagaggttgctagcgctttgctactgaagcttgatgagctttttgagatttattctgtaaacagtaacgttggggaagccctagctacgttgaagatttgtctgcaagtaaccaacctctgcaaggtatgcaacagggacattaccgaagcaaaattactttctgcattgaaaacattggagttgattgagaaggactacctgcaaaatattccactgaagcttctgaaaaaggtcattcataaacaagttcctatggtaaagctgtacattgagaagaaagtttgtagtgagtttaatgagtggcttgtgtatatcagaaggactgctaaggatattgggcaggtcgcaataaaccagacatctctgactcataagaaagatcagggaatttgtgcccgacaaagggaagcagaagaatctagcctcgttgggttcgacgtgaatgcttacaccttggatgtggagcacatggctgaggaagcaatgctggaatttgatcttgtgccagtgtacagggcacaccatattcacataggccttggtcttggggagaagtttcgagaatattactacaataacaggctcatgcaactcaatttggacttgcaaatttctacatcacaacccttcgttgagtcctatcaacctttcattgctcaggtagctggcttttttattgttgaggaccgtgtctttcgaactgcagatggacttctatctgagagccaggttgatactatgcttgaaacagccatttctaaacttactctgatcttagaggaacagttctctcgcattcatgctgccaaccacctcctcctcataaaaggttatgtcagcctttttggtgcaaccctgaagaagtatgggtaccgatccatgtcgctggctgaaatccttgataaaactagggacaagtatcttgaacttcttctttctgactgccggaagcagctcaacgaggccttctctagggactcatatgagaggatggttataaagaaacaaaatgaatacgacgcaaacatagcggcattccaacttgaccccattgatggagtatcaaatttgccatacgtcgctccattttcctcctctgttcccaatgcttgtcgtattgtgcgttctttcatcgaggagttggtcagctacttgtcactcagtggtggcgtaaacgtctatgatgtggtgaaaagctacttggacaagttcttgattgagacgttgaatgatggttttctgaagctgatacatggtggatccctggaatttccacaggtggtgcagatcgcaggaaatatcgccgttctcgagcagtcctgtgacatgttcctttggcacgccgctcgactttgtggtgtccctaggtgcctcctcgagaagccccattctggattgagtgccagagctgtgctcaaagcctcccagaatgcggcatacaacggatcggttactttggtgaattccaagatcgacgagttcatgctgcagctgactagcatcaactggaccccggacgaagctccagagcacgccaacgactacatgaacgaggtcatcatctaccttcacgaggtggtgtcttccgggcagcaggccgtgccaagggacgcgctgttcaaggttgtatctggcgcgctgagccacatctcggactctatgacgacggtccttctcagtgaccgggtgaaaaggttcaacgcgaacgccgttgctagcatcgacgtcgatctgagggcgctggaggggttcgctgacgacacgtaccgcacggccgggtttctggacctgagaaagggaaccagtttcagagagtgtctagccgaagtaaggcagctcacaaaccttctgctgagcagccagcctgagagcttcgcgaaccctgcaaccagggagcagagctacggagccttagaccacaagaaggtggcgataatttgtgacaagttcaaggatgcccccgacagcctgttcgggagcctctcaggccggggcacggtgcagagcgcccggaagaagtccctggatgtgctgaagagaaggctaaaggattttagctagctggtgagctagatcatttagacaagctagtagcatagtacccctgttttagtgccagtcgtatccatttaaaatttcttttccgtctttctttattccctctttaatcgacttcccgtttcatgcgccgaagagaaggctgaaggattttagctggggtttgctggtgagctagatcgttaaataagctagtgctctgtttagggaagaagacaagtggttcggtgtgtaaagccatttcaaatttctttccatccttatttttactcccttaatttgcttcctacacatcatggaagaagctgtaggttttgacatcgagcgcgaaggcacctacgaccgagaacaagacggcgacagcggcgctgagcgacttcacagcgcccgaattttttgtattttagcctttaaacagaagtaaattcacgtttagacctaaaaaaa

SEQ ID NO: 126455 - DNA, 2565 bp, Zea Mays
ttctgctgctcccaaatcccagtcgatcccagaggatgccatcgccatggctgccgcatggagaatcaccgtcctcctcttctacgcgctcacgtccgagttactgaaacgctcgttatcctccaccgtctctccatcgccagccgccgccgccgaagcccaggcgctgctgcgatggaagtctagcctgctaccgcccaactccaccagcagcagcagcagctccccactgtcctcgtggttaccaggggccgcgggctccgtgtgcacgtcatgggccggcgtcacgtgcgccgacggcgagaacggccgcatcaccggtgtcgcgctccagggcgccgggctcgccggcacgctcgaggccctgaacctcgccgtgttcccggcgctcacagcgctcaacctcagcggcaaccgcctggccggcgccatcccgaccaccatctcgaaactgacgtccctcgtctcgctcgacctgtccagcaaccgcctcaccggcggcatcccggcggcgctggggacgctgccggcgttgcgggtcctcgttctgcgcaacaactccctcggcggtgccatcccggcgtctctcggccggctgcacgcgctggagcggctggacctcagggccacgcggctggcctccaggctgccgccggagatggggggcatggcgagcctcaggttctttgatctctccgtcaacgagctctccggtcagctgccgtcgtccttcgcggggatgaggaagatgagggagttctccctgtcaagaaatcagctctccggtgcgatcccacctgacattttcagcagctggccggacctgacactgctctacctgcactacaactccttcaccggaagcatccctctggagctcgaaaaggccaagaagctgcagctgctgtcgcttttctccaacaacctcaccggcgtgattccggcgcagatcggcggcatggcgagcctgcagatgctgcacttgggacagaattgtctcacaggaccgatcccctcttcggtagggaacctggctcaccttgtcatacttgttttgtccttcaacggcctcacaggcacgatccctgctgagattggatatctgacggcgctccaagaccttgacctgaacaacaaccggctggaaggtgagctgcctgaaaccctgtcgttgctcaaagatctctacgatctttccttgaacagcaacaacttcaccggcggtgtccccaacttccgtagtagcaagctgaccactgttcaattggacggtaacaatttctcgggaggcttccccctgtcattttgcctgttgacatcattggaggtcttggatctatcgagcaaccaactttccggtcagctccctacctgcatatgggacttgcaagacctcgtgttcatggatctgtccagcaatactctttcaggggatgtactggcttcatccacaaactccagtttgtcgttggaatctttgcatctgtcaaataacagattctcaggagagtttccacctgtgatcaagaacatgaagatgctagttgtcctagaccttggtgacaactacttctctggtgaaatcccatcgtgggtagggtcagggtcaccatttctacgaatcctccggttgcggtccaacatgttcagtggcagtagtattcccttggagctactacagctctcccacctccgatttctggacctggctagcaacaatttgcagggaccaataccacatggtctcgctagcttaacgtccatgggggtgcagccacagactgaattcgacatcagatcgggagtccatcaccagatcttaaacctagaagcagacttctcttatgccgatcgagttgacgtgagctggaagacacacacttatgaatttcaaggagcgattgcgctgatgaccggtatagacttgtcaggcaattctatcggtggtgaaattccaaccgagataacaaaccttcaaggccttcggtttctgaacttatcaagaaataatctctctggtactattccagctaacgttggagatttaaaactactcgagtcccttgacctctcatggaatgaactgtctggtctcattccttcaggcatctcagaactcacgtctcttagttcactgaatctctctaacaatatgctctcaggtgagataccaactggtaatcaactccaaacgctagccgatccttcaatttacagcaacaactatggtctttgtggctttccgttgagtatatcatgtcccaacagttcaggtgtacaagtattggacaggagtaataaagaaattgaaggtgtgtatgtctactactcgattattgccggagttgtatgtggagtatggttgtggtttggatcattagtttccattcctctatggagaacttcgtttttctgtgttgttgatatcatttatataaagcttaaggccctttggatcggttcattttaaaggaaatcgggctctacttaataaagtaggctatttggcttcaaatttgacattccactatttttaaagtttagatataagactaccttaaattc

SEQ ID NO: 126456 - DNA, 99 bp, Zea Mays
gtggctacctcaacgctctcctacgagtgcacaagcctcaccaggagggacaagtacagggcgcttgaaggcaacgacggagtcgtcgccacccacagg

SEQ ID NO: 126457 - DNA, 1100 bp, Zea Mays
ctgtcacctaaaatctaggatatattattcccccaaaacaaacactaaccggccggcccaattctcacgcgctcgccgcctaggagcattcacgttggtggcgggcggtggctcggttcctctcctccaccgcacctccaagaatccacctccacgactaagctgacggctcggcggcgccatggcggttcaccggctccaaccttccctctctggcctacagtgctccaccgcccggtcgccagtgctcctccatgggccacggctgacgggtgcacgcaccgatggttggtgcaggcaggagaggtggatttggtggacctagattcgatgtgcagagagcgacttggaggttatttttccagcacttgacattcgagtgaaaaatgtcgcagggacatattctcttgaacataaaggagaaaattatctcttcgcacatcagacaaggcttctactctttcagaagaaagtcattttcaagagaatcttgaacaaaatgaccagatgtttaggcctggttggaaggacatttttcgaatgaatcagagtgagctcgaggctgagattcgaaaaggtctctcgagattctactcttgatccaaggaggaaggcctatctgatccaaaatctcatgaccagccgttggatagctgctcagcagaaatcaccacaaccaagcgtcgaaggacataatggatgtacacgacgacctggatgtgttccttcgtaccgagacccagggaaacaaatatttggctgtgagcattacaaaagaaactgcaagcttgttgctgcatgctgcaataagctattcacttgcatattctgtcacgataaagttagtgaccatacaatggacaggtaactcaagaggtccacttattgactcttatgaccatgtaattggtgttaatacaactacattaacacgtaaaggtgagtcaagattctctcattaaaatatttgtagtcaagattcttttttgtgatgttccaaactgaaagagtgcatccgggctgttgctgtgaaagaaagtgaaagatgatgaggtcaaaaaatgtctttacttggcaaatatacttgaaacataatttgt

SEQ ID NO: 126458 - DNA, 1536 bp, Zea Mays
ctgtcacctaaaatctaggatatattattcccccaaaacaaacactaaccggccggcccaattctcacgcgctcgccgcctaggagcattcacgttggtggcgggcggtggctcggttcctctcctccaccgcacctccaagaatccacctccacgactaagctgacggctcggcggcgccatggcggttcaccggctccaaccttccctctctggcctacagtgctccaccgcccggtcgccagtgctcctccatgggccacggctgacgggtgcacgcaccggcaggagaggtggatttggtggacctagattcgatgtgcagagagcgacttggaggtggctgacatcttcaagcactgcaacatgcagttacaactactgttggccatacagggaaatgctgggcctattataccaattgttcaaagcatggaccttgtatagctacatgtttttatcatagatatattaatttctgaaatgcccatatattggtatatttgtggaaatttattggccaactgtaagcccgtcgtgatgcacagaacatttgtggtataagatttttctgttgatgtttgcaggttatttttccagcacttgacattcgagtgaaaaatgtcgcagggacatattctcttgaacataaaggagaaaattatctcttcgcacatcagacaaggcttctactctttcagaagaaagtcattttcaagagaatcttgaacaaaatgaccagatgtttaggcctggttggaaggacatttttcgaatgaatcagagtgagctcgaggctgagattcgaaaaggtctctcgagattctactcttgatccaaggaggaaggcctatctgatccaaaatctcatgaccagccgttggatagctgctcagcagaaatcaccacaaccaagcgtcgaaggacataatggatgtacacgacgacctggatgtgttccttcgtaccgagacccagggaaacaaatatttggctgtgagcattacaaaagaaactgcaagcttgttgctgcatgctgcaataagctattcacttgcatattctgtcacgataaagttagtgaccatacaatggacaggtaactcaagaggtccacttattgactcttatgaccatgtaattggtgttaatacaactacattaacacgtaaaggttggtagatctggaaggtcttgatggtctaatacctgtctatgagtacgaaagaaaaggcgggagaagtcggtctctgcagcatcgcgcgtgaaaaaaaatcagccaattccatgagcattgatgttgtcatgacttcaaggagagaccatgctaagaataatgcattatgacatttgtcaggcttacatatcgattgtttgatatggatagatgtataggtttatgaccaatccagttcaaagcaatttgagtacaaaagaaataaggagcaggaaagctctgtacatcttgcattttgctgtttttttgtcgaagtttcaatgtctgtcgcgtgacaaaatatagttgtaatttatatt

SEQ ID NO: 126459 - DNA, 1734 bp, Zea Mays
ctgtcacctaaaatctaggatatattattcccccaaaacaaacactaaccggccggcccaattctcacgcgctcgccgcctaggagcattcacgttggtggcgggcggtggctcggttcctctcctccaccgcacctccaagaatccacctccacgactaagctgacggctcggcggcgccatggcggttcaccggctccaaccttccctctctggcctacagtgctccaccgcccggtcgccagtgctcctccatgggccacggctgacgggtgcacgcaccggtatgcatcccttgctgctctaattcccgacgctctagctcgtgtaccagatgtgcagactgtcgcctagccctgctccggcgtgaaggacttctgcttctgcccctgcgcatcccgcccttggtcgcgcacctcggcatgttcctcggcccgacggctactgtcttgaggcatacggtggccgcccacctcgtacccagtcaccagatctcaagttccacctcaaaatccagatcaagtgaatgccatgtttcatccttggtccaatcggttcttactggaatttgttggcaggcaacgagcacccaccaccggcaggagaggtggatttggtggacctagattcgatgtgcagagagcgacttggaggtggctgacatcttcaagcactgcaacatgcagttacaactactgttggccatacagggaaatgctgggcctattataccaattgttcaaagcatggaccttgttatttttccagcacttgacattcgagtgaaaaatgtcgcagggacatattctcttgaacataaaggagaaaattatctcttcgcacatcagacaaggcttctactctttcagaagaaagtcattttcaagagaatcttgaacaaaatgaccagatgtttaggcctggttggaaggacatttttcgaatgaatcagagtgagctcgaggctgagattcgaaaaggtctctcgagattctactcttgatccaaggaggaaggcctatctgatccaaaatctcatgaccagccgttggatagctgctcagcagaaatcaccacaaccaagcgtcgaaggacataatggatgtacacgacgacctggatgtgttccttcgtaccgagacccagggaaacaaatatttggctgtgagcattacaaaagaaactgcaagcttgttgctgcatgctgcaataagctattcacttgcatattctgtcacgataaagttagtgaccatacaatggacaggtaactcaagaggtccacttattgactcttatgaccatgtaattggtgttaatacaactacattaacacgtaaaggttggtagatctggaaggtcttgatggtctaatacctgtctatgagtacgaaagaaaaggcgggagaagtcggtctctgcagcatcgcgcgtgaaaaaaaatcagccaattccatgagcattgatgttgtcatgacttcaaggagagaccatgctaagaataatgcattatgacatttgtcaggcttacatatcgattgtttgatatggatagatgtataggtttatgaccaatccagttcaaagcaatttgagtacaaaagaaataaggagcaggaaagctctgtacatcttgcattttgctgtttttttgtcgaagtttcaatgtctgtcgcgtgacaaaatatagttgtaatttatattttggcatgcacgaaacatgtgtatttattc

SEQ ID NO: 126460 - DNA, 2159 bp, Zea Mays
ctgtcacctaaaatctaggatatattattcccccaaaacaaacactaaccggccggcccaattctcacgcgctcgccgcctaggagcattcacgttggtggcgggcggtggctcggttcctctcctccaccgcacctccaagaatccacctccacgactaagctgacggctcggcggcgccatggcggttcaccggctccaaccttccctctctggcctacagtgctccaccgcccggtcgccagtgctcctccatgggccacggctgacgggtgcacgcaccggtatgcatcccttgctgctctaattcccgacgctctagctcgtgtaccagatgtgcagactgtcgcctagccctgctccggcgtgaaggacttctgcttctgcccctgcgcatcccgcccttggtcgcgcacctcggcatgttcctcggcccgacggctactgtcttgaggcatacggtggccgcccacctcgtacccagtcaccagatctcaagttccacctcaaaatccagatcaagtgaatgccatgtttcatccttggtccaatcggttcttactggaatttgttggcaggcaacgagcacccaccaccggttaagtctctccccttcggtccttcctccctttcttctgtgttaagccaccgagcacccaagcggtttggcctgatgccacatctctggtagctacaaacctacaagctttgacaaaagatgctatgattaggccgatacaaagttgtttctgcttctttatctctgtatcatactagcacttattaggttgcaactcgattgtttaggtactagatttgatctgattgtgaattaccagatggttggtgcaggcaggagaggtggatttggtggacctagattcgatgtgcagagagcgacttggaggtggctgacatcttcaagcactgcaacatgcagttacaactactgttggccatacagggaaatgctgggcctattataccaattgttcaaagcatggaccttgtatagctacatgtttttatcatagatatattaatttctgaaatgcccatatattggtatatttgtggaaatttattggccaactgtaagcccgtcgtgatgcacagaacatttgtggtataagatttttctgttgatgtttgcaggttatttttccagcacttgacattcgagtgaaaaatgtcgcagggacatattctcttgaacataaaggagaaaattatctcttcgcacatcagacaaggcttctactctttcagaagaaagtcattttcaagagaatcttgaacaaaatgaccagatgtttaggcctggttggaaggacatttttcgaatgaatcagagtgagctcgaggctgagattcgaaaaggtctctcgagattctactcttgatccaaggaggaaggcctatctgatccaaaatctcatgaccagccgttggatagctgctcagcagaaatcaccacaaccaagcgtcgaaggacataatggatgtacacgacgacctggatgtgttccttcgtaccgagacccagggaaacaaatatttggctgtgagcattacaaaagaaactgcaagcttgttgctgcatgctgcaataagctattcacttgcatattctgtcacgataaagttagtgaccatacaatggacaggtaactcaagaggtccacttattgactcttatgaccatgtaattggtgttaatacaactacattaacacgtaaaggttggtagatctggaaggtcttgatggtctaatacctgtctatgagtacgaaagaaaaggcgggagaagtcggtctctgcagcatcgcgcgtgaaaaaaaatcagccaattccatgagcattgatgttgtcatgacttcaaggagagaccatgctaagaataatgcattatgacatttgtcaggcttacatatcgattgtttgatatggatagatgtataggtttatgaccaatccagttcaaagcaatttgagtacaaaagaaataaggagcaggaaagctctgtacatcttgcattttgctgtttttttgtcgaagtttcaatgtctgtcgcgtgacaaaatatagttgtaatttatattttggcatgcacgaaacatgtgtatttattcatttttgaacgaaattttacgtcaa

SEQ ID NO: 126461 - DNA, 2631 bp, Zea Mays
aaaatctaggatatattattcccccaaaacaaacactaaccggccggcccaattctcacgcgctcgccgcctaggagcattcacgttggtggcgggcggtggctcggttcctctcctccaccgcacctccaagaatccacctccacgactaagctgacggctcggcggcgccatggcggttcaccggctccaaccttccctctctggcctacagtgctccaccgcccggtcgccagtgctcctccatgggccacggctgacgggtgcacgcaccggtatgcatcccttgctgctctaattcccgacgctctagctcgtgtaccagatgtgcagactgtcgcctagccctgctccggcgtgaaggacttctgcttctgcccctgcgcatcccgcccttggtcgcgcacctcggcatgttcctcggcccgacggctactgtcttgaggcatacggtggccgcccacctcgtacccagtcaccagatctcaagttccacctcaaaatccagatcaagtgaatgccatgtttcatccttggtccaatcggttcttactggaatttgttggcaggcaacgagcacccaccaccggttaagtctctccccttcggtccttcctccctttcttctgtgttaagccaccgagcacccaagcggtttggcctgatgccacatctctggtagctacaaacctacaagctttgacaaaagatgctatgattaggccgatacaaagttgtttctgcttctttatctctgtatcatactagcacttattaggttgcaactcgattgtttaggtactagatttgatctgattgtgaattaccagatggttggtgcaggcaggagaggtggatttggtggacctagattcgatgtgcagagagcgacttggaggtggctgacatcttcaagcactgcaacatgcagttacaactactgttggccatacagggaaatgctgggcctattataccaattgttcaaagcatggaccttgtatagctacatgtttttatcatagatatattaatttctgaaatgcccatatattggtatatttgtggaaatttattggccaactgtaagcccgtcgtgatgcacagaacatttgtggtataagatttttctgttgatgtttgcaggttatttttccagcacttgacattcgagtgaaaaatgtcgcagggacatattctcttgaacataaaggagaaaattatctcttcgcacatcagacaaggcttctactctttcagaagaaagtcattttcaagagaatcttgaacaaaatgaccagatgtttaggcctggttggaaggacatttttcgaatgaatcagagtgagctcgaggctgagattcgaaaaggtctctcgagattctactcttgatccaaggaggaaggcctatctgatccaaaatctcatgaccagccgttggatagctgctcagcagaaatcaccacaaccaagcgtcgaaggacataatggatgtacacgacgacctggatgtgttccttcgtaccgagacccagggaaacaaatatttggctgtgagcattacaaaagaaactgcaagcttgttgctgcatgctgcaataagctattcacttgcatattctgtcacgataaagttagtgaccatacaatggacaggtatcttcaccacaaccattcattttaccgtccacacctttcctgctgagggatgctttcaaggatttcattttaacatcgaaccaatatcaattaagcatggcattttatttggaaatagatgtttgtggtggtgccatggacctgtgcgtcccttgtgaaatgaattgattttttgtcattgaattttctaactgaagctttttcattcgtttgattcacttgagctcccttaagttgtattgtattatttaatcataaatgccatccttcctcttatagttatataatcaaatattagttttaatcctatctgcatggtttacaatgtattgggttgtgtcattgtgtgaagaatgtttggtggttagtctgaccacatgtgttagctgaatatgagtgccgagcagtagcatgcatataagttccactgcattcaatatttacatttttttcttatttccaggtaactcaagaggtccacttattgactcttatgaccatgtaattggtgttaatacaactacattaacacgtaaaggttggtagatctggaaggtcttgatggtctaatacctgtctatgagtacgaaagaaaaggcgggagaagtcggtctctgcagcatcgcgcgtgaaaaaaaatcagccaattccatgagcattgatgttgtcatgacttcaaggagagaccatgctaagaataatgcattatgacatttgtcaggcttacatatcgattgtttgatatggatagatgtataggtttatgaccaatccagttcaaagcaatttgagtacaaaagaaataaggagcaggaaagctctgtacatcttgcattttgctgtttttttgtcgaagtttcaatgtctgtcgcgtgacaaaatatagttgtaatttatattttggcatgcacgaaacatgtgtatttattcatttttgaacgaaattttacgtcaaatcctctattgcgtt

SEQ ID NO: 126462 - DNA, 2390 bp, Zea Mays
aaaatctaggatatattattcccccaaaacaaacactaaccggccggcccaattctcacgcgctcgccgcctaggagcattcacgttggtggcgggcggtggctcggttcctctcctccaccgcacctccaagaatccacctccacgactaagctgacggctcggcggcgccatggcggttcaccggctccaaccttccctctctggcctacagtgctccaccgcccggtcgccagtgctcctccatgggccacggctgacgggtgcacgcaccggtatgcatcccttgctgctctaattcccgacgctctagctcgtgtaccagatgtgcagactgtcgcctagccctgctccggcgtgaaggacttctgcttctgcccctgcgcatcccgcccttggtcgcgcacctcggcatgttcctcggcccgacggctactgtcttgaggcatacggtggccgcccacctcgtacccagtcaccagatctcaagttccacctcaaaatccagatcaagtgaatgccatgtttcatccttggtccaatcggttcttactggaatttgttggcaggcaacgagcacccaccaccgatggttggtgcaggcaggagaggtggatttggtggacctagattcgatgtgcagagagcgacttggaggtggctgacatcttcaagcactgcaacatgcagttacaactactgttggccatacagggaaatgctgggcctattataccaattgttcaaagcatggaccttgtatagctacatgtttttatcatagatatattaatttctgaaatgcccatatattggtatatttgtggaaatttattggccaactgtaagcccgtcgtgatgcacagaacatttgtggtataagatttttctgttgatgtttgcaggttatttttccagcacttgacattcgagtgaaaaatgtcgcagggacatattctcttgaacataaaggagaaaattatctcttcgcacatcagacaaggcttctactctttcagaagaaagtcattttcaagagaatcttgaacaaaatgaccagatgtttaggcctggttggaaggacatttttcgaatgaatcagagtgagctcgaggctgagattcgaaaaggtctctcgagattctactcttgatccaaggaggaaggcctatctgatccaaaatctcatgaccagccgttggatagctgctcagcagaaatcaccacaaccaagcgtcgaaggacataatggatgtacacgacgacctggatgtgttccttcgtaccgagacccagggaaacaaatatttggctgtgagcattacaaaagaaactgcaagcttgttgctgcatgctgcaataagctattcacttgcatattctgtcacgataaagttagtgaccatacaatggacaggtatcttcaccacaaccattcattttaccgtccacacctttcctgctgagggatgctttcaaggatttcattttaacatcgaaccaatatcaattaagcatggcattttatttggaaatagatgtttgtggtggtgccatggacctgtgcgtcccttgtgaaatgaattgattttttgtcattgaattttctaactgaagctttttcattcgtttgattcacttgagctcccttaagttgtattgtattatttaatcataaatgccatccttcctcttatagttatataatcaaatattagttttaatcctatctgcatggtttacaatgtattgggttgtgtcattgtgtgaagaatgtttggtggttagtctgaccacatgtgttagctgaatatgagtgccgagcagtagcatgcatataagttccactgcattcaatatttacatttttttcttatttccaggtaactcaagaggtccacttattgactcttatgaccatgtaattggtgttaatacaactacattaacacgtaaaggttggtagatctggaaggtcttgatggtctaatacctgtctatgagtacgaaagaaaaggcgggagaagtcggtctctgcagcatcgcgcgtgaaaaaaaatcagccaattccatgagcattgatgttgtcatgacttcaaggagagaccatgctaagaataatgcattatgacatttgtcaggcttacatatcgattgtttgatatggatagatgtataggtttatgaccaatccagttcaaagcaatttgagtacaaaagaaataaggagcaggaaagctctgtacatcttgcattttgctgtttttttgtcgaagtttcaatgtctgtcgcgtgacaaaatatagttgtaatttatattttggcatgcacgaaacatgtgtatttattcatttttgaacgaaattttacgtcaaatcctctattgcgtt

SEQ ID NO: 126463 - DNA, 2772 bp, Zea Mays
caaactcccaaatttcaacgtccaagggtggcgcgagcacacagacatagaggcacggaaagcagagcgcgaggaagagagagacagagagaaaaacccaaaccctaacaatcatttccaggcccccgccccccggcgtctccagaacgttccagaaccttcaaggaaccatccacaggcgaggcctcgttccccgcccgtatctccccatttccacccggccggcgcggcgggatcctgactctggcgctgtctgctggggtttcgtgtaggagcaggcgcgagcgcgggtgtttggatcgtgggaggcaacgctggcggctcgcagcggcagcaggtgatggcggattcgcctagcggtggaggatctagggcttgtgtctgctgggtgagacaggtcgaggaggcagcgtcggggctggtgctcgggagaaacgaacaggggaggagggagggaggatgctgagcgtggtccgggtgcaccttccgtccgagatcccgatcgtgggctgcgaggtcacgccctacgtgctactgcggcggcccgacggtgcagtctccaccgacgatgtccctgaaactgcgcccgctgatggccagttcatgcggtacagatggtaccgcatacagagcgatcggaaagtccctatctgcagtgtgcatccaatggaacaagcgacgattcagtgcctcggttgtctcaagtcaaaaatacctgttgctaagagctaccactgttcagctaaatgtttctctgatgcatggcagcaccacaaagttttgcatgaacgagccagtagtgctcaaaatgaaaatggggctgaagaagaggagttatgtggcagtggtggttctggggttctaagtactgctggatctggttctttgtcaaattttggacagagccctagtattaacaatgaacctgtgcctttgtatccctcaggtactgataaaaattctggagaaacttggtatgaagttgggcgcttgcgaacgtatacaccaactgctgctgatattgggcatgcactaaaatttgagtgtgtagctgtggattcagaaaaaaggtctccaattggacctccgacctcagttatgacgtcacacgtaatccccgcaccaactccgacccctcgtcgccttatccaagtgaatggggatgttttgggtcacttggatttagacagccaaacttcatccttggggacattcactgtattatcttacaatattcttgctgatacatatgctacaagtgatgcatatagctactgcccaacatgggcacttacctggacttatagaagacaaaatttgttgcgtgaaattattggttatcatgctgatatcatctgtcttcaggaggtacaagtaaaccactttgaagattttttttcacctgagcttgacagacatggatatcaggcgctttacaagaaaaggacaacagaggtgtattctggaaatcctatggccatagatggctgtgctacttttttccgcagagacaagttttcgcatgttaaaaaatacgaggttgagttcaataaggctgcacagtccttaacagatgcgattattccttctgctcagaaaagactggctttaaatcgtttgattaaagacaacattgcactaattgcggttttagaagccaaatttgctaatcatggagctgaaaatcctggtaaaagacagctactttgtgtggcaaatacacatataaatgttcatcaagacctaaaagatgtgaagctatgggaggttcataccctcttaaaaggattggagaagatagctgtcagcgcagacattcctatgttggtctgtggagatttcaactcgccccctgggagttctccacatgcgcttcttgcaatgggcaaagttgatcagcatcatccagatctggcaatagacccccttggaattttacgccctccaagcaagttgaatcatcagcttcctctggtcagtgcatactctgcatttgcaagaatggtaggtgttggctatgatttggagcatcagcggagaaggacagaccctgcaacaaatgaaccactcttcacaaattgcacaagagattttactggaactgttgattacatattttacacagcggactccttgacagtggattcattattggaacttttggatgaggaaagtttaagaaaagacacagctcttccatctcctggatggtcatcagatcacatagcactgttagccgagttccggtgcaagcctagaatcagaagttgacacattaggtcttgtagaaaaaggttattgtcatcatccttggtggtggaacagcgttccatgtgggtatgacgggacgcgggctctcggggaagcaagcagcctaggtagcagcctcagcaaggggaaggggcatgtaacatttgattttacccttttacattttagctcatgatactcaagctgcccatgtgtaccattacttcctatagaagaaaatacttgagagaaattttgaaggctagtttggaaactctattttttccaaggtatttctatttttcaaggggaaatgaaatattttttcgtggaaaaatagaaatctctagaaaaaatgaggttcctaaactagcccttaaagggctataagccccttttttttctttcactctggtcgcgttggatttaacctctttgctgtatccatatgctcgctgcctacaagatgtaggagccttcagtttctctaccaatgtaattccagttccagtttttgttctc

SEQ ID NO: 126464 - DNA, 2162 bp, Zea Mays
aaatttcaacgtccaagggtggcgcgagcacacagacatagaggcacggaaagcagagcgcgaggaagagagagacagagagaaaaacccaaaccctaacaatcatttccaggcccccgccccccggcgtctccagaacgttccagaaccttcaaggaaccatccacaggagcaggcgcgagcgcgggtgtttggatcgtgggaggcaacgctggcggctcgcagcggcagcaggtgatggcggattcgcctagcggtggaggatctagggcttgtgtctgctgggtgagacaggtcgaggaggcagcgtcggggctggtgctcgggagaaacgaacaggggaggagggagggaggatgctgagcgtggtccgggtgcaccttccgtccgagatcccgatcgtgggctgcgaggtcacgccctacgtgctactgcggcggcccgacggtgcagtctccaccgacgatgtccctgaaactgcgcccgctgatggccagttcatgcggtacagatggtaccgcatacagagcgatcggaaagtccctatctgcagtgtgcatccaatggaacaagcgacgattcagtgcctcggttgtctcaagtcaaaaatacctgttgctaagagctaccactgttcagctaaatgtttctctgatgcatggcagcaccacaaagttttgcatgaacgagccagtagtgctcaaaatgaaaatggggctgaagaagaggagttatgtggcagtggtggttctggggttctaagtactgctggatctggttctttgtcaaattttggacagagccctagtattaacaatgaacctgtgcctttgtatccctcaggtactgataaaaattctggagaaacttggtatgaagttgggcgcttgcgaacgtatacaccaactgctgctgatattgggcatgcactaaaatttgagtgtgtagctgtggattcagaaaaaaggtctccaattggacctccgacctcagttatgacgtcacacgtaatccccgcaccaactccgacccctcgtcgccttatccaagtgaatggggatgttttgggtcacttggatttagacagccaaacttcatccttggggacattcactgtattatcttacaatattcttgctgatacatatgctacaagtgatgcatatagctactgcccaacatgggcacttacctggacttatagaagacaaaatttgttgcgtgaaattattggttatcatgctgatatcatctgtcttcaggaggtacaagtaaaccactttgaagattttttttcacctgagcttgacagacatggatatcaggcgctttacaagaaaaggacaacagaggtgtattctggaaatcctatggccatagatggctgtgctacttttttccgcagagacaagttttcgcatgttaaaaaatacgaggttgagttcaataaggctgcacagtccttaacagatgcgattattccttctgctcagaaaagactggctttaaatcgtttgattaaagacaacattgcactaattgcggttttagaagccaaatttgctaatcatggagctgaaaatcctggtaaaagacagctactttgtgtggcaaatacacatataaatgttcatcaagacctaaaagatgtgaagctatgggaggttcataccctcttaaaaggattggagaagatagctgtcagcgcagacattcctatgttggtctgtggagatttcaactcgccccctgggagttctccacatgcgcttcttgcaatgggcaaagttgatcagcatcatccagatctggcaatagacccccttggaattttacgccctccaagcaagttgaatcatcagcttcctctggtcagtgcatactctgcatttgcaagaatggtaggtgttggctatgatttggagcatcagcggagaaggacagaccctgcaacaaatgaaccactcttcacaaattgcacaagagattttactggaactgttgattacatattttacacagcggactccttgacagtggattcattattggaacttttggatgaggaaagtttaagaaaagacacagctcttccatctcctggatggtcatcagatcacatagcactgttagccgagttccggtgcaagcctagaatcaga

SEQ ID NO: 126465 - DNA, 2656 bp, Zea Mays
aaatttcaacgtccaagggtggcgcgagcacacagacatagaggcacggaaagcagagcgcgaggaagagagagacagagagaaaaacccaaaccctaacaatcatttccaggcccccgccccccggcgtctccagaacgttccagaaccttcaaggaaccatccacaggcgcgagcgcgggtgtttggatcgtgggaggcaacgctggcggctcgcagcggcagcaggtgatggcggattcgcctagcggtggaggatctagggcttgtgtctgctgggtgagacaggtcgaggaggcagcgtcggggctggtgctcgggagaaacgaacaggggaggagggagggaggatgctgagcgtggtccgggtgcaccttccgtccgagatcccgatcgtgggctgcgaggtcacgccctacgtgctactgcggcggcccgacggtgcagtctccaccgacgatgtccctgaaactgcgcccgctgatggccagttcatgcggtacagatggtaccgcatacagagcgatcggaaagtccctatctgcagtgtgcatccaatggaacaagcgacgattcagtgcctcggttgtctcaagtcaaaaatacctgttgctaagagctaccactgttcagctaaatgtttctctgatgcatggcagcaccacaaagttttgcatgaacgagccagtagtgctcaaaatgaaaatggggctgaagaagaggagttatgtggcagtggtggttctggggttctaagtactgctggatctggttctttgtcaaattttggacagagccctagtattaacaatgaacctgtgcctttgtatccctcaggtactgataaaaattctggagaaacttggtatgaagttgggcgcttgcgaacgtatacaccaactgctgctgatattgggcatgcactaaaatttgagtgtgtagctgtggattcagaaaaaaggtctccaattggacctccgacctcagttatgacgtcacacgtaatccccgcaccaactccgacccctcgtcgccttatccaagtgaatggggatgttttgggtcacttggatttagacagccaaacttcatccttggggacattcactgtattatcttacaatattcttgctgatacatatgctacaagtgatgcatatagctactgcccaacatgggcacttacctggacttatagaagacaaaatttgttgcgtgaaattattggttatcatgctgatatcatctgtcttcaggaggtacaagtaaaccactttgaagattttttttcacctgagcttgacagacatggatatcaggcgctttacaagaaaaggacaacagaggtgtattctggaaatcctatggccatagatggctgtgctacttttttccgcagagacaagttttcgcatgttaaaaaatacgaggttgagttcaataaggctgcacagtccttaacagatgcgattattccttctgctcagaaaagactggctttaaatcgtttgattaaagacaacattgcactaattgcggttttagaagccaaatttgctaatcatggagctgaaaatcctggtaaaagacagctactttgtgtggcaaatacacatataaatgttcatcaagacctaaaagatgtgaagctatgggaggttcataccctcttaaaaggattggagaagatagctgtcagcgcagacattcctatgttggtctgtggagatttcaactcgccccctgggagttctccacatgcgcttcttgcaatgggcaaagttgatcagcatcatccagatctggcaatagacccccttggaattttacgccctccaagcaagttgaatcatcagcttcctctggtcagtgcatactctgcatttgcaagaatggtaggtgttggctatgatttggagcatcagcggagaaggacagaccctgcaacaaatgaaccactcttcacaaattgcacaagagattttactggaactgttgattacatattttacacagcggactccttgacagtggattcattattggaacttttggatgaggaaagtttaagaaaagacacagctcttccatctcctggatggtcatcagatcacatagcactgttagccgagttccggtgcaagcctagaatcagaagttgacacattaggtcttgtagaaaaaggttattgtcatcatccttggtggtggaacagcgttccatgtgggtatgacgggacgcgggctctcggggaagcaagcagcctaggtagcagcctcagcaaggggaaggggcatgtaacatttgattttacccttttacattttagctcatgatactcaagctgcccatgtgtaccattacttcctatagaagaaaatacttgagagaaattttgaaggctagtttggaaactctattttttccaaggtatttctatttttcaaggggaaatgaaatattttttcgtggaaaaatagaaatctctagaaaaaatgaggttcctaaactagcccttaaagggctataagccccttttttttctttcactctggtcgcgttggatttaacctctttgctgtatccatatgctcgctgcctacaagatgtaggagccttcagtttctctaccaatgtaattccagttccagtttt

SEQ ID NO: 126466 - DNA, 1220 bp, Zea Mays
gggaaggagccacgcgaaagaaagctgacgcccacgcgcccaggagcaccaccggtgacgcgtgatcatattcgagcaccaatcccctcatcctccccagcccccggcgctaaaatctacacaaagcctcgctaaaccggcctgattcgcgctcccgatctcgcgttcgatcccagcccaccgtgaggtcctccagcctcccgcctcccgccagatctcggtgtcgttcgttcggtttcgatttggtggtggaagggaagggatgagcgggatgagcgcacggataaaggagatggtgcgtgtggccacggcgcggctgggcggtgagcaggcggggggtggcggggcttcctcctcaggcttcgcgcgccgggagtccacggcgcggctcggcggcgggggcaccagcctccggaggcagccgcagccgatggcaccctccgtgcgcaccgtctgttgcaacgaccgcgaggccaacgcccctgtcgggtacaagggaaattctgtgtcgactacgaagtacaacatcctaactttcttacctaaaggattattcgagcagttcaggcgggttgcaaatctttactttctcatgatctcaatcatgtcaactacacctatcagtccagttcatcctgtcactaatgttgttcccctaagtcttgtgcttctggtgtctctcatcaaggaagcttttgaggattggaagcgttttcagaatgatatgtcaattaacaatgcacatgtcgatgtattgcaaggtcaatgttgggaaagtactccatggaaacgactgcaggttggagatattgtgaggatcaagcaagatggttatttccctgctgacttgctcttcctatcaagtacaaaccctgatggtgtttgctacatcgagacagcaaatcttgatggggaaacaaatctgaaaataaggaaggctttggagaagacttgggactatgtaattcctgaaaaggcttctgagttcaaaggtgaagtgcagtgtgaacaaccaaacaattccctttatacgtttactggcaatcttatcatggacaagcagactatacctctctcaccgaaccagttactcctaagaggatgcagccttcgtaatacagaatacattgttggtgtaaccgaacatacccttagctgttaaagcatcatgtagggatacttggtagataaaccaaggtggtattgaaaatgcagttagg

SEQ ID NO: 126467 - DNA, 1341 bp, Zea Mays
cttcctgccagaaccgagcggagatcatctggagccgggtcccggcgattaccctgcgcggcgccaatggagcccgaggcggcggtgttggcacagctgcagctgcagctcctcgtcctcgtctctgagttccgccatctccgcgagcgggagcgcggcgcccgcgaggagctccgagacgccggccagaggtgggaggcggcggcggcggaacaacgtagggaggcccgggagctgcgcgtggaggtggcctcgcgggacgactcgctacggaggctcgaggccaggataaaatgccttgagaatgagaatgagcagctggagaaaaacgaaaacaacttgaaagaaagcatggatgtgctgcttcaatccagggaggctttcataaaacactatgaggactctacttgttctatgcagtggacaatccagctgaaggataaacagattgctgtaatgtcagagaaattgaattcacatcttgttttgtttagttcggtagaaaaggaagttgctgctgtgaaacaagtactaggtgatgtgcattgtctagttggtgagaaggaaaatgtagttgctgacttgaaggataaagtccaaaggatttctgtgcttgagaaagattttgtagagaatcttaatttcttggaaagcaaaatcagtgcataccagcttgaactccgtagtagggcgaggatcatatatgagttaaaaaatcgccttcaggatgagaagcttaacagcagttttcagccccatctggaagaagattacgctattgatagattaacttcagagaatcaggcaatgcgtttggaacttcataacatggaaattgctttacagaaatttcaagatttattcagtagtattgggcatgagggaatgaatagtttttcagcaatttctgaaaatcaggacgtacaggatgtgaataatgaacaacatgaaagggttccaggtacacaatgtggtctagcaaatgagcataccttggtaactgcagttgtcaaagaagccaccacacaaaatgtagatcaccagttggaaactgatccaggcagcatgcaagtacaaagcccagtgcacttcaagtctggtgcaatgccatctccggagctagtagctgcaaatacagaaaaagctgacagccttcttgaacccaatgtagacattggcatgggcagtttatctcctgcacgaccaacagattgtttgaatatggatcttgacacggagagtcagtcctgacaatgcaatttatatcccttcacacctggtattcggatacgtatatttaacaatctcgtagttggttgtggagcatattttattattttc

SEQ ID NO: 126468 - DNA, 1771 bp, Zea Mays
cttcctgccagaaccgagcggagatcatctggagccgggtcccggcgattaccctgcgcggcgccaatggagcccgaggcggcggtgttggcacagctgcagctgcagctcctcgtcctcgtctctgagttccgccatctccgcgagcgggagcgcggcgcccgcgaggagctccgagacgccggccagaggtgggaggcggcggcggcggaacaacgtagggaggcccgggagctgcgcgtggaggtggcctcgcgggacgactcgctacggaggctcgaggccaggataaaatgccttgagaatgagaatgagcagctggagaaaaacgaaaacaacttgaaagaaagcatggatgtgctgcttcaatccagggaggctttcataaaacactatgaggcaggcaggactctacttgttctatgcagtggacaatccagctgaaggataaacagattgctgtaatgtcagagaaattgaattcacatcttgttttgtttagttcggtagaaaaggaagttgctgctgtgaaacaagtactaggtgatgtgcattgtctagttggtgagaaggaaaatgtagttgctgacttgaaggataaagtccaaaggatttctgtgcttgagaaagattttgtagagaatcttaatttcttggaaagcaaaatcagtgcataccagcttgaactccgtagtagggcgaggatcatatatgagttaaaaaatcgccttcaggatgagaagcttaacagcagttttcagccccatctggaagaacttaataaaactttgttggtgaaggattacgctattgatagattaacttcagagaatcaggcaatgcgtttggaacttcataacatggaaattgctttacagaaatttcaagatttattcagtagtattgggcatgagggaatgaatagtttttcagcaatttctgaaaatcaggacgtacaggatgtgaataatgaacaacatgaaagggttccaggtacacaatgtggtctagcaaatgagcataccttggtaactgcagttgtcaaagaagccaccacacaaaatgtagatcaccagttggaaactgatccaggcagcatgcaagtacaaagcccagtgcacttcaagtctggtgcaatgccatctccggagctagtagctgcaaatacagaaaaagctgacagccttcttgaacccaatgtagacattggcatgggcagtttatctcctgcacgaccaacagattgtttgaatatggatcttgacacggagagtcagtcctgacaatgcaatttatatcccttcacacctggtattcggatacgtatatttaacaatctcgtagttggttgtggagcatattttattattttcttgtagttgatcaactgtcttgtgtgcgtagcctgtttagttagccactaaagagatagatcaggtagtgtaaagagcatcttggctcatctctctaccgccacaatgtccgagattcggatggcagctcagctgatgagaccgaggagaaagaaatgatagctgtcattgtctcttgggataaatctgagggctcttattggaggagatgaaaaaaacagactcttaaaaataggaggggctctcaaaagaaaaatagagagctatatttcgagggctgttgctagactggagatgctctaaggtgtatttgttttttggcttttgttctaagactgtctccaacaacgttctttatattcatcctctatatctgtcttttacagtcttctaaaaga

SEQ ID NO: 126469 - DNA, 1774 bp, Zea Mays
cttcctgccagaaccgagcggagatcatctggagccgggtcccggcgattaccctgcgcggcgccaatggagcccgaggcggcggtgttggcacagctgcagctgcagctcctcgtcctcgtctctgagttccgccatctccgcgagcgggagcgcggcgcccgcgaggagctccgagacgccggccagaggtgggaggcggcggcggcggaacaacgtagggaggcccgggagctgcgcgtggaggtggcctcgcgggacgactcgctacggaggctcgaggccaggataaaatgccttgagaatgagaatgagcagctggagaaaaacgaaaacaacttgaaagaaagcatggatgtgctgcttcaatccagggaggctttcataaaacactatgaggactctacttgttctatgcagtggacaatccagctgaaggataaacagattgctgtaatgtcagagaaattgaattcacatcttgttttgtttagttcggtagaaaaggaagttgctgctgtgaaacaagtactaggtgatgtgcattgtctagttggtgagaaggaaaatgtagttgctgacttgaaggataaagtccaaaggatttctgtgcttgagaaagattttgtagagaatcttaatttcttggaaagcaaaatcagtgcataccagcttgaactccgtagtagggcgaggatcatatatgagttaaaaaatcgccttcaggatgagaagcttaacagcagttttcagccccatctggaagaacttaataaaactttgttggtgaaggattacgctattgatagattaacttcagagaatcaggcaatgcgtttggaacttcataacatggaaattgctttacagaaatttcaagatttattcagtagtattgggcatgagggaatgaatagtttttcagcaatttctgaaaatcaggacgtacaggatgtgaataatgaacaacatgaaagggttccaggtacacaatgtggtctagcaaatgagcataccttggtaactgcagttgtcaaagaagccaccacacaaaatgtagatcaccagttggaaactgatccaggcagcatgcaagtacaaagcccagtgcacttcaagtctggtgcaatgccatctccggagctagtagctgcaaatacagaaaaagctgacagccttcttgaacccaatgtagacattggcatgggcagtttatctcctgcacgaccaacagattgtttgaatatggatcttgacacggagagtcagtcctgacaatgcaatttatatcccttcacacctggtattcggatacgtatatttaacaatctcgtagttggttgtggagcatattttattattttcttgtagttgatcaactgtcttgtgtgcgtagcctgtttagttagccactaaagagatagatcaggtagtgtaaagagcatcttggctcatctctctaccgccacaatgtccgagattcggatggcagctcagctgatgagaccgaggagaaagaaatgatagctgtcattgtctcttgggataaatctgagggctcttattggaggagatgaaaaaaacagactcttaaaaataggaggggctctcaaaagaaaaatagagagctatatttcgagggctgttgctagactggagatgctctaaggtgtatttgttttttggcttttgttctaagactgtctccaacaacgttctttatattcatcctctatatctgtcttttacagtcttctaaaagattcttttctct

SEQ ID NO: 126470 - DNA, 174 bp, Zea Mays
atgcaggtcacacagagtgcagtcaaggttgttgtccggtggaaaaaagccctttcttctaagaatgttcttggagttgattctgtctctgaagaccaaccatacaaaaatcttgaatttcttctcaaccttggactgccaaatccaattaaagacaacgagaggctggattga

SEQ ID NO: 126471 - DNA, 2190 bp, Zea Mays
ctgcctaggttcaccccgattcaactccgacttcgcgagtcgtgtctcacctctatcgccatccgttccctactccacttcaatctgctattcctgctccactccgcttcaatccgccgcccctgctccagtaggaacgttccccaccccggcaaccccccacgctagctactccggagcaccggaacgcaccgtcgcccccgtcaagcaggttgcgccgcccgcccgtggtgccggcgctgtgctggaggcggtggagctggggccgtggggaagcttctcgctggggagagccgggacaagctagagcgacggacatgggtcaccagtaagccacggtcaggggcatttcagtcctacctagcagtggtgatggcaaaaatctaacataatgcaagaaaaaccttggaatgaatgtacaagccacttagggtgctgtattagagctgtaacaggatgggttcgttatgctgcgtggcggcacggcctcatggggctagcacagcaagccgggagtggtcctctattagccgtagcgacccaccctggcgtactggtgctggcttctccccacctctgtctagagggtgggagtacaggatcaactcggaagggctgtcttatggatcccatggtgatagtggggtcgctgtgaactatggatcatcactatcatcaaatagtaaaggggctagtaggagctgggagaggaatgagcttccacaagatcaccgctactctacatctgagggtgccatttcgtatctcaacagcccagatatcagcttccagaatcaccatattatgctaccgatgctgcaagattctagtgttgatgaatacatgagagtcgctgagcctattggttctttattattgtcagagggaatgtcaggtcaacataatagtggtggttccacctcctcttgctctgatggaagcgaatatgatattgtacctaaatcatacacatcaacgccccgcaacttcccaagtcgtcgatcattcctgtcgaagccaatccaccctgtttcatttccagaacatgcactagaagcacaggaaactcgaagtcatgttgcaagcgcaagctccaacaatcctctgtgctctgaatacaagggaacaggagaactttgcttcccggactacggtagcggccgtcacggggagtcaggaaattggagtgctgcaagcagcatggatcttactgatctatcagaacaacccgaagctggacaagctggactactgcgtcctaacaatgcaatgcagaaaacaaggtgcgacctctgcgagaggcttctgacaaagaggtcaccttgtggttctcgtagaatcgtacgcaccggagatttgcctgttgctggtgttctaccatgctcccatgtctaccatgccgagtgtctagagcggaccacacccaaggggcagaagcacgaccctccttgccccgtgtgcgacaagctggctggtaaagataccgagcagtggtcaatctgcaggttgaaaaatgggttcccaaggttccgctcgctaggggaagggccttctcgggttttcagctgcgctgatgctggagattgcgttgctggggccgttcagattccaagatcaaatagcatcgggctattgactcgcagtggtcacaagaggcatgcatcttcgaagggagagcccagcaaagactcggctgagacatcaagaaatgcttgcatgtaacttcctaatgcactcagtaggtcttatgtccatgaccttgcattgttatagttgcaaggtcttatgtccatgacctcgcattgttatagttgcaaggttatgtatgcatgcttacggatgttttcatggcttaatggcgccgctaggaaatgacatagatatgcctgtttatctcctatcatccctggtttgatgacaaggggataggagaggagaggaaatcccttgctattcaaaaaattttcttcaccatggatcccctctaattctcttgtcgccaaactagctctcggttatcaggttgccacttgtgcataatgttgttcagttgtattgtgctggaaatcgcaagtaaactgctcatccagttctatgaaactaccgcaattacctggcccctacagtctacggccctacattgtaacactgtatggttgtaacgctgtcaatattgagacgagatttgac

SEQ ID NO: 126472 - DNA, 2196 bp, Zea Mays
ctgcctaggttcaccccgattcaactccgacttcgcgagtcgtgtctcacctctatcgccatccgttccctactccacttcaatctgctattcctgctccactccgcttcaatccgccgcccctgctccagtaggaacgttccccaccccggcaaccccccacgctagctactccggagcaccggaacgcaccgtcgcccccgtcaagcaggttgcgccgcccgcccgtggtgccggcgctgtgctggaggcggtggagctggggccgtggggaagcttctcgctggggagagccgggacaagctagagcgacggacatgggtcaccagtaagccacggtcaggggcatttcagtcctacctagcagtggtgatggcaaaaatctaacataatgcaagaaaaaccttggaatgaatgtacaagccacttagggtgctgtattagagctgtaacaggatgggttcgttatgctgcgtggcggcacggcctcatggggctagcacagcaagccgggagtggtcctctattagccgtagcgacccaccctggcgtactggtgctggcttctccccacctctgtctagagggtgggagtacaggatcaactcggaagggctgtcttatggatcccatggtgatagtggggtcgctgtgaactatggatcatcactatcatcaaatagtaaaggggctagtaggagctgggagaggaatgagcttccacaagatcaccgctactctacatctgagggtgccatttcgtatctcaacagcccagatatcagcttccagaatcaccatattatgctaccgatgctgcaagattctagtgttgatgaatacatgagagtttcagtcgctgagcctattggttctttattattgtcagagggaatgtcaggtcaacataatagtggtggttccacctcctcttgctctgatggaagcgaatatgatattgtacctaaatcatacacatcaacgccccgcaacttcccaagtcgtcgatcattcctgtcgaagccaatccaccctgtttcatttccagaacatgcactagaagcacaggaaactcgaagtcatgttgcaagcgcaagctccaacaatcctctgtgctctgaatacaagggaacaggagaactttgcttcccggactacggtagcggccgtcacggggagtcaggaaattggagtgctgcaagcagcatggatcttactgatctatcagaacaacccgaagctggacaagctggactactgcgtcctaacaatgcaatgcagaaaacaaggtgcgacctctgcgagaggcttctgacaaagaggtcaccttgtggttctcgtagaatcgtacgcaccggagatttgcctgttgctggtgttctaccatgctcccatgtctaccatgccgagtgtctagagcggaccacacccaaggggcagaagcacgaccctccttgccccgtgtgcgacaagctggctggtaaagataccgagcagtggtcaatctgcaggttgaaaaatgggttcccaaggttccgctcgctaggggaagggccttctcgggttttcagctgcgctgatgctggagattgcgttgctggggccgttcagattccaagatcaaatagcatcgggctattgactcgcagtggtcacaagaggcatgcatcttcgaagggagagcccagcaaagactcggctgagacatcaagaaatgcttgcatgtaacttcctaatgcactcagtaggtcttatgtccatgaccttgcattgttatagttgcaaggtcttatgtccatgacctcgcattgttatagttgcaaggttatgtatgcatgcttacggatgttttcatggcttaatggcgccgctaggaaatgacatagatatgcctgtttatctcctatcatccctggtttgatgacaaggggataggagaggagaggaaatcccttgctattcaaaaaattttcttcaccatggatcccctctaattctcttgtcgccaaactagctctcggttatcaggttgccacttgtgcataatgttgttcagttgtattgtgctggaaatcgcaagtaaactgctcatccagttctatgaaactaccgcaattacctggcccctacagtctacggccctacattgtaacactgtatggttgtaacgctgtcaatattgagacgagatttgac

SEQ ID NO: 126473 - DNA, 2233 bp, Zea Mays
ctgcctaggttcaccccgattcaactccgacttcgcgagtcgtgtctcacctctatcgccatccgttccctactccacttcaatctgctattcctgctccactccgcttcaatccgccgcccctgctccagtaggaacgttccccaccccggcaaccccccacgctagctactccggagcaccggaacgcaccgtcgcccccgtcaagcaggttgcgccgcccgcccgtggtgccggcgctgtgctggaggcggtggagctggggccgtggggaagcttctcgctggggagagccgggacaagctagagcgacggacatgggtcaccagtaagccacggtcaggggcatttcagtcctacctagcagtggtgatggcaaaaatctaacataatgattgaagtgttatctgaataggaatgctctggtggatttgcagcaagaaaaaccttggaatgaatgtacaagccacttagggtgctgtattagagctgtaacaggatgggttcgttatgctgcgtggcggcacggcctcatggggctagcacagcaagccgggagtggtcctctattagccgtagcgacccaccctggcgtactggtgctggcttctccccacctctgtctagagggtgggagtacaggatcaactcggaagggctgtcttatggatcccatggtgatagtggggtcgctgtgaactatggatcatcactatcatcaaatagtaaaggggctagtaggagctgggagaggaatgagcttccacaagatcaccgctactctacatctgagggtgccatttcgtatctcaacagcccagatatcagcttccagaatcaccatattatgctaccgatgctgcaagattctagtgttgatgaatacatgagagtcgctgagcctattggttctttattattgtcagagggaatgtcaggtcaacataatagtggtggttccacctcctcttgctctgatggaagcgaatatgatattgtacctaaatcatacacatcaacgccccgcaacttcccaagtcgtcgatcattcctgtcgaagccaatccaccctgtttcatttccagaacatgcactagaagcacaggaaactcgaagtcatgttgcaagcgcaagctccaacaatcctctgtgctctgaatacaagggaacaggagaactttgcttcccggactacggtagcggccgtcacggggagtcaggaaattggagtgctgcaagcagcatggatcttactgatctatcagaacaacccgaagctggacaagctggactactgcgtcctaacaatgcaatgcagaaaacaaggtgcgacctctgcgagaggcttctgacaaagaggtcaccttgtggttctcgtagaatcgtacgcaccggagatttgcctgttgctggtgttctaccatgctcccatgtctaccatgccgagtgtctagagcggaccacacccaaggggcagaagcacgaccctccttgccccgtgtgcgacaagctggctggtaaagataccgagcagtggtcaatctgcaggttgaaaaatgggttcccaaggttccgctcgctaggggaagggccttctcgggttttcagctgcgctgatgctggagattgcgttgctggggccgttcagattccaagatcaaatagcatcgggctattgactcgcagtggtcacaagaggcatgcatcttcgaagggagagcccagcaaagactcggctgagacatcaagaaatgcttgcatgtaacttcctaatgcactcagtaggtcttatgtccatgaccttgcattgttatagttgcaaggtcttatgtccatgacctcgcattgttatagttgcaaggttatgtatgcatgcttacggatgttttcatggcttaatggcgccgctaggaaatgacatagatatgcctgtttatctcctatcatccctggtttgatgacaaggggataggagaggagaggaaatcccttgctattcaaaaaattttcttcaccatggatcccctctaattctcttgtcgccaaactagctctcggttatcaggttgccacttgtgcataatgttgttcagttgtattgtgctggaaatcgcaagtaaactgctcatccagttctatgaaactaccgcaattacctggcccctacagtctacggccctacattgtaacactgtatggttgtaacgctgtcaatattgagacgagatttgac

SEQ ID NO: 126474 - DNA, 2343 bp, Zea Mays
ctgcctaggttcaccccgattcaactccgacttcgcgagtcgtgtctcacctctatcgccatccgttccctactccacttcaatctgctattcctgctccactccgcttcaatccgccgcccctgctccagtaggaacgttccccaccccggcaaccccccacgctagctactccggagcaccggaacgcaccgtcgcccccgtcaagcaggttgcgccgcccgcccgtggtgccggcgctgtgctggaggcggtggagctggggccgtggggaagcttctcgctggggagagccgggacaagctagagcgacggacatgggtcaccagtaagccacggtcaggggcatttcagtcctacctagcagtggtgatggcaaaaatctaacataatggtaaatttgggatctttgcatatcattccttgtttcttttaaggtcttagatattagacagagtttcattgaaactaagatcagttggttaccccgccacacagattgaagtgttatctgaataggaatgctctggtggatttgcagcaagaaaaaccttggaatgaatgtacaagccacttagggtgctgtattagagctgtaacaggatgggttcgttatgctgcgtggcggcacggcctcatggggctagcacagcaagccgggagtggtcctctattagccgtagcgacccaccctggcgtactggtgctggcttctccccacctctgtctagagggtgggagtacaggatcaactcggaagggctgtcttatggatcccatggtgatagtggggtcgctgtgaactatggatcatcactatcatcaaatagtaaaggggctagtaggagctgggagaggaatgagcttccacaagatcaccgctactctacatctgagggtgccatttcgtatctcaacagcccagatatcagcttccagaatcaccatattatgctaccgatgctgcaagattctagtgttgatgaatacatgagagtttcagtcgctgagcctattggttctttattattgtcagagggaatgtcaggtcaacataatagtggtggttccacctcctcttgctctgatggaagcgaatatgatattgtacctaaatcatacacatcaacgccccgcaacttcccaagtcgtcgatcattcctgtcgaagccaatccaccctgtttcatttccagaacatgcactagaagcacaggaaactcgaagtcatgttgcaagcgcaagctccaacaatcctctgtgctctgaatacaagggaacaggagaactttgcttcccggactacggtagcggccgtcacggggagtcaggaaattggagtgctgcaagcagcatggatcttactgatctatcagaacaacccgaagctggacaagctggactactgcgtcctaacaatgcaatgcagaaaacaaggtgcgacctctgcgagaggcttctgacaaagaggtcaccttgtggttctcgtagaatcgtacgcaccggagatttgcctgttgctggtgttctaccatgctcccatgtctaccatgccgagtgtctagagcggaccacacccaaggggcagaagcacgaccctccttgccccgtgtgcgacaagctggctggtaaagataccgagcagtggtcaatctgcaggttgaaaaatgggttcccaaggttccgctcgctaggggaagggccttctcgggttttcagctgcgctgatgctggagattgcgttgctggggccgttcagattccaagatcaaatagcatcgggctattgactcgcagtggtcacaagaggcatgcatcttcgaagggagagcccagcaaagactcggctgagacatcaagaaatgcttgcatgtaacttcctaatgcactcagtaggtcttatgtccatgaccttgcattgttatagttgcaaggtcttatgtccatgacctcgcattgttatagttgcaaggttatgtatgcatgcttacggatgttttcatggcttaatggcgccgctaggaaatgacatagatatgcctgtttatctcctatcatccctggtttgatgacaaggggataggagaggagaggaaatcccttgctattcaaaaaattttcttcaccatggatcccctctaattctcttgtcgccaaactagctctcggttatcaggttgccacttgtgcataatgttgttcagttgtattgtgctggaaatcgcaagtaaactgctcatccagttctatgaaactaccgcaattacctggcccctacagtctacggccctacattgtaacactgtatggttgtaacgctgtcaatattgagacgagatttgac

SEQ ID NO: 126475 - DNA, 931 bp, Zea Mays
tgcttcctgcgtccccgtcctggtgatcacgcccagatcaaatcctattcaaatttggagcgcaatatggctgaagagaagagccgtccgcggctgaacgagcggatcatgtcgtccctctcaaagcggtcggtcgctgcgcattcctggcatgaccttgagataggacctggagcccctgctgttttcaattgtgttgttgagatcacaaagggcagtaaagtgaaatatgagctagacaagaagaccggaatgatcaaggttgacagggtgctatactcatcagtggtctacccacacaactacggtttcattccacgaacattgtgtgaagacggagatccaatggatgtgctggtgttgatgcaggaaccggtgatacctggctgttttcttcgggcaagggccatcggccttatgcccatgattgatcagggtgagaaagatgataagataattgcagtttgtgttgacgatcctgagtaccgccacttaaccgatctcaaggagctttctccgcaccgccttaatgaaatccgtcgcttctttgaagactacaagaagaacgagaacaaggaggttgctgtgaacgatttcttgccaccaactacttccctggaggccattcaacactcaatggacctgtacgctgaatacatcctgcacagtttgaggcgctagatctggtttccagatggaacagtccctctcctggtctcagggggaaaaaaaataagcaataaccgatcagcctcctggctttgtttcaggagccgttttgcggtatatataacttgatcaagggataatgtgattcttctgcaagttactgcatataatatgctaaccatgagatatatattgtctacttctgtacatttttgtggaatatttgagtcaacgattggagtctcttcttgctttctgtcaa

SEQ ID NO: 126476 - DNA, 128 bp, Zea Mays
tgttagtaaacacgtgactaggcaaactatttacaagtatttcacctcctttctcactagccataaattaatccatctcaagtactaacgtcaacactctactccaatgcaacttttgcacaaggatc

SEQ ID NO: 126477 - DNA, 2460 bp, Zea Mays
aaaccgatgcagtgaaacagatggcttgaccggttccatatgcggcggcggcacacgccatacagcagggaaagcattcgccgcagacccgtggtagaagaagagggtgagaccagtccatctatttctagctatccatcttctatatatatacgcagttatattatatggccaattagatagagattagagagggagctgggaatgaaattttgtacagggaagagagagagagagggtagttgatgggaagggtttgatgtgactgccctttcttttcgctttgcttcctggatccaactgccgccgccgcatctgtcttcgttgattcggtgttcttcgatcggatgcctttatctgcctaggtacgtgcgccgattcttgcgtcgggggattcaattctcggatgggtggagggggattcgtcattcgtgttactgagctatgagtgggtggatgggttcgtgaggtgcttaccagatctcagcttctcgatctgtccttcgcgatttgtcgcccaattcgtttacctcctcctatttctgctcgcagatcggagcaagagcaaagcgcggggtgtaaatcctgagaggaggaagagaaggaggagaggagatcgagaccggctccccccgtcttgcttgtgcttgtcgcgtacggttcttgtaagaacccgcagctgccgcgtccggttctttcaagaacccgcggcggggatggatctgtacgacaagcgagaggacatggcgttgcaagacggggactcctgcctggcttcccgggcttcgcggggcggatgcgacgtcgatttacagtgggtggatggcctcctcgaaggcgccggacggaagcggcgtgcgccggaagacttcgaagacgaggtccagaaaatggacgaggtggatggcggtggcaagcgcagcaagccgccgtcaccgcagccacacacgccagatattcatgaagctcatgtccctggccgccgcaccaccgtggtggctggtggtggggagcacagcggtggtgggggtgacctcataggagaaatcggtcgggacctgtccatcaactgcctcctccggctgtctcggtcagagtatggctcagtggcatcgttgaatcatgatttccggtctctggtgagaggaggggggatctacaggctgcggcggcagaataacatagcggagcattgggtgtacttctcctgtaatgttttggagtgggatgcctatgacccctaccgcaagcgttggatctcggtgcccaagatgccgcctgacgagtgcttcatgtgctcggacaaggagtctttggctgtgggcaccgaactacttgtgtttgggatggcacatattgtcttcagatacagtatactgacaaactcttggtcacgaggtgaggtgatgaactctcctcggtgtttatttgggtcggcaagcgttggtgagaaggcatatgttgctggtggcactgattctcttggcaggatccttagctcagcagagctatacaactctgagacacatacttggacacctcttcctagcatgaataaggcacggaaaaattgctctgggttgttcatggatggcaagttttatgtaattggcggtgtgacaaacaacaacatggtattgacctgcggtgaagtgtacgatgtgcagagcaagacttggagggtgatcgagaacatgtctggtggtctaaatggagtgagcggtgcacccccacttgttgcagtggtcaagaatgagctttatgctgctgactatagtgagaaggatgtgaagaagtatgacaagcagaataataggtggatcacacttggtaaattgcctgagcgatctgtgtccatgaatggatggggccttgcattcagggcatgtggtgagaggcttattgtcattggtggcccaagaacgccagttgggggaacgattgagctaacctcatggattcctgatgacaagccacctgtgtggaatctgatggacagacggccatctggaaattttgtgtataattgcgctgtgatgagctgctgagttcacttcatcaaggattctgcacagtgatgtttacaaagagaggtattcacaatggaaggcctgtttagcttcagcactccatgagtttctgcctttgacctggtagctgatgtagttggcatcagcagagcagcagcaggatcttgtaaaacttgagttcatacgtcagtttccgccccgactaatccttttctttcatttacatttggatcagtcttaagatctagaagatgataccatgcaaaagatgtcataccaataatctagaaacatcaaatttcggaggccttccatcattgatgatgccatagcaatttgttttgatcatattcccttatctatgtctgcaacaaaagaagtgaccatcttgttattactgtattattatttttgagttatcatatatgtt

SEQ ID NO: 126478 - DNA, 2389 bp, Zea Mays
aaaccgatgcagtgaaacagatggcttgaccggttccatatgcggcggcggcacacgccatacagcagggaaagcattcgccgcagacccgtggtagaagaagagggtgagaccagtccatctatttctagctatccatcttctatatatatacgcagttatattatatggccaattagatagagattagagagggagctgggaatgaaattttgtacagggaagagagagagagagggtagttgatgggaagggtttgatgtgactgccctttcttttcgctttgcttcctggatccaactgccgccgccgcatctgtcttcgttgattcggtgttcttcgatcggatgcctttatctgcctagatcggagcaagagcaaagcgcggggtgtaaatcctgagaggaggaagagaaggaggagaggagatcgagaccggctccccccgtcttgcttgtgcttgtcgcgtacggttcttgtaagaacccgcagctgccgcgtccggttctttcaagaacccgcggcggggatggatctgtacgacaagcgagaggacatggcgttgcaagacggggactcctgcctggcttcccgggcttcgcggggcggatgcgacgtcgatttacagtgggtggatggcctcctcgaaggcgccggacggaagcggcgtgcgccggaagacttcgaagacgaggtccagaaaatggacgaggtggatggcggtggcaagcgcagcaagccgccgtcaccgcagccacacacgccagatattcatgaagctcatgtccctggccgccgcaccaccgtggtggctggtggtggggagcacagcggtggtgggggtgacctcataggagaaatcggtcgggacctgtccatcaactgcctcctccggctgtctcggtcagagtatggctcagtggcatcgttgaatcatgatttccggtctctggtgagaggaggggggatctacaggctgcggcggcagaataacatagcggagcattgggtgtacttctcctgtaatgttttggagtgggatgcctatgacccctaccgcaagcgttggatctcggtgcccaagatgccgcctgacgagtgcttcatgtgctcggacaaggagtctttggctgtgggcaccgaactacttgtgtttgggatggcacatattgtcttcagatacagtatactgacaaactcttggtcacgaggtgaggtgatgaactctcctcggtgtttatttgggtcggcaagcgttggtgagaaggcatatgttgctggtggcactgattctcttggcaggatccttagctcagcagagctatacaactctgagacacatacttggacacctcttcctagcatgaataaggcacggaaaaattgctctgggttgttcatggatggcaagttttatgtaattggcggtgtgacaaacaacaacatggtattgacctgcggtgaagtgtacgatgtgcagagcaagacttggagggtgatcgagaacatgtctggtggtctaaatggagtgagcggtgcacccccacttgttgcagtggtcaagaatgagctttatgctgctgactatagtgagaaggatgtgaagaagtatgacaagcagaataataggtggatcacacttggtaaattgcctgagcgatctgtgtccatgaatggatggggccttgcattcagggcatgtggtgagaggcttattgtcattggtggcccaagaacgccagttgggggaacgattgagctaacctcatggattcctgatgacaagccacctgtgtggaatctgatggacagacggccatctggaaattttgtgtataattgcgctgtgatgagctgctgagttcacttcatcaaggattctgcacagtgatgtttacaaagagaggtattcacaatggaaggcctgtttagcttcagcactccatgagtttctgcctttgacctggtagctgatgtagttggcatcagcagagcagcagcaggatcttgtaaaacttgagttcatacgtcagtttccgccccgactaatccttttctttcatttacatttggatcagtcttaagatctagaagatgataccatgcaaaagatgtcataccaataatctagaaacatcaaatttcggaggccttccatcattgatgatgccatagcaatttgttttgatcatattcccttatctatgtctgcaacaaaagaagtgaccatcttgttattactgtattattatttttgagttatcatatatgttgcactttcattcctttatacatttatttggatggatgaccttgggatgggttccagctaaactgtttgaacagagcatgattataaattggactcctgtttggagtttggactatt

SEQ ID NO: 126479 - DNA, 2118 bp, Zea Mays
atggatctgtacgacaagcgagaggacatggcgttgcaagacggggactcctgcctggcttcccgggcttcgcggggcggatgcgacgtcgatttacagtgggtggatggcctcctcgaaggcgccggacggaagcggcgtgcgccggaagacttcgaagacgaggtccagaaaatggacgaggtggatggcggtggcaagcgcagcaagccgccgtcaccgcagccacacacgccagatattcatgaagctcatgtccctggccgccgcaccaccgtggtggctggtggtggggagcacagcggtggtgggggtgacctcataggagaaatcggtcgggacctgtccatcaactgcctcctccggctgtctcggtcagagtatggctcagtggcatcgttgaatcatgatttccggtctctggtgagaggaggggggatctacaggctgcggcggcagaataacatagcggagcattgggtgtacttctcctgtaatgttttggagtgggatgcctatgacccctaccgcaagcgttggatctcggtgcccaagatgccgcctgacgagtgcttcatgtgctcggacaaggagtctttggctgtgggcaccgaactacttgtgtttgggatggcacatattgtcttcagatacagtatactgacaaactcttggtcacgaggtgaggtgatgaactctcctcggtgtttatttgggtcggcaagcgttggtgagaaggcatatgttgctggtggcactgattctcttggcaggatccttagctcagcagagctatacaactctgagacacatacttggacacctcttcctagcatgaataaggcacggaaaaattgctctgggttgttcatggatggcaagttttatgtaattggcggtgtgacaaacaacaacatggtattgacctgcggtgaagtgtacgatgtgcagagcaagacttggagggtgatcgagaacatgtctggtggtctaaatggagtgagcggtgcacccccacttgttgcagtggtcaagaatgagctttatgctgctgactatagtgagaaggatgtgaagaagtatgacaagcagaataataggtggatcacacttggtaaattgcctgagcgatctgtgtccatgaatggatggggccttgcattcagggcatgtggtgagaggcttattgtcattggtggcccaagaacgccagttgggggaacgattgagctaacctcatggattcctgatgacaagccacctgtgtggaatctgatggacagacggccatctggaaattttgtgtataattgcgctgtgatgagctgctgagttcacttcatcaaggattctgcacagtgatgtttacaaagagagaagctgatgctcatgaactgaatacaaacaaaagatttccatgacacttaaaccagtgactgttgtgagtgctgggttcttttttggacaagtacctctttggactgttcttttttgagtaaggaaaaagggcgctagatttgacatggtaatctgaatttcaaaggattttgattccttgttctcgatggaaatctagctggtttgagatgctcaccagtcaccattttgtttgacaaaactaactggtataatccgttattggagtctgactgcaaaaaggtatatttccatgtgtttcgtccgcagcacagggttattgcacctggtagaaatcaggtgctgttccatcactagttcgacttgagatttgctctgttttttaaagaataaaacagtgaactcttgcaccatttcgcttttgttacatagtgattttctgacttgagatttgctctgttttttaaatactatctgacggaggaatgtaaatgtgcaagttggcgtaaggttctcgactctgaacctctgacattaaccgttctcttccaacatagtgattttctgcactttaccaagtttttacacctctgcagcagctaatcatttttttgctgaattaatagttttttatgcggtagtgtgaactactttttttttcatttttgttgggagtcttaacatgaggccatgacccataagcactcaattgtcgcacatatacggcatatttttattttg

SEQ ID NO: 126480 - DNA, 75 bp, Zea Mays
gatcttgtaaaacttgagttcatacaagctgatgctcatgaactgaatacaaacaaaagatttccatgacactta

SEQ ID NO: 126481 - DNA, 227 bp, Zea Mays
ctttcatgtaagtattttttctatcaacatttgcaaaaagtttcgggtccaactgaacgtgttgtcggtgcatctagaaaagagcacaagaattcatggggctaagaagaccgtaggataaaattaagcaagaccggaaaaaagtagtgttgaatataatttaagttttacatcaatatatgatcagattcaaaaagaaaacaatataaacaaaagaaataaatata

SEQ ID NO: 126482 - DNA, 624 bp, Zea Mays
ttcggtaaactgtaaaaatgttctcctcaatttgaccagattccttaagattattacaattaccagtttcaatttacgtgacagtattacaattactaccttcatttgcgcgacagcaaatacgagtagaagccattaagtacaaacctagcacaaggagctggcatttgttgtatttagctggcaacctcaactggttcagatcccttgtcaatagaagctttcacggcatccagtaccacctgcgtcttccgggtgatagccggccacttaccctcaggcctgccaccggcgcggacgttctgcacaagccttgtgaattcctggatcatgagtgcctcctgtggcagatcagtagtaacaacatgcttctctggcaatggatcccatccgatggtgggtttgacgaagcttgacttcgaggccacactgaactccgcagagctctcttcgtacggaatgaccaggtcagtgacatggagagtgccgtttgtgccatagacggtcacgtcaaaggcgaggttagcaagaaacgagcagttgaagtttgcagtcttgccatctgcccagtacaaggtcgcaccgcaagcaaggagcacgccagcctggttcttgacaggatgg

SEQ ID NO: 126483 - DNA, 896 bp, Zea Mays
atatataggggctgagaaggagaggagattctcgtaccatgcatgtgttcaaaacggaaagtctgatctgaagccagcagacgtgaaaccgacagcacgtacgtacgtgtgagggctgagggctgctcggcggccatgggacaatggtgctttaagaaacgcgcagctctggtgattattgtggccattagctcgctgcagctgctcctgataactgctcaagaagctggaggagaccacgaggtgtggtcgtcgtcatcctcgccggccggtggtcgtggtggcggcgccgtcgtcgtcccgacggcgcggatggggccggacgggtcgtcgacgtcgtgttcgggggaggaggcggtggtggtgtaccagagcagcgccaaccctctgcccagcggcatcccggcctacaccgtgcagatcatcaacgtctgcggcggagggtgcaccgtgtacgacgtgcacgtctcctgcggcgacttcgcctccacggagctcgtcgacccggccaagttccagcgcgtcgccttcgacgactgcgtcgtcaagggcggcgccgccttggaacccagcgagaccgtctccttccagtactccaactccttctcctaccagctcagtgtcgcctccgtcgcgtgccactagagatcatcgaaccacaggaccactactactagatgatcatcgtcggtcgtcgttacgttgtgctgtactagtactactgctgttgttatgctaactagctagttccacgtacgttaattgttcagtctatctgcacttctgtttaatttctatcgtgtgtgtgtaactatatatttctacggtcgtcgtagttcggcatcaaactggaagtgatcaatcaagggaaaaatctctatctctactatattaaa

SEQ ID NO: 126484 - DNA, 309 bp, Zea Mays
atggagaaaactggagcagggagggaacgacgtccatgggaggagttggggtcggccatgggagatggctggaaacggccatgggagggagctggtgactgccggcgtccaaggtcaggggcggaagccgagggagtagggagcgttggagcgcagcgaggtctgagcatcggcgagggaacgacagccacggtggaagagaaaggaacggggcagcggcgtcggcgatgcgcgccgccgagcgccgggatggggtcgcggcgtcagcgaccgtcgggaaccacacgagcagcaggcggcggcggctga

SEQ ID NO: 126485 - DNA, 183 bp, Zea Mays
ttttcttttccataattctattttttcttttctacaattattttttttctttactacaatttagcgatcaatgtttatttgttttaattaatttttagtcactaacatctacatgtacgttcagtctataagatttgatagtgatcattgctctatagcgacccaccgctagttcccaacgac

SEQ ID NO: 126486 - DNA, 575 bp, Zea Mays
gttgcaaatttgctacacagttataatttatatggggatcgtttatcccacccctttagggcttgttcggttagctctcaatccatgtggattgagtgggattggatgggtttgaatcccaaataagtcaaacttcttcttaattttttccaatcccatccaatccatgtgtattgggaataaccgaacaaggccttattggaaaagttctttctcgtgtttgcaaccacttactaatattattattttttggtttctgttacgtgctacaaaggcaaccgttagttcgaggccactgcaaggtaatatggagttagtggctacagtgcctgcttaagtttctttgtcgttccaagtttagtgacaaactgacaatggtgtagcaactggcttgcgctactacttcaaaaaaaactggcttgtgctgcgacaagtattttgtttttgcctacctgtatggtctagtctttgtttgcactggtggatttgtagagatgttatcattcaacaatgttctgtggtcagttgccattgtccttatgctctgtgaataatgcttggactgccgcctgtgt

SEQ ID NO: 126487 - DNA, 112 bp, Zea Mays
aggtagaagtctatttttggccatccaattattgcccgagtttgtttttggccatgcaactcaaaaactataaatccttgaccactgaactatcaatactggacaaatgtgg

SEQ ID NO: 126488 - DNA, 1972 bp, Zea Mays
tcaaactccccggcttcccaaaacgatgcatccgccttcccgcctgctggtcctcctccacgccggcgccgtccacccgccgtcgttccgcgtccttctgaagcttcacgcgcaccacctcgtctccggcctcctctcctcccactccacgtcgcccttcatcgaccgcctcgtcgccgcctttgcccactccgaccccgcctctccgcgcccgcttctccacgcgcttgccatcctcgcttccctcccatccccgccggactctgcattcccctacaatgccgccttccgcgcgctctccctctgcccgcatcaacacctcgtggaccgccactgcctcccgctctaccgcgccctcctccactccggttccgcgcgccccgatcacctcacgttcccgttcctcatcaaggcctgtgcgcgcctgcagtacagatcgtacggtgccgcggttcttgggcatgtgcagaaactggggttcagcgctgacgtcttcgtggtgaacgccgcgatgcatttctggtctgttcgtgggcccatggctttcgcccgaaggttgttcgacgaaagtccagtcagggacgtggtctcgtggaacacactgattggtgggtacgtgaggagtggcctcccgcgggaggcgctagagttgttttggaggttggcggaagacggcaatgcagtgaggcctgacgaggtcacggtgatcggagcagtgtcgggatgtgcacagatgggggatttggagctagggaagaggctgcatgagtttgtggacaataaaggggtgaggtgcacggtgaggctgatgaacgcggtgatggatatgtatgtcaagtgtggcagtttagagttagcaaactcggtgtttgaaaggatcagtaacagaactgctgtttcttggacaaccatgatcgtggggcatgcgaggctggggatgatggaagatgcacggatgttgttcgatgagatgcctgaaagggatgtattcccatggaatgctctgatggctggttatgtacagaataagcagggcaaggaggctattgcactgtttcatgagatgcagaaatcaaaggtggatcctaatgagatcaccatggttaatctcttatctgcttgctcgcagctaggagcattagaaatggggatgtgggtccaccattacattgaccgacataaacttcatcttagtgttgcacttggtacatctctggtggacatgtatgcaaagtgtggcaacatcaagaaggcaatctgtgttttcaatgaaatcccagttcaaaatgcactcacatggacctcaatgatatgtggtcttgcaaatcatggacatgctgatgaggccatagaatacttccagagaatgatagatcttggattgcagccagatgagataacatttataggggttctgtcagcttgttgccatgccggtttggttgaagcaggtcgtcaatttttctccttaatgcatgcaaaatatcaccttgagaggaaaatgaaacattattcatgtatgatagacttgctaggcagagcagggcatttggatgaagcagaacagcttgtgaacgccatgcctatggatcctgatgcagtagtttggggtgctcttttctttgcttgtaggatgcatggtaatataactcttggtgagaaggcagcaatgaaattggtagaacttgacccaagtgatagtggaatctatgtgttattggctaacatgtatgcggaggcaaatatgaggaagaaggctgacaaagtgagggttatgatgaggcatttgggagtggagaaggttcctggatgtagttgcattgagctaaacggtgttgttcatgaatttatcgtgaaagataagtctcatttggacactaatgcaatttatgactgcttacatgagatcacattacaaatgaggcatattgcaaacctgattgacatttccgaaagtggctcacatatttag

SEQ ID NO: 126489 - DNA, 134 bp, Zea Mays
ctcccttccctctcccttcttcacccttctctctccctccaaggctccaacacccttctctctacaccagctggaagaaaacacaaggactggagatgagccccttatctgaaggtatatgtctgaactctgaa

SEQ ID NO: 126490 - DNA, 1583 bp, Zea Mays
aaggtatttctttttacttttgcgtttgcacaggccactccaccggttctcctattcttcctagcacaaaggggaggaagtaaagccttcccctcgccggagatgctgccgtcggcgaccgggtacactgccggcgacgtccactcggcacgcgagatgttccatcccttctacctctgacttcttgcgcacgcggcctctagtagatagtaattggacacttcatacttggattggatctctagatagcctagaaggtgagcgggcgtggaaggagaaatccgggaagcgatgagctttagcgccgcaagagtctcggagcatggcggcgagttcgaggaggcaagggggatgccggcagaggtgagctgggagatgctcgacaagtcgcggttttttgtactcggcgccgcgctcttctctggcgtctccgcggcgctatatccggccgtcgtcctcaagacgcacctccaggttgctgcccccgcacaggccgcggcctcggcggcagcggcggcgattctccggcgcgacggtccccgagggttctaccgtggcttcggtgcgtccctcgcgggcacggtgcccgcgcgcgctctctatatggcggcgctcgaggccaccaagagcgtcgtgggctccgccgccctccgcctcggcgtcgcggaaccggccgcctcggctgccgcctcggccgcgggcggcgtctccgctgccgtagccgcgcaggtcgtctggaccccggtggacgtcgtcagccagcgtctcatgcttcagacggcgcccctcgctgccgcccgctaccgcggcggtaccgacgcgttccggaagatcctactcgcggacggcgtgcgcggcctgtaccgcggcttcggcatctcggtgctgacctacgcgccctccagtgccgcgtggtgggcctcctacgtgaccgcgcagcggctcctctggcgcgccgtcggccccgcggcgcacgacagccgcggcgccgcgatagccctgcagggtgcgagcgcggccgcggcgggaagcgcggcggcgctggtgacgatgccgctggacaccgtgaagacgcggctgcaggttatggacgctggggcgcaggcgccgacgctcgcggccgcggcgcgcgcgctagttcgggagggaggttggtctgcttgctaccgcgggctcgggccgcggtgggcgtccatgtcgctgtcttcggccaccatggtcaccgtctacgagttcttgaagcggctctcggccaaggaaggctccctctaagctctggatcaaagtgtatccatggatgatccttgtaagcatccatgtccaaatgcgaatatcctgcactgatctcttgatgggatgttaggaagcaagatttctgctgggtttgtctgttgatgacgatgatgatgaattttgtaaaataaagatttgtgtatatacttctaggaatattgttgtgggtctcattcctccatggtgcgaatgttggcaactgtggccactagaactgctggtgggcatttacgctttcgcgtgtaacaaagatcagaagatatttcgagggaaatgttctgttgcggacc

SEQ ID NO: 126491 - DNA, 563 bp, Zea Mays
atggcgttgagaaggctggcgagccgcgcgccgggggaggccggcctgcggcagccgccgctggcgggggcggcggacggcttccgcgccctcttcgccgtgcctggcggggccggcttctgcttctccacgggagccaccgaggccggcccaacgccgccagctgaggttcggatggggcggaggcggcggagggagtactcgacctcggacgacgagaagtagccacggccggaggagcagtcgtccgcaggcgaaggggccgcgcgcgccgcccggtggctggcggccaagaagggcttgtagtagtagtaatgtagggccgcctggtgttgctccttggcgctccgaggcgtcggtgccgtggcacgctccgccgttgctccgtggccgccggcctgctcgtccaaggaatcgcagatggcgtccagcagcgtggacgagaaggatggttggccaggtcgccgcctcggcctctcccgcgccgccgacggtggcgctggcgcccacctctccattgttgacgtgtagtcgagaagagcagagcagcgagtgcgcgcggg

SEQ ID NO: 126492 - DNA, 162 bp, Zea Mays
gaagtgtctacttcgcaggtaataattgaagttaaacacgctgaaaccgaagctgaagcagccgccatcgaggccaaagcaataaccgtgagggctacaaagagggctgcggacaacatagttttgaagatatgcgaacaaatttatgatgaagtgatgtag

SEQ ID NO: 126493 - DNA, 1125 bp, Zea Mays
ctcaaatgaaatgttggggcagtttgatgcatcaagagcagacagacttggacatgagttacctatgtcgcgcagtgtctcatcagtaacacaagaacaagatgacatatctagtttcgccaacaacgggcaagctgtagcagcttggcgaattgcattatcagaaagcttatggcaggattggaagtccaactcaagcaactgaggacaattgagtgatacatgagccatgccagttcgcctcaaagacagtatttgaagttgggaacacctgtatggtagtgtaacatattagctagatgacacatgaaactatatacactacgaaaaaaacattgatcacctgacagatattctgagtgcacggcacttaaaaatatgaagctcacgcaatccaccatgtttaatagttgcttcttggatgccactcccaagagaagcatcgtttactgttaaagcagtcaataatgggcactcagataaagcttgaaaaaatgggcctcccagttgtcccttgcccattgtcaaagtcttcagatgcctacaagatactctatccaataaaactagcatttctgcatttatgacaccattcaaattgagttctgttacactcgggtaacgacggcaaatattaacaactttctgcagtgatatcctagtgttttcaaatttcaaacacttccaaaaatcatcatgcacactagcagatcgccactgtttgcaggtaacacctgctctgcataaatccttctggcccaagaaagagaatatctgccatggaaaacctaagaaattagtacatttcaaatcaggcagaagcaatatttctgtagataataaactataagtaaatggaaatcagggcacaccagatgcaggagatcgtcagagagatccattcttattccaacaccttcagaatttctttcacctgggttttctgcatcatccactatctcgttattggcatctcttaggctctcactaccatcatttgggaaaagggacaagccaaattccaattcgtgttctggtaaacaagacagctttaaatgaacacattcatcagaaatgggcaaaaatgtcaatttagagtcaaagggagtagcactggcaccagaa

SEQ ID NO: 126494 - DNA, 102 bp, Zea Mays
tacccttatttttgtgaaaccaaattaatggtctatgttatcattcaaatttgccttatgttgacactatgtatatatgctattcacaataacagagccatt

SEQ ID NO: 126495 - DNA, 1366 bp, Zea Mays
aggttgagatgaacgtctctcgccaaaactccatctaaaatagcagcgacgagacgagcgagaatatctgccaattcaaaaccaaaaaggagaggaggggagccccggacggagaagagaacagaagaaaccccgcggccaccccttcctgcctatatttctctctctgtcttgcgcgacagggagagaccagcgccaacacctccggtttcttgattgggtggtgatcggtgaaggaaggagaaattaagatgagcctcttcgggcttgggagcaagaatcagaagacgttcaggcctaagaagaatgcaccgtctggcaacaagggtgtgcagctgaagaaacacatcgatgcaaccttaggaagcgggaatttgagggatgctgtccgattgccaccaggggaggatctcaatgaatggctagctgttaacactgttgatttcttcaaccaggtgaacatcctgtatggtactctaatggagttctgcacaccagctacatgcccaacaatgtcagctggaccaaagtttgagtatagatgggccgatggggtgcagatcaagaaaccaattgaggtttcagcaccaaagtatgttgagtacttgatggattggatcgaagctcagcttgatgacgaatccatcttccctcagaaactcggaaccccttttccacaaaatttcaaggaagttgtgaagacaatctttaagcgacttttccgtgtttatgctcatatttaccactcacattttcaaaagattgtcagccttaaggaggaagcacatcttaacacttgcttcaagcattttacattgttcacttgggaattcacgttgattgacaaggctgagcttgcaccacttattgatctaattgaatccattgtttcagtttgttgacatgacatcaatgattatttggatcattttcttatttttggagagcaaggagttacaactaagtgtccagtatgagggtgagactaagaatggtcaaaagtttttttttgttatcttttaggtgtctgtctctacaatgggacttgtgcatgtttgtcttatgaagtcctgaagaaactatttagggctcaatgagataatgttgtgtatccttctcttgaatgactccataagttctgtttgcaacaagcattaatttctcattcctaaaggagaactttattcatctattcatgtaaaatattagtcttgtttatagatacatcactataaaaggagttattttctttaagaaaaatcatctcaaaatgtattttggaatcattacaataaggtatgtagtactattcaatgtgacatacaattcttttttattgtttttgtggttgcatcaagatagatgt

SEQ ID NO: 126496 - DNA, 1062 bp, Zea Mays
ctccctcgaggtcccttttgattcacaactttaggctttttctactatttaagtgccactttttcatttggacttcggccctgtcatgtgcccaatataatgggcacaatttagactcacttttatttctgctccttctgcagtatgtccattttctccaacgcaagtactccctgaactcattcaacctcctgggccacacagctccagcccaagctgggtcactgctgctagtgggaccatttgcggattacttgttgacaggcaaaagggtggatcagttcagtttgtcatcgcttgctctgtttttcctggcactctcatgcttcatcgccattggtgttaatctgagccaattcatctgcatcgggcggttctctgccgtatccttccaagtcctaggccacatgaagaccgtacttgttctgtcccttgggttccttttctttggcaaggagggcctgaaccttcaggtagtccttgggatggtcctggccgttctcggaatgatatggtacgggaacgcgtctgctaaaccaggtggcaaagagcggcgcagcatcctgccggtgaggtctgcgagtctcaagggaagttccgaagaaaaggccggtgccgagaaatagtcttgctatatctgactgcaaactttttatttagatggggaatttttcgttccgaaggttaaatttctggtgaggtgacgcgagtatcacagattgggagctctgcattatgtctgacgcgcacaaaacaaacgcgtcccttgtagagactctggattgttatagttacaggtatactgtaaagcttcatttttttttggcgctctgaatcgtttgcagtgagggggaaagacggacatggtttacggcccgtttcggttcttccggaaccgtagcctggaatggttcctagctcaattgtttacctaatttatataagttttgatcaacccgaatgattcttggatgaatccaggacaaacgaacaaggcctacggagggtttaagacagtttttttttatcttatcgaacatatagttcggtagtttgaggaac

SEQ ID NO: 126497 - DNA, 399 bp, Zea Mays
gatgtgaaagaatgcatgaacacattgatgaacaggctgatctggactgtcgcggaggacgacacgaaggtcctggcttcgggttgcattgattcaccgtcgaggccatcagcggcggcgatagactgcaacaagaagcggcggcggcgacggtcaccttctccggcaaatctcgccgaaggcaacactgacgattgctccgagcagcgtcgctgcttgaagcttccacgagatcgacaaccaccgtctcctattgatcccaccgctcttcttcaagctacaggttttggattattgtttttcggtgaccggtcggtagatttgaaacaggatatgtttggtagcctttgatatgttgctcataaatttgcctaggcaatgccccccgcccaagccacc

SEQ ID NO: 126498 - DNA, 270 bp, Zea Mays
ctggtgcagacccattcattattcatatgggtgcaacagcggttggtgcagtggcgctcgtgtgagtggtggatgtcggggccgccagtgcaaggtaaggcctcactattttggggtgggatctggattctagacctggaagtactgatgattaatgcctgccctccatgtgcagctccgtccaggaggaacgggtacatccgaatagactactacgacgtttagatatgattattgattagcataattaaaaatagcatgttaaatgca

SEQ ID NO: 126499 - DNA, 335 bp, Zea Mays
ttctgattgtagaaataacatggctttaagattggaatatttaccctgtattatcatttatgaaacatagtcttatgattgttgctatttttggttcatcgaacacactttagaacacctgacctgagttggtcaagtctggctttccactttagtattcctttgttgacacacttgtggagcaatacggtcttaatgcaaattagcactttgaaatgcaaacaggtatgttgttcatattattacgcaaattgattactgctcttttcactgaggtcagaatagtcagacacccatcatagtcaatgaaaaatcctgtgcatgcaaagaacttc

SEQ ID NO: 126500 - DNA, 533 bp, Zea Mays
cgaaccattgcacgccttagatcaaggatttcgtggctcaaggagggagatgcaaactctaaactgtttcattcctttgcgcgttacagaaagaataagaaccttgtttccaaaattattgtgggaaatcaagtccttactgctcataatgacaaagctgcagcagtggatcagttctatcttgatcttcttggtgctagtagagacataaatttatccagtaaccttgatgctttggaaattgctggcgctccaaatccaaaccttctagagttggacaaccccataactgagcaagaagtatgcaatgctataaattgtttgccctcagataaatctcctggaccggatgggtttactggcagattttataagacttgctggtccattattaaagatgatcttatggctgggtgatggcaggttggaacagaagatttgataatttctataagctaaactctgctttcatcactttaatcccaaagaaaggtggagcggatcaggtcaaagattttagaccctttagtgtt

SEQ ID NO: 126501 - DNA, 186 bp, Zea Mays
cttcagcttggcagaacaaaagtttttcttcgggctggtcagatagctgtgttggactctagacgtggtgagattctggacaatgctgtgaggattgtgcagagtcactttcgaacctttactgtgcgcaagaaatttctttcaacaaggaaagcttctatttctatccaaatattttgccgaggt

SEQ ID NO: 126502 - DNA, 2305 bp, Zea Mays
gtggaattgtttcattggatcgagatttttattatcgtttgtaaatctcaagcttggtggaggatgcagaagctctattatttccatcagcagtatcgatgggcaacagttctcatccagtgttgttggagacagaagcttgctaaaagggcattgcggaaccttaaacatgctgcttatgaaactggagctttacgtgaagctaaaggcaaacttgagaagagcttggaagatcttactttgcgattcacattagagaggaggcaaaggcttgctgctgaagagtcgaaggcattggagatatccaagcttctcaaaatattggaatccgtgaaatcagaattagaggcatcaaatgaagaaaataaaaatagttgcaagaaaatttcctcgctccaacatcagctagatttatcatccaaggatcaagaagctcagcaaaatattctttctcagatagaagaagtgaagagggagaatattttactacaggcaaagaacacagaaatggaacaagagctcttaaaagctcaaaaatgtagccatgataatatggacaagttgcacgatgtggaaaagaactatgttcatctccgggataacttgaaaaacttagaggataagatctcaaatttagaagatgagaatcatttattgagacagaaggccttgaatttatctcctaggcacagccgaactggggaatcttcacctgtgaaacttgcacctccccctcataaccagacagaatcaagaaggtcgaggatgaattctgatagatatgaggattaccatgatgtgctccaccgctgcatcaaagatgatatgggattcaagaagggaaaaccagttgcagcctgtatcatttacaaatgccttctctattggggagtatttgaggctgaaagaacaactatttttgacttcataattcacacaatcaataccactctgaaggcagaaaacgagaatgacattttgccctactggctagccaatacatctgctcttctatgcatgttgcaaagaaacttaaggtcaaaaggattcatcatggcagcctctcgatcgtcttcggatactcacttaagtgaaaaggcaaatgaaacattccggactcctttaagagcctttggacaacaaacaagcatgtcacacattgatgctcgatacccagccatgctatttaagcaacaactaactgcttccttggagaagatctttggcttaattcgtgacaatctaaagaaagagatatcacctcttttaagcctttgcattcaggcaccaaaacttgctcgaggaggcagtggaaggaggtcgagatcacctgatgtagccttgcagcaaccgataagtactcattgggatcggattgtgaaatttttggactcattgatggatagactacacaaaaattttgtgccttcttttttcacccgcaagctagtaactcaagttttttccttcattaatgtgcagctgttcaatagtatgctcctacgacgagaatgttgcacattttcaaatggagaatatgtgaaatctgggctttgtgtgctggagaaatggattgtggacactgaagaggtgcagcttgggatgagctgcagttcattaggcaagcggttgactttctgatcattccacagaaaagcaaaaagaccattgagcagattaagaaaaatatttgcccggcattaagtgtgagacagatatatcgcttatgtacgatgtactgggacgacaaatatggtactcatagtgtatcagctgaggttgttgccagaatgagggacatggtgagtaatgacatgcaaaatcctgtctctaattcatttcttttagatgatgacttaagcattcctttcacaaccgaggaaattgcagagcaagtaccagatgttgacatgtcaaacatcgaaactcccgcatctcttcgtcatgttcattctgctcagttcttgacgcagcaccttcagccaccttatacgtctcgatgaattgcctaggtttttgctttggtaacaattagtgatgccgaggtagtgaacttagaggatttgataggtcggggggtaactataaccatcattgttgatttaatccatgctaatattcattccaccgtatgcttttttgttttatatttttgacatgcctcgtgtcatcatgtcaagcccaaagtagactacattctttgtaggtcgctgtcaaatttcagatccattatctagtcatcaatccatcattatgctgagtcctttatattgctaaacctgggatatacttgtggtatttttcc

SEQ ID NO: 126503 - DNA, 580 bp, Zea Mays
gcttcagatatctttcaatcggaatttgtgaaagtgaaaaaaaagacggatagaagaatacggacatagagggtgtgagtgtgagagcgctgtgggaagaaataaatgcatggaaggaatagatctcgtgatattgaccggatcgatgagctcttttttttaaacggcaggagctctgcccattatttaagggaaaagagtttagagagtacaaacaacagtctgagaccggacaaaccacacccgagcacactcaaagggaggctaagccccacaccctaaatggctagcaggaagcagcaatatgaaaattacatgggaagcaaggcccgcctaaattgtgaaacatcttctttaattcttaaggcgacttggaccggaggaagggcgacgctttcgaaaatcctgcgattcctctccttccaaatgttccacattgtgtaaatcacgattctattgaaagcgcgtttctgattttttggtagtaggggagtcgcagcttcccaccactatgaattgaaacatattactaactccgtttttcttatttttcatattttagtttaaaaataaattaacg

SEQ ID NO: 126504 - DNA, 1274 bp, Zea Mays
ctccacccgatattcctccacttcgatcagcagctgcccgcacgcgcgctgatggggaagccggccgagtcgtcgtcgacgtcgtggtctgcgctgttcggtttcggttgcttcagctcttcccatgccgaccgctctggtgacggcccgggcaaggtggcctccgccggttccaggcctcccgcgccaccagcaccgctgctttcgccggatgacctatcactgtcgctggcgggatctgacgtgctggctttcacggtggaggagctccgggtggcgacgcgggacttctcgatgagcaacttcgtcggcgagggcgggttcgggcccgtgtacaagggccgcgtcgacgagcgggtcaggcccggcttgcggcagccgcaggccgtcgccgtcaagctgctcgacctcgagggctcccagggccacaaggagtggctggctgaggtcattttccttgggcagctgaggcatccgcaccttgtcaagctcatcggctactgctaccaggacgagcacaggcttctcgtgtacgagttcatggccaggggcagcttggagaagcatctcttcaaaaggcactctgcttcccttccgtggtcaacgcgaatgaggatcgccattggagccgccaaaggtttggctttcctccacgacgctgccaaacccgtcatctaccgcgacttcaagacgtccaacatcctgctggactcggactacacggcgaagctgtcggatttcgggctagcgaaggctggacctggagaagacgagacccacgtgtcgacccgagtcatgggcacgcagggctacgccgcacccgagtacatcatgacagcttcggcgtcgtgctcctggagctgctaacggggcggaaggcgttggacaagaaccggccgccgcgagagcagagcctggtggaatgggcgcggccatgcctgcgcgacgctcgccggctggagcgcgtcatggaccggaggctgccgcgccccaccacgcccacccgagcagcccaaaaggccgccgggatagcccaccagtgcctcagtgtcagccccaaatcccggccccaaatgtcccacgttgtacaggccctggagtcgctgcttgctctagacgatgccgccgtggagccgtttgtgtacacggcgccgccggagagcagatgacctgtgtcatcttgtgtaaaaagcaagcgccggtgagtcaacaatccgaaggtgttttgcccacagtagtccactatatatatattttctattgtaaaaaacatt

SEQ ID NO: 126505 - DNA, 1384 bp, Zea Mays
ctccacccgatattcctccacttcgatcagcagctgcccgcacgcgcgctgatggggaagccggccgagtcgtcgtcgacgtcgtggtctgcgctgttcggtttcggttgcttcagctcttcccatgccgaccgctctggtgacggcccgggcaaggtggcctccgccggttccaggcctcccgcgccaccagcaccgctgctttcgccggatgacctatcactgtcgctggcgggatctgacgtgctggctttcacggtggaggagctccgggtggcgacgcgggacttctcgatgagcaacttcgtcggcgagggcgggttcgggcccgtgtacaagggccgcgtcgacgagcgggtcaggcccggcttgcggcagccgcaggccgtcgccgtcaagctgctcgacctcgagggctcccagggccacaaggagtggctggctgaggtcattttccttgggcagctgaggcatccgcaccttgtcaagctcatcggctactgctaccaggacgagcacaggcttctcgtgtacgagttcatggccaggggcagcttggagaagcatctcttcaaaaggcactctgcttcccttccgtggtcaacgcgaatgaggatcgccattggagccgccaaaggtttggctttcctccacgacgctgccaaacccgtcatctaccgcgacttcaagacgtccaacatcctgctggactcggactacacggcgaagctgtcggatttcgggctagcgaaggctggacctggagaagacgagacccacgtgtcgacccgagtcatgggcacgcagggctacgccgcacccgagtacatcatgacagggcatctaacgaccaagagcgacgtgtacagcttcggcgtcgtgctcctggagctgctaacggggcggaaggcgttggacaagaaccggccgccgcgagagcagagcctggtggaatgggcgcggccatgcctgcgcgacgctcgccggctggagcgcgtcatggaccggaggctgccgcgccccaccacgcccacccgagcagcccaaaaggccgccgggatagcccaccagtgcctcagtgtcagccccaaatcccggccccaaatgtcccacgttgtacaggccctggagtcgctgcttgctctagacgatgccgccgtggagccgtttgtgtacacggcgccgccggagagcagatgacctgtgtcatcttgtgtaaaaagcaagcgccggtgagtcaacaatccgaaggtgttttgcccacagtagtccactatatatatattttctattgtaaaaaacattagttcacgcgtgagacgcgtacctctgtttttctcgcccctgggaaacttggtggctgcctctatatttacactgatct

SEQ ID NO: 126506 - DNA, 1473 bp, Zea Mays
gcgaatgaaccacaccacacggctcactggctcaggtcggccacaccagaaaagcatgcgaactgaaatggcgccatgttcgcctctcctcctggccgtggcgctcctatgcgccgccgccgccgccgccgcggcaggcggattcggtggccccacggcgcggtacgatcgcgtattcagctttggcgactcgctcactgacaccgggaacgcgctgcacctcgcagcaaccgccggcgggcccgcgagccggccaccgtacggcgagaccttcttccgtcgcgccaccggccgcgcgtccgacggccgcctcgtcatcgacttcatcgtcgaggcgctggccgtgccgcagccgacgccgtacctcgctggcgcgacggcgacgggggcggatttccgccgcggcgtgaacttcgcgttcggcggggccacagcgctcgacctgcacttcttcgtgagcaggggactggggtcgttcgtgccggtttcgcttaggaaccagaccgtctggttccacaatgttctacgacttcttggctcagctcgcgagcagaggaagaccatggccacctccctcttcctcgtcggagagatcggagtcaacgactacttcatcggcctcaacgagaaccgcaccgtgggcgaggtgcggaccttcgtgccccacgtcgtcggtgccatccgttcggtcatcactgacgtgatctccgccggagcaggcacggtggtggtgccggggatgataccgctgggctgcgagccgcagctgctcacgctctacagaggcagcgtcgacgccgccgggtatgacccggagtccggctgcatcacgcgtctcaacgacctcgcccagctgcacaaccgcgagctgcgccgcatgctcgccggcctccgacgagcccaccccggcacggccatcgtatacgccgacctctaccgagcagtcaccgacatcgtcgtgtcgccccgcgcatacggtttcaggcacatgccgctggacgcgtgctgcggcggcggcggcgcatacaactacgacgacgcatcgttctgcggcgcggcggggacggcgccgtgcgcagacccgtcggagtatgtctcctgggacggggtgcactacacggaggccgccaacaggctcatcgcttgcagcgtgctcgagggatctcactctcacgccgccgacgcgcccacgctgtcgaattcatcggccacaacggaggattggcttcacaggatcggctgcgtctagcagctagcattttgtgtctagagtctagactggacgaccagagtcgagagacatttcagtcgggccacggccatattttagttctttatttaaggaaacagtatattttcattcaattgtctgatgatgtagtaaaactagtaacacgtataggggtggtcacaaatcaggatccaaatatttttttcacagttcgtttaaacctttaattaattttagtccgg

SEQ ID NO: 126507 - DNA, 1894 bp, Zea Mays
aaattagcacaaagcgtcccaaaggaccgaactgtaaattcttaaaatcacgtgcgttcttcagtgttagttctccaccctctccttggcggaaaaccctaaccccctttctcggcgacgatccgacccctaccccatctcccggccgaccccacggcgctctccgccatgccggacgtgcaacctctcgtcagcgacttcgtcctcaagctcaagcgccggaaggtggaggggtcgcacgcggtggcccggcagacggcggagctgctacggtcggttgtgtcgcagcatcggatgggtagcagcgccaaccaggcggccacacttgccgatgccgtacgggctgtgggggagcagctcattgccgccaatcccattgagcttgctgttggaaacattgtgagacgtgttttgcatataataaaggaggaagatatatcttccacagcagttggtatcgaaggtctttctgttactgttgacagtgatgatgaatatgacagcgaacatgatgatcgccctgcattatctgctgctgttcttgctgcacatgctagaaatgcccttcgtgcaccttcattgcagactctgctagaagacattcctgtgagtcctgcaatttcccgcactgcatcatcaactggtgactcagacggaaaaagtaaatcagctggagataagagctcaactagaaaactgaagcatgatgtcatcgcagccattggtgatcttattgatgagattgactcatgctatgagccgatttctgagcaagctgtggaacttattcaccaaaatgaggtaatcctaactctaggtcgttctagaaccgtcaaggagttcctgtatgccgcgaaagaaaagaaacgatcttttcgtgtatttgttgctgaaggtgctccaagatatcagggccatgttctcgcaaaagagctggttgagaaaggtgtacaaactacagttataacagattcagcagtttttgctatgatatctcgagttaacatggtcatcgttggagcgcatgctatcatggcaaatggtggagtcattgcaccagtagggatgaacatggttgcacttgctgctcaaaggcatgctgtgccttttgttgtggttgctggtagtcacaagctgtgtccgttgtatccacacaatccagaagtgttgttgaatgaactcaaatcgccgtctgatttgctcgattttggcgagttctcagattgcatgaatttcagtactcaggatggcagccccttgttaaatgttgtcaacccaacatttgactatgtgccaccgaagcttgtgagcctattcatcactgacactgggggacacagtccatcttatatgtatcggcttattgctgagtattactcagctgatgacctggtagtgagacggaaggcaacatcttgaaggaagacaaaagcgctgcgaagtctccttggtgttctgatcataggatttgcgatcttattggaatcctagtgttcttgtactcgtcatgatctgttgcctgtagagcggtgctgctgtgataagtggaatcacctgtttgtggatccagttactgtcaaactgcaggaaatcgatgcaagcattctcgcgcatcgttgtaaccatggcggcattttaagtataaactgttgaggaatggagcgttacgtcatggaagaattgtttcactataggagaggttcaaatatatgattgactggttgtgtagagggtgtctgtttcttttctggtcataggttaatctgggccttggctggtccaaattttgaatgttataaactccagcaagctgttcgatatgtctatgaagtgttaccatgcacactgatgggtatttgctgagccattttgttttctatatctatcgtatata

SEQ ID NO: 126508 - DNA, 1114 bp, Zea Mays
ggcctaagcaccagcaccagcaccaccaccagtgatccggccaaggtccgtaccgaccaaagacggccggggaggagatggccgcctccgggaccgggaacaacaggttcgcccatacatgcgctcgcgtgcggcagttcatgatggagcagaacaggcaggtgcgaatggatgacctcatcggctcctcctcgtccccgaggccactgcaactgacgccagtccctgtagcgacggggccgccgccggcggctgcctgggagaccgacgccggcgctaggactttgccgctgttccccgtccgcaatagcagtagcacggagatcatcaggccagagcaggaggccaaggccaccctaaccatcttctaccagggccaggtggcaacgttccacaacttcccggcagacagagccaaggaccttatacaaatggcaggttctgtgaccggggaggcgccggggaaaggggtgacgacgacgaccgccgtgccagaaaaggccgggaccagtggtggtgagccgtcggctgcaggggtagctggcacgccgcccatcgcaaggaagctcacgctacagaggttccttaggaagaggaaggacaggatcgccggcgctgacggccgcggccacaatgaggatgctccgccgcggaagaagacagactccgctggcgccggcgccaacgaccccgccgaatacgttcctgatgaagcctcgtggctcaggctctgaaacccgctcttcactgcaaatttgcaggagaataatatgaatgagaagggcaagagtgctggcatgcatgccacacatcctctaaaatgatacaataatagtgccgtgtgtgcctgtcagaattcctaagaattcttaggcattgtttgaaagggctgtaacttttttttctgaaagcaccttgccgtgaagcttttagaacatctctaacaggagagatgtatagaactctagcgcaaaaaattgcttcaacgagagttctattttacaaaaattcatcaaaattataggactctgtcagatattgttaacattttatttcctaaataatatgatataggactcagttttgttggagccgtaaatatttttatggcctt

SEQ ID NO: 126509 - DNA, 1427 bp, Zea Mays
ctagctactcctactcgtactagctagcagagagggagacgacggcggcggttagatcccattcccccacggcacggcgagaggtacgaggaggaggtacagatgtcggccgccactggttacagccggttcctgcggcagtacatgagagagccgcagcggcatcagctggtggaggcggaggagacggactccggccggaccatgcagctgttccccacgcgcgccggcggcggcacgtcgtcgtcgtcgcatgaacagtcagatgatggtgcgcaggcggccaacaaggcaacgctgagcatcttctacgagggccggatgctcgtgttcgaggagttcccggccgacaaggccaaggcgctgatgcagctggccgccgggtcgtcgggctcctcgtcggcggcggcgcccaataacaaggacgccccagtaccagtggtgcgggtgcggcgggtgccagagcagccggcagccaccgcgccattggcagtcgtgccctccgacctgctgcccatcgcgaggaaagtgtcgctgcagaggttcctccagaagaggaaggagaggatcgccgccaccgagccttacccggagccggagaaagatgatgttcctgccaccgccaccgccaccgccaccggctggcaagcgacggccttaaaggataaacctgcacctgcctcatggctcgggctttgaaaataatgatccgatcatcttgttgtctccgtttcagaatttttcagcgttgcgaagaattcttcttcttcttttttttttaaaaaaaaagcaacagttaattatccgttggtctatcgagagatttgatggatcatatataataacccggcagctacatttctcctggacatctatatgtattgattattgtatgtttttttaatttcatctatcggtgacatgctttatgttaataacatgcaagcacacgattgcatcttaattagcttattattaagaatactgttgttatttactattgtgaggtgaacattgtacgttcattcggtcataattaaaacatgatttctgttccttgttcttagtaagttagaccagcttttttatcatctagtagaacggatcggcgacagatctgtcgaagaacaagaaacatgtgcagcctggcggctacgagtacgacgacgacgacggccagaagttggtagatgtccgcttccagagtcatacagagtgtttgtgtttctgctggtcaattttctatgtctaccgtttcaaaagcatggaaaatggcatgggtggtgtccccccggtgcctttccagatcggaacatcgattttctatgttgactgcgacgagtcaacagagagtggtagagagaaaggctggagggcaagttccacgaagtttctgatctcattctcggatccacgttttgtaattt

SEQ ID NO: 126510 - DNA, 597 bp, Zea Mays
atgtcggccgccactggttacagccggttcctgcggcagtacatgagagagccgcagcggcatcagctggtggaggcggaggagacggactccggccggaccatgcagctgttccccacgcgcgccggcggcggcacgtcgtcgtcgtcgcatgaacagtcagatgatggtgcgcaggcggccaacaaggcaacgctgagcatcttctacgagggccggatgctcgtgttcgaggagttcccggccgacaaggccaaggcgctgatgcagctggccgccgggtcgtcgggctcctcgtcggcggcggcgcccaataacaaggacgccccagtaccagtggtgcgggtgcggcgggtgccagagcagccggcagccaccgcgccattggcagtcgtgccctccgacctgctgcccatcgcgaggaaagtgtcgctgcagaggttcctccagaagaggaaggagaggatcgccgccaccgagccttacccggagccggagaaagatgatgttcctgccaccgccaccgccaccgccaccggctggcaagcgacggccttaaaggataaacctgcacctgcctcatggctcgggctttga

SEQ ID NO: 126511 - DNA, 93 bp, Zea Mays
ttaattaacaaaatatattattttacaaaacaaaaactactaattaaccaaaaggtttggcttcaatccgtcaacataaagtacctgatgtga

SEQ ID NO: 126512 - DNA, 868 bp, Zea Mays
accgaaacccaagcaaccaacaacgtccgaggcaaatcaaatttccatcaaccctcctcctcctccattctccagaacagcagcagccagcaggtcatcgccagtgatggcggcggcggcaccttctggaggcacaggaaagaacacagctgcgactgcgacgacaccgagccggttcgcggcggcgtgcggcgcgctgagccagtacgtcaaggcggcggaggccgagaggacgcgcgcgcggccgccggtgcggcggcccctgccgctcatgccgggcgccgacgtcgaccaggacgagccggaaacggcggcgcagctgatcatcgtgtacggagggcgggcgctggtgctcgacgacgtcgcggcggacaaggcggcggacctgctgcgcctcgccgcggcggcggcggcgcgaggaggcacagagcagccgctctgctcgctcgccgacctacccgtggcccggaaggcgtcgctgcagcggttcatggagaagcgcaaggacagggtcgccgcccgcgcggagccgtaccgccggcgccgacccgtcggtgaccgacgcaacgatctcgcgctcgagctgtgatttgaggatgtctcggcggtaactactagaggacgctgtgctcaagaagcagccgaacgatctctgatgcttcgtacagtcagatcatattaatttgttataactagataggtataggtggattgttcttatgtgttgtgcagcaaaacagaagaaaaaacttggagatgaaaagacatggtttcgcattacctttctttcgccactaaaaatggttctttttatttgtcttgagattctgtgacaaagagatatctataataacgtagtcttgagatt

SEQ ID NO: 126513 - DNA, 1651 bp, Zea Mays
gcggaggactctgggatggggtgcgggggccgaggggccacgcgggcgcgcagaggcggggggcacgcgggggcaagcggaaccgtggtgaagcagtgtggacacctacgctatagccttctagagcagtagagattgacaccacgggcacgcacgtcagcgcctccaccttcctccccagccgcaagcagagcaagaaccggagctggggatcgattccgcgccgcctgatctgcgatcgggactcgatcgtgcataatccgaggttcttcctctctgtcgtctccgatccagacgggtgtgcctggtctgcatcttcatcctctgcaagaaatcacacatctcgtggcgcaccttgcatcagccgcggccggcacctctactctcgcccgccccctatgtcgtaagcgcgcaatcagaactcccgatcacccgcacgctggtgcgccagtgtcgtcttcgccaccatgaactccatcgagcccttcaacaggctggtgaagctggcggcccgcgccttctacgatgacgtctcaatgaagggcgacaaccagcccaagacctcccgcggggacaaccgcggcatggccgtcgtcgtcctggacgcgctcaccagacgaccgtgggtccgagaggaagatttggctaaagcattgaagctccactcgaaacagctgcgtcgcattctccgtttctttgaagaggagaaactagtcacaagggatcatcggaaggagtcagcaaaaaatgccaaagcacataatgctgcagctgctaatgacggtcaaacagttgctaaggagggagaagagaaagtaaagatgcacacacattcatactgttgcttggattatgctcaggacctgtggcacaggcactggatgacagggcttgggtgagagacatctccaccactctctctctacaaggaatacattaatacctcatgctttgggatatcatggaagggttggtgctttctcaagaagaagatcatcatatttggagacacgaggcttcgggaaggttttcttctaaatcctgttacaagtcattcttcagaggatccatcacttttgaaccttggaggagggcgtggaaatctgggcacctctgaaatgcaaagtattcttatggttggccattaagaataagtgttggactgcggataggctggagcggcgtgggatgtccacccgacagcctgcctgttctgtgatcaagagcatgagacggcccaacatatcctaactagttgtgtctttgcccgtcaattttggcatgatctgctggctccccttggacttgcggcgcttgccccccaaattgatgatgaggtctttggggaatggtggaggaaggtgtcaatagtgctattatcctcggtggttggagcctatggcttcatagaaataggtgtgtgtttgagggggctcagccgagtctgcccaagctgaagcaggacttctctaataaggctgtctgctgggtgttggctggggttaagcacctccttgagttgggtttagcctttgatccaggttgattcgctagtctgtatgagtggtgtaggcctggcaaaggtcttgtatgtggggctctttcttctcccttttatataaacgatgtgcagttctcctgcatgtttgag

SEQ ID NO: 126514 - DNA, 2267 bp, Zea Mays
gcggaggactctgggatggggtgcgggggccgaggggccacgcgggcgcgcagaggcggggggcacgcgggggcaagcggaaccgtggtgaagcagtgtggacacctacgctatagccttctagagcagtagagattgacaccacgggcacgcacgtcagcgcctccaccttcctccccagccgcaagcagagcaagaaccggagctggggatcgattccgcgccgcctgatctgcgatcgggactcgatcgtgcataatccgaggttcttcctctctgtcgtctccgatccagacgggtgtgcctggtctgcatcttcatcctctgcaagaaatcacacatctcgtggcgcaccttgcatcagccgcggccggcacctctactctcgcccgccccctatgtcgtaagcgcgcaatcagaactcccgatcacccgcacgctggtgcgccagtgtcgtcttcgccaccatgaactccatcgagcccttcaacaggctggtgaagctggcggcccgcgccttctacgatgacgtctcaatgaagggcgacaaccagcccaagacctcccgcggggacaaccgcggcatggccgtcgtcgtcctggacgcgctcaccagacgaccgtgggtccgagaggaagatttggctaaagcattgaagctccactcgaaacagctgcgtcgcattctccgtttctttgaagaggagaaactagtcacaagggatcatcggaaggagtcagcaaaaaatgccaaagcacataatgctgcagctgctaatgacggtcaaacagttgctaaggagggagaagagaaagtaaagatgcacacacattcatactgttgcttggattatgctcagatatgtgatgttgtcaggtatcggattcaccgcatgaaaaaaaaattgaaggatgaattggacagcagaaatacaattcaacactatatatgtcctagctgtaataaaagatactcagcctttgatgcactacaactggtaagctacacggatgagtacttccattgtgaaacttgcaatggtgaactggttgctgaggatgacaagcttgcttctgaggaaatgggagatggcgatgacaatgttagaaagcgcaggcgtgagaaattaaaggacatgcagcaaagaattgaagagcaattgaagccattggttgcacaacttgatagagtgaagaatctgcctgcgcctgagtttggtagtcttcaaacatgggaaagagcacatattggtgcctttgcaattggtgaccctgctgcagctgattcttctaggaattcacaagggcagtatggtacaccaatgccataccttggacagacaaaggttgaagttgatatattgagtgatggtgaaaaagaaggtgctgaatcaggtaaagatggttctgaactcaaagtcatacctccatggatgatcaaagatggcatgaatcttacaaaggaacaaagaggagagaaaattgagtcacaaaaacttgaaaaatctgaagccaaagatgataagaaacaggacttgaaagatgatcaaagtgtacaggaagaatacataaaggcctattatgaggccttgaggaaaaagcaggaagaggaagaagcaaaaaacagaatgcagcaggaaggcaagatttctgtccctgattctcaaactgaacgccaagtgggcaagaaatacaagcgggacgacgatgatgatgaagacattgaatgggaagagcatcaacctacagctgcagggaatgcaaccgaaacatacaaattggcagatttgaatgcggaggcccaagaatctggcgatgatgaagatgataatgtgtgggaagagggctaatgctaaaaagataacagactattcctgtgcggctgcgcccttaggattttggtatcccaccagaggtcgagagtatttcactaatgagcttagttatgttgaacgcatgatcccgagaaacttgtcaagtgaaaagccagcccctatgcatttttagttgaagatgtacaaattatacttaaatactttatgagccggtcagcagtttcccctgttacttcgaagagctgttgtagtcttgtagactgttaatgtgtgggcaacttgcatgcctttgtttcgctgaaaggaattacacgtacatgcacgtttatgtcctgaaagtgaaaatgcaatcgttgtagttgccattcatcgatgcccacattcgacatgtatttgatagttatctagtaatccaagtttctgagttgtcgc

SEQ ID NO: 126515 - DNA, 423 bp, Zea Mays
tttccatctccgtatcccgaccgccgtccacaagagagaaaggaagcagcgtcgccatggtgaatttgtgccgtcgccacttgttcaccatcgattggtcagccgaaggaattcaccagagaccggagatcctcctcgcgctaaaaggctacgccaggggggtatcacacttggccaattgctcaccggtgagacacaggcgtcacggacggcacatcgccgtggtcgaatatctccacgactctcggagtcaacgagcaagtgactgaggaacccgaagcaccgcaagttgaagattctgagcaggagctcgctgaaagcaagttgtgcccttgatcacattctttgaaccaataatgttcttgtttctaataatcactatgacatgcttaggttaacttgatgggacctaataggttacct

SEQ ID NO: 126516 - DNA, 198 bp, Zea Mays
atgtctagtcagcacggaccagactatgactggaggacctcacctattgatcctcaggctatgtatgtaagtggtggaaaagctcatagaaggtacacaatgtttgctaacgtcatcaactcgagccaggtgagggttcggcgtggaggttcgtcaaggtctgctactcgtagctcccatcgctccatgttatggtga

SEQ ID NO: 126517 - DNA, 721 bp, Zea Mays
actagtacttggtgatccgtttcacatcgccatggtctgctcttagctgagctgtccatccatgacttgctcttgctctcaaccatttgcgcagtgtagctttccccccccctgtttccgccggtgcgagatttcagatgacgaagaagagttgctgtgggacacggacaactgcttgcgctgcccaccaggaccaacccaagatcaggggaggggagtatctggccacgcaacgaaacgtagacagagcagcagtccaggcccaaacgctcctccgaagaagccgacatggaagaggtttctgtccatgtttcagaacaaggtgaagcacaaacccagcagcctgaagcagaagcggcccagcagcgcaatgctgcaagagtgcgccagtctggtccgcgtggtccggcgcacggcggcagagtgctttgcgcctgcggttgctggcggggacgaagtcgacgaactgccctgttattacatgcagcttgaccaggtgagctacggggtcagacgggaggcctacggtcccatctacctggtcacgtagacgactgggactgaagtatctgttccatttcatgtgctgttgtcttgtctcggttgcctgtccgtgttcgtcatggcaatcttcttggttgccggacaatatcatatatcttcagaaatgctgctaccatgcgtgtgcaataaagtgatcttctgactgaactgaaagaca

SEQ ID NO: 126518 - DNA, 153 bp, Zea Mays
gttgatattgcttatattctgttttcttgatttagttttatgttctcaacgattactatttatgtgcctttgcaagctaatggtagtaactccggtgggtcatttttaaccttgaagaccacatcattattcttttgtttccttacattttta

SEQ ID NO: 126519 - DNA, 78 bp, Zea Mays
ccaaagattagcatgtacatttatttgtatgatagccctgaattgcatatttggtatcatttggttgcttcaaagagg

SEQ ID NO: 126520 - DNA, 860 bp, Zea Mays
tgagtaatgatgcttacttgcttagtactctttcagttccaaattatatttcacatgcatgtcgctagccgggatgctacttcagtgagacattgaagcccatatcagaagagcaccaggcaagagttggagaactaggagtcttcggctgtcgctacggccttcggattgctcctgtattcttcaatggacaatccttgacacggtcacataagcacaacaagaggagaaccccgaccacagttcccagtccaagggcgacgatggcggatttgcttttattgctgaacaatgggaaccctctgtgggtgaccgcttgctcgagccattatttgaattcaagctcctcatctgtgtgaagctgacagcacattgaggcttcccaagctctgtagccacgggggaattacgccgatgagcagacagtttgttaggatgagcacctgcattgtctcaccgccgcggaaattcctggtcagcaccaagcttgtcaggttgggcaggtgttgcaagacctgcaatgtctatgccaggttgtgaaactattcctggtcagcgagaggtacgacagggatctcaactccttgaagctctccggtatccccccccacgagcttgttccttgtaagattcagtgtcctcaacttggtgcacacactgatgccaggagctatagcgccactcagatagttggttccaacatcaaaagtattaagcttcggcagcaagctggagtcgatagcaatctcactagagagcgagttgttcctcaagctgattaccctcagcagtggagaactttacagggaagcgggcaactcaccatccagcctattggtggccaggtttacgaactctag

SEQ ID NO: 126521 - DNA, 564 bp, Zea Mays
tatcatctccatgatatatttcggtagcataagcgcatgcatgatttgacctagaatgcttttgcagttgtgatgagcggtcgcaatctgcctacatcacgtttagagataatcaaggagcagagagggctatgcttcttacgggagcgactatagaagatatggctgtcatcatcacaccagccactgattacaagctaccagcgtttgttttagctgatctagaggtagaaccatgttacattcaaatccccccattagcaaaatttcttttaacaagctcagactcctaatgccaccaactgcattatcagtcaaaaaacactggtggcatggaatctgctcttcagaaggctgaggatattgcagtttctatgttagccaaagggtttgttctcggcatggacacagttgaaaaagcaaaggctttcgatgaaaagcatcagctcacatcaactgcaactgccaaagtcgcttcccttgacaggacaatgggcttaagccagaagttcagcaccgggaccttagtggtgaatgagaaaatgaaggagatggatgaaaagt

SEQ ID NO: 126522 - DNA, 198 bp, Zea Mays
atggcatctggccgtgcctgtcgatcagccagcggctccatttgtccagctgctggctgctgccgtgatcttttccgggtttccggctccgcgtgctatggacgcgagccacgccgaccgtccagtgcacggacgcggattgccaacgcttctccttctttcttggcattcaacaggctgaaacaacagattgcatag

SEQ ID NO: 126523 - DNA, 1046 bp, Zea Mays
aggagcaatggaaacagaggaggaggtgaaagatcgggatgtggcaggtggtgagcaagccgggattctgagcgccatggccaccaagatcggcatggccatgcctggtgcaaacggtgacgacagccatggcggcagcggggacgacgctaagtcgagcaatggcgaagcgacccgtggtggcagtaatggtggagagaagcagggggatgaatccaacggtggcgggatacttagcgctgtggcttccaggatcggcgtggccatgtccggcgccaacggggaccgcagcggcagcgctgaggatggtgccaagacgagcgctggcgacgctggtcacggtagcaagggcgaggagaaggggcgtggtgtgaatggtggtagaatagtcgagcagatcatttctaatctgccctcagatggtcagtcgcctgatgccgatgaagcttcctcaacgccaggatcattttgtatcgaagattagctccatgttccgaaggctctctaggtcgtcctcaacgccaggatcaaatcatcagctgagccggagactgaaaataataaagaaaagcaagcagctggtcatagtaaacatcatgtagcgaggcttagtagattgctttttttcccgttagaatcagtccacatgtcctcgacacgggctagatttgttctaggattattttttcagtagtaagccatgtatccatggacagtccacagcgcgacgtctaatgtaacatcatcaaggttcttttgactatcccataagaaaccattccttaagacaaccgatattgtgagttgataaccaacaactaatgttaccatgcgattgttccgcaaaacaactatgccctctttctgtatcacttccttttctcttttatactatgaaaagatcttacatgatactgcatgatgacccttatatagagatgttttactgtataacgaccctacatgtagcaatataatcacccttatatagagatgttttactgtagacacatcattattggacagaaatgatgctttcatttcag

SEQ ID NO: 126524 - DNA, 456 bp, Zea Mays
atggactgcccgcagctgaaatctcctttgccggtgaactgggacgcgcttgacgcccttgtcctcgacttcgcgagatccgaccgccttgtggcccctaccactgcatccgcctccccctcgacgccgtcttcaccctcctctactaccaccgtcacctcctcggcgccatcctcgtattcgttgtcctcttcctcgtcctacaggtcgcgtctccttatccgctgcgcccgccgcgcgatcgagctgggagacgtagacgcggccctcgcgctcctccgggcccgcgcgcccgcggcgctcgccgaccaccgcctcctcttccacctccacaagcagaggtttgtggagctggtgaggaggggcacggaggcggacagggacgcggcgctcgattgcctccgcacggcgctcgcgccctgtgcgctcgacgcctacccgaaatatcataaatag

SEQ ID NO: 126525 - DNA, 1815 bp, Zea Mays
aaaccctttgctctacagtggtctataaagaggaggtttgaacttgctggtttactatcatctatactaagagctcatttagaagcttatgaccctgttctttcgctgacgctaagatacttaataagcattcacaaggcattttgcacgcgccaaggaattcaatcacctatatctgatctcactgaacgactgttatttgaggatcgtgacccccctgtggttcctccggaatgctcactcgaagcaccatcatttgatgaggttgatgttcaagccctagcgcatgctgttgagttgacaagacaaggtgctgtggatagcttgaagtttgcaaaaggacatttataccaagcttttcagaacgaattgtgccggatgaagctggacctgacacttctggataaacttgtacatgagtattgtgtatacaggggaatagttgaaggcagttcacatgttctttctggaactgctgacttgaaatgtaatcaaaataatgatgttaataatgaaacacagctttattgtgaaatgaccaacaatcagaatggacattgtagcaccagcggtatcaatcttgacgattcttggtccaggaggttgcatagggatagacatattatgcctgggcagcaaagacgaaagagatggagaggacggttagatgatcttgattatgcttgtgatgcgttgttggatcccagtaagcatgatagtttgtctcctactcttgatatggacgaagatactatggtagaaaaacaggacttggtggaaaattttaatttatctgataaacacatggaagatcagaaatatgaaattattttggagatgcgggacctcacacgaaaagggatggcttccaaagttgttgaggaaataagcagtatagatcctgatttctttcaacagaaccctattctcctgtttcagctgaaacaggttgaatttcttaagctggtagctgccggtgatcatgtatctgctctcaaggttgcatcaacttatctgggaccacttgctgccaataacgaagctctactgaagcccttgaaggaaacattggtgacactaattcaacccaatgaagatgtagtcatgaatgcattgtcattgccagtacttgccagttctgtccaggttgcaatgagcagaaggcttggtattgaagagcctcagttaatgaagatagtcagaacaacaatccatacacacactgaatggtttaagcttcagatgtgcaaggaccgttttgagcacttattgaagattgattctctaaaagaggttgatccatcattggggagtcaccgtaagtccaaggtccttacagatgaatgtgcaaatggatcatctcaaatgacaacatgttcaagtggcaaggtgccagatgaaggtagtagccctcaagtctcatcagaagttgcctgtgatgaaaatgctatactgaaggttatggaattccttgcgttgccaagggcggacgccatccaactcctcatgcagtacaatggaaatgcagaagcagtcatccaacagatcttccaatagtgcttactgtaaataacaaagtattttgcttgctttcaaacgtaattatttgttgatacttttcttgccctgtacagaagattctgttagaactaggagtctgtgtttgatgatccacagtacttctatggacttacacagagtaggaatcggtgggattcagcacaggctaaactcaacgataaatgcaaagatattgatttatactggttcagaccattgaacagcgtgcgtaatatatattatgtctagttagtt

SEQ ID NO: 126526 - DNA, 1332 bp, Zea Mays
aagaaaaaaaactgcccgaggaaagaaggcggaagccgacgtgcaaccagcccagcttaaaaaaaactgcccgagcaaagaaggcggatgccgacagacgagtcgtccgtcccaggctcccagccccggcgccccgtctcaaatcaaaaaaattcgtctcaaatctcaaacccataaaaaatactgtattttccaaccaagccactcgcccgaccttcatccgcattccacgcgcactccgctgcctcactccgagactccgccgctgcttccaacttccgttgcgcacgagcgaaacatccggagctagcaagggaggaggaggaggaggcgatggcggggggcggggataaggtggactacgtcttcaaggtggtgctcatcggcgactccgctgtcggcaagtcgcagatccttgcgcgcttcgcccgcaacgagtttagcctcgactcgaaggccaccattggggtcgagttccagactcggacgctcgtcatcgaacacaagtccgtcaaggcgcagatctgggacaccgccgggcaggagaggtatagagctgtcacaagtgcctactacagaggtgctttgggagctctgctagtctatgatatcacaaaacgccagagcttcgaccacatacctcgctggctggaagagcttcggggccatgctgacaaaaacattgtgatcatgctggttggcaacaagagcgacctcgaagacgagcgtgccgtaagcaccgaggacgccaaggagtttgccgagaaggagaacctcttcttccttgagacctccgcgctgcaggcgaccaatgtagaaaatgccttccagaccgtcttgacagagatctttaagatccacagcaagaagaacatggcagcggacccaagggccaatggggccgcaccatcgctggcagggaagaaggtcatcgtcccaggcccagctcaggagatccctaagagcaagtgctgcagttccatgtgacatgttgcctgaattttatttgggtttgttcgtgtccgaggtattctcagcatctttgtggatgtataatactggaataggcttagatttgaattgctggttaacttgattttcggttttgaagggaccgatatcgtagtttagatttgtcacccgtcttcaagatgacgaggatagggagcgagaagaaaacatatgtttgcatagactttgttggattttacaaaaatagcagtgtaagcacattattttttccccgatgccttgaaacccttgtgtacagtagagatggatcctaaacatcttaattacaggataaatttaatatttgaaatagatatgtat

SEQ ID NO: 126527 - DNA, 620 bp, Zea Mays
agcactcgtcagcccatatcagatcgactgctaagagagtcgtcccagactatcccgccgggtagctaaccttatcttcccatggagccagcgaagctcgcagctttccttgccgtcgctgccgtcgcctacgctgttgccgtcgcaccggctgccgcggaatactccggcggcgcgaccgccccagaaagctgccagacgcaaatcatgtacttcaccaactgcctggcccgtgatgagatccgcgggcagtgctgtagcgtggtcgagagccgcgagtgcctctgccagctgaagcgggaggtggcgctgccctgcagcctgcatcgccaccatcaacgcagatgctccaaggaagggtcgcctccacggtcggtgaagctggccgagctgcagcgcctcccatgcttcaagacactcaagtgctaggagccgttacgagttcgtatttttgttttgtgtacgtgtgcttttgtttgtttcacaattgttccttgttactgtttatttccattcagcttgctatggatgtaggtacctgtgcttgtccgttgagaattccttgcgtgctcttaaagaacgtttttgaaaaattagaagatttggttttaatttgatct

SEQ ID NO: 126528 - DNA, 99 bp, Zea Mays
agcagttggtacacagaaagctaaagctccctatcagcagccaagaactatacatatggagatcataggtaaaactaagataataagatctgaacaaag

SEQ ID NO: 126529 - DNA, 1543 bp, Zea Mays
caaattggcccatactctgtttctaagtttatttgaatgaagtatacgaggagggaatgtgtattgtctattatgttgacaaacaaaacatagttgaaatccagaaaaaagaaaaaagttaacctacggcaggggcatccacgtgttgatgccctactggtcgcctcacatccctcacgataacgaagcgaatcctattgcgacgcagccaccagccaccatcggccatcgctctagccagcccgcccgccagcgagaggtcaaaaaccactacgagccaaaaactggagcccagggaaagcgacgagcaaaccaaacatggcggcgatcctcgcgcgcgccggcgtcatcgccaccgccggcaaaggtttctcgggccgccgccggggcaatggtatcgtcgtcgcggcggtcactaaaacgggggctgctgtgccacaggagggggcgctggaacggccggcgtggtccggcgagaccacgctgtcgcgtctggttggcgcgctcatcgcgttcaagccgctctacgcggtattgaagctcgcctcccgcgaggtcatcatcaggacggcggagaagtcgaacatcccgtggagggagatgacgaaggaggtgctggagtcggacgtgtacgaggtgttcgagagaatccaagacccaaacctcgtgtaccctgactactatctcaacccgtttcatgcctacgacgaagggaatctatcatggctggctgcagcagaggcggagcctgcaacaatgtcgatcgcaaagagggcaatacctgaggctacatcaatcgaagaggccaaccaaattgtccgcggcaactggctgaatgtgattgaggagcatcatctgaagtactcggggaactgtcaggtaaacgacatcctagacattggctgctctgttggagtaagcaccagatacctcgctgagaagttcccatcagctcaagctgttgggctcgacctatcaccgtactttcttgctgtggcggcacaaaaggaagaaaaactgtcacggccaaagcctattcgctgggttcatgccaatggtgaagcgaccgggctgtcttcagattcatttgaccttgtctcccttgcttatgtgtgccatgagtgcccagcacgagcaatcacgggattagtgaaggaagcattcagggtccttcgcccgggaggaacaatcgccttaactgacaattcgcctaaatccaaagtgcttcaggaactatccccagttttgttcactctgatgaagagtaccgagcctttcctggacgagtactacatgctggatttggaggagacgatgagaaaagtgggctttgttaacgtttgctccgtcctgacagaccccaggcacagaacagtcactgcaaccgtgccttactaattgggtcagaccatcaaatcccaagcccggccggtgtacaacaattgactatttgaaattttgtatccttactggtatggttgcacctgtataaagtagagcaatctgagtgaaacaacaaatcgaagtacaccaatttaccttc

SEQ ID NO: 126530 - DNA, 1775 bp, Zea Mays
caaattggcccatactctgtttctaagtttatttgaatgaagtatacgaggagggaatgtgtattgtctattatgttgacaaacaaaacatagttgaaatccagaaaaaagaaaaaagttaacctacggcaggggcatccacgtgttgatgccctactggtcgcctcacatccctcacgataacgaagcgaatcctattgcgacgcagccaccagccaccatcggccatcgctctagccagcccgcccgccagcgagaggtcaaaaaccactacgagccaaaaactggagcccagggaaagcgacgagcaaaccaaacatggcggcgatcctcgcgcgcgccggcgtcatcgccaccgccggcaaaggtttctcgggccgccgccggggcaatggtatcgtcgtcgcggcggtcactaaaacgggggctgctgtgccacaggagggggcgctggaacggccggcgtggtccggcgagaccacgctgtcgcgtctggttggcgcgctcatcgcgttcaagccgctctacgcggtattgaagctcgcctcccgcgaggtcatcatcaggacggcggagaagtcgaacatcccgtggagggagatgacgaaggaggtgctggagtcggacgtgtacgaggtgttcgagagaatccaagacccaaacctcgtgtaccctgactgtcagctcacttcccctttcctttcctttccttcagttccgttgattaatttcagcattatattcgaccaaaagataccctatatgaagtaaagtaaactggagtacataatgctaacgcctcatttctcttgatcagactatctcaacccgtttcatgcctacgacgaagggaatctatcatggctggctgcagcagaggcggagcctgcaacaatgtcgatcgcaaagagggcaatacctgaggctacatcaatcgaagaggccaaccaaattgtccgcggcaactggctgaatgtgattgaggagcatcatctgaagtactcggggaactgtcaggtaaacgacatcctagacattggctgctctgttggagtaagcaccagatacctcgctgagaagttcccatcagctcaagctgttgggctcgacctatcaccgtactttcttgctgtggcggcacaaaaggaagaaaaactgtcacggccaaagcctattcgctgggttcatgccaatggtgaagcgaccgggctgtcttcagattcatttgaccttgtctcccttgcttatgtgtgccatgagtgcccagcacgagcaatcacgggattagtgaaggaagcattcagggtccttcgcccgggaggaacaatcgccttaactgacaattcgcctaaatccaaagtgcttcaggaactatccccagttttgttcactctgatgaagagtaccgagcctttcctggacgagtactacatgctggatttggaggagacgatgagaaaagtgggctttgttaacgtttgctccgtcctgacagaccccaggcacagaacagtcactgcaaccgtgccttactaattgggtcagaccatcaaatcccaagcccggccggtgtacaacaattgactatttgaaattttgtatccttactggtatggttgcacctgtataaagtagagcaatctgagtgaaacaacaaatcgaagtacaccaatttaccttccacgcatggacattatgaagtccaacactaggactgttatggtcagatgattcagggaaccaatctaaaaaaaaactcatgtgatattgtagcc

SEQ ID NO: 126531 - DNA, 1878 bp, Zea Mays
caaattggcccatactctgtttctaagtttatttgaatgaagtatacgaggagggaatgtgtattgtctattatgttgacaaacaaaacatagttgaaatccagaaaaaagaaaaaagttaacctacggcaggggcatccacgtgttgatgccctactggtcgcctcacatccctcacgataacgaagcgaatcctattgcgacgcagccaccagccaccatcggccatcgctctagccagcccgcccgccagcgagaggtcaaaaaccactacgagccaaaaactggagcccagggaaagcgacgagcaaaccaaacatggcggcgatcctcgcgcgcgccggcgtcatcgccaccgccggcaaaggtttctcgggccgccgccggggcaatggtatcgtcgtcgcggcggtcactaaaacgggggctgctgtgccacaggagggggcgctggaacggccggcgtggtccggcgagaccacgctgtcgcgtctggttggcgcgctcatcgcgttcaagccgctctacgcggtattgaagctcgcctcccgcgaggtcatcatcaggacggcggagaagtcgaacatcccgtggagggagatgacgaaggaggtgctggagtcggacgtgtacgaggtgttcgagagaatccaagacccaaacctcgtgtaccctgactgtcagctcacttcccctttcctttcctttccttcagttccgttgattaatttcagcattatattcgaccaaaagataccctatatgaagtaaagtaaactggagtacataatgctaacgcctcatttctcttgatcagactatctcaacccgtttcatgcctacgacgaagggaatctatcatggctggctgcagcagaggcggagcctgcaacaatgtcgatcgcaaagagggcaatacctgaggctacatcaatcgaagaggccaaccaaattgtccgcggcaactggctgaatgtgattgaggagcatcatctgaagtactcggggaactgtcaggtaaacgacatcctagacattggctgctctgttggagtaagcaccagatacctcgctgagaagttcccatcagctcaagctgttgggctcgacctatcaccgtactttcttgctgtggcggcacaaaaggaagaaaaactgtcacggccaaagcctattcgctgggttcatgccaatggtgaagcgaccgggctgtcttcagattcatttgaccttgtctcccttgcttatgtgtgccatgagtgcccagcacgagcaatcacgggattagtgaaggaagcattcagggtccttcgcccgggaggaacaatcgccttaactgacaattcgcctaaatccaaagtgcttcaggtaaagcttcagcagtcatcagcaccatatttggacgacacctgaattgtcacagaaggaatgactcacactggacgataacgtttatttccatgtattccaggaactatccccagttttgttcactctgatgaagagtaccgagcctttcctggacgagtactacatgctggatttggaggagacgatgagaaaagtgggctttgttaacgtttgctccgtcctgacagaccccaggcacagaacagtcactgcaaccgtgccttactaattgggtcagaccatcaaatcccaagcccggccggtgtacaacaattgactatttgaaattttgtatccttactggtatggttgcacctgtataaagtagagcaatctgagtgaaacaacaaatcgaagtacaccaatttaccttccacgcatggacattatgaagtccaacactaggactgttatggtcagatgattcagggaaccaatctaaaaaaaaactcatgtgatattgtagcc

SEQ ID NO: 126532 - DNA, 1894 bp, Zea Mays
caaattggcccatactctgtttctaagtttatttgaatgaagtatacgaggagggaatgtgtattgtctattatgttgacaaacaaaacatagttgaaatccagaaaaaagaaaaaagttaacctacggcaggggcatccacgtgttgatgccctactggtcgcctcacatccctcacgataacgaagcgaatcctattgcgacgcagccaccagccaccatcggccatcgctctagccagcccgcccgccagcgagaggtcaaaaaccactacgagccaaaaactggagcccagggaaagcgacgagcaaaccaaacatggcggcgatcctcgcgcgcgccggcgtcatcgccaccgccggcaaaggtttctcgggccgccgccggggcaatggtatcgtcgtcgcggcggtcactaaaacgggggctgctgtgccacaggagggggcgctggaacggccggcgtggtccggcgagaccacgctgtcgcgtctggttggcgcgctcatcgcgttcaagccgctctacgcggtattgaagctcgcctcccgcgaggtcatcatcaggtagtcgtacaaaatagaaacctctgccgctctttctaaacattactgcagttcttcacttgttctcttggggatggcggagatgtcggtaagagaatacatgcgtgtaggacggcggagaagtcgaacatcccgtggagggagatgacgaaggaggtgctggagtcggacgtgtacgaggtgttcgagagaatccaagacccaaacctcgtgtaccctgactactatctcaacccgtttcatgcctacgacgaagggaatctatcatggctggctgcagcagaggcggagcctgcaacaatgtcgatcgcaaagagggcaatacctgaggctacatcaatcgaagaggccaaccaaattgtccgcggcaactggctgaatgtgattgaggagcatcatctgaagtactcggggaactgtcaggtaaacgacatcctagacattggctgctctgttggagtaagcaccagatacctcgctgagaagttcccatcagctcaagctgttgtaagccccgaaatctccttctgtgcattgtgtcgtacggagtcccactgcatggatcattcacaagcaaagcaaccaatgttcaccaaaagagtaaactgtagtagtgtttctgaatgatgcaggggctcgacctatcaccgtactttcttgctgtggcggcacaaaaggaagaaaaactgtcacggccaaagcctattcgctgggttcatgccaatggtgaagcgaccgggctgtcttcagattcatttgaccttgtctcccttgcttatgtgtgccatgagtgcccagcacgagcaatcacgggattagtgaaggaagcattcagggtccttcgcccgggaggaacaatcgccttaactgacaattcgcctaaatccaaagtgcttcaggaactatccccagttttgttcactctgatgaagagtaccgagcctttcctggacgagtactacatgctggatttggaggagacgatgagaaaagtgggctttgttaacgtttgctccgtcctgacagaccccaggcacagaacagtcactgcaaccgtgccttactaattgggtcagaccatcaaatcccaagcccggccggtgtacaacaattgactatttgaaattttgtatccttactggtatggttgcacctgtataaagtagagcaatctgagtgaaacaacaaatcgaagtacaccaatttaccttccacgcatggacattatgaagtccaacactaggactgttatggtcagatgattcagggaaccaatctaaaaaaaaactcatgtgatattgtagccaggaatcactttcatgaacctt

SEQ ID NO: 126533 - DNA, 1155 bp, Zea Mays
tgagatgaattatacaaacagggaaagtgtttgcactgaacctaaatcagtacatagatagatacagtaagttgaaaaatacagaacgtagtgttacggtccacaataaacaggtagctgatcgaaaacttggaatggaagccgatgaaatcgtaagcgatacacaacgcaaacactggagacacgaaatgcatgcacggcgaaaattggaatccatgtatcgtcgtgccgacgggaggatcagagattcagaagtgctggttgttgcgaaaggacgcgaaggccttggctgcgccggcgcggaggaccaactggtggtagagcatggcggcggcggcgccgatgagtgggccgacccagaatatccagtgatcctcccacgcctttcgctggttgtacacaacggccggccccaggctccttgccgggttgatgcccgtgccggtgacggggatggtggccaggtgcaccatgaacaccgcgaatccgatgggcagcggcgccaggaccgggacgtgcgaatccctgaccttgcgcttggggtcggtggccgagaacacggtgtagacgaggacgaaggtgcccacgatctcggcgcccagaccggctcccttggagtagccggcggcgagctcgttggctccgccgccgtagcgaaggtaccagtgggcgccgtggaaggccttgacgaggccggcgccgcacatggcgcccaggcactgcgcgaccacgtagagcgcggcgcgcaccagcgacagcttgcgcgccagcagcaggccgaaggtgaccgccgggttaatgtggccgccggagatgccggcgatgcagtagacgagcacgaagatcatgccgccgaaggaccaggcgatgcccagcacgccgacgctgccgcacggctgggactcggcctcgcgcttgtgcccgatgacggtggccagcgtgacgtacacgaagagcagcgtggccacgaactcggcgatgacggcgcggtacagggaccacttgcccagctcgccggcgttcacgaatggtgctgggacagggtcactgtagtccttcttgccatctgcggtctctatggattgatgacaagtatccatatctgagactagtgtgcgtgactacagaattcaggcaagctaaggaagagcgtgc

SEQ ID NO: 126534 - DNA, 2222 bp, Zea Mays
atacgtcgaattttaggacggcctgcggtaactcctcacggcacgtcgagcccactcagcagtcagcagcgacccgcaccttccggaggtaagccatggcagagttgcctttggcagcggggctgatggaccttcgcaactgcaagctctctccgaagccagcgccgcccttgccactccccgcgctccgccgcatgcacacaagcgccacggctacgacggccccgtccccgcgccatgcggtccccgaactccactccactaccgagctggcggacgggagcatcgtcttccgtttcggccatcctaagtccaaggcgctggagccggagccggcgagcgtaaagaccagcccttactccagagttgcccctgcctcgggcgctgtgcccggcagccagatggagccggagattgactctgaacatggattagacggcgtgcgaataggcaccacggctggggttgagaagccgagcccgaatgccgcagccgaggcctggccgacacctccacctcctgacgccggcgcggtaaccggtgccacttccgctgcgctagaggaggcgccggagcaggaggcgggttccaatgctgccgttgaggaggtggacaccaggccatcatccgcagagtctcttgtcccgtcgagatcagaggatgggccaaagggcgacggcgtcgctgttgaggctggcatgccgaccagtggtgctgccatggatacgattgagactgctttggaggggcgcggggcaagcgaggatgactcagcagttgatgtgagtggtggcttggatgaggcggcgacttccggtttggaggactccgaagccgcatcggaaggctccactgcacaggatttctacaccgacgttgaaacggagtccagcggctccagcagcgacgagcagagagctgagttcggcttttccttaccaccaccggaacaagttagcaacaaggcggattggaaaaatgacacttcagaggtgaagagttctgataggatgattccaatagctcaacggacacgtgtgttatcgtcaggtgctgcaatattgcctcatccgtcaaaggtagcaacaggtggagaagatgcatatttcattgcagccaatggctggtttggtgtagcagatggagttggccagtggtcatttgaaggaatcaacgcagggctttatgcaagagaactaatggatggctgcaaaaagttcgttaccgagaatcaaggggatccagatcttagaccagagcagatcctttccaaagcagtagatgaagcatgttcacctggttcttgcactgtattagttgctcattttgatggccaggcccttcaagcatcaaatattggggactctgggtttatagtgataagaaatggagaagtgttcaaaaagtctaaacctacgctttatggtttcaatttcccactacaaattcagaagggagatgacccctcaaagtttgtacagaattatgctattgatctagaggacggcgatgcaattgtgacagcaaccgatggcctttttgataatgtatacgagcatgaaatagctggaattgtctccaaatcgttacaggcagatctagaaccagcggagattgcggaacacttggctgtgaaggcccaggaagtagggaggtctggggctgggagaagcccattttcagatgctgctctctcggctgggtaccttggctacagtgggggcaaactggatgacatagccgtcgttgtatcaattgtccggactgaaattcaagaggataggctaagatgactatgcagaaaagaagctcatgttttgtggaagctcaacaccaagcgaccacgcgggttgccctatcagtattctgtactgctagaactgcagctatgtggcgatttctggaaagttaagggcgtatgcatcagcatcatacaccgtgctcgatcatcaataggcgggccaataaccattggacatcagcattgtagcgaagccccttcctgttgcccttgccagtgcaccggcgccacattttgatttttggtttcgctataaaaatataaggcatttagatgttgcccttgccattaaaccaatgtcatgtactccttctgtcataaattaaaattcgttttggtttctaatggattcatataatacttagtgtatgtgttatatatatatataaaaactaatttgataagggagtatgttataatc

SEQ ID NO: 126535 - DNA, 2306 bp, Zea Mays
atacgtcgaattttaggacggcctgcggtaactcctcacggcacgtcgagcccactcagcagtcagcagcgacccgcaccttccggtcaagagttctcgagagctcaaacgatccatcctcaccaccattcgactccacagctggaggctgaagctccgcagtcacagcattcaaatcaatctctctctttctctctctctctctcacaggaggtaagccatggcagagttgcctttggcagcggggctgatggaccttcgcaactgcaagctctctccgaagccagcgccgcccttgccactccccgcgctccgccgcatgcacacaagcgccacggctacgacggccccgtccccgcgccatgcggtccccgaactccactccactaccgagctggcggacgggagcatcgtcttccgtttcggccatcctaagtccaaggcgctggagccggagccggcgagcgtaaagaccagcccttactccagagttgcccctgcctcgggcgctgtgcccggcagccagatggagccggagattgactctgaacatggattagacggcgtgcgaataggcaccacggctggggttgagaagccgagcccgaatgccgcagccgaggcctggccgacacctccacctcctgacgccggcgcggtaaccggtgccacttccgctgcgctagaggaggcgccggagcaggaggcgggttccaatgctgccgttgaggaggtggacaccaggccatcatccgcagagtctcttgtcccgtcgagatcagaggatgggccaaagggcgacggcgtcgctgttgaggctggcatgccgaccagtggtgctgccatggatacgattgagactgctttggaggggcgcggggcaagcgaggatgactcagcagttgatgtgagtggtggcttggatgaggcggcgacttccggtttggaggactccgaagccgcatcggaaggctccactgcacaggatttctacaccgacgttgaaacggagtccagcggctccagcagcgacgagcagagagctgagttcggcttttccttaccaccaccggaacaagttagcaacaaggcggattggaaaaatgacacttcagaggtgaagagttctgataggatgattccaatagctcaacggacacgtgtgttatcgtcaggtgctgcaatattgcctcatccgtcaaaggtagcaacaggtggagaagatgcatatttcattgcagccaatggctggtttggtgtagcagatggagttggccagtggtcatttgaaggaatcaacgcagggctttatgcaagagaactaatggatggctgcaaaaagttcgttaccgagaatcaaggggatccagatcttagaccagagcagatcctttccaaagcagtagatgaagcatgttcacctggttcttgcactgtattagttgctcattttgatggccaggcccttcaagcatcaaatattggggactctgggtttatagtgataagaaatggagaagtgttcaaaaagtctaaacctacgctttatggtttcaatttcccactacaaattcagaagggagatgacccctcaaagtttgtacagaattatgctattgatctagaggacggcgatgcaattgtgacagcaaccgatggcctttttgataatgtatacgagcatgaaatagctggaattgtctccaaatcgttacaggcagatctagaaccagcggagattgcggaacacttggctgtgaaggcccaggaagtagggaggtctggggctgggagaagcccattttcagatgctgctctctcggctgggtaccttggctacagtgggggcaaactggatgacatagccgtcgttgtatcaattgtccggactgaaattcaagaggataggctaagatgactatgcagaaaagaagctcatgttttgtggaagctcaacaccaagcgaccacgcgggttgccctatcagtattctgtactgctagaactgcagctatgtggcgatttctggaaagttaagggcgtatgcatcagcatcatacaccgtgctcgatcatcaataggcgggccaataaccattggacatcagcattgtagcgaagccccttcctgttgcccttgccagtgcaccggcgccacattttgatttttggtttcgctataaaaatataaggcatttagatgttgcccttgccattaaaccaatgtcatgtactccttctgtcataaattaaaattcgttttggtttctaatggattcatataatacttataaaaagcaaaacaaa

SEQ ID NO: 126536 - DNA, 4530 bp, Zea Mays
atggttccgaacggagcaggggaatgcggcggcggctgccggcgagggaaagcagcgcacgccggtgtcggcgctgtggctggtttcttcttatgtctcttgatggtctgggcagttggtgggtctgaaagatcaggttgtggccgggtggctgagcaccacggggtggtacgggtggggcagttcaacctcagcaggagccagctgcaggcgttggtgttcctcctctcatcgacacataaagaatgtatggtaaattctggaatggtccatgatgggaatcaagtcaatggtgcgtcttttatcccagatattcgttgcattcgagataggatatatgatggaaaacagaattggttgaaggatgcaattcttcaagaatcttgcacagcacaagataaatatggcctaaatagtcatgcacctgcagtattggaagataagttattgcaaaatgttatacaagaagacattaattctaccacgcagtgcaatccggacgaatgtgacttatgtgctggaatcagtggcgtgaatgtggtccagaatattgggtcaagttctaatcgcacaataatattatgtctatctgcttttttggggagcattgtgatatcaatagttaaaactacgcacaaaagagggattcaaacccacaagctttatgcagatgagaaagttctccaggcaccaagtactaaaataagtcgaaagtggtcaaagagagccctgcttattggtgtcttatttgggctctgtagctctgtatgcatattttcatgcatgtatgccgatgttgttgctcggagaattgagaatcttgctaatatgtgtgatgagagagcaaggatgttacaggatcagtttaatgtaagcatgaaccatgtgcatgcgttggctatactggtctcatcatttcaccatgggaaggatccttctgctattgatcagaaaacatttgaggacttcacagcaaggacaacatttgaaaggccattgatgagtggtgtcgcctatgcattgaaggtattacacaatgaaagacaacagtttgaggaacaacatggatggaagattaagaagatggaagatggagatcagtcccttgttcatgactacaaccttgaaaagcttgaaccatcaccagttcaagatgagtatgcgcctgttattttctctcaggaaactgtgaagcacattatatctgtagatatgatgtctgggaaggaagatcatgacaatatattacgttcctggtcaacaggtaaaggggccctaacatccccttttaagcttctgaagtccaaccatctcggtgtggtgcttacattcactgtatataaatatgatctgcctccaaatgcaacaccacaggagcgtattcatgctacattgggctatcttggtgcctcatttgatgtcccttctctggttgataaactcctagaacaactcgctagcaaacgaaagatagtagttaatttatatgacaccacaaatcatacctctcctattgaaatgtatggttctgattttactccatctggtgatctgcatattagtagcattgattttggagacccaacacgcaaacatgagatgcattgcagatttaaacatgaaccttcactgccatggtctgcaataataatatcaacagctgtagctataattgttttgcttgttggacatattatttatgcaactctgaactcccttgaaaaggctgaacatgattatagagtaatgagagaacttaaaggacaagctgaagctgcagatatagcaaaatctcagtttctagcaactgtttcccatgagattcggactccaatgaatggtgttttaggtatgctgcagatgctaatggacactgaacttgatacaactcagcaggattttgtagtcaccgctcaagaaagtggaaaggtattaataaacttaataaatgaagtccttgatctggctaagatagagtcaggaaggattgagctggaagcagtgccttttgatgtccgtgatattcttgacaatgtgatatctcttttctacgataaatcacaagctaaaggcatagagttggccgtgcttgtatctgaccaagttcctgatgtcctaattggggatccatggcggttccggcagatcattacgaaccttgtggggaattctatgaagtttactgaacagggccacatctttgttcaagtccatttggtcaaggaactaaacaggaaaggaaacaatttttgtgatgtttctgctcataacagagaaattctgtatgattctgacaactcgatgctatggaacacactaagcggacttgaagtagcagatagctggaggtccttggagaattttacgatgttcaagaattcaaatggtgaaacagatacaattaggttagctgtcagagttgaagacaccggcataggaataacaaaagatgctcaaatgcgtatttttacacctttcatgcaagctgacagttccacctcacgaacatatggtggaactggaattggcttgagtattacaaaacgtttagttgaattgatgggtggagaaatagggtttactagtaaatcaggagttggtagtacattttcttttactgccattttcaaggagaacagaggatgtcctggagatatgaaaagatactattctgaacctactccgttggattttcaaggaatgagggctcttattattgatggaaggagtgcacgtgcagaggttactatgtaccatcttcgtagacttggaatacagtgcagtcttgttgccacatctgaatctgaatctgcatcttcagctttgatgaaagcctgcacctcaagcaaaaacaatccggacatggtccttgttgatacagaagcttggggtaaaggttcaggtttggcattctatcatcgttttgtagattgtcaactaaagggcgcacacaagttttctcagcccatgccaaagactattcttttgggaagctcaataagccctgttgaatctgattatttaagattgacaggatttggtgattgcataaggaaacccctccgtcttagtactattgttgcctgtcttcgcaaaaccttaggggttggggttacaaggcagcagagtagagaccaatctttggttcttcaaagtgtactaactggaaaacagattctggttgtggatgataatgcagtcaaccgtaaagttgcagctggttctttgaagaaatatggatctaaagttacatgtgttgatagtgggagtgatgcaattgatatgctcaagccacctcacacatttgatgcttgcttcatggatgttcagatgcccgagatggacgggtttgaagctacaagattaatccggtccatagagaaaaaaataaacgatatgatcatgatgggtgaaatatccgctaataattatggaaataaggcccattggcatgtaccaatattagctatgacggcagatgtaatccaagcgacttttgaaaaatgtatgcagtgtggaatggatggatatgtgtcaaagccatttgaagaacagcagctctactttgctgttgctcatttcttagagactgatgaaacagaataacaaatccaacttcgtaggagattgatttgccgcaacactgtttcaacatctgccaaaagaccatctgttcaacaggttctgaaaaacagcgatcggcagcatatttggtgatttcctctacatgctttttaagagcaagctaatgcaattaaatatttccccatgcagttctacaagcttatgcatttacattctttgtggagcgataaaactttgcttgtatacttgtctgccaaatatctactataacatcttgttatcaagaaagaaacctattgtaacattgacttgcctagctctgaatgcagatgaagcatcaatatttttgaaacaaaaatactaatttgctcattactcattgaatcattgtagaaattgctgatttggtaattttatctttgttttggagcaatggaattgaggtcccagttcttatatatagaacttgctccaggaaacaaaatacattggactcccactgaccagaagaaagaagataagatagtagggggtacaaaatgtttggtctggtttccgcagcaattttttttctggccgtgttttctggaaccaatacaacatgaccttgcaacagtggtgtcagttgcttctgtaatgccttatgacaccacgatatttccaaatgctgtgttgtaagtgctttacagacaaaccgaggtccagctttctaaaacattgagttcaatgacatcacttcatccattatttaagaaagcgagggtcttcaaatcaggaggatacaattgtatcaccaagtcaggcacacagtttcaaggtgactttgttctgatctgattgttaatgcaatctgtaaagaggcaactatgagttagggattgtttgatgccttgaatgtcgtatattcatattccatcatttttgtgggcacttgtatatacattg

SEQ ID NO: 126537 - DNA, 1849 bp, Zea Mays
gggctaaactttagcagggattggaagacctagtccacggtgaccaactgaccatggccagcattcactccactctgctccacgcgagccacgaggtgcgagagtgcgacgcgagagaggcagatatcagtggggcaatataaaataaaacaaaaagaaataaaaactgcatcggcatttattccgttgggcctcgcttccgatgcgccggagctcgcacgcgatgggagcgcaagcgtttcggctgctgctgcttctgctgctcgcggcggcggcggcggaggcgcgcttcgttgtggagaagaacagcctgatggtgacgtcgccgacttcgttgcggggacgacacgacagcgctatagggaacttcggaatcccacagtacggcgggagcatggcgggcgccgtcgtctaccctaaggacaacgccaaggcttgcgacgatttcgacggcaggcaccccttccgtgccaagcctggcgcgatgcccacgttcctcctcatcgaccgcggtgagtgcttatttgcgaagaaggtttggaatgcacaaaatgctggtgcctctgcagtacttgtagttgatgacaaggatgaaccattgataacaatggatttacctcgtgaagatgacgaggcttcaaagtatatacaaaacataaccattccttctgcattaatagatgaaaaatttggtgaccagttgaagaaggctgttaaagatggggaaatggttaatgttaatcttgattggagggaggctgttccacatccagatgaccgtgttgagtatgagttatggacaaacagcaatgatgaatgcgggcctaaatgtgatatgctgatgaattttcttaaggaatttaaaggagctgcccaactacttgagaaaggtggctatagccaattcacgccccattacattacttggtactgtcctcaagcatttgtgatcagtaaacaatgcaagtctcaatgcataaaccatggaaggtactgtgcacctgatccagagcaagattttagcacaggctacgaaggaaaggatgtggtggtagagaacctcagacagttatgtgtgtttaaagttgcaaacgaaaataagaaaccatgggtctggtgggattatgtgactgattttcacataaggtgtccaatgaaggagaagaagtacaataaaaaatgtgcagaaactgtcatcaaatcactaggtctggatgtgaagaaggtcgataaatgcatgggagacccaaatgctgattctgaccacccgttacttaaaatggaacaagatgctcagattgggaaaggttcaagaggagatgttactatattgcctacacttgttgtgaacaaccggcaatatcgagggaagcttgagaggaaagctgtcctcaaagctatttgtgctggttttgaggaaactacagaaccaaatgtttgcctgagtgatgatatagagacaaatgagtgtctgaatgacaacgggggctgctggcaagacaaatctgctaatgtaacagcctgtagggacaccttccgtggtagagtgtgtgaatgccccactttcaatggcgtacaatttaaaggcgatggctacagcaattgtgaacctgctggaccaggaaaatgcttgataaaccatggaggatgttggcatgaaactcgcaacggaaaaacattctctgcttgccaggaatctggagatgggaaatgcctgtgcccagctggtttccgaggggacggcgttaaaaaatgtgaaggtgctgtatttagtaatataatttgcctcatcatcaccatttcttctcaaacacataggagagcggtcagcggtgtattattatattaa

SEQ ID NO: 126538 - DNA, 2666 bp, Zea Mays
gggctaaactttagcagggattggaagacctagtccacggtgaccaactgaccatggccagcattcactccactctgctccacgcgagccacgaggtgcgagagtgcgacgcgagagaggcagatatcagtggggcaatataaaataaaacaaaaagaaataaaaactgcatcggcatttattccgttgggcctcgcttccgatgcgccggagctcgcacgcgatgggagcgcaagcgtttcggctgctgctgcttctgctgctcgcggcggcggcggcggaggcgcgcttcgttgtggagaagaacagcctgatggtgacgtcgccgacttcgttgcggggacgacacgacagcgctatagggaacttcggaatcccacagtacggcgggagcatggcgggcgccgtcgtctaccctaaggacaacgccaaggcttgcgacgatttcgacggcaggcaccccttccgtgccaagcctggcgcgatgcccacgttcctcctcatcgaccgcggtgagtgcttatttgcgaagaaggtttggaatgcacaaaatgctggtgcctctgcagtacttgtagttgatgacaaggatgaaccattgataacaatggatttacctcgtgaagatgacgaggcttcaaagtatatacaaaacataaccattccttctgcattaatagatgaaaaatttggtgaccagttgaagaaggctgttaaagatggggaaatggttaatgttaatcttgattggagggaggctgttccacatccagatgaccgtgttgagtatgagttatggacaaacagcaatgatgaatgcgggcctaaatgtgatatgctgatgaattttcttaaggaatttaaaggagctgcccaactacttgagaaaggtggctatagccaattcacgccccattacattacttggtactgtcctcaagcatttgtgatcagtaaacaatgcaagtctcaatgcataaaccatggaaggtactgtgcacctgatccagagcaagattttagcacaggctacgaaggaaaggatgtggtggtagagaacctcagacagttatgtgtgtttaaagttgcaaacgaaaataagaaaccatgggtctggtgggattatgtgactgattttcacataaggtgtccaatgaaggagaagaagtacaataaaaaatgtgcagaaactgtcatcaaatcactaggtctggatgtgaagaaggtcgataaatgcatgggagacccaaatgctgattctgaccacccgttacttaaaatggaacaagatgctcagattgggaaaggttcaagaggagatgttactatattgcctacacttgttgtgaacaaccggcaatatcgagggaagcttgagaggaaagctgtcctcaaagctatttgtgctggttttgaggaaactacagaaccaaatgtttgcctgagtgatgatatagagacaaatgagtgtctgaatgacaacgggggctgctggcaagacaaatctgctaatgtaacagcctgtagggacaccttccgtggtagagtgtgtgaatgccccactttcaatggcgtacaatttaaaggcgatggctacagcaattgtgaacctgctggaccaggaaaatgcttgataaaccatggaggatgttggcatgaaactcgcaacggaaaaacattctctgcttgccaggaatctggagatgggaaatgcctgtgcccagctggtttccgaggggacggcgttaaaaaatgtgaagacattgatgagtgcaaggagaaaaaagcttgtcagtgtcctgaatgcaactgcaaagatacatggggtggctatgactgcacttgcagtggtgaccttttgtacatcagagagcatgacacctgcataagcaagacagcagttcaggctaaagcagcatgggctgcagtgtggggtatcttgatagttgttgctgttgtggcagcgggaagttatgttgtgtacaaatacagactaagggtaagctagcacatgcacacccttacttttgttctttcgttgtttaatgtatttcattttaaaatacttaccctttatgtattataccgtttatattaagcagatggttgggtttgtgccatcacgtgtagacatatccagatagtctaatttgcatgaaaaatcacatgtatgatcaactcgatctataatcgaagctatcgtactaccacttaagtacttaatatttgactaatgatgtatccaaaatgtactgatggaatatcttggcgttccaatctccttgagaaaattgacaaaagcacaattgcagacctttattgattgacttgctataaccgtttgtgagttggaaagcgaatgtgttgaccaaagagagcctacggattttggttgaattcgtgcttacttcaatgctagtttatctttgatggccattgaccttttcaccttgggcaatcaaggttattgacatgatcagaagaggattattgtggagaggaagaaatgatgtgatgggaggtcacttcactgccttgtaacttgaaccaaagtgtatcttcctcgtgagcttggtcgacctggcatctctaaccttcagaaccttggatgggtgcatcaagcaaaaatggccatggctgaaaaaaaatcttagtcatccatggac

SEQ ID NO: 126539 - DNA, 2712 bp, Zea Mays
cacgcgagccacgaggtgcgagagtgcgacgcgagagaggcagatatcagtggggcaatataaaataaaacaaaaagaaataaaaactgcatcggcatttattccgttgggcctcgcttccgatgcgccggagctcgcacgcgatgggagcgcaagcgtttcggctgctgctgcttctgctgctcgcggcggcggcggcggaggcgcgcttcgttgtggagaagaacagcctgatggtgacgtcgccgacttcgttgcggggacgacacgacagcgctatagggaacttcggaatcccacagtacggcgggagcatggcgggcgccgtcgtctaccctaaggacaacgccaaggcttgcgacgatttcgacggcaggcaccccttccgtgccaagcctggcgcgatgcccacgttcctcctcatcgaccgcggtgagtgcttatttgcgaagaaggtttggaatgcacaaaatgctggtgcctctgcagtacttgtagttgatgacaaggatgaaccattgataacaatggatttacctcgtgaagatgacgaggcttcaaagtatatacaaaacataaccattccttctgcattaatagatgaaaaatttggtgaccagttgaagaaggctgttaaagatggggaaatggttaatgttaatcttgattggagggaggctgttccacatccagatgaccgtgttgagtatgagttatggacaaacagcaatgatgaatgcgggcctaaatgtgatatgctgatgaattttcttaaggaatttaaaggagctgcccaactacttgagaaaggtggctatagccaattcacgccccattacattacttggtactgtcctcaagcatttgtgatcagtaaacaatgcaagtctcaatgcataaaccatggaaggtactgtgcacctgatccagagcaagattttagcacaggctacgaaggaaaggatgtggtggtagagaacctcagacagttatgtgtgtttaaagttgcaaacgaaaataagaaaccatgggtctggtgggattatgtgactgattttcacataaggtgtccaatgaaggagaagaagtacaataaaaaatgtgcagaaactgtcatcaaatcactaggtctggatgtgaagaaggtcgataaatgcatgggagacccaaatgctgattctgaccacccgttacttaaaatggaacaagatgctcagattgggaaaggttcaagaggagatgttactatattgcctacacttgttgtgaacaaccggcaatatcgagggaagcttgagaggaaagctgtcctcaaagctatttgtgctggttttgaggaaactacagaaccaaatgtttgcctgagtgatgatatagagacaaatgagtgtctgaatgacaacgggggctgctggcaagacaaatctgctaatgtaacagcctgtagggacaccttccgtggtagagtgtgtgaatgccccactttcaatggcgtacaatttaaaggcgatggctacagcaattgtgaacctgctggaccaggaaaatgcttgataaaccatggaggatgttggcatgaaactcgcaacggaaaaacattctctgcttgccaggaatctggagatgggaaatgcctgtgcccagctggtttccgaggggacggcgttaaaaaatgtgaagacattgatgagtgcaaggagaaaaaagcttgtcagtgtcctgaatgcaactgcaaagatacatggggtggctatgactgcacttgcagtggtgaccttttgtacatcagagagcatgacacctgcataagcaagacagcagttcaggctaaagcagcatgggctgcagtgtggggtatcttgatagttgttgctgttgtggcagcgggaagttatgttgtgtacaaatacagactaaggacatatccagatagtctaatttgcatgaaaaatcacatgtatgatcaactcgatctataatcgaagctatcgtactaccacttaagtacttaatatttgactaatgatgtatccaaaatgtactgatggaagtaaaacattttaggatctagggatgaaaggtaaccacagaatctctccaccagagtctctctatgattgatgacttgtccttttcttgcgccctttagccagtgacatagatttctctcttaggctgctggatttgtttggtgatgcttctggggtgagaagcaaaagagtaatgtttatcccatactgtacagagaatgacttggcttccatacaacatcacctctcgtgtgaattacttgacttcccatgcaagtatcttggcgttccaatctccttgagaaaattgacaaaagcacaattgcagacctttattgattgacttgctataaccgtttgtgagttggaaagcgaatgtgttgaccaaagagagcctacggattttggttgaattcgtgcttacttcaatgctagtttatctttgatggccattgaccttttcaccttgggcaatcaaggttattgacatgatcagaagaggattattgtggagaggaagaaatgatgtgatgggaggtcacttcactgccttgtaacttgaaccaaagtgtatcttcctcgtgagcttggtcgacctggcatctctaaccttcagaaccttggatgggtgcatcaagcaaaaatggccatggctgaaaaaaaatcttagtcatccatggac

SEQ ID NO: 126540 - DNA, 2432 bp, Zea Mays
ctcgcttccgatgcgccggagctcgcacgcgatgggagcgcaagcgtttcggctgctgctgcttctgctgctcgcggcggcggcggcggaggcgcgcttcgttgtggagaagaacagcctgatggtgacgtcgccgacttcgttgcggggacgacacgacagcgctatagggaacttcggaatcccacagtacggcgggagcatggcgggcgccgtcgtctaccctaaggacaacgccaagcctggcgcgatgcccacgttcctcctcatcgaccgcggtgagtgcttatttgcgaagaaggtttggaatgcacaaaatgctggtgcctctgcagtacttgtagttgatgacaaggatgaaccattgataacaatggatttacctcgtgaagatgacgaggcttcaaagtatatacaaaacataaccattccttctgcattaatagatgaaaaatttggtgaccagttgaagaaggctgttaaagatggggaaatggttaatgttaatcttgattggagggaggctgttccacatccagatgaccgtgttgagtatgagttatggacaaacagcaatgatgaatgcgggcctaaatgtgatatgctgatgaattttcttaaggaatttaaaggagctgcccaactacttgagaaaggtggctatagccaattcacgccccattacattacttggtactgtcctcaagcatttgtgatcagtaaacaatgcaagtctcaatgcataaaccatggaaggtactgtgcacctgatccagagcaagattttagcacaggctacgaaggaaaggatgtggtggtagagaacctcagacagttatgtgtgtttaaagttgcaaacgaaaataagaaaccatgggtctggtgggattatgtgactgattttcacataaggtgtccaatgaaggagaagaagtacaataaaaaatgtgcagaaactgtcatcaaatcactaggtctggatgtgaagaaggtcgataaatgcatgggagacccaaatgctgattctgaccacccgttacttaaaatggaacaagatgctcagattgggaaaggttcaagaggagatgttactatattgcctacacttgttgtgaacaaccggcaatatcgagggaagcttgagaggaaagctgtcctcaaagctatttgtgctggttttgaggaaactacagaaccaaatgtttgcctgagtgatgatatagagacaaatgagtgtctgaatgacaacgggggctgctggcaagacaaatctgctaatgtaacagcctgtagggacaccttccgtggtagagtgtgtgaatgccccactttcaatggcgtacaatttaaaggcgatggctacagcaattgtgaacctgctggaccaggaaaatgcttgataaaccatggaggatgttggcatgaaactcgcaacggaaaaacattctctgcttgccaggaatctggagatgggaaatgcctgtgcccagctggtttccgaggggacggcgttaaaaaatgtgaagacattgatgagtgcaaggagaaaaaagcttgtcagtgtcctgaatgcaactgcaaagatacatggggtggctatgactgcacttgcagtggtgaccttttgtacatcagagagcatgacacctgcataagcaagacagcagttcaggctaaagcagcatgggctgcagtgtggggtatcttgatagttgttgctgttgtggcagcgggaagttatgttgtgtacaaatacagactaagggtaagctagcacatgcacacccttacttttgttctttcgttgtttaatgtatttcattttaaaatacttaccctttatgtattataccgtttatattaagcagatggttgggtttgtgccatcacgtgtagacatatccagatagtctaatttgcatgaaaaatcacatgtatgatcaactcgatctataatcgaagctatcgtactaccacttaagtacttaatatttgactaatgatgtatccaaaatgtactgatggaatatcttggcgttccaatctccttgagaaaattgacaaaagcacaattgcagacctttattgattgacttgctataaccgtttgtgagttggaaagcgaatgtgttgaccaaagagagcctacggattttggttgaattcgtgcttacttcaatgctagtttatctttgatggccattgaccttttcaccttgggcaatcaaggttattgacatgatcagaagaggattattgtggagaggaagaaatgatgtgatgggaggtcacttcactgccttgtaacttgaaccaaagtgtatcttcctcgtgagcttggtcgacctggcatctctaaccttcagaaccttggatgggtgcatcaagcaaaaatggccatggctgaaaaaaaatcttagtcatccatggac

SEQ ID NO: 126541 - DNA, 969 bp, Zea Mays
atggctgctgcgtcactgtcactgctgaccttatcttgttgcttctgtcggttgcaccaccaccccgacacttcctattgcagcggcatcgtcatcgtgggccatgggtttgcttccacaggaggagaatccactgttgagaactgccagatcctccagactagggtgaaccgttccaaatctgataaagcatgggtagcgcaagcagagatgcagggtttttcctgcgatattatgtttactgataaggagctagatataattgagatggctgtgtacggggacgtcattcgtccagggaagcaatgtcgctgcagaacagtagccgaggtgctcgggcaggtgaagccaacgaatcgcatggctgcatgtgagttaccagacaaaggtgcctcttaaaatgtataattcgaataaattggtttcgaccctcacctgtcagaatacaaccttttgtagcgcagttgattccattcaacagaggaacttgagttctttctcacaagtcataatcttgggaaatggatgcagttgatctgcagcctgtgctcattcatgatatctgctcgtaaacattctgttgatttttttgttgttacatattgattgatggcaacgttatcaatgaattggcccattccaataattgggcttgaaaataactacttcgggtggttcaactcccatggctggtttagcttcagttggttggacctgtttagtaaggccactgtaaggatgtgagctgcaacagcctttgccgaggggtatagaaatgagaaactgaagtttaaatgttgtgttgtgatctgtagcctacatgatgtggtaacttcgaacttctacgcaaccatgatttctaccttaggaggcaaattccttaggagctgctggagaaggtcctcaattccgtatataccataccactagaaaagttgtaatcctacatgagtcagcttcaaattttgc

SEQ ID NO: 126542 - DNA, 1496 bp, Zea Mays
cccaagtgcatccgcattccacccggaaccgcggtctcagcgctcagatggctcagatgtcacccacccgcaacaagtgcgtcctaaccgccatctgagcgcgttcttgtccaccctaacctggtgcctctcacggccgcattcgcaccgcgatgaactacgccgcagccgccactaacgcccccgcggcggcgcccgcggcagcgccggcgtcgggcacagaacacgcccactacccgtattacgctggctattcttatccctacggcgcctatcaccaacctgccccgcccacgtactcctccgccgtggccgccgcctcgtcatcctactactaccccgtccctgccgccgcgtcgtccaccgccgcgcagtacgacccctattcgggttaccagcactacagtcacccggagggaggaggctcggcgggggctggcctggtgggctgctacagcaccgtcggcgaggcgttgcagcaggccgcggtagcatcgacgacgcaggctgctctggaggcgaccacaaaggaggcggggaagcaattcggtttcgatccccagagctacgctcaggcagcagttgccagagcctccaatggaattacacaaccagctgcagccccaggcttgcaccatgcccagtggaatgctcattttgggtatcctgtgccgaaatatgtcttgaggaaacaaatgaagaaaaagccgaagactgtgcaaccagcgccatgtgaggtgtgcaagattcagtgtgatacactagaagttctcctgatccataagcagggaaagaagcacaagaaaaatttggagaaattacaagactcaatcacccgtaaaccaattataaagcccccaagcaatgtcatcggtccaagtatgccacctgttgctgtatccaactgtgtggtgccctctgtacagccgaagaagaagagcagctcagcagcaacccgggaagatctggaggtgaagaagaggcgagtccttgaggctggagcagcgcagggcgaagtaaaaatctgccaagtgtgcaatgttgtagtgaacagccaaaaagtgtacgagttccatattgcggggcagaagcaccaggccttggtacgtaagcagcaaccgctacgttttgtcacatgatgcagagccattttgctcgtcgtctttcgtctggcctcatgcttgtccggaagttcctctggaacgagaactcacaacattcgtatcttcaactttgttagcacatttcctcgtttagtgctcgtgctcctgtactactggtagcgtgccaaaaggttaacaggttttcattggacttttgcctgctggtcataattctgagtgctgaaactgaagactatattgtatgtcgcaagttctttatcagcatggtttggttgtatctagtaaaaaatcatggttggattgtagatcgtcaaagtttgctgttgctataaagcactccttccattctaaattataagttctgttatattt

SEQ ID NO: 126543 - DNA, 635 bp, Zea Mays
ccactacctcgctccctcgtcgcgcagcgagctccatctccgacctacgcagcaagctgcgcgctgcagcagcagccatgagatcccgtccgtgtcgccagcgtcgacccgatctgcgcagcggtgccggtccaccgcagcagccccatgctgcgccgttgatctacgcggttcgattgtctccgcgtctcgcttcaccgaatctgcgcagcgccgacgtgccatcgtgggaacccgtgcccttgtcgacgtcacgccttgcgcatcgctcgtcggcaaagagcccaaactaatggcatgcatgcgcggcacgagtcggccaggttgttcgccttgtatgattgcgatttattttacttacgtattcggtcgatgatgtgcctgcatgtttatatgcgtgtgaaaataaattgtatgaatgaacacgtatatagaagaaaatgaagtagaacaagaactcgaatgtttttatatttttggtaggatcacatttgcggttagagaaaaagaggttgttcgatgcgtgcgatttgtagtttgtctaattatgttttggttgatgtggagtacatgggtgtttaattatgtgtgggtataaaatgttttgggttatatgcagtggcaaggtcgcattc

SEQ ID NO: 126544 - DNA, 1595 bp, Zea Mays
gaaatatttcgtcgtctcgactgtcgactctcgagtatctcaagaaaaaggaaggtcttcgggaattctgttcagcagaatccgagtccactagccctcctcagtcctccccagggatttcgacttccccgagacaccatcgctacgacgagcaagcagagcaccatctcggctgccttaaactgtctctccgccggatactacacccgccgccgcagcgccgaccttgtctcaatcgagcggagcgggcgatcggattggttgcttccttcccccatctcatgttggtggactgagagatggagttttgatttcaaatagcatctagagaactgccactaagtttttaagttagtatataatgggtggctgttgttgctgttcgtcgagaacatctgaagccgatagagcaccaattgatatatatcgtcaacaaaatcttgaggagcatgagccgctgtcttcagcttttgatggatcatctccaccatcttcaattgttgcagtagacacaaatctggatacttccacacctgacacatatcgagcaccacctgcacccttgccttatgatgttgttttggcagtcccaactacccctggtttggagaagctagacaacaagagcaaaactgatgaccaacaagagtccataaatgatcaggagtctttaaaggtggatgagtcatgtaagaaaaatgtcactgaagataaggctgaggaggaggatgtttgtcctatctgccttgaagaatacgatgaagaaaatccccgctctgtaactaagtgtgagcaccatttccatctttgctgcattcttgaatggatggagcgaaaagatacttgcccagtttgtgaccagacaattttggtggatgagatgtccgaatagacttggtaatcctggtggatcatcacttgaagctgtttgttactgaggaagtgcaggcaacaactactacactcttgatattcgtccattctgggtggctctcagagtaatgaattgatggggcaaaaattgaaaggatgaacgacatgaaatgtatttacgccccctcctttaccctgcattctgtgtcatgcttttgctgttcatagcaacaggtggactaggaaactgcttggttgaattatatatagagagagatatgtcggcttgcaggttgattcagttaaaagtgcaaaactatgccatttcgcttttctgaattcagagtttcagacatctgctggttcttccaggaatccagtcagctttttacatggtatattaggtggttgcaggtaaaaatggtctagatggaggtgggggtttctttgtataatccacatgctattcaagcttcctgtatataatatttcctgttttcttcgatttgtctagtcaggcaagtttcagggatatagttttctgttatgctgaatatttgcagatcctcgctgttctgataaaaaacttactgatcatcccaaatctgggccagacaaaacgtctcagggatataatataatacatctgacagctcttgttaaaacatcttcggggcctgctaaaatgttcacattatgttccggctatgaaaacttgcagt

SEQ ID NO: 126545 - DNA, 336 bp, Zea Mays
atgttggcgagccaagagacgctgccttcgctgctgctgccgcccaggagcacgctgccttggcccccgccctcgatgcccaggccacccatcggcatcatcgcgctgtccggggtggcgtccgtgaacgtcgcgcccggtggcatcatggtccccgtcggcatagccggggtcgcgcccggcatcggcgttgcctccggcaccgtcgtcgtcattgtccccggcaccgtcgccggcgtcgcgcccggtgtggtcgtcgacttctggctgcgctcatgtcacgggtacatacaagagcagcgtatccatccggtcagaagttcacgtgctcagtag

SEQ ID NO: 126546 - DNA, 2853 bp, Zea Mays
ctcggctcctccaacagccgccgccgccgctgccgcgccagatgcgcctcctcgccgccgcggcgagacaatccaatacaccgcagcgtattctcgtcaccctccaccacttcatatccacagcgacgacgaccacgtcctcctcggcatacgatccaaccgcgcagttcatccatcctgaccagcatcgtctcttgccactgccagcatctctccgccgtcacgccgtcctcgcactcgcggaccttctcaagacctccctgcaatgccaccttgcgctccacgctgtcagcccactctctggctccccctactccaccccgttcgcctcccgcttcgccgccgccgcccacctcgccacgtcggatcccgcgcttcgcccctttgcagcgatcctcatcgcagcgctcctcccggtcgcctcctcggacctccttttgtggtcgtccagtgacagtgccagcgggagcgcgcgcgcccactactgcgcgctccggctcgcgctccacgcattcctcgccgcgggcatggcagcagaggcactcgacgtgctcgcgcgcgtccgccgctctggtaacacgcccagcctctccgcgttgtctgcattgctgcgccttctattccgaagcggggaggtccgcgctgcctggaacgtgttcgaggaaatgaccgcagaaggaccacggccgagcctcgccaccttcaacgccatgctcctcgggttctgccacagggggatggtgcgagtcgcctccgggctgcttgggatcatggggaagtctggtatcgcccccgacgtgtgcagctataacattctcatcaaggggcactgtgtgtttgggtggtcccgggacgccttcaagatgtttgaaggaatgcacaggtcagggtgtgagccaacagttgtgacatataacatactagtggatgttctgtgccatgaggggaggatgccagaagcaaggaggttgttcgatgaaatggcccaggtggggatccaagtaaatacaatcacgttcaatgttttgattgatggatatgcaaagagtggacagatggatcaggccagtgcagcctatagggagatgcaagcgaggggattagtgccagactcctgcaccttcaacattattgctgctagagctcacaagttcgggtatgctgcccagttagtccatgaccatgacatgtttagttcacatatgtcggctgatgggttggatatgttggtctgtaggctttgttgggatcatcgattggatgatgcctgggagcttctgcttggtgctattgagcagggtgttccattgcgtgttactggatttaatgcattgatcgctgcttatagtaaggagggactccatgaagaagcttctgaactgtatagaattatgaacaagttaggactggcaccatcctcgtctacttttaattacttgataatggggctctgcaatcaaggaagacttgatgaggcacagcttcttttagagcacatggttagcaaaggatattgtctaagtacatcatttactatctgcttggatgcatacttcagagacggtaatgcagttggcgcactgaaatgctgggatgatatgggcaatattggtttgcagactgattttattgccttctcagcatatattaatggcctatgccgattagattgcgtgaatgaggcttatcaggcatttgctgagatgacaagcagaggaattgtaccaaacaatattacttacaactccatcatatctgcactttgtaaggcaggcaatatgactgaagccttgaagttagttcagaatatgaggcagagtggccttgttcctgacatttacacaagcaacattctaatcgacggtttgtgcagagaaggaaagctgaagatggtggacaaccttttattggatatgtgcagtaatggtctaaccccagacacagtgacatataatacaataatcaatgcatattgtagggctcaggatatgaacagtgccatgaatttcatgaataagatgcttgtagctggttgtgaaccagatattttcacatataatatttggatgcatagcctctgcaggaaccatatgttgaaccaagcagggaagctgctagatgagcttgttgctgtggattgttctccaaattctgttacgtacaacacattaatggatggcatttgcagtgatgttcttgatcgagctatgatacttactggcaggcttattaagatggcttttaaaccaaacactatcacactcaacgttttcctttctcatttctgcaagcaaggatttgggaatagagccctcatgtgggctgagaagctcagagaagattcttttgtttttgatggtgctacaagaaatataattgactgggcacgaagggaaatggaggatgaccccaaggctaacaacgaggacataggaagatgcatgtttcttgagttcttaatgttcatgacatatgaggctatgctcaacagcagatcctcaaaggctacacatatgcttacagaaaaaggttttgatcctgctagcagcagcatgattagaattttggatactggttgataaatgaattttataaccatataaagtattagaaaacattttggtagccggcagtgcctctgtgaagataccatatccctacccatgctattcaatatccagtatcaatcactgttgactgttcgagatgaaaggggaaatgaaagtctgctgagctatgtttcatcaggaaccgtccaatctctgatatgcagttccatcatttccttgcatgaattttggaatttggatggtgattgatggttgcataggcagcaacgatttgttgtcttct

SEQ ID NO: 126547 - DNA, 512 bp, Zea Mays
ctttgttcctgtgcgcactgctatttgtgcggttggttgatggtggcctggtatgcatccgttcctgtacaatctcctttggttgagaaggaacctgtcccagggtgttgctgctatggtcattgaggtgtcagaaactgctggctcccaggtggttgccctcaatcactcacgcgcacacacttgtacctgggtagaagaagagaagagggagagagcaaacttggtgctctgcaaactgaagtggaggttcaaacttggtgctgccgcaaactgaactggaggtgcggttaggcttgcacctttcatatcatatatcactagtgattagataatagtggtcctaggaaacgagacagcgtttccgtggcaagtatacagtttttgaggtggtagaatatagcatattacaaatagattgtatcgtaggggtggtaatggatcacaatccaaatgttgcttcacagtttgtttgagtccttaattaattttagataaaaaatgaatagaaa

SEQ ID NO: 126548 - DNA, 571 bp, Zea Mays
cgggtcttagatgcacaacacaacgcttatattacttacaacaaaagataagcccacgaatcagtagatcgaggtcccgcccagtccagcagaagcgcacacggagatgtcccagctgagccctgctggccacatggctgcgacgctcctcctcatcctcctggcctccgcagcagcagcagcggtgtcagctgaccaacaggtctctgcctgccagaatgacatagacgcactgtggcgcagctgcaagcagttcgtccagaaggaggggcccaagatgcctccgtccgaggactgctgcaaaaccatcaaggccttagacgcgcacgcgtcctgcatctgcgactacgtcggctccccggacgccaggaataagctagacctggacaaggtgttcttcgttaccaaacagtgcggcgtcaccgtccccaagggctgcggtgagtataatagctttagctgggcatggccaatgatcatttgagaacgacaatgacatgctggcccgctcacagtagcagccagagagggtcctgcatgtcgatgtcagtcagctcatgctccacgtggc

SEQ ID NO: 126549 - DNA, 845 bp, Zea Mays
cgggtcttagatgcacaacacaacgcttatattacttacaacaaaagataagcccacgaatcagtagatcgaggtcccgcccagtccagcagaagcgcacacggagatgtcccagctgagccctgctggccacatggctgcgacgctcctcctcatcctcctggcctccgcagcagcagcagcggtgtcagctgaccaacaggtctctgcctgccagaatgacatagacgcactgtggcgcagctgcaagcagttcgtccagaaggaggggcccaagatgcctccgtccgaggactgctgcaaaaccatcaaggccttagacgcgcacgcgtcctgcatctgcgactacgtcggctccccggacgccaggaataagctagacctggacaaggtgttcttcgttaccaaacagtgcggcgtcaccgtccccaagggctgcggatcaaagcaggactgaagagcggctgaatctgaatggagcaagttggctaacatacgcacggcagctacaaatacttataggaataaataaagttggtcaactgttggtttcatggtgttggagtacaacaactgtactgttcttatcctcatatatgatatatgaactctagttcatcacataatataaatctgtaagagagcccagaaacatagatggctcatgggacagctggagaggcttattttctttctaccatccagtttctgattcaacataaacaaaagcgaataaaaaacatgtaaaaatatgcatattcaaaaccagcatacttacaatttggattttattccacagagagactgattgctcaagtttaaatcagtcaactgtttggtcttct

SEQ ID NO: 126550 - DNA, 2149 bp, Zea Mays
cgggtcttagatgcacaacacaacgcttatattacttacaacaaaagataagcccacgaatcagtagatcgaggtcccgcccagtccagcagaagcgcacacggagatgtcccagctgagccctgctggccacatggctgcgacgctcctcctcatcctcctggcctccgcagcagcagcagcggtgtcagctgaccaacaggtctctgcctgccagaatgacatagacgcactgtggcgcagctgcaagcagttcgtccagaaggaggggcccaagatgcctccgtccgaggactgctgcaaaaccatcaaggccttagacgcgcacgcgtcctgcatctgcgactacgtcggctccccggacgccaggaataagctagacctggacaaggtgttcttcgttaccaaacagtgcggcgtcaccgtccccaagggctgcggatcaaagcaggactgaagagcggctgaatctgaatggagcaagttggctaacatacgcacggcagctacaaatacttataggaataaataaagttggtcaactgttggtttcatggtgttggagtacaacaactgtactgttcttatcctcatatatgatatatgaactctagttcatcacataatataaatctgtaagagagcccagaaacatagatggctcatgggacagctggagaggcttattttctttctaccatccagtttctgattcaacataaacaaaagcgaataaaaaacatgtaaaaatatgcatattcaaaaccagcatacttacaatttggattttattccacagagagactgattgctcaagtttaaatcagtcaactgtttggtcttcttccataataatttctcaaactacttaaagactgaaattttgacaccaacatgtgggctccagtatgcataattgtattgaacaaatgctgcaaacgcggagaacataatatgcctaccaggataccacttataattgctgattttccttactgcattagaatgctgttctaaatacaactgctataagcaaaacctgtttctataataacttcagacagcattacaaaggaacaagcgcaaccatgatgcgaacaaacagattttttttaaaaaaaaattggaccaatccaattcggatgaacaagtagaacactgaaatacttccagaactttttatttaacgatatttgtccaatcttgagtcttgactagtaaaatatactgctaatatttaaaacaatcacactttcagattcagcaaattaaatacattcacagatacaggacaaccaccaaccgtgcctatatttggcaaacagggacttccaggctggttttgcttacaaacaaatttctaggagttatgcagctataagtctataatttctcattgacgtcgctcaacacaatcaaaaacataacaaaagtgaaatttctgagcaaagttgaattcatgtcataatactgtaaatttggataaatatgatatagaactaatttacaaaactacaactatccagatcattgtaacaaggaaccataactatggtgccgatcatgaaaccacaactactagtacccttggtaacaagaaactacaactgctagaaaaccgtaacagaacaggagcatgcaccctcctgtcagccttagcctaaggttgtctctagtggtgtcctctatatctatattttatagacttctcgaaaagattatctgctctatattttattcctctccaacatcctttatatcttgtcctctatacatcagtcatcaaagacccatattagagacatttttgctctagtttttttacgtatgtatttgtcataccctcaaatgtcataaacatattttagttttgcttaatctgttgtctaaaatataaaaatggatagagaagaagagtctctatatagaggggatggagtgctctatattcagagtaggttttagatgacaccattggaggctatagagaaagaaatcttctctatatttagggtagaggagcatatagagtcttctgttagagacaacttaatactgcagtagcaaccacattagagttgacacactgtttcactacgatttatataaaagctgaagttcctttgcactgagaacacaagtagctgtg

SEQ ID NO: 126551 - DNA, 1470 bp, Zea Mays
gcttcatccgtaagggtctgtaagatggtaacggtggcagaccccggcccaatttcaatgtgaggcgtacacaagactgatatacgtgttttcctagccctcaagcctgccttccaagttccaatagcctgcctgccttccaagcaaagcaattataaccagtctcctggcgtgttgcatcaccgagcgcacgcacgcacgcacgccgggtacccattccatgcatgccttgcgatagatgctcgccccgcccgcccatgggaagcaacaaagataccgttcgagagcgaggcgagacatgtatatagctagctgcctgcctcacaaccttgcgtgttgcatagtgtgcaagcgcagctcgatcggtgcgcaagacaaaaccgccacaaccatgggcaagcaggcaacatcgtgcgtcggctgtggcgccgtccacctcgccgtcctgttgctcagtttggcgcgcccgtgccactcctcgctctaccgcccgccgccgccgtccgccatggtctaccacgccggcgaggtgctcgacggcgccgtgccggtctccgtcctctactacggcgccttctcgccacaccagaaggccgtcatcgccgacttcctgctctccctctccccgcgcggccgccagccgcagcgccacggatttgggacgccaggacccgcgcctgcgccgtcggtggcccgctggtgggagacggtggaccggtacgcgcgcaaggccggccgggagccgccgcgggtgcttctggccaaccaggtgcacgacgaggcgtgctcgctggggaagacgctgtccagggtccaggtcgagcggctggcggcgcggctcggcgtcgcgccaggaggcgtggccgtcgtgctcactgccgccgacgtcgccgtcgagggacaatgcagcagcgcgtgcgggacgcacggggcctccgcgcctgggggagccgcgcacgtgtgggtgggcgacgccgccgttcagtgcccggggcggtgcgcgtggccattccacccggccgagggcttcgcatacggcgccaggcatgtgcccgggcgcggccgcggcgagacgctggccgcgccaaacggcgacgtcggtgtggacggcatgctgatcaacctcgcggcgctgctggcgggcgcggtcaccaacccatatgggcacggatacttccagggcgaccccggcgcacccgtggaggtggcggctgcatgccccggcgtctacggccgcggcgcgtacccggggtaccccggcgctgtcaggcttgacacggctaccggagctgggtacaacgtggtcggccggaacggcaggaagtatctcgtgccggcgctggtcgatcccgacaccaactcttgtatcatcatgacctaatggagtcatcagctgatgacgaggctcgtctgatctgcactcgcttgtgacatgagagccattaggagttggggcaacctatgcttgct

SEQ ID NO: 126552 - DNA, 438 bp, Zea Mays
atggccacgaggctggcggcggcggcggaggctgagacggcggcgctcttctccgtgacgggcgcggcagccggagtcagagccgccgcggctccggcgggggccatcgcgtcgtcaccagctcccgcgccgacggggctcgtggccggcacgccggcggagggcgcgggcaccggcgccatcgcgggaggcgagggcggggaggccataggcgccctggccggcggcggcgggaggaaggccgtcctgggtggcgctggcgctggagtgcgcttgggcgacgaggccggggcctgcgccgtggccccggcggcgaagaagagggcgaggagcgcgacgacgagggcggcgactcggtccatcgatagagccgggagacggcgcttcgcgggaatgacagctgaggctgagcagatggggagaaggttgggcagctga

SEQ ID NO: 126553 - DNA, 3906 bp, Zea Mays
ggttcttcatctctaggaatccggtaaggtacttttagaataccaatgtgtataatagattaatattattaaatttaagtaaaaaaactacgttttatggaaatgtaagaatgaaagagaaagaaagaatccacagtttattatctttattttttattttataagaatactatagattctattaatatatagattgaaatattatacatataatataaagaacgtaagatagattgaataaagaaaaaaggataaacaaaaagggataaaggatctatcgttctatgaatcgagccaccgagtcgctctggctcgtcgaactcgagttcttttcttttcggccctaaccgacggcgaccacacgagacccgaacggtcacatttagcacactctccagccgacctgtgggcctcgtgcgtgtgcgtggtgtagactgctcagctgaccggcccgtggtttatattgcctctctggctcgcgtattttccggtacacccattttctcctgcaaagattctttataaccattttgacggtggtgagcccgaagccagcgaaaaccatcaatcccattcctctcctccgctagtagccgccaaatcgacgagaaggagccgaggccaggcctccaccaagtatcagattccacgccctacgaatcatcgcaatgacgaagaagcagcggagggaggcgggggcgatgcgacggcgagaccgacaccaccatcaccggcggcagccgcgggacgagcgctgcgtttcctgcaccacgtttaacatcctggcgccgatctacaagcgcatggacaacgagaattgcagggagagccagtacagggcctactggttcagccgcaacgagaagattattgaccgccttctcgctgatcactcctccatcatctgccttcaggaggtatggttggggaacgacgagctggtcgacatgtaccagaagcgtctgggagacgccaattacatgctcttcaagcttgcacgcaccaacaatcgtggagacgtgtggataatggctttgccaaatgcctatggtgttgacatctgtggtgattgtcaattagtcttcttactgctgtacatagaaactacttcaacgttttgaattatagggaactgctgttcaatgacatcggtgatcgggtagctcagctgttgcatgtggaatcagcgatgccattcttacaaaatcgaagcaccagctgtgtccaccagcagagcctcattgtcaacactcatttgttgttccctcatgatcacagcctttcaatagttcgcttaagacaggtatataagatccttcagtatattgaggcttacctagaagagcataaacttggtccactgccaatcatcctttgtggggattggaatggaagtaaacgtggccaagtttacaagttccttcgctcgcaagggtttgtttcatcgtatgacactgctcatcaatacagtgacagcgaagaagatgcacataagtgggtcagtcaccgaaaccatcgagggaacatctgcggagttgatttcatatggcttttaaatcctgataagtgcaggaagcccctgaagaccagctggaatgaagctgtttttggtatcattaagtacttcctccaagttgcattcctttccgaggagaatgcatttgcactcctgaaggcagacagcctttatgatcacatcacatattcaagtttctaccaggcattgtgtcagttaggaatggtccatcctgatagactaaaatcagaagaaattgaggagttgtggagtgaagctgaccgtgatggcgatggtgttattaactacaaagaatttcagtgcatctggagcccaaactgctgtagtcaagaggaggaggatactgaaattgacatcactgatgaaagtctggacacttttgaggcaaacaacgaagccttcggcttcaccgtgaaggaagctgttctctttcccccagaagtagagaagggcatgtggccagaaaactacagcctctcagatcatgctcccctcactgtggtattctcccctattagaatgccttgctctccacgcaatcgtggggagctctagctatctaatgtcaatgatctcatgtatacatatacatgccccacgaaatcgttgttagatttggtggggactacagaggtttggatggggttaaatcactaacaagtcaaaatcttcctcaaaaccctttgatctcctccttcctggtctatagaggattacttttggagaaaatagaaacttggacctttagcattcataccgattgagttaagaaccggtactaagcaagcatcagtatcggttctaactgctaggatctgtgtaagccaccaatcggtattggtctctcgagcacacacaactcatactaaagctagaaaagcctttagtattgattagtgacaaaagttgatagtaaagggtactctttaatacctgctgcaaggtactctttagtatcggctgtactgtaccatttaaaagctagttttctaatttgtgcctcacttcgtgccataccggtccaagtatgatccatctaattgtcacaatcagatttaagggcaaatctaagcgcgtcttaaatatatgctagaatcaagtcttacacatataatgagggcatgtacaacccacacaaatgtcatgtatcttaatgggtatcaagtggataagtgcaaaaaacacaaaagacgatatcttaatgaagagtctctagcacggttttttaagtctagatacgattctatccatataacctacgtaaatgagtcgtatcttgagatgttctagtaaatatgatacaagacttagatatattaggttgtatttaggggtttcttagatgtatctagtgcttagagaatcaaaacgtaatatttaggttttacatgtcctgactcatggtacataaatcaatgtcacatcttttataatataaattctgtataaaatacaccatatggcgacaacgatcctgcaacatcatagttgattgggagacgacgatccagacctcttttgaactcatcgcttagcttgcagtatctgttcttgacctggtgtgattatagcatgagtgatgtcacatatgttcatcgctcaacatgtgtgagtaataatgtgcatgagctcacttacggtggagatttatgtgtagtgtaaaactgaccaaggaaaatggttaaggataagcattgcttttgataagttagtcaaaattttattagcaattactaagtataagtagatatcatcctaattaaataagagatcacaattaataatttttacaatacaatgcacggcatattaaatttaatttcataaattattcacgtgagggttcgagccactcatgatcatgagcacggttgatatgggtgatggtgttggaagtggttccatttcactgtcttgtgccctggattggtcatagtcgtagttcatgccccactcctcgcacaagccacccagtgatatgggtgatggtgttggaagtggttccatttcaatggctacacgttcgtctttgcttgtgaagcctgtctgaggagggtacaagttacaattttttacaacctcgctgcattgaatggagaccttgtcgatccaatcagcaagctctaggggtgggcacttttttttaccataaaccgaaaaccgaaccgaaccgaaatttcggtattttcggttgttcggtgcggtttcggtttttgtatctcataagtttggttttcggtatcgtaatcggttttcaccgtatacccgaagtaccaaaaaaaccgagtaccaaactttatcaattctaaaatttgacttttcgattatgtgaactagatgtgtgaagcaattaaattgttattcactta

SEQ ID NO: 126554 - DNA, 2178 bp, Zea Mays
gtgcgtgtgcgtggtgtagactgctcagctgaccggcccgtggtttatattgcctctctggctcgcgtattttccggtacacccattttctcctgcaaagattctttataaccattttgacggtggtgagcccgaagccagcgaaaaccatcaatcccattcctctcctccgctagtagccgccaaatcgacgagaaggagccgaggccaggcctccaccaagtatcagattccacgccctacgaatcatcgcaatggtgagtattcgcccgcggcggccccgtcgagctatgtgtggcttactgctcgcatagcctcttccgccgtgggcttggattgacggcccggttgtttgctgaggtgaggtcctgctgtgtgtgtgttttgtgcagacgaagaagcagcggagggaggcgggggcgatgcgacggcgagaccgacaccaccatcaccggcggcagccgcgggacgagcgctgcgtttcctgcaccacgtttaacatcctggcgccgatctacaagcgcatggacaacgagaattgcagggagagccagtacagggcctactggttcagccgcaacgagaagattattgaccgccttctcgctgatcactcctccatcatctgccttcaggaggtatggttggggaacgacgagctggtcgacatgtaccagaagcgtctgggagacgccaattacatgctcttcaagcttgcacgcaccaacaatcgtggagacggtcttcttactgctgtacatagaaactacttcaacgttttgaattatagggaactgctgttcaatgacatcggtgatcgggtagctcagctgttgcatgtggaatcagcgatgccattcttacaaaatcgaagcaccagctgtgtccaccagcagagcctcattgtcaacactcatttgttgttccctcatgatcacagcctttcaatagttcgcttaagacaggtatataagatccttcagtatattgaggcttacctagaagagcataaacttggtccactgccaatcatcctttgtggggattggaatggaagtaaacgtggccaagtttacaagttccttcgctcgcaagggtttgtttcatcgtatgacactgctcatcaatacagtgacagcgaagaagatgcacataagtgggtcagtcaccgaaaccatcgagggaacatctgcggagttgatttcatatggcttttaaatcctgataagtgcaggaagcccctgaagaccagctggaatgaagctgtttttggtatcattaagtacttcctccaagttgcattcctttccgaggagaatgcatttgcactcctgaaggcagacagcctttatgatcacatcacatattcaagtttctaccaggcattgtgtcagttaggaatggtccatcctgatagactaaaatcagaagaaattgaggagttgtggagtgaagctgaccgtgatggcgatggtgttattaactacaaagaatttcagcagtgcatctggagcccaaactgctgtagtcaagaggaggaggatactgaaattgacatcactgatgaaagtctggacacttttgaggcaaacaacgaagccttcggcttcaccgtgaaggaagctgttctctttcccccagaagtagagaagggcatgtggccagaaaactacagcctctcagatcatgctcccctcactgtggtattctcccctattagaatgccttgctctccacgcaatcgtggggagctctagctatctaatgtcaatgatctcatgtatacatatacatgccccacgaaatcgttgttagatttggtggggactacagaggtttggatggggttaaatcactaacaagtcaaaatcttcctcaaaaccctttgatctcctccttcctggtctatagaggattacttttggagaaaatagaaacttggacctttagcattcataccgattgagttaagaaccggtactaagcaagcatcagtatcggttctaactgctaggatctgtgtaagccaccaatcggtattggtctctcgagcacacacaactcatactaaagctagaaaagcctttagtattgattagtgacaaaagttgatagtaaagggtactctttaatacctgctgcaaggtactctttagtatcggctgtactgtaccattt

SEQ ID NO: 126555 - DNA, 1968 bp, Zea Mays
ggtacacccattttctcctgcaaagattctttataaccattttgacggtggtgagcccgaagccagcgaaaaccatcaatcccattcctctcctccgctagtagccgccaaatcgacgagaaggagccgaggccaggcctccaccaagtatcagattccacgccctacgaatcatcgcaatgacgaagaagcagcggagggaggcgggggcgatgcgacggcgagaccgacaccaccatcaccggcggcagccgcgggacgagcgctgcgtttcctgcaccacgtttaacatcctggcgccgatctacaagcgcatggacaacgagaattgcagggagagccagtacagggcctactggttcagccgcaacgagaagattattgaccgccttctcgctgatcactcctccatcatctgccttcaggaggtatggttggggaacgacgagctggtcgacatgtaccagaagcgtctgggagacgccaattacatgctcttcaagcttgcacgcaccaacaatcgtggagacggtcttcttactgctgtacatagaaactacttcaacgttttgaattatagggaactgctgttcaatgacatcggtgatcgggtagctcagctgttgcatgtggaatcagcgatgccattcttacaaaatcgaagcaccagctgtgtccaccagcagagcctcattgtcaacactcatttgttgttccctcatgatcacagcctttcaatagttcgcttaagacaggtatataagatccttcagtatattgaggcttacctagaagagcataaacttggtccactgccaatcatcctttgtggggattggaatggaagtaaacgtggccaagtttacaagttccttcgctcgcaagggtttgtttcatcgtatgacactgctcatcaatacagtgacagcgaagaagatgcacataagtgggtcagtcaccgaaaccatcgagggaacatctgcggagttgatttcatatggcttttaaatcctgataagtgcaggaagcccctgaagaccagctggaatgaagctgtttttggtatcattaagtacttcctccaagttgcattcctttccgaggagaatgcatttgcactcctgaaggcagacagcctttatgatcacatcacatattcaagtttctaccaggcattgtgtcagttaggaatggtccatcctgatagactaaaatcagaagaaattgaggagttgtggagtgaagctgaccgtgatggcgatggtgttattaactacaaagaatttcagcagtgcatctggagcccaaactgctgtagtcaagaggaggaggatactgaaattgacatcactgatgaaagtctggacacttttgaggcaaacaacgaagccttcggcttcaccgtgaaggaagctgttctctttcccccagaagtagagaagggcatgtggccagaaaactacagcctctcagatcatgctcccctcactgtggtattctcccctattagaatgccttgctctccacgcaatcgtggggagctctagctatctaatgtcaatgatctcatgtatacatatacatgccccacgaaatcgttgttagatttggtggggactacagaggtttggatggggttaaatcactaacaagtcaaaatcttcctcaaaaccctttgatctcctccttcctggtctatagaggattacttttggagaaaatagaaacttggacctttagcattcataccgattgagttaagaaccggtactaagcaagcatcagtatcggttctaactgctaggatctgtgtaagccaccaatcggtattggtctctcgagcacacacaactcatactaaagctagaaaagcctttagtattgattagtgacaaaagttgatagtaaagggtactctttaatacctgctgcaaggtactctttagtatcggctgtactgtaccattt

SEQ ID NO: 126556 - DNA, 1729 bp, Zea Mays
acacccattttctcctgcaaagattctttataaccattttgacggtggtgagcccgaagccagcgaaaaccatcaatcccattcctctcctccgctagtagccgccaaatcgacgagaaggagccgaggccaggcctccaccaagtatcagattccacgccctacgaatcatcgcaatgacgaagaagcagcggagggaggcgggggcgatgcgacggcgagaccgacaccaccatcaccggcggcagccgcgggacgagcgctgcgtttcctgcaccacgtttaacatcctggcgccgatctacaagcgcatggacaacgagaattgcagggagagccagtacagggcctactggttcagccgcaacgagaagattattgaccgccttctcgctgatcactcctccatcatctgccttcaggaggtatggttggggaacgacgagctggtcgacatgtaccagaagcgtctgggagacgccaattacatgctcttcaagcttgcacgcaccaacaatcgtggagacggtcttcttactgctgtacatagaaactacttcaacgttttgaattatagggaactgctgttcaatgacatcggtgatcgggtagctcagctgttgcatgtggaatcagcgatgccattcttacaaaatcgaagcaccagctgtgtccaccagcagagcctcattgtcaacactcatttgttgttccctcatgatcacagcctttcaatagttcgcttaagacaggtatataagatccttcagtatattgaggcttacctagaagagcataaacttggtccactgccaatcatcctttgtggggattggaatggaagtaaacgtggccaagtttacaagttccttcgctcgcaagggtttgtttcatcgtatgacactgctcatcaatacagtgacagcgaagaagatgcacataagtgggtcagtcaccgaaaccatcgagggaacatctgcggagttgatttcatatggcttttaaatcctgataagtgcaggaagcccctgaagaccagctggaatgaagctgtttttggtatcattaagtacttcctccaagttgcattcctttccgaggagaatgcatttgcactcctgaaggcagacagcctttatgatcacatcacatattcaagtttctaccaggcattgtgtcagttaggaatggtccatcctgatagactaaaatcagaagaaattgaggagttgtggagtgaagctgaccgtgatggcgatggtgttattaactacaaagaatttcagtgcatctggagcccaaactgctgtagtcaagaggaggaggatactgaaattgacatcactgatgaaagtctggacacttttgaggcaaacaacgaagccttcggcttcaccgtgaaggaagctgttctctttcccccagaagtagagaagggcatgtggccagaaaactacagcctctcagatcatgctcccctcactgtggtattctcccctattagaatgccttgctctccacgcaatcgtggggagctctagctatctaatgtcaatgatctcatgtatacatatacatgccccacgaaatcgttgttagatttggtggggactacagaggtttggatggggttaaatcactaacaagtcaaaatcttcctcaaaaccctttgatctcctccttcctggtctatagaggattacttttggagaaaatagaaacttggacc

SEQ ID NO: 126557 - DNA, 1717 bp, Zea Mays
catcaatcccattcctctcctccgctagtagccgccaaatcgacgagaaggagccgaggccaggcctccaccaagtatcagattccacgccctacgaatcatcgcaatggtgagtattcgcccgcggcggccccgtcgagctatgtgtggcttactgctcgcatagcctcttccgccgtgggcttggattgacggcccggttgtttgctgaggtgaggtcctgctgtgtgtgtgttttgtgcagacgaagaagcagcggagggaggcgggggcgatgcgacggcgagaccgacaccaccatcaccggcggcagccgcgggacgagcgctgcgtttcctgcaccacgtttaacatcctggcgccgatctacaagcgcatggacaacgagaattgcagggagagccagtacagggcctactggttcagccgcaacgagaagattattgaccgccttctcgctgatcactcctccatcatctgccttcaggaggtatggttggggaacgacgagctggtcgacatgtaccagaagcgtctgggagacgccaattacatgctcttcaagcttgcacgcaccaacaatcgtggagacggtcttcttactgctgtacatagaaactacttcaacgttttgaattatagggaactgctgttcaatgacatcggtgatcgggtagctcagctgttgcatgtggaatcagcgatgccattcttacaaaatcgaagcaccagctgtgtccaccagcagagcctcattgtcaacactcatttgttgttccctcatgatcacagcctttcaatagttcgcttaagacaggtatataagatccttcagtatattgaggcttacctagaagagcataaacttggtccactgccaatcatcctttgtggggattggaatggaagtaaacgtggccaagtttacaagttccttcgctcgcaagggtttgtttcatcgtatgacactgctcatcaatacagtgacagcgaagaagatgcacataaggaagcccctgaagaccagctggaatgaagctgtttttggtatcattaagtacttcctccaagttgcattcctttccgaggagaatgcatttgcactcctgaaggcagacagcctttatgatcacatcacatattcaagtttctaccaggcattgtgtcagttaggaatggtccatcctgatagactaaaatcagaagaaattgaggagttgtggagtgaagctgaccgtgatggcgatggtgttattaactacaaagaatttcagtgcatctggagcccaaactgctgtagtcaagaggaggaggatactgaaattgacatcactgatgaaagtctggacacttttgaggcaaacaacgaagccttcggcttcaccgtgaaggaagctgttctctttcccccagaagtagagaagggcatgtggccagaaaactacagcctctcagatcatgctcccctcactgtggtattctcccctattagaatgccttgctctccacgcaatcgtggggagctctagctatctaatgtcaatgatctcatgtatacatatacatgccccacgaaatcgttgttagatttggtggggactacagaggtttggatggggttaaatcactaacaagtcaaaatcttcctcaaaaccctttgatctcctccttcctggtctatagaggattacttttggagaaaatagaaacttggacc

SEQ ID NO: 126558 - DNA, 1860 bp, Zea Mays
catcaatcccattcctctcctccgctagtagccgccaaatcgacgagaaggagccgaggccaggcctccaccaaacgaagaagcagcggagggaggcgggggcgatgcgacggcgagaccgacaccaccatcaccggcggcagccgcgggacgagcgctgcgtttcctgcaccacgtttaacatcctggcgccgatctacaagcgcatggacaacgagaattgcagggagagccagtacagggcctactggttcagccgcaacgagaagattattgaccgccttctcgctgatcactcctccatcatctgccttcaggaggtatggttggggaacgacgagctggtcgacatgtaccagaagcgtctgggagacgccaattacatgctcttcaagcttgcacgcaccaacaatcgtggagacggtcttcttactgctgtacatagaaactacttcaacgttttgaattatagggaactgctgttcaatgacatcggtgatcgggtagctcagctgttgcatgtggaatcagcgatgccattcttacaaaatcgaagcaccagctgtgtccaccagcagagcctcattgtcaacactcatttgttgttccctcatgatcacagcctttcaatagttcgcttaagacaggtatataagatccttcagtatattgaggcttacctagaagagcataaacttggtccactgccaatcatcctttgtggggattggaatggaagtaaacgtggccaagtttacaagttccttcgctcgcaagggtttgtttcatcgtatgacactgctcatcaatacagtgacagcgaagaagatgcacataagtgggtcagtcaccgaaaccatcgagggaacatctgcggagttgatttcatatggcttttaaatcctgataagtgcaggaagcccctgaagaccagctggaatgaagctgtttttggtatcattaagtacttcctccaagttgcattcctttccgaggagaatgcatttgcactcctgaaggcagacagcctttatgatcacatcacatattcaagtttctaccaggcattgtgtcagttaggaatggtccatcctgatagactaaaatcagaagaaattgaggagttgtggagtgaagctgaccgtgatggcgatggtgttattaactacaaagaatttcagcagtgcatctggagcccaaactgctgtagtcaagaggaggaggatactgaaattgacatcactgatgaaagtctggacacttttgaggcaaacaacgaagccttcggcttcaccgtgaaggaagctgttctctttcccccagaagtagagaagggcatgtggccagaaaactacagcctctcagatcatgctcccctcactgtggtattctcccctattagaatgccttgctctccacgcaatcgtggggagctctagctatctaatgtcaatgatctcatgtatacatatacatgccccacgaaatcgttgttagatttggtggggactacagaggtttggatggggttaaatcactaacaagtcaaaatcttcctcaaaaccctttgatctcctccttcctggtctatagaggattacttttggagaaaatagaaacttggacctttagcattcataccgattgagttaagaaccggtactaagcaagcatcagtatcggttctaactgctaggatctgtgtaagccaccaatcggtattggtctctcgagcacacacaactcatactaaagctagaaaagcctttagtattgattagtgacaaaagttgatagtaaagggtactctttaatacctgctgcaaggtactctttagtatcggctgtactgtaccattt

SEQ ID NO: 126559 - DNA, 1826 bp, Zea Mays
caagaacacatcgcctatccagtatccaccgacctagctcatcgcgaccaaagaaaaggacacagcaactcagcaagacccccatcttccatagctctagctactagctactagtttcaggcctgcggctcgtgaacacctcatctttttagccacttttgccaccaccgacgacgaccgatcgatcagctagcagctaggccatcccgcgcgcgtcacgaggaacccacggccggcgtcgccattgttgtcgctgtaacttgcaagctttccctagcatcggcccttttccccttccttttccctcgctcgtcctcgtgctagctgtgtataaaagcgcgtcgctagcgcgctcatggagcagcagcagcatcaggaggtgaggaggaacaggaaaggcgtgctgcaggtgcaggacggctctgagatccgggctctcgtggagaacaaggcggagttcgctaggttcgtcgacgacaggttccggaagctcgacgccgatggcgacgggaggctgtcggtgaaagagctccagccggccgtcgctgacatcggtgccgccatcgggctgccggccagagggtcgtcgccgcaggcggaccacatctacgcggaggtcctaaacgagttcactcgcgggaagcaagagtcggtgggcaaggccgagttccagcgcgtgctgtccgacatcctcctcgggatggcggccgggctgaagagggacccgatcgtcatcctcaggataaacggggaggacctgagcgagttcgtggagagcccgaggtacgagcctgaagccgtggccatattttcgcaggccgtggggggccctaccaataccaacgacgccacgctgcgccagtgcctgctggccgctgtcggagagctcaccatcgaccacggcatgccaccggcttctgatccctgggtcatggagaacgtcgtggagcccgcgttccaagagctgcctgctagtgctacccagcagctcgacctcgaccagcctgttccctcccaggaagcctttctccaggaattcaggagacttttgggcgccatcaccctgagactgcgacagcaccctgtgatcgtcgcccataccgagaacaacttcgacgggagtggcgtcaggaggctactgtcgaacaagttcgagttcgacaagctgctggactctgtgtggagagaggtcccgaaagaacgcaaggacaagcaggcgtcgaaagagtacctccggatcgcgctcgacaggatcgccgattcggcgggcctgccgcctctgggggccgtcggtcaggtggatgccgtggtgaacgaggcgttcaagatggcgaaagccgacgacctcagggcggtggacgaggcggagttcaagaagctgctgaccgaggttcttggggccgtcatgctgcagctggacgccagccccgtcgctgtctccaccaacaccgtcgtccacgagcccatgtgcacctcctcctcctcctccgcgctgctgtcgcccacgccgctgtctccgatggtgtcctctcctgctagtgaataggagaagacttgacaactgagtgaggagatgacgatggagatggatcacaccggcccgtcacgctcagtttttctttttctgtgtcaccgggtactaataacatgttaggaacttgtgggtttttatgtcgcttataacttctcgtcgaaataaggcttttctaagcttttgagtagttgtgaacattttaagcaatcgtgaacagatggtggttgatatgtgtccagtatggttttttaattgtgaacatgtggtggttgattaattatgaacactactt

SEQ ID NO: 126560 - DNA, 1933 bp, Zea Mays
caagaacacatcgcctatccagtatccaccgacctagctcatcgcgaccaaagaaaaggacacagcaactcagcaagacccccatcttccatagctctagctactagctactagtttcaggcctgcggctcgtgaacacctcatctttttagccacttttgccaccaccgacgacgaccgatcgatcagctagcagctaggccatcccgcgcgcgtcacgaggaacccacggccggcgtcgccattgttgtcgctgtaacttgcaagctttccctagcatcggcccttttccccttccttttccctcgctcgtcctcgtgctagctgtgtataaaagcgcgtcgctagcgcgctcatggagcagcagcagcatcaggaggtgaggaggaacaggaaaggcgtgctgcaggtgcaggacggctctgagatccgggctctcgtggagaacaaggcggagttcgctaggttcgtcgacgacaggttccggaagctcgacgccgatggcgacgggaggctgtcggtgaaagagctccagccggccgtcgctgacatcggtgccgccatcgggctgccggccagagggtcgtcgccgcaggcggaccacatctacgcggaggtcctaaacgagttcactcgcgggaagcaagagtcggtgggcaaggccgagttccagcgcgtgctgtccgacatcctcctcgggatggcggccgggctgaagagggacccgatcgtcatcctcaggataaacggggaggacctgagcgagttcgtggagagcccgaggtacgagcctgaagccgtggccatattttcgcaggccgtggggggccctaccaataccaacgacgccacgctgcgccagtgcctgctggccgctgtcggagagctcaccatcgaccacggcatgccaccggcttctgatccctgggtaatttttctgaaaacggcagtagagttcgtattgcgcgcgcgtgctttgatttttgggtgggctcgctctttcattggatatattggatgtatcatatgttgtaggtcatggagaacgtcgtggagcccgcgttccaagagctgcctgctagtgctacccagcagctcgacctcgaccagcctgttccctcccaggaagcctttctccaggaattcaggagacttttgggcgccatcaccctgagactgcgacagcaccctgtgatcgtcgcccataccgagaacaacttcgacgggagtggcgtcaggaggctactgtcgaacaagttcgagttcgacaagctgctggactctgtgtggagagaggtcccgaaagaacgcaaggacaagcaggcgtcgaaagagtacctccggatcgcgctcgacaggatcgccgattcggcgggcctgccgcctctgggggccgtcggtcaggtggatgccgtggtgaacgaggcgttcaagatggcgaaagccgacgacctcagggcggtggacgaggcggagttcaagaagctgctgaccgaggttcttggggccgtcatgctgcagctggacgccagccccgtcgctgtctccaccaacaccgtcgtccacgagcccatgtgcacctcctcctcctcctccgcgctgctgtcgcccacgccgctgtctccgatggtgtcctctcctgctagtgaataggagaagacttgacaactgagtgaggagatgacgatggagatggatcacaccggcccgtcacgctcagtttttctttttctgtgtcaccgggtactaataacatgttaggaacttgtgggtttttatgtcgcttataacttctcgtcgaaataaggcttttctaagcttttgagtagttgtgaacattttaagcaatcgtgaacagatggtggttgatatgtgtccagtatggttttttaattgtgaacatgtggtggttgattaattatgaacactactt

SEQ ID NO: 126561 - DNA, 628 bp, Zea Mays
ggagctctatttggcctgctgggatccatgctttctgaactactcatgaactggactatatactccaacaaggcggcagctataataacacttttgtttattattgcactcaatttggctattgggatactacctcacgttgacaactttgctcacattggtggattcgcgacgggtttcctcttgggttttgttctgttggcaaggcctcaatttagctggatggaaagtcatgagttgccacacactaaccaacctcccaagtacaaagcataccagtatattttgtgggttgtggcactcgtcttgctgttagttgggtttgtgatttcactggtgatgcttttcaaagggaagaacgggaacgatggctgccattggtgccactacctgaactgcgtgccaacatccaagtggaagtgtaacacctagacacctcagttttctgttacactcgggggcaaaaatgtagtatccagatttacaagaccattctctatgtttgtttgtctgtagatatgaacaagttctttgtcgtttaccggttttgagtttccttgcctatgtaaactgcttcgttgagcgttttatgtttacaattggagcttgatagctgttttaaattgct

SEQ ID NO: 126562 - DNA, 1239 bp, Zea Mays
cggaagaaaaagaaaaaaaatagagagtaattaaaccccgtcggacccaaacctctgaaagccccaaaacctaaacctagcttttcgtcagtacaacgcctccgccgctccttccattagctcagacatggttctcggcctctacaccttcgccgacatcgacgccgacggagcaccccgcctcgaggttgccgatggcgaggagttcgtccgtgtcgatcgcgttgtcgagcttgccctcggtccccgggtgctgaaggcccctggaaccctttacctcaccaccaggagggtgatttgggtcagcgatggcggcgagggctacgctgtggacttcgttgccatctcgctccacgccgtgtcgcgtgatcccgaggcgtatccatacccctgcatctacacacagattggagtgatgcacgtgaagatcgagacggaagctatttctgacgaggagtctgatgtgtcagattctgaaacaaatggagaactcgagctctcaaaagttatggaaatgcgcatcataccttcagatcctggtcaattggatgaactctttgaagcattctgcaattgcgctgagcttaaccctgatcctagtgctgagagtgatgaagaacatggctgggttcatggtgatgagggttatgaagatacggtagatggaagcgacactgagttttcagatgtcaacccaattggtcaaactggtgagcaggatattaaccatgctgtaatcgagctccagatcaatgaccaacgttttgaggacgcggtagatgaggagagtcacaggaacgggaactagggaccatgtgaattggtcgtcgtcgatgcagcatacttgtctgtaaagacttcacttttctcatgttgtcagatcatgtggaccaacttgaatggcaacaatgggggataacgagctttattatatgagttgtgcctgtaccatacgtgcatgaccatctatggtcatatgactactgactagtattttagagggcgagggggtgcaaatcgatacccggccttgtgcaacacattttccttagcaaaagaaaaaaaatgttgtttggccaagtaaaattgtagtgttgaagggtcgaaagtggagaggtgtaaagttggttagttccacatcgcactatttctgtctgagtgtctctcttgaaacagtaaacaacaccactcctgtctggttttgtaaacaacattccagcagtagcttgcaaactgttc

SEQ ID NO: 126563 - DNA, 1218 bp, Zea Mays
cggaagaaaaagaaaaaaaatagagagtaattaaaccccgtcggacccaaacctctgaaagccccaaaacctaaacctagcttttcgtcagtacaacgcctccgccgctccttccattagctcagacatggttctcggcctctacaccttcgccgacatcgacgccgacggagcaccccgcctcgaggttgccgatggcgaggagttcgtccgtgtcgatcgcgttgtcgagcttgccctcggtccccgggtgctgaaggcccctggaaccctttacctcaccaccaggagggtgatttgggtcagcgatggcggcgagggctacgctgtggacttcgttgccatctcgctccacgccgtgtcgcgtgatcccgaggcgtatccatacccctgcatctacacacagatcgagacggaagctatttctgacgaggagtctgatgtgtcagattctgaaacaaatggagaactcgagctctcaaaagttatggaaatgcgcatcataccttcagatcctggtcaattggatgaactctttgaagcattctgcaattgcgctgagcttaaccctgatcctagtgctgagagtgatgaagaacatggctgggttcatggtgatgagggttatgaagatacggtagatggaagcgacactgagttttcagatgtcaacccaattggtcaaactggtgagcaggatattaaccatgctgtaatcgagctccagatcaatgaccaacgttttgaggacgcggtagatgaggagagtcacaggaacgggaactagggaccatgtgaattggtcgtcgtcgatgcagcatacttgtctgtaaagacttcacttttctcatgttgtcagatcatgtggaccaacttgaatggcaacaatgggggataacgagctttattatatgagttgtgcctgtaccatacgtgcatgaccatctatggtcatatgactactgactagtattttagagggcgagggggtgcaaatcgatacccggccttgtgcaacacattttccttagcaaaagaaaaaaaatgttgtttggccaagtaaaattgtagtgttgaagggtcgaaagtggagaggtgtaaagttggttagttccacatcgcactatttctgtctgagtgtctctcttgaaacagtaaacaacaccactcctgtctggttttgtaaacaacattccagcagtagcttgcaaactgttc

SEQ ID NO: 126564 - DNA, 1536 bp, Zea Mays
agttcttttatcgtttgagcatatgctgtgtatcaaaataaagcatgcagccagtctttcttgctcaacgactcaaaacctcgcttgatggaggtagctctatctgccatttctggcgaaatactcagccgactcatctccttcgtaatcaagaaacacaccgacaggtcatgtgtggaagacaagctagaaaggcttcagcatctcctgctcagactccatactgtggtcgaggaggccgagggacggtacatcaccaattccaagatgctgttgcagctcaggatgctcgtggatggcatgcacgaaggctaccatgtactcagcaccatcaggttcaagcctgttgaagaagacacatcatcccacagccaggtgacacaaccacctgccttgtcatcccctctcaagcgcactcgtgcagcagcttccagcttcaggactgccataacttccaaccacgagctacaagcttctctgaagaaactggaaacgattgttgcaaacatgacggagttcgtcattctgctgggtggatgcaagcagatgcacagaagaccatacgacacctacatctacatcgacaatttcatgttcagtcgccttgtggagaagcaagagctgatcaatgcgctgttgcaagacgattctcctgtaggtgctccagctgtggtaccagtaactggtgcatacagagccgggaagaaaagcctagtcgggtatgtttgcaatgacaatatggttcgctctcacttctcctcggttttgcacctgaaaagcaacagctttctgaaagtaagccgtaaaatgttcatgcctgtaaggacgctagttgtggtcgagtttatttcagatgtgggtgacagtgaatgggtgaagttttattcagacgcatcgccacagatgggcgcaggaagcaaagtggtcatcgtgagcaggttccaagagatagcgaggtttggaactgtaaagccagttgtcctcagaagcctgtcacaagcagagttctcctacctcttcaaggcactcgcattcggagggacagatccagagaaccacccacagctatcgtcgatagctatggagctagccatgaacgtgaacgggttgctccttgtagcgaatacgctcgccgacttgctgaggaagaaccaaagcgtcaggttctggttccatatgctgaagaggttcaggcagtcagtggagcgcaatttctccaggttcggtgagcatccaaagcaacttgttgagagggaccatccgactgacataacaatgctggtccagccttcttctgctgtacttcgtctcatgccaccccacggcgacgctagattgtgcatggaacaactgcccaaggtgaagtttgcagacctggtgcaaggttcagctactgttcaacccgatgaggagtttcagataactatgtgggagtcaagattacccccttttactaagtttgtcgcgagctgtgtcgctgaggagcatccttgtacttcctcggacaacaaaaggcacaagtcatgtaaacagtaa

SEQ ID NO: 126565 - DNA, 495 bp, Zea Mays
atggatgctcctggtggtgaagctttaggtggggtcattggtgttgcccgccacatgatccaaactgaaggattcttctcgctgtataagggattggtgccttctcttatcagtatggcatcctctggcgttgtattctatggagtgtatggcatactgaagatggcttatctgcattctcctgaaggaaagaaaatggtatcgatgatgaagcaacaaaaacaagagacaaatgcattggatcaacttgaactgggtactgtgaggactttactctatggggccattgctggttgctgtgctgaagctgctacatacacatttgaagtggtccttaggcagctacagatgcaagtaaaagcaaccagaatgaatgcgcttgcaacatgccttaagattgtcgaccaaggtggggtaccagcactgtatgccggtctaatccccagtttgttacagtcgaccatgtttgtttggaaacaaatattaacgccttag

SEQ ID NO: 126566 - DNA, 198 bp, Zea Mays
atggcggatgaggagggcgatggttggggcggccccgtcgagggagcactctgccgcgggagggaaggtgagcgcggcggggcggcgggaatcgcggctgtggctgcgcagaggatggaaggtgcggggagcagggaatcgcagctgtggctgcgcggaggatggaaggtgcgggggagcgttcggccgcgggcgtga

SEQ ID NO: 126567 - DNA, 474 bp, Zea Mays
tggctccttggtaaaactgtggctgaacactgtccaacccttatccaagtgatttctagaagggctttaaagcgaagaacagtagctgaggggctcacaaatcgtcaatgggtgtcagatattcggggaggattgtctgtaacggtcctagtagagtatctgcagctatggaacttggttgatggggtagttctgcaacctgacatcgcagaccaacacatctggcgcctctctgctcatggtacttattgtagcaaatcggcctatgatgctctctttgttggctctatcccttttggcccttggcgacgtgtctggaagacctgggcccccttaagatgcaaattctttgtatggttggcaatcaaaaacagggtttggacagctgatcgacttgcaaaaagaggtctgccccatccagttgcttgccctctgtgtgatcaggccgaggaaaccatccaacatattcttgtc

SEQ ID NO: 126568 - DNA, 101 bp, Zea Mays
cagggggaatgattgcgggagagtgtgaaatagtgggagagatgtcacacccggtttcagaaggcaaaccaaatgtgaaccatgtacgtgctaggataatc

SEQ ID NO: 126569 - DNA, 1952 bp, Zea Mays
agcgaatcctaagtttcataatggcataaatccaattttctctacaggaaacacggcatcctcgctgacgccggagaagccgaagctacaagttcgcccgtcggagccgcagcacaggcgcttgcaaacgcgatggggagcgcggacctggtgctcaagatggcttgcgagggctgcggcaacacgtcggatctctacggcacggggtgcaagcacaccactctctgcagtgactgcgggaagtccatggcacgctcccgtgcccgctgcctcgtctgctccgcgcccatcaccaggctcatccgggaatataataagaatgccgagaacaagtggtctctccataaggagggtctgcaaggccgtcagatagccgagaatatgcgggaaaaatacaacaagaaaccatggattttggaagacgaaacaggccaatatcagtatcaaggtcaaatggaaggatcacagtcagctacagctacatattatttgttaatgaggcacggcaaggaatttaatgcatatcctgctggctcttggtttaatttcagtaaaattgcacagtacaaacaattgacactggaggaggctgaagaaaagatgaataagaggaagaccagtgcaactggttatgaacgctggatgatgaaagcagcggcaaatggaccagctgcctttggttcagacatgaagaagcttgaggccacaaatggtggggaaaaagaaagtgctcgtcctaagaaaggaaaaaataatgaagagggtaataattctgataagggtgaggaggatgaagaagaggaagcaacacgcaagaatagacttggactaactaaaaagggcatggatgatgatgaggaaggtggaaaagatctagatttcgatttggatgatgaaattgagaaaggtgatgactgggagcatgaagaaacattcactgacgatgatgaggctgtagacattgatccagaggaacgggcagatttagctcctgaaattcctgctccacctgaaatcaagcaggatgatgaagagaacgaagaagaagggggcctgagcaagtctggcaaggaactaaaaaagttgcttgggcgcgctgctggactaaatgagtcagatgcggatgaggatgaagaagacgaagatcaagaagatgattcatcgccagtgcttgctccaaaacagaaggatcaagttaaagatgaacctgtggatagcagcccatctaaaccagcaccatcaggacatgctcgaggcacacctccggcatccaaatccaagcaaaagagaaaatcaggtgttgatgatgcaaaaacttctagtggtgcagcttcaaagaaagcaaaggtggaattggatgcgaaagcatcaggcctcaaagaggaggcatcatctttggcaaaacctgcatcaaagacctctgctgcatcaaaaagtgggacaagcgtatcacctgtcacagaggatgaaatcaggagtgttcttcttgcagtggctccagtcaccacacaagatctggtatccagattcaagtctaggcttcgaggtgcagaggacaagaatgcatttgctgaaattctgaagaaaatttcgaagatacagaagacgaacggccacaactacgttgtcctcagagatgacaagaagtaaataaccgaacaaaggcgctgacatcgcaaccgttggctgtactgagataatatgtttatgtaacatgctgccttgaagataaacaagtctgtaacactagaattgtcttctaacccttgtgtacttgaattttattttactattccagattttatttatgcggctttgcactacacacctgttataaatggaaatccattgggagttcatctcgtgaattttggtagattgacataatttctctcgcttaaaataattattagcttatggggaacccagtgcagttgtgaattttgcgttgt

SEQ ID NO: 126570 - DNA, 1943 bp, Zea Mays
agcgaatcctaagtttcataatggcataaatccaattttctctacaggaaacacggcatcctcgctgacgccggagaagccgaagctacaagttcgcccgtcggagccgcagcacaggcgcttgcaaacgcgatggggagcgcggacctggtgctcaagatggcttgcgagggctgcggcaacacgtcggatctctacggcacggggtgcaagcacaccactctctgcagtgactgcgggaagtccatggcacgctcccgtgcccgctgcctcgtctgctccgcgcccatcaccaggctcatccggaagaatgccgagaacaagtggtctctccataaggagggtctgcaaggccgtcagatagccgagaatatgcgggaaaaatacaacaagaaaccatggattttggaagacgaaacaggccaatatcagtatcaaggtcaaatggaaggatcacagtcagctacagctacatattatttgttaatgaggcacggcaaggaatttaatgcatatcctgctggctcttggtttaatttcagtaaaattgcacagtacaaacaattgacactggaggaggctgaagaaaagatgaataagaggaagaccagtgcaactggttatgaacgctggatgatgaaagcagcggcaaatggaccagctgcctttggttcagacatgaagaagcttgaggccacaaatggtggggaaaaagaaagtgctcgtcctaagaaaggaaaaaataatgaagagggtaataattctgataagggtgaggaggatgaagaagaggaagcaacacgcaagaatagacttggactaactaaaaagggcatggatgatgatgaggaaggtggaaaagatctagatttcgatttggatgatgaaattgagaaaggtgatgactgggagcatgaagaaacattcactgacgatgatgaggctgtagacattgatccagaggaacgggcagatttagctcctgaaattcctgctccacctgaaatcaagcaggatgatgaagagaacgaagaagaagggggcctgagcaagtctggcaaggaactaaaaaagttgcttgggcgcgctgctggactaaatgagtcagatgcggatgaggatgaagaagacgaagatcaagaagatgattcatcgccagtgcttgctccaaaacagaaggatcaagttaaagatgaacctgtggatagcagcccatctaaaccagcaccatcaggacatgctcgaggcacacctccggcatccaaatccaagcaaaagagaaaatcaggtgttgatgatgcaaaaacttctagtggtgcagcttcaaagaaagcaaaggtggaattggatgcgaaagcatcaggcctcaaagaggaggcatcatctttggcaaaacctgcatcaaagacctctgctgcatcaaaaagtgggacaagcgtatcacctgtcacagaggatgaaatcaggagtgttcttcttgcagtggctccagtcaccacacaagatctggtatccagattcaagtctaggcttcgaggtgcagaggacaagaatgcatttgctgaaattctgaagaaaatttcgaagatacagaagacgaacggccacaactacgttgtcctcagagatgacaagaagtaaataaccgaacaaaggcgctgacatcgcaaccgttggctgtactgagataatatgtttatgtaacatgctgccttgaagataaacaagtctgtaacactagaattgtcttctaacccttgtgtacttgaattttattttactattccagattttatttatgcggctttgcactacacacctgttataaatggaaatccattgggagttcatctcgtgaattttggtagattgacataatttctctcgcttaaaataattattagcttatggggaacccagtgcagttgtgaattttgcgttgt

SEQ ID NO: 126571 - DNA, 1941 bp, Zea Mays
agcgaatcctaagtttcataatggcataaatccaattttctctacaggaaacacggcatcctcgctgacgccggagaagccgaagctacaagttcgcccgtcggagccgcagcacaggcgcttgcaaacgcgatggggagcgcggacctggtgctcaagatggcttgcgagggctgcggcaacacgtcggatctctacggcacggggtgcaagcacaccactctctgcagtgactgcgggaagtccatggcacgctcccgtgcccgctgcctcgtctgctccgcgcccatcaccaggctcatccgggaaaaagaagaatgccgagaacaagtggtctctccataaggagggtctgcaaggccgtcagatagccgagaatatgcgggaaaaatacaacaagaaaccatggattttggaagacgaaacaggccaatatcagtatcaaggtcaaatggaaggatcacagtcagctacagctacatattatttgttaatgaggcacggcaaggaatttaatgcatatcctgctggctcttggtttaatttcagtaaaattgcacagtacaaacaattgacactggaggaggctgaagaaaagatgaataagaggaagaccagtgcaactggttatgaacgctggatgatgaaagcagcggcaaatggaccagctgcctttggttcagacatgaagaagcttgaggccacaaatggtggggaaaaagaaagtgctcgtcctaagaaaggaaaaaataatgaagagggtaataattctgataagggtgaggaggatgaagaagaggaagcaacacgcaagaatagacttggactaactaaaaagggcatggatgatgatgaggaaggtggaaaagatctagatttcgatttggatgatgaaattgagaaaggtgatgactgggagcatgaagaaacattcactgacgatgatgaggctgtagacattgatccagaggaacgggcagatttagctcctgaaattcctgctccacctgaaatcaagcaggatgatgaagagaacgaagaagaagggggcctgagcaagtctggcaaggaactaaaaaagttgcttgggcgcgctgctggactaaatgagtcagatgcggatgaggatgaagaagacgaagatcaagaagatgattcatcgccagtgcttgctccaaaacagaaggatcaagttaaagatgaacctgtggatagcagcccatctaaaccagcaccatcaggacatgctcgaggcacacctccggcatccaaatccaagcaaaagagaaaatcaggtgttgatgatgcaaaaacttctagtggtgcagcttcaaagaaagcaaaggatgcgaaagcatcaggcctcaaagaggaggcatcatctttggcaaaacctgcatcaaagacctctgctgcatcaaaaagtgggacaagcgtatcacctgtcacagaggatgaaatcaggagtgttcttcttgcagtggctccagtcaccacacaagatctggtatccagattcaagtctaggcttcgaggtgcagaggacaagaatgcatttgctgaaattctgaagaaaatttcgaagatacagaagacgaacggccacaactacgttgtcctcagagatgacaagaagtaaataaccgaacaaaggcgctgacatcgcaaccgttggctgtactgagataatatgtttatgtaacatgctgccttgaagataaacaagtctgtaacactagaattgtcttctaacccttgtgtacttgaattttattttactattccagattttatttatgcggctttgcactacacacctgttataaatggaaatccattgggagttcatctcgtgaattttggtagattgacataatttctctcgcttaaaataattattagcttatggggaacccagtgcagttgtgaattttgcgttgt

SEQ ID NO: 126572 - DNA, 2022 bp, Zea Mays
ctaagtttcataatggcataaatccaattttctctacaggaaacacggcatcctcgctgacgccggagaagccgaagctacaagttcgcccgtcggagccgcagcacaggcgcttgcaaacgcgatggggagcgcggacctggtgctcaagatggcttgcgagggctgcggcaacacgtcggatctctacggcacggggtgcaagcacaccactctctgcagtgactgcgggaagtccatggcacgctcccgtgcccgctgcctcgtctgctccgcgcccatcaccaggctcatccgggaatataatgtacgagctaattctgttatggataagacatactctattggacgatttgtcactggtttacctcctttctcgaaaaagaagaatgccgagaacaagtggtctctccataaggagggtctgcaaggccgtcagatagccgagaatatgcgggaaaaatacaacaagaaaccatggattttggaagacgaaacaggccaatatcagtatcaaggtcaaatggaaggatcacagtcagctacagctacatattatttgttaatgaggcacggcaaggaatttaatgcatatcctgctggctcttggtttaatttcagtaaaattgcacagtacaaacaattgacactggaggaggctgaagaaaagatgaataagaggaagaccagtgcaactggttatgaacgctggatgatgaaagcagcggcaaatggaccagctgcctttggttcagacatgaagaagcttgaggccacaaatggtggggaaaaagaaagtgctcgtcctaagaaaggaaaaaataatgaagagggtaataattctgataagggtgaggaggatgaagaagaggaagcaacacgcaagaatagacttggactaactaaaaagggcatggatgatgatgaggaaggtggaaaagatctagatttcgatttggatgatgaaattgagaaaggtgatgactgggagcatgaagaaacattcactgacgatgatgaggctgtagacattgatccagaggaacgggcagatttagctcctgaaattcctgctccacctgaaatcaagcaggatgatgaagagaacgaagaagaagggggcctgagcaagtctggcaaggaactaaaaaagttgcttgggcgcgctgctggactaaatgagtcagatgcggatgaggatgaagaagacgaagatcaagaagatgattcatcgccagtgcttgctccaaaacagaaggatcaagttaaagatgaacctgtggatagcagcccatctaaaccagcaccatcaggacatgctcgaggcacacctccggcatccaaatccaagcaaaagagaaaatcaggtgttgatgatgcaaaaacttctagtggtgcagcttcaaagaaagcaaaggtggaattggatgcgaaagcatcaggcctcaaagaggaggcatcatctttggcaaaacctgcatcaaagacctctgctgcatcaaaaagtgggacaagcgtatcacctgtcacagaggatgaaatcaggagtgttcttcttgcagtggctccagtcaccacacaagatctggtatccagattcaagtctaggcttcgaggtgcagaggacaagaatgcatttgctgaaattctgaagaaaatttcgaagatacagaagacgaacggccacaactacgttgtcctcagagatgacaagaagtaaataaccgaacaaaggcgctgacatcgcaaccgttggctgtactgagataatatgtttatgtaacatgctgccttgaagataaacaagtctgtaacactagaattgtcttctaacccttgtgtacttgaattttattttactattccagattttatttatgcggctttgcactacacacctgttataaatggaaatccattgggagttcatctcgtgaattttggtagattgacataatttctctcgcttaaaataattattagcttatggggaacccagtgcagttgtgaattttgcgttgt

SEQ ID NO: 126573 - DNA, 204 bp, Zea Mays
atgtgcgcccgccagcccgccacacaggccaagccctcttctctgtttccagccgccgcccttcaaaaccctacctatcccctaagcgtcgccccgccgacgccccgcccgcaccttacgccgcggcggacaccttactccccggcacaaggcgatctagacgccttgccctgttgtattgacgaggagaacgagggtagatag

SEQ ID NO: 126574 - DNA, 285 bp, Zea Mays
ggggggggggggggggggggatggcaagaggataatgaaatgtcatggtccttcatgactcccttttgtaccatctggcacttcatgtacatgaattttgcatcaacgtcagctccgcctcatacctcactgtcaccacgcaggccatgccggcggcacgaaacaccaacgaacgcaaagagaagggatctgaccgattgggcagcgatgggcgcaagtaagggatccgaggagtctaggagcttcatacccttgcaaccttggagagcgtgggccagcgcttag

SEQ ID NO: 126575 - DNA, 708 bp, Zea Mays
atggcgccgccacccaccagcccctcattcctccgcccgccgccgctgccacaccacccgcaccctcgcctccttttgcgacctccctccgcctctttccgcgtcgccgaaatactcggcggtcggggcctctgcaatggtgaggtcggcgtccgcaaagaactcgcatccggctccaccacctcctcgcccgcgccctctcctcctccttcgacagattctcctccgcccgcggttgatccggacgcgttcgagaaggagatgatgggcctcacaggcggcttccctggcggtgaggtcggcctcaaggacttcgtagccaagaacccgcctcctcccaagaaatcagaatcccagccccaagccacgctctccgcgccgccgcggccgccggagctgccgctgttcttgcccggcatggtggtgctggtcaagaaccccaacaacgcctaccacatgtactgcggtatcgtgcagcgcgtcagcgacggcaaggtcgcggtgctcttcgagggaggagtgtgggacaggctcatcaccttcaacctcgacgagctcgagggcagggagaagggaccccctatggccaaccccaagtccgtggtgctagaggatcttgtcgcggagctcgaggatgacgatgatgataaggaggacgaagcggccaagaagaaggaaccggagggcgcggcggcggcggcgacatga

SEQ ID NO: 126576 - DNA, 1032 bp, Zea Mays
atggcgagcctcctccagaagtccgtagacgctgtagaatgggacgctgaggacatctccggcaggctgggcctggtcttgcatgccgccttcctcttcgccggtttccagccctacggcagacagccacggtcgggataccttctgaagaagcaatcacgcaagaggggaggctcggcgtgcctctcccgactgtacaccgcgccagagcttgcgcagcgtgagggcgcagacgctgccgtgctgatgttgtgtgtgcagggaagcaacgtggcgctcctcgtgttcatcaccaccgacggcgacgacacgccggaggacgtgtacctggaacatctggatctcgagatcgtgagaccgctcctctcccgcagccttgggggcgtggagccatgggcgtcgcggatctgtaagtcgctcgccaacggcgtgtgttggtgcttcctcgacaagctgtgccgcaggaacggtctggcgctgagcggcttctcgtccctgcacgacgacctcaaggctgtggtcttggcaaagctcaccgacggcaaggaccttgcgagggtggagtgcgttagctcccagctgaggctgctcgttgcggagcgcgaccacgagctgtggaggaccttgtacaaggccctacctgcgggccggcgcaggggctggtggtggtctctgcggtggttcctccccaacgccgagagctccgacgatgagactctcgatgtcgcatcgacctggaaggacaagtacgtggaggccatgcggcgtccctatccctatcgtatgtcgttcaggtcgcgctcgtggtacttcgatcctgttgattggcggagggacctgttgtcacaaccccttggttactggttcgtccaagatccgccggaggaggacgaggagaagacgaaccctccaagggtcgacagaagcggcggcggccaccgccggaagctggcacggaacgacttcaagaagtggcatggtggcggcgcgatccactcgccgtcgtcacgctatcggtggaaacatcgctag

SEQ ID NO: 126577 - DNA, 1159 bp, Zea Mays
cacagtccacacaatccagagcagagcaagaaaagaaccgctactatggcgagccttctcaagaagtttgtagacgctgtgcagtggaacgctgaggacgtcgccggccggctgggcatagtgctgcatgccgccttcctcttcgccggcttccagccctacggcaggcagccacgatcggggcacctccgcaaggagcaatcgcgcaagacgggaggctcggcgtgcctctgccgaatgtacacagcgccggatcttgcgcagcgcgagggcgcagacgctgccgtgctgctgttgtgtgtgcagggaaatgacgtggctctcctcgtgttcgccaccagcgacggcgacggcaacgacacgccggagaacgcctacctggaacgtctggatctcaagatcgtgaggccgctcctctcccgcagcctcggtggcgtggagccatgggcgtcgcggatctgtaagtcgctcgccgacggcctgtgctggtgcttcctcgacaagctgtgccgcaggaacggtctggcgctgagcggcttctcgtccctgcacgacgacctcagggctgtggtcttggaaaagctcaccgacggcaaggacctcgcgagggtggagtgcgttagctcccagctgaggctgctcgtggcggagcgcggccaggagctgtggaggaccctgtacaaggccctgccttcgtggcagtgcctgccgtcgaggtacaggtacctcccaaaatccgagagccccgacgcggaggcggagactctcaatattgcatcgatctggaagcacaagtacgcgcaggccaggcggcgtcccgatcctaccttcaggaatctcttgtggcacttcgattttgatgatgattacatccaattattttgtcatgtccgtccgtccattggttactgtttcgtccaagatccgtcggaggagaagaggattcctcctagggtcgacagaagcggcggcggccaccgccggaggctgccacgggacgaccgcaaggagtggcatggtggcggcgcgatccactcgccgtcgtcacgctatcggtggaaacatcgctagcttgatctcatcatgcgctgctgatataaatactatgcttcatgatgtgctgcgttataaattttatcttataaattttagtggaata

SEQ ID NO: 126578 - DNA, 323 bp, Zea Mays
ttctttttcttcccactactgttgtgaaggacgaagctaagtcggagctggggttatacgatgagctgaaagaggcatgcatagcaggtgagaacctgatgaacctgagctaacagaaatgcaagtccgtgccatctttgaagctgctatagcgatgaccaaccagggcgttcaagtctttccagagataatggttcctcttgttggaacaccgcaggaattgggacatcaggtggcccttatccgtcaagtcgctaacaaagttttcaccagtatgggtaaaactattgggtacaagatcggaatgatgattgagattccca

SEQ ID NO: 126579 - DNA, 2302 bp, Zea Mays
tatttattttcagattgtccctgctccagcaagagtaggcaaggacgagcctcccccatcctgggtgttggtgcctgactcattttatcaaattttgctatggacatgagcaatagagatcaccttaggaggagggaggaggatgatgatgacctcttccttttgattctcccttccctacatctcttgggctatcttggacgtagtaaaaagaaactgaggcatacatcagcgctgaccggagaggaaaaggttcgagagctacttgaaggtcatatcaagaactgcagggtatcatttagaatggaaccttacattttcaaatccttggccaactatcttagaatggaaggattggttaaagatacaagaatcaaagttgaggaaaaacttggcttcttcctatacatgattagccacaatgcaacatttgaagatctccaagtcttttttggtcatagcaatgatacatttcactgtgtcatcaaacatttcttcgacattgttatccctggccttagcatgtggttcctaaagcctccttccaatcaagttcatcctaaaattcatggagacaaccgattttatccatacttcaagaattgcataggttcaatagatggaacccatgttccagtatcaatgtcacccgatcaagccgcaccattcaggaatagaaaagggacccttagccaaaacgtgatggttgtgtgtgattttaaccttaacataacttatgtgtcagccggatgggaaggatcagcaacagattcaatggttcttagatctgcaatgaacaatgttataggaaagtttgaagtaccttctgggaagtactacgtagtagatggtggttatgccaatacagcttcctttattgcaccatatcatggggttagatatcacctgaaagagtttgtccatggtcatcgaaggcctcaaaatcacaaagagttattcaaccatcgccatgctgttttaagaaatcatgtagagagggctttgggtgtcataaagaagagatttccaatcctcaaagttgctacccttcacaaaatggaaaatcaagcaaaaatacctattgctgctgcagtcctccataacttaattcggtcacataatggtgatgagagatggctagaaaatgatcaaggaaatatcaacccgcaaagttttgtcagcctacccaatagtgaccatggaaatgatgaagggaatatggaagggaataacttaagagatatgatagcttatcatatgtgggcagattatgagcaacgtagaaatcagtgaatcatttctgtaatggatattgtgtaatcaataaatgccatttctgtaatggatattttgtaatggatattgtgtttttttactatggccataaaagtagaaatgatgttcatagtttattttttgctggtgattctctataatagatatgatgttcacaagaggttctcccaaaattttgatgttatctaaagctgctcaaaagaaggtttctcctaaagcttctacatcaaagaagtgtggaggtacatgtggtgttcagagagcagcatggaattctgaattggagaagagcctcgttgatttgttgtttgagcaccatgtacctccatatagggctcaaaatggctagagtccagatgcttggaacaaaattgttactgaattcaataagaagcatgagtatgtcacattcaacaagattcaaattcaggagaaggagagggaactgaaaagggattacaagatgttgaaagaggctagaaagcaaagtggtgtttcctggaatgagaaacgatgcatgattgttgctgatccaccaatatgggaaaacatcataaaatcatttcctagggccaagaaatttcaaaagaagtctttccctctctttgatgctcttggggaactatatgatgggcacattgctcaagggacctggaacataacatctacacagctaccacaagaatggaacacaatttcaaatgaagaagaacaagtgaacaccacaagaatggatgaggaaggcattattcaacaacaaccacaagaagaggattcaagattggaacaagatgaagatcctataattgaaaggactgaacagaggtctactgcatcaacaatcaatcaagataaggaagcaaagaggatgaagaaggattctttggaaggacttgttgggagatatctagatctaaaatcaaaacaagttgaggatgaggttacacaaatggcgaaaggaaaagaatctgctcaaggtaatgacttctccatcatgagatgcatt

SEQ ID NO: 126580 - DNA, 212 bp, Zea Mays
ctccttgttaattgaattgttaactttgtttatttttcttttaaacatagatggatgaaggatctttaacatatgtttttgttattctctcgagatctaaatgttcattgaccaaatttgtcactatatatgcaactatgtttttgtatgtcactgaaactatctataaaattatcactgtgtatcagtgtatgcagttggcttgatgtgag

SEQ ID NO: 126581 - DNA, 1331 bp, Zea Mays
ccccgtgaccccaccgccatagcctcccccagtccctcttctattgtgaccccgccggcccctccccctcctctcactcgtgtcactgccaccatcgacttctttcctcatctgatcgagatcgtagtgttagaacaaactatatgctataagaagataagataggagatgacatagttgcctcacacaaccttaaggagtagagaagagatgagaccggtgttgagctgcagagctggggcacatgaaggaatgctgggatggaatttggactggccgactggatctttttctgtacgacaaagaaaagctacagtagtgctcatgttgggccttgggccattgacgacgagccttacatcagacccagaactacttcatcccgcgccccctgaagctcgagcacggcagcaccgtccgatcctggatccaacagccgaaacccacccacctggaaaccctagcgccgccacactatataaccttctctcttcgccgtgctccgatttgacacacctcccaaaccctacactcccggcggcggcggcggcggcgcagcagcggcagcagcatccgaagatggtgaagttcctcaagcccggcaaggccgttatcctcctccagggccgcttcgccggcaggaaggcagttatcgtgcgcgtgttcgaggagggcacccgcgaccgcccctatggccactgcctcgtcgcaggcctcgccaagtacccaaagaaggtgatccgcaaggactccgccaagaagactgcgaagaagtcgcgcgtcaagtgcttcatcaagctcgtcaacttcactcacctcatgcccacccgctacaccctcgacgtcgatttcaaggatgtcgccaccggtgggcccgacgcactctctacccacgacaagaaggtcgccgcctgcaagacggccaaagcgcgccttgaggagaggttcaagaccggcaagaacaggtggttctttaccaagctccgcttctagatgctcggcctcccgaatagtcctgctttagctgtcgatttgttgtatcggacacactccatctctgttttcgtattaccatgaatatttcgtgtttagtcctggggctctcagagataaatttgctaagatatgccgttgttgtgttacatgttttcgtgataggtctggttaaaattttgttctgttttacggcttgcgggtttcttgttggtgccagacatttgtgatgcatcttgttagtagtgtttcatcaagtatgctcttttgtttctcctgatgatctggttaattatgaaaagtagaaatgtagcataaggtatacaaatatattatgt

SEQ ID NO: 126582 - DNA, 831 bp, Zea Mays
cgaatattaaacttccatggaaaatcatgctttacttagatgctgtttgactccctgtcaaagaatttttttaatactgttcatactgcctttcggagctgggtagtcattcctttccaaatatttttgagtaacattagggaaaatttgatacgttcgaatcgaagcgctgttggctatcacattggatgctgcttcattcattgtcttgtaattaatgggcagttagttttagtttctcatttgtttgttgatcatgcttgtagcctcttgttatcttttatttactcgtgaaataaaatacaacggatcctaagaattctactaccttcgttccattttataatttgtttgactggcttttcaaaaaaaatcgtaattattattaatttttactgtgatatcgtttagtatataatatattttaaatatggctttgaattttccattttcttgcaaaaaaattgaataagatgaaccggtcaatctcggttcaaaaagtcaaacgaattataaattgtgacatgtgagtagaatagaatataccgtggagtaaagcaaataattcatgtaaccttctgaggctgggtatgttttaatgttgcctttttaaacaaacgtgttaggtgttatttcacctagaacctcttgtaatttggtacgcattttgattgctttggcacattttgctgctcgttactattgtgttgtttgctttacaagttcaacattgtcttcctggttacaatttatcaatgcgtttggtaccagtaaaccttattttataacttaattcgtgcacctcaaaatcttatttgaacggaatctggc

SEQ ID NO: 126583 - DNA, 2242 bp, Zea Mays
gaacggacggaaaattgacgacctctcccgttccggcggccgaccgtgcacgatcgtctgcctgccctgctcacccacttgccgtcgcaccggctccgttccttctgccccactaccgccatcccaaccggcaagcgcgccaccgccttctccaccctcgcccaccttgctgccgcagtcgcccataccgctaccgcgcccacgcccgcctcgagggcccgacgccagaggggctgccctcgatctgaccccacggggtaggatggacaaagggaaatcggtggtggccgagctggcggcgtcgttcagcgatgtccgtgtcacgccgcgccagaaccccaagaccaagagcttcctaccgtcgccctccttctattcttcctcgaagaaaggtaaacctcagaaattggtcagcttgtgccttggcacccttggtcagcatcttgaagatatcatcactgatatttcagaatttgctgccttatttccaccccacataaagttgacaattatgtctattgcaaggaggaggaggctcctgaatgatgaagttttgacttctcttgctgaaagttcctgggaaatcctagatatatctggatctgatgtaactgatgctggtttggctactgtagcgaatgtttgtagtaatttacgagcagttgatattagtcgctgtgaaaaagttactacttctggtgtgtctgagattgtatgccactgcccgtccttggagatattgagatgtggaggctgtccaagaagtgaagtaacggcacggaggtgcttggatctcttgaaacccaaattgaataatcttgaagaggactcatgggaggaacttaatacactagatataggaggtggtgcggaatccttaaaatggcttgtttgggtatgcaagcaagttcacttctctagctatgatttgtggtgtgtttacaattcaccaatacgtatctcgtgtttaatgaatattttccctgttttgcagccgaagatagatgataactcaaaggagactttagctgctgaatgccctcgtgttactgtcaacccacagccatcgctgtttgacctctcaggatccaaagtcccagttgaagcactggcaagcgtaccgctggaccattccatagttgaggatattgatcccaagacatgggctgtttctgctgctcctcgaagacctgttgctcctcccaatccaaatgctccccctgaaataccgatagcggaaaggttcaggctggcctatgtggagagggaagcaaggctggcacccaagagggccaaacgggaaaggcagcagcggcgccgagctgaaagggactacatgatgaatgacatcgacgcgaggtcgatggcacttgctgctcaagcaagcagaaacctgcgcaagagctgatagcgaactttgcttggcttggcttggcttcttgtttatgctgtttgttgtatgcatatctcaatagttgtcaaacacaatgtaaacatagcagttttgtattgggctatagcagtggcgtttacactttcatgtactactacaaaaaagtctaaatgtgaatacactcggtgcaaggaaagcgtgccttcattgggtcgcgatgaattagattatattcgtatcctgcttgtctgcatatcatattatatcctgaagtgcctactgtcggattagcgtctttggttgtgtgggcgtgtcacctggataggctgagcgcatgcaaaatagaacaagcctaactcatttttagaattaagtactccgtctcaaattaatattcatttttacccttttagtagatttatatattaatgtatatgttctatatatgtttaccttcgttatcattcatataaatatagacatactatattagaacggagggagtatttaataagacttgttgtaacttaacccattgttacaatagctagagccgatcaaactaaaaaaatagcgtcgctgatttttagtttcatttagaaatattatataaaatattagtcgttttaactctttatttatgttatgtttaaatggatgataaatctagacacatatataaaacaaatatattaattattgtatgaatcaactaaaaaggtaaaacgaattttattttaggacgtagagagtgcattaattcttatttttgcttttgcttttatcccctccgtcttagaaagatatttataattagattatgaaatagtaatgttccacatgtgtaag

SEQ ID NO: 126584 - DNA, 1948 bp, Zea Mays
cattaccacgcctatcccccttccattcgtcttccccctccttcccttcgcgcctaggggcggaaggccgccgtgcccgttcttcccagctgcagcaaccggccagtgcgcgcggttgcgttgcatttgcatggctgcgcgctgcgctctgggagcttgcactagcgggtcggcggcctaggcgcggggcatctttcgagtgcgtgcgtgtctgttcaagctctgatcgtctctccggcccattcgccggaggaaactgaccgccgccttctcgctctcgctctctaccctattcccggggctgagaggggaggagagaaggccacgtccacaccataaagcaggacgtacagacacgtgtacgagggggatcacggtcgggtgaggtgactaagctggcggacggaacgacgacgatggcgaggagcggcggcgggatggaaggcagcggcgggctgaagaaggggccgtggacgcaggcggaggacaagctgctgagggaccacgtgcggcggcacggcgagggcaactggaacgccgtgcgccgggagacgaggctgcagcgctgcggcaagagctgccgtctccggtgggccaaccacctccgccccaacctccgcaagtgccccttctcccccgaggaggagcgtcagatccttctcctccacggcctcatcggcaacaagtgggcgcgcatctccaagcacctctcaggaaggacggacaacgagatcaagaactactggaacacgcgcttcaagcgccggcagcgcgcgggcctgccgccctacccgccggacgtcgagcggcagatcaagctgctgcgcgcgcagaacgtcaacccgttcgcagacgcagacgccgacgccgcccacgccaacgccagcgccggccttccggcgccgccgctcctctacgacgtcggaaacccgttcgcgttgctctccagcataccgtcactgtcgcagacggcctcgcactcgcactcgccactgatcaaccagaactacccgcttctgaaccagatgcaggtgttccaccacctcggcggcagtcagcagccgtcgttccaccaggacggcagcgcggcggctttcggtgacatcgtctcctctcgcctgccgccactgccaaccgccagaacgcaggcggagctacattcgaaccaattcgacacctccatcagcggcgggctggtggatcagtcgatgctgatcggcgacgaacacctgctgcggcctaacccgagtatggtcaaggtctcctccatgcccgcgctctcctaccgtgagccggatgggtccaggatgctgccagcccatggcgccgggagcgacggcgacgtctcctcgctggggcaatgccctccgggacaggacctccaccgtggtgcgacatgggacttcaccttcgaataggacgaacacgaacgtgcgtacacgcggcacaaacacgatgatcatcgtctcaccatgtggttgcatgcatcgggaaaccaatgcgttttcagcggccgtgaagccggcgaagaggaggacggcgagcgaggtggggttctccgacatgttcgccgtcgcaccgccgggggattggttcggcggcgggtcgacggcgccatcgccggggccgtcatcggccgtcaccgacgaagagtttaacctggagatgcagcagttcatgtcaatgctaccactgtctgacgagcacggctggaacgcataatgcggccgggtaaaatggaaatcgaaaactgtgtagagcgtgtgtctccttgcttctgcgacgagaatggtgtgcgcattgtttttgtaatgtgcccactcttggatctttatctgttctagacgtcgattgagtttcaaacattgataatgctagggcaccatcggcgtgggataaacacaaaataatccaagaattcactgcaacaactgctgtgcaccttcgt

SEQ ID NO: 126585 - DNA, 1924 bp, Zea Mays
cattaccacgcctatcccccttccattcgtcttccccctccttcccttcgcgcctaggggcggaaggccgccgtgcccgttcttcccagctgcagcaaccggccagtgcgcgcggttgcgttgcatttgcatggctgcgcgctgcgctctgggagcttgcactagcgggtcggcggcctaggcgcggggcatctttcgagtgcgtgcgtgtctgttcaagctctgatcgtctctccggcccattcgccggaggaaactgaccgccgccttctcgctctcgctctctaccctattcccggggctgagaggggaggagagaaggccacgtccacaccataaagcaggacgtacagacacgtgtacgagggggatcacggtcgggtgaggtgactaagctggcggacggaacgacgacgatggcgaggagcggcggcgggatggaaggcagcggcgggctgaagaaggggccgtggacgcaggcggaggacaagctgctgagggaccacgtgcggcggcacggcgagggcaactggaacgccgtgcgccgggagacgaggctgcagcgctgcggcaagagctgccgtctccggtgggccaaccacctccgccccaacctccgcaagtgccccttctcccccgaggaggagcgtcagatccttctcctccacggcctcatcggcaacaagtgggcgcgcatctccaagcacctctcaggaaggacggacaacgagatcaagaactactggaacacgcgcttcaagcgccggcagcgcgcgggcctgccgccctacccgccggacgtcgagcggcagatcaagctgctgcgcgcgcagaacgtcaacccgttcgcagacgcagacgccgacgccgcccacgccaacgccagcgccggccttccggcgccgccgctcctctacgacgtcggaaacccgttcgcgttgctctccagcataccgtcactgtcgcagacggcctcgcactcgcactcgccactgatcaaccagaactacccgcttctgaaccagatgcaggtgttccaccacctcggcggcagtcagcagccgtcgttccaccaggacggcagcgcggcggctttcggtgacatcgtctcctctcgcctgccgccactgccaaccgccagaacgcaggcggagctacattcgaaccaattcgacacctccatcagcggcgggctggtggatcagtcgatgctgatcggcgacgaacacctgctgcggcctaacccgagtatggtcaaggtctcctccatgcccgcgctctcctaccgtgagccggatgggtccaggatgctgccagcccatggcgccgggagcgacggcgacgtctcctcgctggggcaatgccctccgggacaggacctccaccgtgaataggacgaacacgaacgtgcgtacacgcggcacaaacacgatgatcatcgtctcaccatgtggttgcatgcatcgggaaaccaatgcgttttcagcggccgtgaagccggcgaagaggaggacggcgagcgaggtggggttctccgacatgttcgccgtcgcaccgccgggggattggttcggcggcgggtcgacggcgccatcgccggggccgtcatcggccgtcaccgacgaagagtttaacctggagatgcagcagttcatgtcaatgctaccactgtctgacgagcacggctggaacgcataatgcggccgggtaaaatggaaatcgaaaactgtgtagagcgtgtgtctccttgcttctgcgacgagaatggtgtgcgcattgtttttgtaatgtgcccactcttggatctttatctgttctagacgtcgattgagtttcaaacattgataatgctagggcaccatcggcgtgggataaacacaaaataatccaagaattcactgcaacaactgctgtgcaccttcgt

SEQ ID NO: 126586 - DNA, 1919 bp, Zea Mays
cattaccacgcctatcccccttccattcgtcttccccctccttcccttcgcgcctaggggcggaaggccgccgtgcccgttcttcccagctgcagcaaccggccagtgcgcgcggttgcgttgcatttgcatggctgcgcgctgcgctctgggagcttgcactagcgggtcggcggcctaggcgcggggcatctttcgagtgcgtgcgtgtctgttcaagctctgatcgtctctccggcccattcgccggaggaaactgaccgccgccttctcgctctcgctctctaccctattcccggggctgagaggggaggagagaaggccacgtccacaccataaagcaggacgtacagacacgtgtacgagggggatcacggtcgggtgaggtgactaagctggcggacggaacgacgacgatggcgaggagcggcggcgggatggaaggcagcggcgggctgaagaaggggccgtggacgcaggcggaggacaagctgctgagggaccacgtgcggcggcacggcgagggcaactggaacgccgtgcgccgggagacgaggctgcagcgctgcggcaagagctgccgtctccggtgggccaaccacctccgccccaacctccgcaagtgccccttctcccccgaggaggagcgtcagatccttctcctccacggcctcatcggcaacaagtgggcgcgcatctccaagcacctctcaggaaggacggacaacgagatcaagaactactggaacacgcgcttcaagcgccggcagcgcgcgggcctgccgccctacccgccggacgtcgagcggcagatcaagctgctgcgcgcgcagaacgtcaacccgttcgcagacgcagacgccgacgccgcccacgccaacgccagcgccggccttccggcgccgccgctcctctacgacgtcggaaacccgttcgcgttgctctccagcataccgtcactgtcgcagacggcctcgcactcgcactcgccactgatcaaccagaactacccgcttctgaaccagatgcaggtgttccaccacctcggcggcagtcagcagccgtcgttccaccaggacggcagcgcggcggctttcggtgacatcgtctcctctcgcctgccgccactgccaaccgccagaacgcaggcggagctacattcgaaccaattcgacacctccatcagcggcgggctggtggatcagtcgatgctgatcggcgacgaacacctgctgcggcctaacccgagtatggtcaaggtctcctccatgcccgcgctctcctaccgtgagccggatgggtccaggatgctgccagcccatggcgccgggagcgacggcgacgtctcctcgctggggcaatgccctccgggacaggacctccaccgtggacgaacacgaacgtgcgtacacgcggcacaaacacgatgatcatcgtctcaccatgtggttgcatgcatcgggaaaccaatgcgttttcagcggccgtgaagccggcgaagaggaggacggcgagcgaggtggggttctccgacatgttcgccgtcgcaccgccgggggattggttcggcggcgggtcgacggcgccatcgccggggccgtcatcggccgtcaccgacgaagagtttaacctggagatgcagcagttcatgtcaatgctaccactgtctgacgagcacggctggaacgcataatgcggccgggtaaaatggaaatcgaaaactgtgtagagcgtgtgtctccttgcttctgcgacgagaatggtgtgcgcattgtttttgtaatgtgcccactcttggatctttatctgttctagacgtcgattgagtttcaaacattgataatgctagggcaccatcggcgtgggataaacacaaaataatccaagaattcactgcaacaactgctgtgcaccttcgt

SEQ ID NO: 126587 - DNA, 1851 bp, Zea Mays
cattaccacgcctatcccccttccattcgtcttccccctccttcccttcgcgcctaggggcggaaggccgccgtgcccgttcttcccagctgcagcaaccggccagtgcgcgcggttgcgttgcatttgcatggctgcgcgctgcgctctgggagcttgcactagcgggtcggcggcctaggcgcggggcatctttcgagtgcgtgcgtgtctgttcaagctctgatcgtctctccggcccattcgccggaggaaactgaccgccgccttctcgctctcgctctctaccctattcccggggctgagaggggaggagagaaggccacgtccacaccataaagcaggacgtacagacacgtgtacgagggggatcacggtcgggtgaggtgactaagctggcggacggaacgacgacgatggcgaggagcggcggcgggatggaaggcagcggcgggctgaagaaggggccgtggacgcaggcggaggacaagctgctgagggaccacgtgcggcggcacggcgagggcaactggaacgccgtgcgccgggagacgaggctgcagcgctgcggcaagagctgccgtctccggtgggccaaccacctccgccccaacctccgcaagtgccccttctcccccgaggaggagcgtcagatccttctcctccacggcctcatcggcaacaagtgggcgcgcatctccaagcacctctcaggaaggacggacaacgagatcaagaactactggaacacgcgcttcaagcgccggcagcgcgcgggcctgccgccctacccgccggacgtcgagcggcagatcaagctgctgcgcgcgcagaacgtcaacccgttcgcagacgcagacgccgacgccgcccacgccaacgccagcgccggccttccggcgccgccgctcctctacgacgtcggaaacccgttcgcgttgctctccagcataccgtcactgtcgcagacggcctcgcactcgcactcgccactgatcaaccagaactacccgcttctgaaccagatgcaggtgttccaccacctcggcggcagtcagcagccgtcgttccaccaggacggcagcgcggcggctttcggtgacatcgtctcctctcgcctgccgccactgccaaccgccagaacgcaggcggagctacattcgaaccaattcgacacctccatcagcggcgggctggtggatcagtcgatgctgatcggcgacgaacacctgctgcggcctaacccgagtatggtcaaggtctcctccatgcccgcgctctcctaccgtgagccggatgggtccaggatgctgccagcccatggcgccgggagcgacggcgacgtctcctcgctggggcaatgccctccgggacaggacctccaccgtggtgcgacatgggacttcaccttcgcggccgtgaagccggcgaagaggaggacggcgagcgaggtggggttctccgacatgttcgccgtcgcaccgccgggggattggttcggcggcgggtcgacggcgccatcgccggggccgtcatcggccgtcaccgacgaagagtttaacctggagatgcagcagttcatgtcaatgctaccactgtctgacgagcacggctggaacgcataatgcggccgggtaaaatggaaatcgaaaactgtgtagagcgtgtgtctccttgcttctgcgacgagaatggtgtgcgcattgtttttgtaatgtgcccactcttggatctttatctgttctagacgtcgattgagtttcaaacattgataatgctagggcaccatcggcgtgggataaacacaaaataatccaagaattcactgcaacaactgctgtgcaccttcgt

SEQ ID NO: 126588 - DNA, 1436 bp, Zea Mays
cgcctaggggcggaaggccgccgtgcccgttcttcccagctgcagcaaccggccagtgcgcgcggttgcgttgcatttgcatggctgcgcgctgcgctctgggagcttgcactagcgggtcggcggcctaggcgcggggcatctttcgagtgcgtgcgtgtctgttcaagctctgatcgtctctccggcccattcgccggaggaaactgaccgccgccttctcgctctcgctctctaccctattcccggggctgagaggggaggagagaaggccacgtccacaccataaagcaggacgtacagacacgtgtacgagggggatcacggtcgggtgaggtgactaagctggcggacggaacgacgacgatggcgaggagcggcggcgggatggaaggcagcggcgggctgaagaaggggccgtggacgcaggcggaggacaagctgctgagggaccacgtgcggcggcacggcgagggcaactggaacgccgtgcgccgggagatcaagctgctgcgcgcgcagaacgtcaacccgttcgcagacgcagacgccgacgccgcccacgccaacgccagcgccggccttccggcgccgccgctcctctacgacgtcggaaacccgttcgcgttgctctccagcataccgtcactgtcgcagacggcctcgcactcgcactcgccactgatcaaccagaactacccgcttctgaaccagatgcaggtgttccaccacctcggcggcagtcagcagccgtcgttccaccaggacggcagcgcggcggctttcggtgacatcgtctcctctcgcctgccgccactgccaaccgccagaacgcaggcggagctacattcgaaccaattcgacacctccatcagcggcgggctggtggatcagtcgatgctgatcggcgacgaacacctgctgcggcctaacccgagtatggtcaaggtctcctccatgcccgcgctctcctaccgtgagccggatgggtccaggatgctgccagcccatggcgccgggagcgacggcgacgtctcctcgctggggcaatgccctccgggacaggacctccaccgtggtgcgacatgggacttcaccttcgcggccgtgaagccggcgaagaggaggacggcgagcgaggtggggttctccgacatgttcgccgtcgcaccgccgggggattggttcggcggcgggtcgacggcgccatcgccggggccgtcatcggccgtcaccgacgaagagtttaacctggagatgcagcagttcatgtcaatgctaccactgtctgacgagcacggctggaacgcataatgcggccgggtaaaatggaaatcgaaaactgtgtagagcgtgtgtctccttgcttctgcgacgagaatggtgtgcgcattgtttttgtaatgtgcccactcttggatctttatctgttctag

SEQ ID NO: 126589 - DNA, 199 bp, Zea Mays
tagtacaccaagcaaaaaaatggaatctcgtgctgttatttaactcccaactcacagtaaacagagacgaagctgatgacaacacacgctctccgagctttttcagcctccgcgcaactcagagcacttgcgcaaggatagttaaacccggaaccagttaattagactatacaagcaaaccaaaacagttaagaattct

SEQ ID NO: 126590 - DNA, 437 bp, Zea Mays
cctagtagatgttcctctagtgactgcaacaagcatatatgaaaaggtgatgggtaggggtggtaatggatcacggtccaaatgcttcttcacaaaatggtagggccctaaatattttgtagttcaaaaatgaatagaaataggacccgatcctaatctgatctgatcattaaatgtaaaatttagagtccattgtcacccatagtgatgggtggcttagaatgggtgcctccctgtcccacacgtccatcgagtacaccatcgcgtcaagcacggggttctagaatacgacgatggacatgtgactacactacgagttcaccattgactagtggtatgtgttcttgaacctaccatttctcaagagttgcacatgagcgcatgcatgttcattggtggttgtaagcactagctaacatcctaccacacatttccac

SEQ ID NO: 126591 - DNA, 92 bp, Zea Mays
cttgcatgttcaagattgccatgttctctctgaatgtcctgggacacaatgcaactggtcagctcttttctttcagcgggaaaccttgtgtc

SEQ ID NO: 126592 - DNA, 2522 bp, Zea Mays
ccaacgcgcaggcgtactggcgttggcgcgtacagctcatgccactaccccaccccacacccgcacccgccccatgaaatcacgagcgccatttgcaccatgggcagaggcagacacacccccaccccacgcccccctccctcggatccagattatcaccgcacctccctcatttatattcgcttccatccacctgccgccgcagcagatccaccggcacgagaccgaccccgtttcctcgctccttcgtctctcgctgacactgtttgacccctgtcctccaggctcggctccagctaaggtcgagcggcgaggcgacagccctagtgtagcgcggcgcggtaccatagatggggagacgaatggaggccccctcctcgccggcgtccctcgtcgtcgtcctcctcctcggctcgctgctcctgcaggcacgcgccgatgacccctacaggttctacacctggaacgtcacctttggcgacatctacccgctcggcgtcaagcaggaggggatactgatcaacggccagttcccggggccgcagatcgacgccgtcaccaacgacaacatcatcgtcaacgtcttcaacaacctgccggtccccttcctcctctcctggcagggaattcagcagcggaggagctcatggcaggacggcgtgtacggcaccaactgcccgatccctccgggcggcaatttcacttacaacatgcagttcaaggaccagatcgggagctactactacttcccttcccttctgtttcacaaggcagctggcggttacggtgccatcagggttctcagccggccgaggatccctgtcccgtttgacccgcctgccggggatttcaccatattggcgggtgactggttcaagctcaaccacaccgacctgaaaggcattctggacagtggcaatgacctgccgtttcctgacggccttcttatcaatggccaaggttggaatggcaacagattcacggtggaccaagggaaaacgtatcggttccgggtgtcgaacgtgggaatcgcgacctcggtgaacataaggatccaaggccattccatgctgctggtcgaggtggaggggtctcacaccatgcagagcacttacacgtccatcgacgtccatctaggccaatcatactcgttccttgttactgctgatcagccacctgcagactactccatagttgtctccacacgctttaccacccctgtcctcaccaccgctgccatcctccactacagcagctcaaatggtgctgcaagtgtgccgcctcccccggcgcctaccgttgagatcgatttctctctcaaccaggctagatccatccggtggaacctgacagcgagtggaccaaggccaaaccctcagggttcctaccactacggtctcgtcaacaccacaagaaccatcaggctcgccaactcgcgggcaaccatcaacggcaagctgagatacgcagtgaacggcatctccttcgtcccggccgacactcctctcaaggttgctgatttctacagcatcccgggagttttcacgctgggcagcatgcccgacaacccgacgggcggcggcgcttacctccagacgtctgtgatggcggccaacatgcgggactatgttgaggtcgtctttgaaaacgcggagaacttggtgcagtcgtggcacatcgacggctacgcgttctgggtcgtcgggatggatggaggacagtggacaccggctagtcgtcagggctacaacctcagggacgccattgctcggtacacattgcaggtgtaccctcagtcatggacggctatctacatgccgctggacaacgtggggatgtggaacgtgaggtccgagagctgggccaggcagtacctcggccagcagttctacctccgcgtctactcgccggcgaactcgtggcgggacgagaacccgatccccaagaacgcgctgctctgcggccgggcctctggacgccggaccaggcctctctgaagctgaatccctgagcccaagaagaccatgtttgttcggccacgaaggggtggccggaacttgcggggatcaattgaagttgagggaagagatgattggagtgttcagattgctgaactgagttccattttgtggcgctgatgatcgttcagctcatatattatttagcaattgtagctaaaacattaattcccggtcgatttgttgtatgtgaagcttcctcgcttcctcgctcacatcattgatgatgataatattcatagtaaccagattttcctttttcatacactgtcagatttctcatcgatctgaatgagttcaagaaacactgaaacgagcaatacgtgtacagcgcaagtagagatgtaatatggtttggaaaatatccgtccgaattttggattcgaagatgatgaatacttgttcggatggaattttcggatatccggttttttttttctaataacagatacatatattttgtttgaatatcggattcgaatacaatatatctgatatctggat

SEQ ID NO: 126593 - DNA, 1732 bp, Zea Mays
gttccaacccacaaaccgagcggcggccgccgcctcccttttcgtctctgactttttctacaagctcattcttcctcccccgatctcgggagcagccgaagcatgtcctggcggtggactctcgcgcgccgcgtcgccacgctggccgcgatcggtggcggcggtgcccaggcgcagaggctcctgtccacctcgtcagccggcggtggcactggcctcctgggtcggcactacatacccctcgcctcccagattcggagcaaggtagttggttgcagaggagctgctcttgtgagctccagatggttgcatgaggcccaataccaggttcgccaggacggggcttccagggctcagcaagatccatttgaattagtcgccgatgagctatcacttcttgcaaataggttacgatccatggtggctgctgaggtccccaaactggcatcagcagctgagtactttttcaaggtgggagcagagggaaaaagattccgacctacggttttgttgctcatggcatcagctctgaaatttcctttgtcagagtcaacagaaggaagagttctcagtatattggcagataaactccgcacaaggcaacagaacattgctgagataactgaaatgattcatgtcgcaagccttctgcatgatgatgttcttgatgatgctgatactaggcgtggtgtcagttcattgaatctcatcatggggaacaagctttctgtgctggctggtgatttccttctgtctagagcatgtgtggcccttgcagcacttgggaacacagaggtggtttctctaatggcaactgctgtagaacatctagttactggtgaaactatgcagatctcaacaagcagagagcaacggcgaagcatggagtactacctgcagaagacatactacaaaacggcatcattgatatcaaatagttgcaaggctgttgctattcttgcagggcacacaactgaggtctcggtgcttgcatatgaatatggtcgaaacctgggtctagccttccagttaattgatgatgttcttgatttcaccggcacctctgcatcccttgggaagggttcattgtctgatattcgccacggaattattactgccccgatgctatatgcgatggaggaattcccacaactgcaagaagttgttgaccggggttttgataatcctgcaaatgttgaaattgcccttgactatctccagaagagccgtgggattgaaaagacaaaagagcttgcacgagaacatgctgatcgtgcagtcaaggctatagaatctctacctgatagcgacgacgaggatgttctgacttcaaggcgtgctcttattgatatcacagaaagagtcatcacacggacaaaataggaaggtgttcggcgtccataaggtgaatggagagctgaacctcgcctttggcctagtgtttcacttggattttcttttttgtatacttcggttcattgcattcttttcgcagccaaaaccccaagttttgtgtatcattgctgaaatttaggattaagaaatggccctgcatttctgggaagcttctagaggttttggctgcatgtggcaacaaaatatatgtcaccgattgcaatggcaccagatatcgtgtagccatataagtgtgggagcattgtacccaatatacactcccgtaaagactaagatagtactaccataaaatatctgttaaccgttcctcttcaaa

SEQ ID NO: 126594 - DNA, 177 bp, Zea Mays
ttttcgcaggggacgtccactgaccaggacacaagcttgtcaaataagcaagccaagctgctcaagacgcagaagttcgcgtccgagcttgaccatctggtggatacgtcaaaggtaaagttggacgtgatgaagccctggattgccaagcgggtcactgagctatttgggtttgac

SEQ ID NO: 126595 - DNA, 95 bp, Zea Mays
atcattactgccccaatgctatatgcgatggaggaattcccgcaactactagaagttgttgaccgagggtttggtaatcctgcaaacgttgaaat

SEQ ID NO: 126596 - DNA, 144 bp, Zea Mays
ggcccttgactatctccggaagagccatggggttgaaaggacaaaggagctcgcacgagaacactctgatcgtgcagtcaaggctatagaatccctcccctatccgacgacaaggatgttctgacctcaaggcgtgctcttgtg

SEQ ID NO: 126597 - DNA, 135 bp, Zea Mays
aatagtaattaattttggatcatttcatgagatgtgctctcccgataggaggaaaaggaggaaagacccattcattttttattcatcaattagaacaaagtagaagcaactaaacaccatacatgtttatatatc

SEQ ID NO: 126598 - DNA, 456 bp, Zea Mays
ggccatttccctaggcctcggcctaggaactgactcgcgccacaacgacgtggaacatttccacgcgaaggcgagggggagcccgggagggaggtgtgtgcgattcgtgcggcggcggcacactagggcgacacctgcgactcctctccgccccctacgtaggaggtaagagctaggatagtaaatgcacttggaggtggacaagagaaaaaaacaaagcttgactgcttgtgttgatcatttctgttgttgagccaactttgaggtcaacacaatgacaattctatgttgttgagcaaactattcagaagacaatatactaaaagatgaaagctttgaaaaatttctcttagaaataggtcatatatgcaacatgggatatgcacaatgttgtggttcactttttaagatatgctctattgtatattcaaccaagcctgaagaataattatagac

SEQ ID NO: 126599 - DNA, 2932 bp, Zea Mays
ggttcggccaataaacagccaacaaactatttctgcaaaacattaacagcaagtgataccagtacccatggtgggttctccgttccccgtcgagcagctgagaaagtgtttcctccactggatttcacccagcaacccccatgccaggagttgatggcaaaagatcttcatggcaatgagtggaaattccgtcacatctttcgtggccagccaaagcggcatcttctaactacaggttggagtgtctttgtaagtgcaaagagactcgttgctggcgactctgtcctttttatctggaatgacaataaccagcttctgctgggaattcgtcgtgcaaatcggccacaaactgtcatgccatcttcagtcttatcaagcgatagcatgcatatcggtcttcttgctgcagctgctcatgctgcttcgacaaatagccgatttacaattttttacaacccaagggcaagcccttcagagtttgtcataccactcgtaaagtatgttaaggctgtgtatcatacccgcatatctgtggggatgcgattcaggatgctttttgagacagaagagtctagcgttaggagatacatggggacaattaccggaatctgtgatcttgattctgttcggtggccaaattcacactggcgttctgttaaggttggctgggatgagtcaactgctggtgagcgacaaccaagggtgtcactatgggagattgaacccctgacaactttcccaatgtatccatctccttttccgctcaggctcaagcgtccatggccaacaggcttgccttctctgcatggtatgaggtgggaaggatgatgacctggctaactctctcatgtggcttcgagataccgcaaatcctggttttcagtcgttaaattttggtggacttggtatgagcccttggatgcagccaaggctggatgctaccttacttggtctgcaacctgacatgtatcaggcgatggccacagctgcttttcaggatgcaacaaagcaggcatcgcccacaatgctgcagttccagcagccccagaacatagctggccgggcttccccgcttctttcaagtcagattttgcagcaagcacatcatcaatttcagcagcaaccgtaccttcaaaacatctctgagagcacaatccaagcacagggtcagtctgagttcctcaagcagcagatccaacgcagccagtcattcaatgagcagaagccccagatgcaacaccagcaagaatcacagcagcagcagcaaccacagtgtctgccagtcccccaacatcagcaaatgcaacaacagaatatgaccaactaccagtctatatctaatgcattatcaccgttttctcagctgtcgccagtttctcagtcttcacctatggcgctgcagactatattaccgttctcgcaggcacagagcttcacagacacgaatgtaggttcattgtctccatccaatggtaacaccatgcaaaacacactgaggccgttctcatcagaagcagtttctcacctcagtatgccgaggcccactgcgatacctgtcgcagacccatggtcgtcgaagcgtgtcgcggtggagtctctgcttccttctcggcctcaggtttcatcccagatggaacaattggaccctgcaccagctagtatacctcatagctctgcgttggcaccacttcccggaagagggtgcttggttgaccaagatgtgaactctgatcctcaaaatcatctcttgttcggtgttagtatagactcgcagtcactgctaatgcaagggggcattcctggtctccaaaacgggaatgattcagctgctataccttattccacttccaatttcctcagcccttctcagaatgactttcctctggaccatacactaaattcttcaggctgcttagatgattctgggtacgtcccgccatgttcagataattctgacaaagtgaaccgaccaccagcgaccttcgtgaaggtttacaaatctggaacctacgggaggtcgcttgatatcactaggtttagcagctatcacgagctccgtagggaactggggcgcctatttggccttgagggccagttggaagacccattgagatcaggctggcagcttgtattcgtcgaccgtgaggaggacgtccttctcgtgggcgacgacccttggcaggaattcgtgagcacggtgtcctgcataaagatcctctccccgcaggaggtgcagcagatggggaagcagggcctggagctcctgagctcggcccccgcgcggaggctcggtagcagctgtgacgactacgtcagcaggcaggagtcgagaagcctgagcaccgggatcgcgtccgtcggttcggtcgagttgggatgagcagcaagatagcgcgcacgcagcagcagcagcagcaggttacgcatcctcagcctcagggtaggtaggggactgaagggttggtctgcgacttgatgacccacgagctcctcgttgcgcgcttcgttcgcctccatgcgatggatagaagttcagcgcagaccaagccttagctctgcgagctatgtaccatctaataattctgtccgtgtcgtaccatgtcaactcctaagtagaagaattgaagaaactaccagcagccgctgtctggtatacacgctgaaacattttttttcttgtatggagaaatactaatcatctggatgtagccaggcctatgctctctaatggttgatcgggtaatacagcccctcgcacacagcaaactcacaagagaaacttccagttgctacattaagtttgggcagtaataaaaggtccgtcaaaaattaacttttttttttctcggcagcaacaagaagtccatacaaaattaacttattttttagtggctaaacggaggaggctgaaaatattttttttgttttggcg

SEQ ID NO: 126600 - DNA, 2925 bp, Zea Mays
ggttcggccaataaacagccaacaaactatttctgcaaaacattaacagcaagtgataccagtacccatggtgggttctccgttccccgtcgagcagctgagaaagtgtttcctccactggatttcacccagcaacccccatgccaggagttgatggcaaaagatcttcatggcaatgagtggaaattccgtcacatctttcgtggccagccaaagcggcatcttctaactacaggttggagtgtctttgtaagtgcaaagagactcgttgctggcgactctgtcctttttatctggaatgacaataaccagcttctgctgggaattcgtcgtgcaaatcggccacaaactgtcatgccatcttcagtcttatcaagcgatagcatgcatatcggtcttcttgctgcagctgctcatgctgcttcgacaaatagccgatttacaattttttacaacccaagggcaagcccttcagagtttgtcataccactcgtaaagtatgttaaggctgtgtatcatacccgcatatctgtggggatgcgattcaggatgctttttgagacagaagagtctagcgttaggagatacatggggacaattaccggaatctgtgatcttgattctgttcggtggccaaattcacactggcgttctgttaaggttggctgggatgagtcaactgctggtgagcgacaaccaagggtgtcactatgggagattgaacccctgacaactttcccaatgtatccatctccttttccgctcaggctcaagcgtccatggccaacaggcttgccttctctgcatggtgggaaggatgatgacctggctaactctctcatgtggcttcgagataccgcaaatcctggttttcagtcgttaaattttggtggacttggtatgagcccttggatgcagccaaggctggatgctaccttacttggtctgcaacctgacatgtatcaggcgatggccacagctgcttttcaggatgcaacaaagcaggcatcgcccacaatgctgcagttccagcagccccagaacatagctggccgggcttccccgcttctttcaagtcagattttgcagcaagcacatcatcaatttcagcagcaaccgtaccttcaaaacatctctgagagcacaatccaagcacagggtcagtctgagttcctcaagcagcagatccaacgcagccagtcattcaatgagcagaagccccagatgcaacaccagcaagaatcacagcagcagcagcaaccacagtgtctgccagtcccccaacatcagcaaatgcaacaacagaatatgaccaactaccagtctatatctaatgcattatcaccgttttctcagctgtcgccagtttctcagtcttcacctatggcgctgcagactatattaccgttctcgcaggcacagagcttcacagacacgaatgtaggttcattgtctccatccaatggtaacaccatgcaaaacacactgaggccgttctcatcagaagcagtttctcacctcagtatgccgaggcccactgcgatacctgtcgcagacccatggtcgtcgaagcgtgtcgcggtggagtctctgcttccttctcggcctcaggtttcatcccagatggaacaattggaccctgcaccagctagtatacctcatagctctgcgttggcaccacttcccggaagagggtgcttggttgaccaagatgtgaactctgatcctcaaaatcatctcttgttcggtgttagtatagactcgcagtcactgctaatgcaagggggcattcctggtctccaaaacgggaatgattcagctgctataccttattccacttccaatttcctcagcccttctcagaatgactttcctctggaccatacactaaattcttcaggctgcttagatgattctgggtacgtcccgccatgttcagataattctgacaaagtgaaccgaccaccagcgaccttcgtgaaggtttacaaatctggaacctacgggaggtcgcttgatatcactaggtttagcagctatcacgagctccgtagggaactggggcgcctatttggccttgagggccagttggaagacccattgagatcaggctggcagcttgtattcgtcgaccgtgaggaggacgtccttctcgtgggcgacgacccttggcaggaattcgtgagcacggtgtcctgcataaagatcctctccccgcaggaggtgcagcagatggggaagcagggcctggagctcctgagctcggcccccgcgcggaggctcggtagcagctgtgacgactacgtcagcaggcaggagtcgagaagcctgagcaccgggatcgcgtccgtcggttcggtcgagttgggatgagcagcaagatagcgcgcacgcagcagcagcagcagcaggttacgcatcctcagcctcagggtaggtaggggactgaagggttggtctgcgacttgatgacccacgagctcctcgttgcgcgcttcgttcgcctccatgcgatggatagaagttcagcgcagaccaagccttagctctgcgagctatgtaccatctaataattctgtccgtgtcgtaccatgtcaactcctaagtagaagaattgaagaaactaccagcagccgctgtctggtatacacgctgaaacattttttttcttgtatggagaaatactaatcatctggatgtagccaggcctatgctctctaatggttgatcgggtaatacagcccctcgcacacagcaaactcacaagagaaacttccagttgctacattaagtttgggcagtaataaaaggtccgtcaaaaattaacttttttttttctcggcagcaacaagaagtccatacaaaattaacttattttttagtggctaaacggaggaggctgaaaatattttttttgttttggcg

SEQ ID NO: 126601 - DNA, 387 bp, Zea Mays
atggcatcccaccggccctgcctgggccgacgcctgcccatgctgttgcgggcgcgccgatccagaccggcttctatgtcttcagtgtctgcttcgttgttggcggcatctagatcatcttgcgccaggctgcccagacccgaactcgcttgtggctggaccggttgcttccctgttgtgatttacaggcgagcaaggcacgtgtcatgggagtccatgcgccggttgagcgtctccagctgtgccgacagtttggtccccaagtcggtcatggatgtgaactgggtgaccagaaaatccaacttctccacagacgtcatggtcgcaggatcacccccggagccggccatggaaggcgatgctccagttgaatctgataccaaatga

SEQ ID NO: 126602 - DNA, 1198 bp, Zea Mays
agagtggtaattaattatgacttcccaagtgggatagaggactatgtgcatcgcatagggcgtacaggaagagctagcgctactggagtctcgtacacctttttatctgaacaagagtggaaacatgttggtgatttggtgaaactcttgcaaggtgccaaccagcatgtccctccacagctgcgtgacatggctgcacgcagtgcttctggaggtcaagaaacccggttgctaggatgagtcgctgggatgggcctggtggtagtcgttttgaacctggtgctagtggctctgttggttatggtggtgttagggagggtcctggaggttttgatggtcgtgagggcccaggtggatttggtgtccgagaaagccccgcaacccagacagaggccggtcacggggttatgatagaagaagtgatggcaggagcattagtaggagcaggagtcgcagcaggagctggtcacacagtagaacccgcagcaggagctggagccgtagtcggagccgaagcagtagccggagtcacagcagaagcaagagccgtgaccatggtgcagcaccagagcgcaggcctcaagcaagatctggttttgatgtgttgcctcctgcaactggacctgcacctgcgcccgtacctagactagcagcaccacctgttcctgctctcgcagctcaacaatcactggccgatacatcttcagtgtcaccaatgtctcatggtggcatagtccagccagctgctgcaccgttgatatgaggtaggaataacaacagctttggtggcataccgactggccaacctttgcagaagactgatgctgcattccccagttttcctgcaggcaaaaaatttccaggcgcagcagttcaacaggccgcttctgatgtataatgagttgaacaatatgtagtgcactgcccccttttcttcccatttaatccggtgtacaatacgagaaatgagatttcgggtagtacactaccggaatttggctctttgccgagtgccaagttctttgccgagtattttttgtcgggcactcggcaaagaagttgtttgtcgagtgccacgcaaaaaaccctcggtaaaagaaaacactcggcgaagaagctgtttgccgagtgttttatttttggcactcggcaaagacaatttaaaaatcacattttaaagcagtaaattaattcaaat

SEQ ID NO: 126603 - DNA, 488 bp, Zea Mays
atggaaggaccaccagggctatcccaagcgatcccggtttctggagatgcgtactgcaacagctccactacgcacgtggatgctgccggcagcagctcaccggccgtcgcgaagctccggaagctgctgttccgccggatgctcatcggcgtcaacgacggccgctacttccatggcctgttccactgcatcgacaagcagggcaacatcatcctccaggacgccgtcgagtaccgcagcgcccggcattgcttgcctccgacggagcataggtgcctggggctcatcctgatcccggccgcctgccggtcgtcttgccaggttgattgctccgttgaagagaagatgtcgctcatgtgtttggagtgaatggtgcttctaaatatgtgttactatgctttccaagctactcaggaatcatgatagataaacccttttgtataacattcctagatcttgctgggatttaatttgcatcgattctgcta

SEQ ID NO: 126604 - DNA, 2093 bp, Zea Mays
atggacccgggcaacaaactggcctttgcaaaagcgcccttcagctcccggaccgcttcccctgagctgctgcccaagaacttcgacaccacttgcccaccctccctggattcttgcggctcttcctcgagctcatcgaatccttcatggagagcgccgagggaccgtccccgtactccggtgatcgagcggcaccggttcaggatggcaatggccaaactacacctgggcataattcgcgaaggccaaacctttctttgcaaataccagctaggaccttggataccaatataccttcatcgacaagagttactatatcctgcagccccagttcaacgagagtgggtttgccaccgagacctaattcgacgagaacaaaatcatctatcaagaacatgaatcctcagcacagtttcagagcaaggagttcagcccaggaaggtgatcgagtggtccttctaaatcctgggacgtcatctgaagggcagcaggataatccaagcacagcaagatcattttcttttagaaaggtcattaactcattatcggcaaaaaggacccattctcttccagtaacgcctgtaggaactactgacaaggctgcatctcctccaaatcaattagataccctgccaactacaactaatgaaggagttgaagcaaaaattaggcgctcactttcagtacctggaaatcgcaaaaacagaagtttgaggagggcagattcattaggtgtcatccgtgtgattccaacaaccccaagacctgtcccagtcgaagcaaccacatcaagcgatataattgaagaaacaatcgatgtccctgaagatggaggcgaagatattcctgaagaagaggcagtctgcagaatttgttttgttgaactcaacgaaggaggtgaaacacttaaaatggagtgcagctgcaaaggagaacttgcacttgcacaccaagactgtgctgtcaaatggtttagcatcaagggaaacaagatatgtgatgtctgtaaacaagaagttcagaatctgccagtgatgttactgagaataccaactcaaactgcaaacaggcgggtagcaaatgctgctcagcagagagcagctcaacaatacagattttggcaggacattccaattctggtgatggttagcatgcttgcgtacttctgtttcttggaacaactcctggttactgatttgcagtcacgtgcactggcaatttcgttgcctttctcgtgtgtgttaggcctcctttcttcaatgatagcatcaactatggtgtcgaagagctatctatgggcgtatgcttcattccagtttgctatcgttatcctgtttgctcatatcttctacaatgtgttgaaagtgaatccagtccttgcagtcttactctcctcattcactgggtttggtattgctattagtacgaactctctactagtagagtatttgaggtggagagctaggaggaatcagcgtttggctcagcaggctgccaatgctgcacagcaccaagaatctggaaatgatggtggaaatgacaacgatgacgctcagcaagggcacgatccaaattctgggaacaatgctgtgtgatgattcaggttcttggtgcaaaaatccagcaccaaaaaaaagattatgaaatggtatgggtgtgaacagctgttttttttatctgtacagcaagtatagctcattcaacgcggcaccagtcacaagctgaaacctggaaaaacatatcttcatatgccacgtggagggcgctcacggatatcattatacatcacgcagagatgaagcaaaacacgatatgtttgtgtattagtccggtagtttgacttcaaatgtatctgttattcattttaagcttaatagatctaatgcattatagaagtacttcggtaagtgtgtgcagcttatagttgtgagttgcgagtatagccccatatagatatacatcaatgaaatgtacctttccagtatattgaggtttgctagccggcacggaacggaagaaatcctcagattgaattgtgatacaattgtctcaactgagaactacagaattgtatgcaatgcgagcgattgaaa

SEQ ID NO: 126605 - DNA, 157 bp, Zea Mays
tattatttttatttatcttcctcctcaccatttaattctaaaagaattaaatgattatcataattacctttctcaaactctttcctatttatttatatatatatatatattttatatataagttgaggtcaaatttaaattatatttttaataaaag

SEQ ID NO: 126606 - DNA, 121 bp, Zea Mays
ttaatgtgctccgcaatagctattattcatagtgttagcattaggatcaagtatcttcttgatgagcttctttgcacttgtggagaaccaggatgggcaactgaaatccgctttgaagatc

SEQ ID NO: 126607 - DNA, 978 bp, Zea Mays
gcacaagcaaaggcgggggagagagctccgtgcagtcaccgtcgtgttcggaacgagcgagagagcgggagacgagtcgcggcgcctctgctgtgctgtcttcttctccccctctgctctgcttcggctcctcacgcggcctcgccgagacccgcaggtacgccttcggccttcccattgggactcctccgtgactccgtctccctggggtcacgggtccgcgccgcctcagatccgggcaacccgttgcgacaccgccttggtgcggctgcggtggtgggcagttccgtggtactgcggcaggcacgccaaagacagtttctcttttctttcttccctgctgcccatggcggcggccgggcggagaaagattgaactcttgactcttctcactgccatagcagatgtatgcacgcacgcaaacgttcctttcggttgcgtcagtagcctgtaagcttggctgctcggctctgtgatcttcgttcctcctctttcgggcaaccaggttcaatctaatttcgatttggtagctaactttttcagcaagtggttgttaggtgttgttgcatttgtggtgtccgagattgattggtaaccacacgccacttgcgagcgaccctttttgactgttttagtttctcccttcgcatgcgcctgtgtccgtaggattctgttgcgtcgattagcttaggtatggggaaaaggtcgagccttgcatttcaatactacgtgctgtcatttctatattcctgatgctccgctgctgatcacacgctcaactgcctttagctctagaccgctcaatctgctctggggaatatttcatcatgtgtaaagtaggtgcccggcgtcgtcccatttgctggatcaagttaggttcaaaaaaattgaaattactacttttccggtttccaaacacatacagtgatctccactttgtcttcgatgcactgtgctctggtcgctcgtttatcttat

SEQ ID NO: 126608 - DNA, 2284 bp, Zea Mays
gcacaagcaaaggcgggggagagagctccgtgcagtcaccgtcgtgttcggaacgagcgagagagcgggagacgagtcgcggcgcctctgctgtgctgtcttcttctccccctctgctctgcttcggctcctcacgcggcctcgccgagacccgcagaacagggggttcagacttcttggtgagagcgatatgagtgtcccaggtcaatgctcatcccagccacaatttatcaccagcgttgggaggagtaaccgctccaatggccccggcactcctcttatcgaaagcatagatgttgatcaaattgttattccagagaaaaacagttggaagaacttattctcatacatagggcctggatttctcgtctcaattgcatatattgatcctggaaactttgagacggatctacaggctggagcacagtacaaatatgagcttctttggatcatacttgttgcatcctgtgctgctcttattattcaatcacttgcagccaggctaggggttgtgacagggaaacatcttgcagagcattgcagggctgagtatcccaaggtcacaaattttgtcttatggattcttgcagaacttgctgttgttgcatgtgacattcctgaagtaattggaactgcttttgctctaaacatgctgttcagaatcccagtatggtgtggtgttctaataactggactcagcactctaatgctcttattgctgcagcaatatggggtccgtaagctagaatttctgattgcatttctggtgttcttaatagcaacatgtttcttagttgaacttgggtattctaaaccaaatgctccagaagttgttaggggcctttttgttcctgaacttaaaggaaatggagctacaggccttgctatctcattacttggtgctatggtgatgccgcacaatctttttctgcactcagcattagtattgtcaagaaaagtgccacggtctgttcatgggattaaggaggcctgcagattctatacgattgaaagtgcatttgcccttacagttgcttttctcatcaacatatctatcatatctgtcagtggttctgtctgtggttcaggtaatttaaacccagaagatcaagcaaattgcagtgatctggacctaaataaggcttcatttttgttaaagaatgtccttggaaactggagctcaaagttgtttgcagttgctttgttggcatctggtcagagttctacaattacggggacatatgctggacaatatgtcatgcaggggtttttagatcttcggatgaaaccctggatacgcaatcttgtcacgaggtccttggctatcctgccaagtttgatcgtgtcaattattggtggttcttcagcagctggccagttgattatcattgcatcgatgatactgtcatttgaactcccttttgctttagttccactccttaaattcaccagcagcaaaacaaagatggggcagcatacaaattcaatattcactgctgtgctgacatggatgatcggctcgtttattgttgtcatcaacacctactttctgataacaagctttgtgaaattgctcgtccagagcgggctgaccaccatttctcaagtattttccggtattttcgggtttttgggcatgctgatttacatagttgcgatcctatacctcgtctttaggaggaacaggaagtccacccagccattgctggagagcgatgctgagcttgcagtatcgggtagcagtgctgatgccggagcagaatgctcgctgggccatttgccccgtgaggacatctccagcatgcaacttccgcagcagcgttcagcttctgatctagattagataacagctgccaggaaaataaatgttttttttgttttttatatagtatagtaattacagaatagggtacgtcaggtattggcttctgttcatcctactgatgatgcttaaggaatgtatacaagaggacggatatctatgctgccaaacaaaaaaatggggcacaaaagaatttagtgcctgtttttgggaagtgatgtgaactgaatcctggaaggggcaaaaaaaaaaaatgttggaatccaattgttgaaaattcttcattctaaacatgaggccgttggtaaaaaatgtctacatgctgtaaacatactatattttgacattattatcacagttaatatatactggacatgctgttttatgtgttgtgcattccagtggctgcaggccttgctcagagctagtttggtgattagagaaatggagaagttctatgta

SEQ ID NO: 126609 - DNA, 2247 bp, Zea Mays
gcacaagcaaaggcgggggagagagctccgtgcagtcaccgtcgtgttcggaacgagcgagagagcgggagacgagtcgcggcgcctctgctgtgctgtcttcttctccccctctgctctgcttcggctcctcacgcggcctcgccgagacccgcagaacagggggttcagacttcttggtgagagcgatatgagtgtcccaggtcaatgctcatcccagccacaatttatcaccagcgttgggaggagtaaccgctccaatggccccggcactcctcttatcgaaagcatagatgttgatcaaattgttattccagagaaaaacagttggaagaacttattctcatacatagggcctggatttctcgtctcaattgcatatattgatcctggaaactttgagacggatctacaggctggagcacagtacaaatatgagcttctttggatcatacttgttgcatcctgtgctgctcttattattcaatcacttgcagccaggctaggggttgtgacagggaaacatcttgcagagcattgcagggctgagtatcccaaggtcacaaattttgtcttatggattcttgcagaacttgctgttgttgcatgtgacattcctgaagaatcccagtatggtgtggtgttctaataactggactcagcactctaatgctcttattgctgcagcaatatggggtccgtaagctagaatttctgattgcatttctggtgttcttaatagcaacatgtttcttagttgaacttgggtattctaaaccaaatgctccagaagttgttaggggcctttttgttcctgaacttaaaggaaatggagctacaggccttgctatctcattacttggtgctatggtgatgccgcacaatctttttctgcactcagcattagtattgtcaagaaaagtgccacggtctgttcatgggattaaggaggcctgcagattctatacgattgaaagtgcatttgcccttacagttgcttttctcatcaacatatctatcatatctgtcagtggttctgtctgtggttcaggtaatttaaacccagaagatcaagcaaattgcagtgatctggacctaaataaggcttcatttttgttaaagaatgtccttggaaactggagctcaaagttgtttgcagttgctttgttggcatctggtcagagttctacaattacggggacatatgctggacaatatgtcatgcaggggtttttagatcttcggatgaaaccctggatacgcaatcttgtcacgaggtccttggctatcctgccaagtttgatcgtgtcaattattggtggttcttcagcagctggccagttgattatcattgcatcgatgatactgtcatttgaactcccttttgctttagttccactccttaaattcaccagcagcaaaacaaagatggggcagcatacaaattcaatattcactgctgtgctgacatggatgatcggctcgtttattgttgtcatcaacacctactttctgataacaagctttgtgaaattgctcgtccagagcgggctgaccaccatttctcaagtattttccggtattttcgggtttttgggcatgctgatttacatagttgcgatcctatacctcgtctttaggaggaacaggaagtccacccagccattgctggagagcgatgctgagcttgcagtatcgggtagcagtgctgatgccggagcagaatgctcgctgggccatttgccccgtgaggacatctccagcatgcaacttccgcagcagcgttcagcttctgatctagattagataacagctgccaggaaaataaatgttttttttgttttttatatagtatagtaattacagaatagggtacgtcaggtattggcttctgttcatcctactgatgatgcttaaggaatgtatacaagaggacggatatctatgctgccaaacaaaaaaatggggcacaaaagaatttagtgcctgtttttgggaagtgatgtgaactgaatcctggaaggggcaaaaaaaaaaaatgttggaatccaattgttgaaaattcttcattctaaacatgaggccgttggtaaaaaatgtctacatgctgtaaacatactatattttgacattattatcacagttaatatatactggacatgctgttttatgtgttgtgcattccagtggctgcaggccttgctcagagctagtttggtgattagagaaatggagaagttctatgta

SEQ ID NO: 126610 - DNA, 2274 bp, Zea Mays
gcacaagcaaaggcgggggagagagctccgtgcagtcaccgtcgtgttcggaacgagcgagagagcgggagacgagtcgcggcgcctctgctgtgctgtcttcttctccccctctgctctgcttcggctcctcacgcggcctcgccgagacccgcagaacagggggttcagacttcttggtgagagcgatatgagtgtcccaggtcaatgctcatcccagccacaatttatcaccagcgttgggaggagtaaccgctccaatggccccggcactcctcttatcgaaagcatagatgttgatcaaattgttattccagagaaaaacagttggaagaacttattctcatacatagggcctggatttctcgtctcaattgcatatattgatcctggaaactttgagacggatctacaggctggagcacagtacaaatatgagcttctttggatcatacttgttgcatcctgtgctgctcttattattcaatcacttgcagccaggctaggggttgtgacagggaaacatcttgcagagcattgcagggctgagtatcccaaggtcacaaattttgtcttatggattcttgcagaacttgctgttgttgcatgtgacattcctgaagtaattggaactgcttttgctctaaacatgctgttcagaatcccagtatggtgtggtgttctaataactggactcagcactctaatgctcttattgctgcagcaatatggggtccgtaagctagaatttctgattgcatttctggtgttcttaatagcaacatgtttcttagttgaacttgggtattctaaaccaaatgctccagaagttgttaggggcctttttgttcctgaacttaaaggaaatggagctacaggccttgctatctcattacttggtgctatggtgatgccgcacaatctttttctgcactcagcattagtattgtcaagaaaagtgccacggtctgttcatgggattaaggaggcctgcagattctatacgattgaaagtgcatttgcccttacagttgcttttctcatcaacatatctatcatatctgtcagtggttctgtctgtggttcaggtaatttaaacccagaagatcaagcaaattgcagtgatctggacctaaataaggcttcatttttgttaaagaatgtccttggaaactggagctcaaagttgtttgcagttgctttgttggcatctggtcagagttctacaattacggggacatatgctggacaatatgtcatgcagatcttcggatgaaaccctggatacgcaatcttgtcacgaggtccttggctatcctgccaagtttgatcgtgtcaattattggtggttcttcagcagctggccagttgattatcattgcatcgatgatactgtcatttgaactcccttttgctttagttccactccttaaattcaccagcagcaaaacaaagatggggcagcatacaaattcaatattcactgctgtgctgacatggatgatcggctcgtttattgttgtcatcaacacctactttctgataacaagctttgtgaaattgctcgtccagagcgggctgaccaccatttctcaagtattttccggtattttcgggtttttgggcatgctgatttacatagttgcgatcctatacctcgtctttaggaggaacaggaagtccacccagccattgctggagagcgatgctgagcttgcagtatcgggtagcagtgctgatgccggagcagaatgctcgctgggccatttgccccgtgaggacatctccagcatgcaacttccgcagcagcgttcagcttctgatctagattagataacagctgccaggaaaataaatgttttttttgttttttatatagtatagtaattacagaatagggtacgtcaggtattggcttctgttcatcctactgatgatgcttaaggaatgtatacaagaggacggatatctatgctgccaaacaaaaaaatggggcacaaaagaatttagtgcctgtttttgggaagtgatgtgaactgaatcctggaaggggcaaaaaaaaaaaatgttggaatccaattgttgaaaattcttcattctaaacatgaggccgttggtaaaaaatgtctacatgctgtaaacatactatattttgacattattatcacagttaatatatactggacatgctgttttatgtgttgtgcattccagtggctgcaggccttgctcagagctagtttggtgattagagaaatggagaagttctatgta

SEQ ID NO: 126611 - DNA, 2237 bp, Zea Mays
agcaaaggcgggggagagagctccgtgcagtcaccgtcgtgttcggaacgagcgagagagcgggagacgagtcgcggcgcctctgctgtgctgtcttcttctccccctctgctctgcttcggctcctcacgcggcctcgccgagacccgcagggggttcagacttcttggtgagagcgatatgagtgtcccaggtcaatgctcatcccagccacaatttatcaccagcgttgggaggagtaaccgctccaatggccccggcactcctcttatcgaaagcatagatgttgatcaaattgttattccagagaaaaacagttggaagaacttattctcatacatagggcctggatttctcgtctcaattgcatatattgatcctggaaactttgagacggatctacaggctggagcacagtacaaatatgagcttctttggatcatacttgttgcatcctgtgctgctcttattattcaatcacttgcagccaggctaggggttgtgacagggaaacatcttgcagagcattgcagggctgagtatcccaaggtcacaaattttgtcttatggattcttgcagaacttgctgttgttgcatgtgacattcctgaagaatcccagtatggtgtggtgttctaataactggactcagcactctaatgctcttattgctgcagcaatatggggtccgtaagctagaatttctgattgcatttctggtgttcttaatagcaacatgtttcttagttgaacttgggtattctaaaccaaatgctccagaagttgttaggggcctttttgttcctgaacttaaaggaaatggagctacaggccttgctatctcattacttggtgctatggtgatgccgcacaatctttttctgcactcagcattagtattgtcaagaaaagtgccacggtctgttcatgggattaaggaggcctgcagattctatacgattgaaagtgcatttgcccttacagttgcttttctcatcaacatatctatcatatctgtcagtggttctgtctgtggttcaggtaatttaaacccagaagatcaagcaaattgcagtgatctggacctaaataaggcttcatttttgttaaagaatgtccttggaaactggagctcaaagttgtttgcagttgctttgttggcatctggtcagagttctacaattacggggacatatgctggacaatatgtcatgcaggggtttttagatcttcggatgaaaccctggatacgcaatcttgtcacgaggtccttggctatcctgccaagtttgatcgtgtcaattattggtggttcttcagcagctggccagttgattatcattgcatcgatgatactgtcatttgaactcccttttgctttagttccactccttaaattcaccagcagcaaaacaaagatggggcagcatacaaattcaatattcactgctgtgctgacatggatgatcggctcgtttattgttgtcatcaacacctactttctgataacaagctttgtgaaattgctcgtccagagcgggctgaccaccatttctcaagtattttccggtattttcgggtttttgggcatgctgatttacatagttgcgatcctatacctcgtctttaggaggaacaggaagtccacccagccattgctggagagcgatgctgagcttgcagtatcgggtagcagtgctgatgccggagcagaatgctcgctgggccatttgccccgtgaggacatctccagcatgcaacttccgcagcagcgttcagcttctgatctagattagataacagctgccaggaaaataaatgttttttttgttttttatatagtatagtaattacagaatagggtacgtcaggtattggcttctgttcatcctactgatgatgcttaaggaatgtatacaagaggacggatatctatgctgccaaacaaaaaaatggggcacaaaagaatttagtgcctgtttttgggaagtgatgtgaactgaatcctggaaggggcaaaaaaaaaaaatgttggaatccaattgttgaaaattcttcattctaaacatgaggccgttggtaaaaaatgtctacatgctgtaaacatactatattttgacattattatcacagttaatatatactggacatgctgttttatgtgttgtgcattccagtggctgcaggccttgctcagagctagtttggtgattagagaaatggagaagttctatgta

SEQ ID NO: 126612 - DNA, 2684 bp, Zea Mays
attgggactcctccgtgactccgtctccctggggtcacgggtccgcgccgcctcagatccgggcaacccgttgcgacaccgccttggtgcggctgcggtggtgggcagttccgtggtactgcggcaggcacgccaaagacagtttctcttttctttcttccctgctgcccatggcggcggccgggcggagaaagattgaactcttgactcttctcactgccatagcagatgtatgcacgcacgcaaacgttcctttcggttgcgtcagtagcctaacagggggttcagacttcttggtgagagcgatatgagtgtcccaggtcaatgctcatcccagccacaatttatcaccagcgttgggaggagtaaccgctccaatggccccggcactcctcttatcgaaagcatagatgttgatcaaattgttattccagagaaaaacagttggaagaacttattctcatacatagggcctggatttctcgtctcaattgcatatattgatcctggaaactttgagacggatctacaggctggagcacagtacaaatatgagcttctttggatcatacttgttgcatcctgtgctgctcttattattcaatcacttgcagccaggctaggggttgtgacagggaaacatcttgcagagcattgcagggctgagtatcccaaggtcacaaattttgtcttatggattcttgcagaacttgctgttgttgcatgtgacattcctgaagtaattggaactgcttttgctctaaacatgctgttcagaatcccagtatggtgtggtgttctaataactggactcagcactctaatgctcttattgctgcagcaatatggggtccgtaagctagaatttctgattgcatttctggtgttcttaatagcaacatgtttcttagttgaacttgggtattctaaaccaaatgctccagaagttgttaggggcctttttgttcctgaacttaaaggaaatggagctacaggccttgctatctcattacttggtgctatggtgatgccgcacaatctttttctgcactcagcattagtattgtcaagaaaagtgccacggtctgttcatgggattaaggaggcctgcagattctatacgattgaaagtgcatttgcccttacagttgcttttctcatcaacatatctatcatatctgtcagtggttctgtctgtggttcaggtaatttaaacccagaagatcaagcaaattgcagtgatctggacctaaataaggcttcatttttgttaaagaatgtccttggaaactggagctcaaagttgtttgcagttgctttgttggcatctggtcagagttctacaattacggggacatatgctggacaatatgtcatgcaggtttttggaacttataccttatttcagttctagttcgcaagttgaatggcaggttgttttatgatgcatattactcgaggcatttgatgttgatcagaagtaatcaagcatttgcttgcttgcaacattagtttgtttagctgttagatatgaaaagtacagaaaataaattagtacataactcttagatttgcaatgaacaagcttgggcttatgagtttcagtgccaacctccaaggttctcttggtcagctagattgcagagaaaaaggacagatacggggggtttttagatcttcggatgaaaccctggatacgcaatcttgtcacgaggtccttggctatcctgccaagtttgatcgtgtcaattattggtggttcttcagcagctggccagttgattatcattgcatcgatgatactgtcatttgaactcccttttgctttagttccactccttaaattcaccagcagcaaaacaaagatggggcagcatacaaattcaatattcactgctgtgctgacatggatgatcggctcgtttattgttgtcatcaacacctactttctgataacaagctttgtgaaattgctcgtccagagcgggctgaccaccatttctcaagtattttccggtattttcgggtttttgggcatgctgatttacatagttgcgatcctatacctcgtctttaggaggaacaggaagtccacccagccattgctggagagcgatgctgagcttgcagtatcgggtagcagtgctgatgccggagcagaatgctcgctgggccatttgccccgtgaggacatctccagcatgcaacttccgcagcagcgttcagcttctgatctagattagataacagctgccaggaaaataaatgttttttttgttttttatatagtatagtaattacagaatagggtacgtcaggtattggcttctgttcatcctactgatgatgcttaaggaatgtatacaagaggacggatatctatgctgccaaacaaaaaaatggggcacaaaagaatttagtgcctgtttttgggaagtgatgtgaactgaatcctggaaggggcaaaaaaaaaaaatgttggaatccaattgttgaaaattcttcattctaaacatgaggccgttggtaaaaaatgtctacatgctgtaaacatactatattttgacattattatcacagttaatatatactggacatgctgttttatgtgttgtgcattccagtggctgcaggccttgctcagagctagtttggtgattagagaaatggagaagttctatgta

SEQ ID NO: 126613 - DNA, 112 bp, Zea Mays
cttttaaaatatggaccataagcacgtctctactaatataaaaggagtttgtctatgtgtgtcgctcctcttccggcccctttctactttttacagaaaaaaataagataaa

SEQ ID NO: 126614 - DNA, 273 bp, Zea Mays
atggaggaagaagatgagaggattggagcaaggggcgccgaatggaggagctgtcctggggctaggggagcgccctgcgctagaaggagaagggggcagagctctgagtgccggactagagatggggagctgtgtataaatggagagatagctctggacatgtcaagtgacagtgagcagtggcaggtgcaaaagtgtcgacattgggcggccatttttggcgttttccttttggaatcgaacccggatcactgcagaagatttgttccttga

SEQ ID NO: 126615 - DNA, 91 bp, Zea Mays
acttaatcgagcagtttcaagcaagtgtatgatttataatttcatacaaatatttggttcaaactttgagaaatctttagaatacacttga

SEQ ID NO: 126616 - DNA, 1856 bp, Zea Mays
cgctcccggctccccgcccaccgcccgccactggattagctaccgcccgtaccggcagctccagcaagagtgccactcacacacacgtcacactgcgtagtgcgcaaggctccgactttgatgcgcgtacccgccacggtccatggcctccgccgtcgccagtaacctccccgtcgccacgccagccgccgtgccggtgccttacgggaggctcagcccgcgcgtgtcaatcagccgcgacgcgcccgccgacctggtggatcccgtcgccatggcagtggccacgccggagcccgcgatctccaaggacttcattgacttcgagttcagcctcggcagctccgccaccatgctccccgccgacgagctgttcgccgacggcaagctgctaccgctgagaaaggcggcgactctgccggatccggaggccgccgcgccacccccggcgcagccagaggaggcaatgccggcgaccagcacggagccgatcaagcctctccgcgccgcggcggctgacggcacagacccctacgcgttctcgcccaaggcgcccagctgctccagccgctggcgcgagctgctcgggctcaggagagcgtcggccgcgcggagcccgagcaccaaggcctcggcgtcggcgtcgcccgcggcggccaagaccccggcatccgcggcgagggcgacgaactccgcggcggcaaggtcgctcaagctcctactccagcggaacgccgggcgcgcatcgggcgccgcggcgtcggaccacgcgtcggcgccgctcctccgcgacagctccgactcggaggggtcgctgtcgctggcgtcctcccgcttctcgctttcctcgtcgtcgtcctcctccgggcacgaccacgacgacgtgccccgcctctcgctcgactccgccgccgacccccacccgcctcgcatccgcctggtccgctcctcccactccaactcccaccaccgccaccccacctcgtcctccacccgcgccgggcgcagccccgcgcgacgccggccctcgccgccgccgccgccgcgctgcctctccgtggactccccgcgcatgaactcgtcgggcaagatcgtgttccaggggctggaacgcagctccagctcaccctgcagcttccacgcggcgtccaagtcgcggtcccggacggtggaccgttcctactcgtccggcgtccgcgtggcgcccgtggtgctgaacgtgcccgtgtgctcgggccccgtgttcggcttcttcaaggacaagaaggactccggcgcggccaaggacgccgcctcggcggcgttggccgcgaggtgcaggtcgtcgctggggcggaaggcggcgcaagggtggagtggcgagctggcgagatcctccggctgatttgacgaccccgtttgacttgaccgggcagcccgcgacctcgtgtttgtctcgtttgcatgcagaacggctgttgccatcgaccgtcatgaatcatgatgagaggatagctttggctgctcgttggtttaactgattttgtttctttctttggagacgacggcggcgatggggtggttgtctaatcgattgactgtttttttctttttttttctgcttcattttcactcgactgtaaattcgagttttgtactactaccgctcttctgatttggttgaatgcgaattgaaaatggtggtaaatcttctgaaacagtgcgacctgcttgcatgttacagatctaagctagtgttatgtactactatggtctgaacttggcgtaacgggaatttgttcagatcggctactgttccatttcctggatcgaagtttgaacaggatgcaactgcaaagcgatgcaaacaaaacaaaacg

SEQ ID NO: 126617 - DNA, 316 bp, Zea Mays
ggggacaagaaacgttggctcagtggagaagatagaagaggaaggggaggatttgtggcgtcacgtggagttgaagagagagagggaggggaataaagaaggaacaacgtgcgggtgggaagtcggccagagggaggacgagggctcatgcatgttttttttgtttttttttctttttttattaagtaaatggatatctatctatatatatatatatatatcatgataaattcaaaaacaatagtaacataaataaaatatgttttcataaaataaattattttgaggtaaattctattatttaaataggttggac

SEQ ID NO: 126618 - DNA, 4516 bp, Zea Mays
aagcataaacctagctcctagtgcagactatcaggtcccaggctcctagccgccagcctaccgcttcctgcttcgtgctcgtgcaaactgcagactcccagccgccgggtcgtcggctagttggacacccaggcgtcgtctcgcgcagtcgcgctgtcgtgctagactagtagactaccacctcgctgcctcgtgcagactcccggctgccgcccagccgacgatccgacgcccaccaccagcacgctcacgtcgagtagtcgcaactcacaagctcaaagttgcctccctcgacatggcaccaccagcaccgagtagtcctggcaaaagtatccagccatcggcgtcatctttggctcgggcagcacgattgcttttcggggaaaatgcaccaccacctattaccaacatcacgtggtccaaaggctctacgactgcagctgcaaatcttcaagtgttaggcaagagaaaacctgttgaagttaatgctcctggtggtatctcaacatcatcatcaacaccaatttccatcccatccgatgaaccaaatccaagtggaactagaacaacagctactggtactggtagtggcacaactgggactaatactgggacagatacaccacaacaaagaaaattagaagttcttgccattgatgattcgaagaaactgccatccttgatgtatgattttgaagatgttatgaatgcactagatgttgcaatgaagcatgatgttcagaatgcagcatatagcagcgaagaaagtgacccagatgctatagatgattatggggagctgtaactgtttgtgtcagttcacatgtaatagtttgttgcatagaaagtgacccagatgctatagatgattatggggagctgtaactgtttgtgtcagttcacatgtaatagtttgttgcatatagcagtgaataaagtttcatgtacaactatctgttcgtgaccatatgaattaaattgtaacttgttcatttcattcatttgatccaggagataaaagaagctacagataaggggaaaattgtgtcttctgtgaacaaaatgattatgagtagttgtagaatggcacctcgcaaaccgagacaaaactaagacagtttaaataagttattatgttttgtgaacttagcctagttgtgggctattatgctgttgttatggtatactattgatgatttatgcgaaggtccgacttgattaaccgtttaccgatcgataccgctataattctattcgtattatatcgttttcgaattttcggattttttcgatcgttttcgttaccggctatcccgttttcgtttccgtccgttgttaaaaaaacagtaacagtaacggtaaaggtgttttcccgaccgttcccgtccgttttcaggcctagacgtcgtgcactgagtgtgggtccacggcgcgccggagccgggcgcagtccttgggtgatgatcttctaggtcgatcgttccgcgagcatttgatccttgatcggcacacttctctcggaagctcccacgaggttctttccgaggggagggccgccctccaccgacctagttggcgtagggaggtcgtcgagctccaaacgggttatccaagtgagatccaaccaccctctggcagggtttgatttcggcgagtggtcccactggtggctcgactcgctaggggcatcccacttagtccttccttattcaatcctgttttagccctttggtcggtctggccgaccaaagggggcccatggctaccccgtcagccaggtttccgcagaagaatgtgaggtttgaccttggacgtggatgtgagcaaatgacctatgggccagtcacctagcttgcggctcactgggggcttgctcagtccacccctcgctctgcgtgagaagttagggtggtttaggtttttacctggttggtatgatgcagttactgctgcgaaatggtaaagggggtggtcataatgacaccgctcggcgtgggcgacttgacgaaatgcaaaacggcatgtcggcctcgtaacgctcgggtggcgtggtggcttggttaaccgcctcgctcgttactggtgtatcttctgcggcgtgccccgctggcgctctgtcccaagcggcgagaacctacaaggcacacagtcttttcttgcctgatacccaaggtggcccttggtcgaagggacaaatcctcaggtgtcgtttggggtggccctacctttcaggcgtcatccttgttccctacacttctgcagtagagggggagtgctcgggttggtatcgcttaccatattcttgcgcttgaacccttgcttcctttcttccctagaagccctctggctattgtgcctccttgcttcctcgtgcccgtccagcttgcctactacacgtatggcgtcattccacgtttccttgatctgagagagtcgtctccatggtctggataagaaggggttcccccctcgagagaggtctcagggtgtagactggagggtgagggtgaaatgcctcgtcccggggatgacgagttggtcgtacttgcgtccttctatgagcgcgagttcggcttgcccctgcatccctttgtgggcggactcccccactactatcagctggaggttcataaccttcaacccaacaatatccttcacgtggtgtgcttcatcacgctatgtgaggcgttcatggggatcgaccctcactggaagctgtggcagtatttcttcagagcgcatgtggccccgggtcgcggcggtcagttgtatgttggctcgaccaatattcagcttgtgcaggccggaaaacagagtactttaagatcccccttccttcatctatgtgatatgaaggggagtggttctttgtcaagaacgtggctaggagtgtcccgccgttcaccagtcgagagccggtatcggcggaggactggcaccacggggtggaggcgagcctcatgagtgaggtggagcatcttctgatggcgatctggacattgaagcagcgagatctcaccagcgcgcggctggtgtgcacttttatgcatcgccagattcagcccttgatggcctattagagaccgatgcaccagtactccggcgtcgacgatcctgaccgccattcctccaagcacctcgcactgacagagatcgaggcccgggtcaaggttgtcacggcgttgtcatcggaatccttcatggacgaggactcgccccttcctctctaaggatgtcgtgagcactctggtgagttccttcttcctgacgtttttcattcatttgtcttccttcgttcgttgtgtctgatgcggactctacaagggatcggacccccgacgtcgtgtcttccgcccctccctaagggcattatcgtcatggcggagcgggagagagacgcgggggagaccttggcagcacgctcgaagcgcctccaagcgaagaaagagaagagggcctcccgccctgctcgcgcagaaccaaggggggtgtcccttcttcctctgattcggaggatatgacctccactgcctaaggggggatggaggtcctagcggcagtgggtggtccatctcattatggcgatgttgaggccagctccaacgtccccgcctagacggacgggttggcccatgacgttgcagcacctacggtatgctcaaagtgtcgcgtggaattcgcttggacctgggggtggcgagggagcaatggcgcaggtggtgtcacacccctcggtgtcatcggtgttgctagggcatcacgcgggaaagagctcgtgggaactccctcctccgtggttgaagtggcgtcacggatggcgcttcaagcggtgccgccacctccggcaccttcaacggttgctcggaagaaagtgaccacccggaaacgctcctcgtggtatgttgttgttgggtcctcttgctcttgtcttcggttttggtcttcgtttcgtattttttctcttatttccttggtcagcatgtatgtgtcgcgcaagttggtgaaggacgcggcttcagcggcgaggggggcttacgactccttcggacctcccgcctctgtcgttggagggaacggctcctttgaccgacgtggccgtcccgccagccgacgttgttgccagcggctatgggtgggagggaggggaaggaaaatgagatctagcactataccatgttggaaaccttccctgactagggttgggacttgtatatatagactaagagttggtgggtctgacccattacacaagggtaaaacagtaattacaaggggctaactcaaaaaccctaagcagggctctagcaagatgcattgttgctttgtggattgcaattttttaaagcacagaagggcagacccagtgccggatgctcccacgtgagtgaggtctaggaaagggataaaccgagactcttccttcccccgtaaatgaggagagactgattcgaacccataacctggttactaaatgagacggccatcaccgctgcactaggcctgcccttcacaagaa

SEQ ID NO: 126619 - DNA, 510 bp, Zea Mays
atggcaccaccagcaccgagtagtcctggcaaaagtatccagccatcggcgtcatctttggctcgggcagcacgattgcttttcggggaaaatgcaccaccacctattaccaacatcacgtggtccaaaggctctacgactgcagctgcaaatcttcaagtgttaggcaagagaaaacctgttgaagttaatgctcctggtggtatctcaacatcatcatcaacaccaatttccatcccatccgatgaaccaaatccaagtggaactagaacaacagctactggtactggtagtggcacaactgggactaatactgggacagatacaccacaacaaagaaaattagaagttcttgccattgatgattcgaagaaactgccatccttgatgtatgattttgaagatgttatgaatgcactagatgttgcaatgaagcatgatgttcagaatgcagcatatagcagcgaagaaagtgacccagatgctatagatgattatggggagctgtaa

SEQ ID NO: 126620 - DNA, 99 bp, Zea Mays
gcaagtggcgtcgatctagagcaggcagacaaggatggaggacggcggcgtcgatctggagcaggcggcgtcgaaccggcggcggagcaggggcacaga

SEQ ID NO: 126621 - DNA, 909 bp, Zea Mays
aggcctagttcgcataatgggctcgtggacccattcagcttcgtcttccaagtcccatccgaccggccgaccgaatgtagcgcaccaatcccatcctccacccaatcgaaggacctagcgagcggcagcggcggcggcgatcggagaagatggtgcgcaaggcgaaggttgagttcgacgagcagccgccggataacttcgacccgaagaacccgtatgccgacccggtggcgatgctcgagtaccgggaacacctggtgcgagagaagtggatccatatcgagaccgccaagatcatccgggagcgcctccgctggtgctaccgcatcgagggcatcaaccaccaccagaagtgccgccacctcgtcgaccaatacctagaggctacccgcggcgtgggttggggcaaggatgcccgcccgcctgaactccacgagcccaagaagaccgtcaaggcggagtagcggcgctgctgccttgcttctcgtgctgctgttcctggattggagaggtgatctgacccttccattgagttgaatgaagtagcctggaactgtggtagttcgtcttttacatcttaagctgctgatagacttcaaataaaatcttgtccaagaaaacattctgtgagcgtacatgttgtcgtcgagctgtgtaattgagcaaatcgtcagattgaaactcgttgtctgccttgttcttcaaataccgcttatccagacggtgcttttgttttcacttttccactgcatctttgctctgcaaggatacgaaaggcatcattggttgctgttgactgttacaacgtcgttatcagtggattaactagtacattgtaaccagataacgacgttgctggataacgacgtccttcccggctagtacaaaaataccgaattttttttattc

SEQ ID NO: 126622 - DNA, 3878 bp, Zea Mays
atggatgtcgccattgacagatctgggccgaacgagtcccccatcagcaggggcaggccgagcacggcgtcctccaaccaccgcccctccacgccgtcctccaaccaccgcccctccacgccctcctccaaccaccgcccgtccacgccctcctccagccaccgcccctccacgccgggcggcaccaggaggagcagcgtcggcacgccgtccacgccgcgctcccgcagcaacggcgcgggccccttcaagtccgagcccaactcgccgccatcggccgccgcacagaagccccgcctctcgttcgaccgctccccgagatccgtggacaccaagcccgtcgtcgagcgccgggtgcccaagatcggcaccactcctgaaaagcagctccggagggaggccgaactgcaggcacagcttgagtccacccatgaggacctgaagaaggccaaggatcaactggcattcatcctcggagagagggaccgtcttgtcggggagctcaacgaggccaagagagtcgctgatgagactcacgagaagctccaggatgccctcatggccaagaggtgggccgaggaggccactgagatcgagaagttccgcgcggatgagctggagcaggcaggcatcgatgaggcacagaggcgggaggaggagtggcagagggagattgagtgcgtgcatggccagcacgccgcggacttggagacgttggtcaacacaacggaggagctggagaggctcagacgtgatctttccatggtgaacgacgccaagaaagctgcacttggccatgcagatgatgcaatgaagatcgctgaggccaatgcggagaaggtggagatcctctcaaatgaagctgctcgcttgaaaggcttgcttgattcgagtgctgccagcgaagagagtaaaagccgtgaagctgagcttcttgttaagaatctgaggtccgaggtttcatctctgaaaggcaaacttgagaaggcaatagtccttgaagagaggttggctgaagcagaaaaaatcattgaggagcttaaatcagagatagctgatgcgcagaaggtcaaagctgacatctgtctgcagttagaagaatggaaggagaagtcaggatcacttgagatgaaattggtgggagttactctatctgagaagttaaaaagtgactcacttgcctccacgactgaagagctggacaaggtcaagtcgatattgcaagatagagaattggaaattgatgttcttaaaggaaagataactgccatggaaattgaggtggcaaggcttttagcggatgtaactgattcaaatgagcatctggatgcatcacagcaagaggtgtttgggctgcagactacaatagatgttctgaggaacaagcttgatgctgcagaactagctgcctcagaggctttggacaatgagaggactgctatcacaaagattgaaggcctagctgaggagaaaatcaaactcattagtgagctggatgatgctagagacagagaggagagagagaaaatggcaattgaggatcttactgctgcattggataaggcatcttgtgaagcacaggaagcacatgataggtttcagaagaaagaagatgattatgaacatgctcttgcgcagataggtgatctgaagatgtccgcgaagactatggaagagtgttatagtgtaatgcttgatgaggcaaaacacgacataactggcctacgggaaactgtggagaagctagaagctgaagtgagcaagtgcagagaagaatgtgaatgtaaggagcttgaccttatcacggctagcaagcagtctgaacaagaaattgctgctcttaaagaagaagcccagcatttatctgcatcactgcaagttgcagagcacgagcttgaagcagtcaatgaagagagagaaaggtttcaggagaaactggcgtgcacagaatcagcagttgctgaagccaaccacgctgtgcaggaggcaaaggccgagaaggagaggcttcaagagaagcttgcacacacggaatcagaggttgctgtggccaacatggctgcacatgaatctaagattgagttcgacaggcttcaagagaaacttacatacacagagttggtggttgctgaagccaacaaggctgtgcaggaggcaaaggctgagagttcgcatctgaaggagcggttacttgacaaagagaatgcattgcagagcataacccaggagaatgatgaattcaggatgcgagaagctgacgccatgaagaaaatagacgagctgtctgctctgcttgctgaagccatgacaaagaagcatcctgaggaggaagaaaagctggtggttgttgatgaggcacacaattctatgcgtgatgaagttatctgttctgttgcagaaaatggagatacggaagaaactgatgataaaaaaccaaagcttgaagttgaagcagtcgatatgaagtccaatggtcaatccaagcatgaagagaaagatgacagcaaggtggaacaagaggaactgaaaactgagctcagcttgcaagagagcaagaaagttagcttcgacaaggacacatggacaaaaaacaaaaaacaagaaactgaatcgcccaatgatgagttaggctcgaagaaggttagcagcagcaccgagaacgcaagcagggccattataccagaggatacggcgactaaagtgtcagcctctccaacgaaaccacagcatcagaaaaagaataagcctctgctgaagaagtttgggagcttactgaaaaagaaaaacagcaagtagccgaacagtgaccgtactattagtgttgttttggatttcttcttatccttttgtttgacgaggtgttgtgcttcctatgcgtttgatcccagtgcctatatttgtggtgattggagaagtttgtgggtgtcgtgatttttttctctctcactttcttaacttggggcctatatggtgttggctgctatctacacgtttatggctgtgtaaatggagttcctcctgatcagaatggatattcgtttctgaaactgtgcagctccttgattgattgtaggttaatgtgatgtaaggcgcccgtgacctaacctggatataatatttattaactagaggactttgagcatagaatgttatctgcaatccagttgataccataatgttgaagcttgtgattgcctttgcgagttgtagcctcctaatctgttctggttgcttgccatcgatcagatcaggtgcagaaaaaggtgcagcaggtgtgattggattggaatccctcgttggggttggccatcgcttcttaccacactgacatcagagggttggccatcgcttcttgctacactgacagcagaggaagtatcatttcatttctgccaacacacaggattgttttaatccactcgaggcttcgtatatcttgtccgatgcattatcctcttgtgcgtgtcctgagtcctaacggtacggcaccgctgtgtcgcttatgggtccaaccacgtgctgttccaagcgcaaacgacatatgaatacctctgttggatggtttgagtcgtcgacttcgaatatgggtgctgccttgggggcgcagccgaatgtcatgcggatgatatcgtggtggtccctcaacatgttctgaattgaaggcggtgggaagcatctgagagaggccataatcccaacaccatttacgtgtagagaaagctcacgactttatacgaagttacctatccaagctgtttggttctcgtgtggctaccctttacatagggacaataataaggattagtaagaaccttctgtgatttttgatactttggtaaaaatacgggtgcgtcattaggagtttgcattctctacca

SEQ ID NO: 126623 - DNA, 668 bp, Zea Mays
cttgccttggcgtaggggaaaacggtgacggcagacagagaacatttggggatcccgggtgccggctgcgtccggtggctggcggcggcgtccgtcgtgtattggcaccattactaccgattacgaaatcttcgagagaggagacgggtgcggggagcggtgcccaaactcaaccattccaccgtgcgtagcaatcgaggcagcggcgtgtctgcaacacgggcggcacggcggcggaggcacatccgcatcataggtatgtcgcgtctgcaaacgaggacagcgaggcacgtctgtaagcgaggccatcgtcggtcctctgactcgtcagcttcaccacgtacgttatctccttctacgtcagctcgatggacgagggcactacctttcaatatcgcacaacacttgacttcttgttaaatggatttatcttcctgggaggcacgatcattttgtgttttttgtagctctagttgtgttaagacctaaaattattagagcttgtgaacggattgttacattcttgtgctacagctaaggctttgttcagttatttcaattccacgtggattggtgtgtattggaatagattttaacttactatgaatttaaaccgactcaatatcacccaatctaaatggattaatggcgaaacgaataagcccaaa

SEQ ID NO: 126624 - DNA, 3251 bp, Zea Mays
atgaaccaccctggcaatgagccatgggcgagttggggacggcacggggcgaaagagagccacaagagagaaacaaaaacaaatgctcgtggtcgtccatcccgcggccacaggacgaggcaaacggacgcgctcgcacgacaaccaccgcacacacgcacacgacagaagcgagaagaggagaaaagaaaagtggagggtaggagctatctccctgcagaggtcaggagcggcctcgagaccctgaagcagaggaggctcgagagaatgcgtttgagtgctcagaatgaagagggcggcaatcctgcgttggctgcgagaagcggtggtgatgccttgcggagccccactaactgcagggtcagattgcatcccgacaacaatacaggaggtttacctggagatgtccagggcaagaatccttttgcaaagcgcaaggtggagaagtttgatatgtccaaccttgagtggataaacaagataccagagtgccctgtgtattgtcccaccaaggtggaattcgaggatcccattgcttatatacaaatgatttcacccgaggctgctaaatacggtatttgtaaaatcgtctctcctgtatgtgcgtctgttcctgccggtgttgtgctgatgaaggaacagcccagctttaagttcatgactagagttcagccccttcgtcttgctgaatgggctgaggatgatacggtcactttcttcatgagtggaagaaagtacaccttccgggactacgagaaaatggcaaacaaagtgttctctaagagatattccagctctagttgtcttccaggtaggtatgtggaggaggagttctggcgtgaaattgcttttggcaaaatggatttcgtagaatatgcttgtgatgttgatgggagtgccttctcttcttctccccatgatcaacttgggaaaagcaactggaacctcaagaatttttcacggctccccggttcagttctaagacttcttcagacaccaattccaggagtgacagatccaatgctttatattgggatgctcttcagcatgtttgcgtggcatgtggaagatcattatttgtacagcatcaattaccatcactgtggggcatctaagacatggtatgggataccaggcgatgcggctcctgggtttgaaagggttgcaagccaatacgtatataacaaggacattttgattggtgatggagaggatgcagcgtttgatgttctactgggcaagacgacaatgttccctccaaatgtcttgctagatcacaatgttcctgtctataaagctgtacaaagacctggagagtttgttataacgtttcctcgttcttaccacgcaggcttcagtcatggcttcaattgtggagaggctgttaattttgctgttggcgattggttccctcttggttctttggctagcaagcgctacgcgcttctgaacagaactccattgcttgcacatgaggagctactttgtcgttctgctatgcttctgtcccaaaagctgttaaactgtgacccaagatccttggacaagttggaacatccatgttcccagtattctgtgaaatcctgctttgtgcggttgataaaattccagcgacgtgcacgtgacctacttgctaaaatgggttctgaaatatgctataagccaaagacatctccaaatctatcctgtagcatttgccggcgtggttgctatatcacacatgtgttgtgtggatgtaactttgatcctgtctgcctacatcatgaacaagaactgcggagctgcccttgtaagtccagtcgtgttgtctatgttagagaagacatactggagctagaggctctatcaagaaaatttgagcatgatgtctacttgtataaggaaagaagttccattagatcatgtaaggaggctgagatctctgatgctaatgttgaacacgtcccaaatcttggtattactctggattttgctaatagtaaagctggtagctctggctttataactgtcgatggaggaaacagttcttctgcagtatcaattttgacatcttctgcgcatcatgaggcactcatgcattcagaagcaagggcaataaatacatcagtgaccaaaggaacttgcactacagatgagagttcatccggcatggattgtgcttgtaatgaacatggttcatgtaatgcttcagtcatggaatgcagtgatgattccggttcagagaatgaaattttccgagtcaagcgcaggtccaccttatttgacaaacctacttctgaaacaaagacatcaaccttgtctgaacagcaggttctgaggcggctgaagaaggtacgtcctggagtacagcaggtcagtaagcgtccagaagaatctggtaatggttcagttcgctctacccatatgagcccgagctcaaatcatgcctcttcggatgatgaaatagacatggctcccctattcttgaggataaagcggcggcagttggaaaaccaagatgttacaagtcgtggcgcgagatcacagtcatacccatcttccagtggttctcgagaagagtttgtggaaagaagtagagatgctgcagcagagctccgtccaaaacgagtgaaaatccggctaccttctagtgccagtaggcagattgagcagcagcgcagttcggggcagcgatttgcaagggaggacaagttgccgcttgcattttagggaatcacaggtactaacctctactgggcagacgaattctttgtttaagtgcattgttaactacaaaacgaggtggcagaagagagtgggagggatcaggttgtgattgtggcagagctgatttggttagcacaggtgcagactgactttagaattggcagcaaagggaagtggctggctaatcgattcttttgtgcagcagggcctccaatttgaggcctctgggggcacgcttaggagacacacacgtgacaatattctcgttgctcgaggttctgtgtcactgccggtggctctttgatgcctggttatcagtgacagaaattgaggagaacctcgctacttcgatttctctgcaagtgtttagagcatgtagctagcttagctgtatatctctcactgtacctacggtctttcctattttttttgtaatttcctgtaaacaggcatagctgctacagtatggctaactctctattcttttgttggtttagcctggcgctgcttagcattttcaattaaatcgagattcgtttcctttt

SEQ ID NO: 126625 - DNA, 2894 bp, Zea Mays
atgaaccaccctggcaatgagccatgggcgagttggggacggcacggggcgaaagagagccacaagagagaaacaaaaacaaatgctcgtggtcgtccatcccgcggccacaggacgaggcaaacggacgcgctcgcacgacaaccaccgcacacacgcacacgacagaagcgagaagaggagaaaagaaaagtggagggtaggagctatctccctgcagaggtcaggagcggcctcgagaccctgaagcagaggaggctcgagagaatgcgtttgagtgctcagaatgaagagggcggcaatcctgcgttggctgcgagaagcggtggtgatgccttgcggagccccactaactgcagggtcagattgcatcccgacaacaatacaggaggtttacctggagatgtccagggcaagaatccttttgcaaagcgcaaggtggagaagtttgatatgtccaaccttgagtggataaacaagataccagagtgccctgtgtattgtcccaccaaggtggaattcgaggatcccattgcttatatacaaatgatttcacccgaggctgctaaatacggtatttgtaaaatcgtctctcctgtatgtgcgtctgttcctgccggtgttgtgctgatgaaggaacagcccagctttaagttcatgactagagttcagccccttcgtcttgctgaatgggctgaggatgatacggtcactttcttcatgagtggaagaaagtacaccttccgggactacgagaaaatggcaaacaaagtgttctctaagagatattccagctctagttgtcttccaggtaggtatgtggaggaggagttctggcgtgaaattgcttttggcaaaatggatttcgtagaatatgcttgtgatgttgatgggagtgccttctcttcttctccccatgatcaacttgggaaaagcaactggaacctcaagaatttttcacggctccccggttcagttctaagacttcttcagacaccaattccaggagtgacagatccaatgctttatattgggatgctcttcagcatgtttgcgtggcatgtggaagatcattatttgtacagcatcaattaccatcactgtggggcatctaagacatggtatgggataccaggcgatgcggctcctgggtttgaaagggttgcaagccaatacgtatataacaaggacattttgattggtgatggagaggatgcagcgtttgatgttctactgggcaagacgacaatgttccctccaaatgtcttgctagatcacaatgttcctgtctataaagctgtacaaagacctggagagtttgttataacgtttcctcgttcttaccacgcaggcttcagtcatgaacaagaactgcggagctgcccttgtaagtccagtcgtgttgtctatgttagagaagacatactggagctagaggctctatcaagaaaatttgagcatgatgtctacttgtataaggaaagaagttccattagatcatgtaaggaggctgagatctctgatgctaatgttgaacacgtcccaaatcttggtattactctggattttgctaatagtaaagctggtagctctggctttataactgtcgatggaggaaacagttcttctgcagtatcaattttgacatcttctgcgcatcatgaggcactcatgcattcagaagcaagggttcatgcaacacaaactgaccagatttattccactgccaagcaggcaataaatacatcagtgaccaaaggaacttgcactacagatgagagttcatccggcatggattgtgcttgtaatgaacatggttcatgtaatgcttcagtcatggaatgcagtgatgattccggttcagagaatgaaattttccgagtcaagcgcaggtccaccttatttgacaaacctacttctgaaacaaagacatcaaccttgtctgaacagcaggttctgaggcggctgaagaaggtacgtcctggagtacagcaggtcagtaagcgtccagaagaatctggtaatggttcagttcgctctacccatatgagcccgagctcaaatcatgcctcttcggatgatgaaatagacatggctcccctattcttgaggataaagcggcggcagttggaaaaccaagatgttacaagtcgtggcgcgagatcacagtcatacccatcttccagtggttctcgagaagagtttgtggaaagaagtagagatgctgcagcagagctccgtccaaaacgagtgaaaatccggctaccttctagtgccagtaggcagattgagcagcagcgcagttcggggcagcgatttgcaagggaggacaagttgccgcttgcattttagggaatcacaggtactaacctctactgggcagacgaattctttgtttaagtgcattgttaactacaaaacgaggtggcagaagagagtgggagggatcaggttgtgattgtggcagagctgatttggttagcacaggtgcagactgactttagaattggcagcaaagggaagtggctggctaatcgattcttttgtgcagcagggcctccaatttgaggcctctgggggcacgcttaggagacacacacgtgacaatattctcgttgctcgaggttctgtgtcactgccggtggctctttgatgcctggttatcagtgacagaaattgaggagaacctcgctacttcgatttctctgcaagtgtttagagcatgtagctagcttagctgtatatctctcactgtacctacggtctttcctattttttttgtaatttcctgtaaacaggcatagctgctacagtatggctaactctctattcttttgttggtttagcctggcgctgcttagcattttcaattaaatcgagattcgtttcctttt

SEQ ID NO: 126626 - DNA, 2513 bp, Zea Mays
caattttttccttctattttaatttttgaagaaaaactaaacagagaagtcgaggaaaaattgctgttagcagcggacagggggtgagcgagcgggccgaggattcatctcgtgtcgacgacgccttcgccctctccgagtctccgtccgtcttccgcgtcctccgcagctggactcgtgcgctattccccaggacgctactcccactagggttttcggattaggtttctagaaccttccaccgccgcctctccatgcacgcgccgccgctggtcacgttcgcagggggcgcctgccccaccaccgcctccgcttcgccgtcgccctggttggcctcgccgcgggacgccatctttgccgcgccggcgaggcccctacggtcccgccgcgggacactccggctggaagctaaggccgcgtggagggctgccggagggggacggggcccgcgggtcccggccaagggcgctgtgctcgcctcctatatgggcgccgaggaggtggtgggaccatcgtcgctgcttgacgaggaagagttcatttctcacatcagaaaggaactggataatggaaaacttcctgcagatgttgccagtaacctggaggagctgtattataattacaggaatgcggttctgcaaaatggagatccaaatgcatatgaggtcatgctttcaaatatgatgaccttgtttgatcgtgttctactggatgtacagaatccatttaactttccaccttatcataaagctttgcgagaaccgttcgactattacatgtttggtcagaactacattaggcctctggtagatttcaggaactcctatgttggcaacatttcccttttccatgatatcgaagagaatctccaccagggccacaatgttgttttgatgtctaaccatcagtcagaagcagatccagcaattattgccttgcttcttgaaaaaaccaatccttggattagtgaaaacatagtttatgttgctggcgatagggttgttaccgatccgctttgcaagccatttagcatgggaagaaatctcatttgcgtgtactcgaaaaagcatatgaatgatttccctgagctaattgagatgaagaggagatcaaatactcgaagtctcaaggaaatggcattgcttttacgtggtggttcacagttaatttggattgcaccgagtggtggtagagaccgcccaaatccctcatcaggagaatggtacccggcaccattcgattcatctgcagtggacaatatgaggaggcttctggagcatgctggtgttcctgggcacatatatccactatcattgctgtgctatgaggttatgcctccaccacaacaggttgagaaggagattggtgagcagagggtgatatccttccatggagcaggcttgtcagtaactgaagaaataaactatggagacattactgctcataccaagaatgctgatgagggaagggagctattcacaaataccttgtacaactcagttgttaaccagtacaatgtgctcaaatctgctatctttagagatcgtggagcagctgtatcaaacaatgtcatctcactgtcacaaccatggcgatgaatgttagctttctcagttttggtcgaccctgatctgaacttcatttcctggttcttctatttgcttgacaaatactagtatggtagggtccattaagtatgacttgaaattttgaatacttaaaaagattgcctggtgtttatgtgtaattttcatgcttaatgtctatagtggtgatcctttcttcccatctgacagttgcgcatagcatagtagcatgtaatcccatctatgtagattccatgaggttatgcttatggtaattgattcatttatatagtaagtaattttgctactatatgttaatctgtttatgttacatttgttcattgacactaactatttagatgggtgtgctaacagacgaattttgctactgcattcaggtccagtttcgttactgaagttaccttttcaaaagagcaggtgaactatcattgtgcaattttgctgggagaaactcttgaacttaaatctttttgatatcactagacttcatcaatcatggtggagcctgttattgtcatgcagatgctcgctaagaagtctgcaactgttggttggtcaagggtgattggcgattttgcacatacggatccgcagttactgctgcctcaggttgctcagcaatgtgctgctggttgggcaccgaggaatccatcaggttgcatcctttttgcccggacgtcgatttgtgcagttgaagtggtaaacgtttttttatcttgtttcgtcatcatgtatatacgtaggcttgagtcattgttggctccacattttttggagatataaatgcggtaggagttatgagatgtccacagtcggccctcccttgttgaattcctttggatgtatcctctctctttcgtacatgcactcactgaaagtcaatgcaaatatctcgtgtttctagta

SEQ ID NO: 126627 - DNA, 2129 bp, Zea Mays
caattttttccttctattttaatttttgaagaaaaactaaacagagaagtcgaggaaaaattgctgttagcagcggacagggggtgagcgagcgggccgaggattcatctcgtgtcgacgacgccttcgccctctccgagtctccgtccgtcttccgcgtcctccgcagctggactcgtgcgctattccccaggacgctactcccactagggttttcggattaggtttctagaaccttccaccgccgcctctccatgcacgcgccgccgctggtcacgttcgcagggggcgcctgccccaccaccgcctccgcttcgccgtcgccctggttggcctcgccgcgggacgccatctttgccgcgccggcgaggcccctacggtcccgccgcgggacactccggctggaagctaaggccgcgtggagggctgccggagggggacggggcccgcgggtcccggccaagggcgctgtgctcgcctcctatatgggcgccgaggaggtggtgggaccatcgtcgctgcttgacgaggaagagttcatttctcacatcagaaaggaactggataatggaaaacttcctgcagatgttgccagtaacctggaggagctgtattataattacaggaatgcggttctgcaaaatggagatccaaatgcatatgaggtcatgctttcaaatatgatgaccttgtttgatcgtgttctactggatgtacagaatccatttaactttccaccttatcataaagctttgcgagaaccgttcgactattacatgtttggtcagaactacattaggcctctggtagatttcaggaactcctatgttggcaacatttcccttttccatgatatcgaagagaatctccaccagggccacaatgttgttttgatgtctaaccatcagtcagaagcagatccagcaattattgccttgcttcttgaaaaaaccaatccttggattagtgaaaacatagtttatgttgctggcgatagggttgttaccgatccgctttgcaagccatttagcatgggaagaaatctcatttgcgtgtactcgaaaaagcatatgaatgatttccctgagctaattgagatgaagaggagatcaaatactcgaagtctcaaggaaatggcattgcttttacgtggtggttcacagttaatttggattgcaccgagtggtggtagagaccgcccaaatccctcatcaggagaatggtacccggcaccattcgattcatctgcagtggacaatatgaggaggcttctggagcatgctggtgttcctgggcacatatatccactatcattgctgtgctatgaggttatgcctccaccacaacaggttgagaaggagattggtgagcagagggtgatatccttccatggagcaggcttgtcagtaactgaagaaataaactatggagacattactgctcataccaagaatgctgatgagggaagggagctattcacaaataccttgtacaactcagttgttaaccagtacaatgtgctcaaatctgctatctttagagatcgtggagcagctgtatcaaacaatgtcatctcactgtcacaaccatggcgatgaatgtccagtttcgttactgaagttaccttttcaaaagagcaggtgaactatcattgtgcaattttgctgggagaaactcttgaacttaaatctttttgatatcactagacttcatcaatcatggtggagcctgttattgtcatgcagatgctcgctaagaagtctgcaactgttggttggtcaagggtgattggcgattttgcacatacggatccgcagttactgctgcctcaggttgctcagcaatgtgctgctggttgggcaccgaggaatccatcaggttgcatcctttttgcccggacgtcgatttgtgcagttgaagtggtaaacgtttttttatcttgtttcgtcatcatgtatatacgtaggcttgagtcattgttggctccacattttttggagatataaatgcggtaggagttatgagatgtccacagtcggccctcccttgttgaattcctttggatgtatcctctctctttcgtacatgcactcactgaaagtcaatgcaaatatctcgtgtttctagta

SEQ ID NO: 126628 - DNA, 1215 bp, Zea Mays
atggcgctcgcgctagagcaacaccggcaaggcaatcgagtgagggggaggatgtggtcatcgagccagacgagcacgaggggtgtggtggagatggggagggtggaggctaggaggggaggtggtggggatgaagacgcaagtggtcaccacgcagcggcaactgatgcacgatctggaggtgctgccactcgaggaggccaccgcaagtgccaagagcatgaatgtgaatggtgcatgtcagcgagggaagtcgctacgatgaagattgctctagagagtgctaggatccaaacaaccatcaatgacatgatactcaatctttttgacaagagaaatgacataataagggcacttaacatgtataaaagagaaattgagcaggaaccgatgatgatcttccagcatcatatgataatagctcttgaaagcttaccatgccacatcgaagtatctgaaaatttttccatacttggatttgcttgtgcttacctgaagggcagtactgatgctggcttacaggagaactcagcagccttgagctgttggttgggtacctttagaagacgttttcagttaagaaacgtattaggggctcttgaagacatgcccattgccattgaaacagacaaagctaaagcccaacattatgagctgccaactacatttttcaagttagtgcttggaaggaatctcaaatacagggaatatgagctgtcaaatattgagataatcgtagccgacatcagcaagtttgagatggaacgctcttttgacaggatcgtatcaatagagatgtttgagcacatgaaaaactacaagtcgcttcttaagaagatatccggatggatgaaagaggatggcctactattaattcacctcttctgccacaaagcatttccatatcactttgaggataaaaacgatgatgactggatcacgaggtacttcttcactggaggaacaatgccatctgcaaacctacttctatactttcaggaggatgtatctgtggtatatcattggcttgtcagtggcatgcattatgctagaactagaggaaaggtacacgaatccgaaacatctggccatcctggacagagtaagtgtgatgctggaatgtggataattagtttagtcataaatgccaaccttggttgtgttgcaacttttgagtgtggatataaaattagtgttaccgtgatgttttgctaa

SEQ ID NO: 126629 - DNA, 1665 bp, Zea Mays
atggcaaccaacgaagcgggtggccgagaagggagaagcgtcaagctgagggaacacaagacatacctggtgaggatgacgggctcaaaccccatatctagcatccggtccgcctcatccaacacaagccgagcatctccacgactccaccaaaccgctgcaatccttgtgctcgaagtccttggagatagatctgaggcacgaggtggagcagctttagactccggttggggtgagcagtggcgatgcgaaaaaagaagcccaaaaaattttgatcgatacccatgcaacatacggtgcatgcattccgtcgagcagcaagcgtaccaacgcaaacatggagatgcagaacatgacgtggaggtagccccgcctcctgcgcatacgtggaagcctcctcgcccgcccgctcttgcagtctcgctggcgcgtcgtaatggaggcgaggagccgcttgattgccgcgcctgcagcgtggacttcggtggtggggtggccggcactggagccgatactggacccggtgctggagacgttgtcgcgaagatctcgcgagcaagagttgtgtgggagtggcagcagcagatctcgggggtgctcgcggatctgtcctcctcctcgttgtcatcgtcgatatcgagcgaggacgcggtggtgtatgctgcagcggcatcggcggatgcctccgagatggaggcgcttgccgcccatgtggagcctgaaggcgcgccgaggagggcgggagacggcggctccgaggatgggggcgagctggcggcgccgaggatgggggcgtgcccgcggctgaggatgggggcgagggcgagggggtgcgctgaggcgggagcggggcatggtatcgcgtgggatacggtgtctatcgcagaatctccagcgagcgggcggctgtcttcgagggaaagggtggcggtcgtctcgacggtgagtagtataaatatacccccgcccctgccagtccgccactatcgtgcgacacctccaaactgcgtcgagccctgcgccaccaactacacccgagcccccaccaccatttcatccccttccccaatccctgtgccgcgcctcccatcaacaccacgcctcccatctacgcccgcctccacacccgtcctcacgcgcggcgtaggccgagccatcagcgccattccccaggccgccttcaacgcagatggagtcatcctcgccgcagtcgacggccacctcccatctacgtcgcctccacacccgtccccacgtgcggcgcaggccgagctatcagtgcccttccccaggtcgccttcaacgtcgtccccacgcgcgacgcaggccgagagccatcctcgccccaaatcctcgccgcagtcgacggccacctcccatctacgcccgcctccacacccatccccacacgcggccaactgcgcccgagccatcaccgcccttccacaggccgccttcaacaaatatggagccatcctcgccccaaatcgaggcagcgcgtgggtttacttaaagaccatgccacctggcgtcacaacctcccccaagacagatttagtgtacaactctccccatcctcaggccggcgctctccaatccaagttgcggcgccaatctccatccgggtacatctctgcaacttcgcaatcctcaattcggtactga

SEQ ID NO: 126630 - DNA, 2003 bp, Zea Mays
gctccttccgtcctcaaaccacaggcggaccctgacgagacgtacaagaacctccaccaggccattgagcccttgaccgtgtacgcaaacgaacacgaagcctagctcctccccaatggcctcccatcctcctcctgcggagccgtcttctaagtcaaacaaggggcagagcgagcacgaggagatccacgtctcctcgggcggcgttctggcttacaccgacgacgatgactgcgagagcaggcgccccttgctgctcaggactcccgcctccgccgagtgctactccgtctccgccgccgtcttcccgtttctctttccagctttgggaggccttctgtatggctatgacattggggcaacatccggtgcaaccatatcgctcaagtcgtcgacattcagtggtactacttggtacaatttgtcatctgtgcaaacgggtcttgtggtcagtggctcactgtatggtgctttgatcggctccgtcttggcatatacaattgcagattttttaggacgacgtaaagagcttatccttgcttctatctcatattttattggagcctttctgacagcagtagcacccaatttcactatcatggtggttggccgctttttatatggcataggaattggattggctatgcatgctgctccaatgtatattgcagagactgcaccgagccagataagaggcatgctcatttctctaaaggagttctttattgttcttgggatgcttcttggttatatagcaggaaatctctatgttgaagtggtttctggttggcgttacatgtatgcctccagtacaccattatgtctcataatgggagttggaatgtgctggttaccctcatcacctaggtggctcctgttatgtgccatacaagggaaggggaatctgccagagacaaaagaaaatgcaacccggtgcttatgtcggttgcggggtcaagcttcacctgatttggtctcagagcagattgacttgattctagaggaactttcatatattgatcaagagaagcaagctagcttcggtgagatctttcaaggaaaatgtcttaaagcaatgataattggatgtggtttggtgttctttcagcaggtcactggtcaacctagcgttctatactatgctgctacaatttttcagagtgctggattctctggggcatctgatgccactcgtgtgtcaattcttcttggcttactgaagctaatcatgaccggagtagcagtccttgtggtcgacagacttggcaggagaccattgcttattggaggtgtcagtggaattactgttgccttatttttgctgtcctcctactacactttactgaaagatgcctcctatgtggctgtaatagcgcttctactatatgttggttgttatcagctctcatttggtcctattggctggcttatgatctcagaggttttcccgctgaggctgcgagggcgtggactgggcgttgctgttcttgtcaattttgcgtccaacgctctggtcacctttgctttctctccactggaggatttgattggaacgggagcgctcttctctggattcggggtgattgcagtggcatctcttgcattcatattctggatcgtccctgagacaaaaggactcaccctggaagagattgaagcgagtttgtagttgactgatccagacgtcacgttcttccgtcctagtttcactgaactgaagggacttctggtatccttctgtagtttgctgccgtagttagccttctataaacgttctacaagctgttgtagcaataatacttctttccttccgggtataaaccgagatggtcggttgctgcaaagtgtgttctttaccgcagttcatccgattagtcacaattaattttcctgatcgccccctgcacttaactaggcaccatgactcaatcagagcgacgttgattattcaactagtactcgatattttcaaaatggttgctaatggaaagaaaagaaagaaa

SEQ ID NO: 126631 - DNA, 2121 bp, Zea Mays
atttgcattgggctgtccgcagtatggcgtcgcctccgactcgtcttgtgttctccccgtcgctgcgtcgcagccgtcgtcgggcttctcctctttcttgcactttcagtcgagtccagacctgcggaatatagatctaccaatcgaccgacccggatccttcccttccgtctgacggcaagtatcacccccttcccctcttctcctgccacacctccgccagcgctagggttttatttttgcattgctgttgctggtggtggttaccttcttctctctctcagtcgtctccctcgcagctgcagtcgtcgtagcagatcttatctcaaaccctaccgaccaacagctgcttgctcgggacgggaaccggagttggattgcgatggcgctgcagtacgtggaggcgcagcggcaggcgcgcccggacctcgccgactggtatgcttccctcgccgacctctaccagcagaagctatggcaccagctcaccctcaagctcgaccaattcctacagctccaggccgcacagaccggagacactatcattcagctctacaacaatttcatcactgattttgagaccaagattaatctgctcaagcttgcccattttgcggtgatagcttctcgccagtaccctgataaggatgctgcaattaccttcttagagggggtgatcacaaagctgcgtgatacaagagagtcacggattaatgaaccgattctctatgtgaagatgcaaattgcagctattaatcttgagaaaggaaaccaaaaagagtgcaagaattcgttggaggatgggaaaaccaccctggatagtatgactgatgtcgatcccacagttcatgctagcttttactggatatcatctcaataccacaagtcatgccaagaatttgcagagttctataagaacgctcttctctatctggcctacacaactgtggagtctctatctgagtcattcaagctagacttggcttttgatctttctctagcagccttgctgggtgataacatttataattttggagagttattagctcacccgattatcaatagtcttattggaaccaaggtggagtgggtttatcatatgttacaagcattcaacacgggcaaccttgctttctaccaagaactttgcagggttcacaatgctgctcttactgcacaaccagctttggtgcaggatgagaggaagctgcttgagaaaatcaatattctttgtctgatggagataatctttagtcggccatctgaagatagaactattccattaagtgttattgctgagcagactaagctttcaatcagtgatgtggagtatctccttatgaagagcctctcggttcatcttattgagggaataattgatgaagtggacagtacagttcatgtttcgtgggtccagcccagagtgcttggaatcccacaggttaaggctttgcgcgaccgcctggatgcctgggttggaaaggtgcatactacattgctttcagttgaggcagaaacacctgatcttgttgctgcctaatttagcacctgttacacttccgcgagaggcttggtcagcaaggtgatgagatgcattgtgacacttgtagtcattttctggataatgaacctgctgccctgagcgtttgtcagcctgcgtcctgatcggggcctgtaatttcttttttgatgtcctctggacatggatgggtacaacttcacgcagtgtcacggaaacgggaccaaatgattgaaatttttatactagtagggtgttactgtagttttcccagttgaatttaatttgtaactgagtttgtactctgctggacatggatgcaggagaatcttgctggaaatttagttgtgcttgatgtttgcatgttgcattgcgataagacgtggatcatcattaatgtattcttattctcagacattgcgttctgggctcggatggaattgtgcttagtttgggacgtttttatggctatgcttggttcagcgtctggggtgcttatagtcgccagaagatggaagccaaaccaaacacctggcttctggtggatgcgctttcgctcgcagcccctttagcactggccgtgagaatcggcctgaagcccg

SEQ ID NO: 126632 - DNA, 2003 bp, Zea Mays
atttgcattgggctgtccgcagtatggcgtcgcctccgactcgtcttgtgttctccccgtcgctgcgtcgcagccgtcgtcgggcttctcctctttcttgcactttcagtcgagtccagacctgcggaatatagatctaccaatcgaccgacccggatccttcccttccgtctgacggcaactgcagtcgtcgtagcagatcttatctcaaaccctaccgaccaacagctgcttgctcgggacgggaaccggagttggattgcgatggcgctgcagtacgtggaggcgcagcggcaggcgcgcccggacctcgccgactggtatgcttccctcgccgacctctaccagcagaagctatggcaccagctcaccctcaagctcgaccaattcctacagctccaggccgcacagaccggagacactatcattcagctctacaacaatttcatcactgattttgagaccaagattaatctgctcaagcttgcccattttgcggtgatagcttctcgccagtaccctgataaggatgctgcaattaccttcttagagggggtgatcacaaagctgcgtgatacaagagagtcacggattaatgaaccgattctctatgtgaagatgcaaattgcagctattaatcttgagaaaggaaaccaaaaagagtgcaagaattcgttggaggatgggaaaaccaccctggatagtatgactgatgtcgatcccacagttcatgctagcttttactggatatcatctcaataccacaagtcatgccaagaatttgcagagttctataagaacgctcttctctatctggcctacacaactgtggagtctctatctgagtcattcaagctagacttggcttttgatctttctctagcagccttgctgggtgataacatttataattttggagagttattagctcacccgattatcaatagtcttattggaaccaaggtggagtgggtttatcatatgttacaagcattcaacacgggcaaccttgctttctaccaagaactttgcagggttcacaatgctgctcttactgcacaaccagctttggtgcaggatgagaggaagctgcttgagaaaatcaatattctttgtctgatggagataatctttagtcggccatctgaagatagaactattccattaagtgttattgctgagcagactaagctttcaatcagtgatgtggagtatctccttatgaagagcctctcggttcatcttattgagggaataattgatgaagtggacagtacagttcatgtttcgtgggtccagcccagagtgcttggaatcccacaggttaaggctttgcgcgaccgcctggatgcctgggttggaaaggtgcatactacattgctttcagttgaggcagaaacacctgatcttgttgctgcctaatttagcacctgttacacttccgcgagaggcttggtcagcaaggtgatgagatgcattgtgacacttgtagtcattttctggataatgaacctgctgccctgagcgtttgtcagcctgcgtcctgatcggggcctgtaatttcttttttgatgtcctctggacatggatgggtacaacttcacgcagtgtcacggaaacgggaccaaatgattgaaatttttatactagtagggtgttactgtagttttcccagttgaatttaatttgtaactgagtttgtactctgctggacatggatgcaggagaatcttgctggaaatttagttgtgcttgatgtttgcatgttgcattgcgataagacgtggatcatcattaatgtattcttattctcagacattgcgttctgggctcggatggaattgtgcttagtttgggacgtttttatggctatgcttggttcagcgtctggggtgcttatagtcgccagaagatggaagccaaaccaaacacctggcttctggtggatgcgctttcgctcgcagcccctttagcactggccgtgagaatcggcctgaagcccg

SEQ ID NO: 126633 - DNA, 1999 bp, Zea Mays
atttgcattgggctgtccgcagtatggcgtcgcctccgactcgtcttgtgttctccccgtcgctgcgtcgcagccgtcgtcgggcttctcctctttcttgcactttcagtcgagtccagacctgcggaatatagatctaccaatcgaccgacccggatccttcccttccgtctgacgctgcagtcgtcgtagcagatcttatctcaaaccctaccgaccaacagctgcttgctcgggacgggaaccggagttggattgcgatggcgctgcagtacgtggaggcgcagcggcaggcgcgcccggacctcgccgactggtatgcttccctcgccgacctctaccagcagaagctatggcaccagctcaccctcaagctcgaccaattcctacagctccaggccgcacagaccggagacactatcattcagctctacaacaatttcatcactgattttgagaccaagattaatctgctcaagcttgcccattttgcggtgatagcttctcgccagtaccctgataaggatgctgcaattaccttcttagagggggtgatcacaaagctgcgtgatacaagagagtcacggattaatgaaccgattctctatgtgaagatgcaaattgcagctattaatcttgagaaaggaaaccaaaaagagtgcaagaattcgttggaggatgggaaaaccaccctggatagtatgactgatgtcgatcccacagttcatgctagcttttactggatatcatctcaataccacaagtcatgccaagaatttgcagagttctataagaacgctcttctctatctggcctacacaactgtggagtctctatctgagtcattcaagctagacttggcttttgatctttctctagcagccttgctgggtgataacatttataattttggagagttattagctcacccgattatcaatagtcttattggaaccaaggtggagtgggtttatcatatgttacaagcattcaacacgggcaaccttgctttctaccaagaactttgcagggttcacaatgctgctcttactgcacaaccagctttggtgcaggatgagaggaagctgcttgagaaaatcaatattctttgtctgatggagataatctttagtcggccatctgaagatagaactattccattaagtgttattgctgagcagactaagctttcaatcagtgatgtggagtatctccttatgaagagcctctcggttcatcttattgagggaataattgatgaagtggacagtacagttcatgtttcgtgggtccagcccagagtgcttggaatcccacaggttaaggctttgcgcgaccgcctggatgcctgggttggaaaggtgcatactacattgctttcagttgaggcagaaacacctgatcttgttgctgcctaatttagcacctgttacacttccgcgagaggcttggtcagcaaggtgatgagatgcattgtgacacttgtagtcattttctggataatgaacctgctgccctgagcgtttgtcagcctgcgtcctgatcggggcctgtaatttcttttttgatgtcctctggacatggatgggtacaacttcacgcagtgtcacggaaacgggaccaaatgattgaaatttttatactagtagggtgttactgtagttttcccagttgaatttaatttgtaactgagtttgtactctgctggacatggatgcaggagaatcttgctggaaatttagttgtgcttgatgtttgcatgttgcattgcgataagacgtggatcatcattaatgtattcttattctcagacattgcgttctgggctcggatggaattgtgcttagtttgggacgtttttatggctatgcttggttcagcgtctggggtgcttatagtcgccagaagatggaagccaaaccaaacacctggcttctggtggatgcgctttcgctcgcagcccctttagcactggccgtgagaatcggcctgaagcccg

SEQ ID NO: 126634 - DNA, 1993 bp, Zea Mays
atttgcattgggctgtccgcagtatggcgtcgcctccgactcgtcttgtgttctccccgtcgctgcgtcgcagccgtcgtcgggcttctcctctttcttgcactttcagtcgagtccagacctgcggaatatagatctaccaatcgaccgacccggatccttcccttccgtctgacgtcgtcgtagcagatcttatctcaaaccctaccgaccaacagctgcttgctcgggacgggaaccggagttggattgcgatggcgctgcagtacgtggaggcgcagcggcaggcgcgcccggacctcgccgactggtatgcttccctcgccgacctctaccagcagaagctatggcaccagctcaccctcaagctcgaccaattcctacagctccaggccgcacagaccggagacactatcattcagctctacaacaatttcatcactgattttgagaccaagattaatctgctcaagcttgcccattttgcggtgatagcttctcgccagtaccctgataaggatgctgcaattaccttcttagagggggtgatcacaaagctgcgtgatacaagagagtcacggattaatgaaccgattctctatgtgaagatgcaaattgcagctattaatcttgagaaaggaaaccaaaaagagtgcaagaattcgttggaggatgggaaaaccaccctggatagtatgactgatgtcgatcccacagttcatgctagcttttactggatatcatctcaataccacaagtcatgccaagaatttgcagagttctataagaacgctcttctctatctggcctacacaactgtggagtctctatctgagtcattcaagctagacttggcttttgatctttctctagcagccttgctgggtgataacatttataattttggagagttattagctcacccgattatcaatagtcttattggaaccaaggtggagtgggtttatcatatgttacaagcattcaacacgggcaaccttgctttctaccaagaactttgcagggttcacaatgctgctcttactgcacaaccagctttggtgcaggatgagaggaagctgcttgagaaaatcaatattctttgtctgatggagataatctttagtcggccatctgaagatagaactattccattaagtgttattgctgagcagactaagctttcaatcagtgatgtggagtatctccttatgaagagcctctcggttcatcttattgagggaataattgatgaagtggacagtacagttcatgtttcgtgggtccagcccagagtgcttggaatcccacaggttaaggctttgcgcgaccgcctggatgcctgggttggaaaggtgcatactacattgctttcagttgaggcagaaacacctgatcttgttgctgcctaatttagcacctgttacacttccgcgagaggcttggtcagcaaggtgatgagatgcattgtgacacttgtagtcattttctggataatgaacctgctgccctgagcgtttgtcagcctgcgtcctgatcggggcctgtaatttcttttttgatgtcctctggacatggatgggtacaacttcacgcagtgtcacggaaacgggaccaaatgattgaaatttttatactagtagggtgttactgtagttttcccagttgaatttaatttgtaactgagtttgtactctgctggacatggatgcaggagaatcttgctggaaatttagttgtgcttgatgtttgcatgttgcattgcgataagacgtggatcatcattaatgtattcttattctcagacattgcgttctgggctcggatggaattgtgcttagtttgggacgtttttatggctatgcttggttcagcgtctggggtgcttatagtcgccagaagatggaagccaaaccaaacacctggcttctggtggatgcgctttcgctcgcagcccctttagcactggccgtgagaatcggcctgaagcccg

SEQ ID NO: 126635 - DNA, 521 bp, Zea Mays
aagcttgctgaagggccgcaggcttggaacatctagattttgttttgctaaggggagcgctatgtgagggtgggcaggttgctcaggtcaagtgggttcacggctgcgagcttcatggagagactattgatagcagttgtgtcctgcatcattctttgatcaagattgatgagggaaagatcagtatgccgaggatgggaccgggttgtagcttgcgatgctagatctgctcatcatgaaacccatcatgactaatgcatttatctgccatttaagtgtacaccagattatttgtatgtttgctgcttactatgcaaaatggcagctaaaagaagccctaaagcatgcgagctgcacctctaccggtttagtggccaaactggctgttactacgtttcaggtgttttatctgtaacttttattttgttctttttcttgttactcacttatttctgaataattaagtatatatgtcacttaatttagtgctagaatgcagatctggcatgtttgggaactaa

SEQ ID NO: 126636 - DNA, 822 bp, Zea Mays
aagcttgctgaagggccgcaggcttggaacatctagattttgttttgctaaggggagcgctatgtgagggtgggcaggttgctcaggtcaagtgggttcacggctgcgagcttcatggagagactattgatagcaggtttctttattttcatgggaaaagtacatgtttctattgtgccttcgtacattcatagttgaggtttaatgtacatgccttctctattatattttagttaagatactcaagcaacaatgcctaaaagctcttactgaattactcgttgttgtgtttgtagttgtgtcctgcatcattctttgatcaagattgatgagggaaagatcagtatgccgaggatgggaccgggttgtagcttgcgatgctagatctgctcatcatgaaacccatcatgactaatgcatttatctgccatttaagtgtacaccagattatttgtatgtttgctgcttactatgcaaaatggcagctaaaagaagccctaaagcatgcgagctgcacctctaccggtttagtggccaaactggctgttactacgtttcaggtgttttatctgtaacttttattttgttctttttcttgttactcacttatttctgaataattaagtatatatgtcacttaatttagtgctagaatgcagatctggcatgtttgggaactaacctgcactattggttgttttttgcttcttggtggaccattttatctatagggtttggaatgttttccagcatgcattaaattactgttaacatatgattttagaatacaagtttttagacatgtgttgtgtatttggctgt

SEQ ID NO: 126637 - DNA, 1018 bp, Zea Mays
gaattcgttcttcatctgaccacgaaagtcagtacagtcatgaagaggaagatgaagaggaaaatcagcgatcattgctaaggagaacaacaatcgggaatggcccctcccgaatcattatatgattggacccgtgaaaatgatttgggaatatcaaatcaaggaagccctgaccaagttttctctagaggacactggcgccttgtcagatgccagaatggcctccgcatttttgaggagctccaagatgttgattaccttgcaagaagttgtagcagagcaatgaaggctgttggtgtggttgaagcctcctgtgaagctatatttcagcttgttatgagcatggatacttcacgttttgagtgggactgcagctttcagtatggtagtctggtagaggaggttgatggccacactgcaatactataccataggctgcagctggattggttcccaatgtttgtttggcctcgtgatctttgttatgtgcgctattggcggcgcaatgatgatggaagctatgttgtgttgtttcaatccagagagcaccaaaactgtggtccacaaccaggatttgtaagggcacatattgagagtggtggcttcaacatttctcccctgaaatcccgtaatggaagaatccgaacacaagtgcagcatcttatgcagatagatttgaagggctggggggttggttatgtaccttcatttcagcagcattgcctacttcatatgctgaacagtgttgctggtacaaataagcttttgaataaaatttacatggtatctttattaattttctgtgttgtacatagtactcagaaaacatttgtttatctaatccgactaggatttggagtaacttctcaactgagacggcacctttttgtgtgaggctgctgtcttgaccagtgtccatacacttttatgtttggtcatgttaggtggctcatagctgagccattacatgttagatgaggtacctttcctgggtgtttgaaatggttgccattgtgac

SEQ ID NO: 126638 - DNA, 2211 bp, Zea Mays
gaattcgttcttcatctgaccacgaaagtcagtacagtcatgaagaggaagatgaagaggaaaatcagcgatcattgctaaggagaacaacaatcgggaatggcccctcccgaatcattatatgattggacccgtgaaaatgatttgggaatatcaaatcaaggaagccctgaccaagttttctctagaggacactggcgccttgtcagatgccagaatggcctccgcatttttgaggagctccaagatgttgattaccttgcaagaagttgtagcagagcaatgaaggctgttggtgtggttgaagcctcctgtgaagctatatttcagcttgttatgagcatggatacttcacgttttgagtgggactgcagctttcagtatggtagtctggtagaggaggttgatggccacactgcaatactataccataggctgcagctggattggttcccaatgtttgtttggcctcgtgatctttgttatgtgcgctattggcggcgcaatgatgatggaagctatgttgtgttgtttcaatccagagagcaccaaaactgtggtccacaaccaggatttgtaagggcacatattgagagtggtggcttcaacatttctcccctgaaatcccgtaatggaagaatccgaacacaagtgcagcatcttatgcagatagatttgaagggctggggggttggttatgtaccttcatttcagcagcattgcctacttcatatgctgaacagtgttgctgggctcagggaatggttttcacaaagtgatgagagtcaagtgcttcctaggattcctgttatggtcaacatgactcaatctgtttcttccaagaaaggcagaaaagcacaagagagtactacacaaaccggcattcagatggatccaagcagacattccacagttcttgaggaggagtctgatgaagatgacgaatttctgatacctgaatctgaaccagagccatcaaatcttgaggatgctgcagatgttaggaagtcagggcgcaatgaagaggattcagatctgattgatttatctgggttttctgggaatttacgtcgggatgaccgtgatagcagtcgtgactgctggagaatgtctgatggaaataatttcagagttcgaagcaagaattttgtatatgataaaagcaagattcctgcaggaaagcctcttatggagcttgtcgctgttgactggtttaaagatgcaaagcgaatggatcatgttgctagaagaaaaggctgtgcagttcaagtagcggctgagaaggggctctttgcattggctataaatctacaagttcctggcactacaaactacagtatggttttctactttgttacgaagaaactgataccaaactccttattgcaacgctttgtggatggtgatgacgaatttcggaatagtaggttcaagttgataccatcagttcctaagggctcatggattgttcgacaaagtgttggcagcactccttgtctattaggaaaagctgttgacattacctatatacgtggctcaaattatttagaaatagatgtggatattggctcgtctacagtggcgaatggagtcttggggcttgtgtgcggtgtcataacgacactagttgtcgatatggctttccttgtccaggctaatacatacgacgagctcccagaaaggctgattggggcagttcgtatgtcgcatattgagctgtcatctgcaatagttcccgtgctcgaggattaatcataatacgcgatactgcatgcattgggcccgacaggattatgccggtctgctgagatcactgacagtgtacacaatgtagtaggaaacatagttctcgacttctcgtgtcatcttcctgaggacctttctatgcgatcatgcatgcattgcgtatttagacgtgaactatgtaggctttagaatgggttgtgttggggaaaagaaaggagagataagaagaggtaggaatagaggcactagtgacccaaactgaggtttcaataaatggtacgtacatgcttaacttgagagaccacaccattcttcattgatagtatttcccttgtgtgtaatgttgtgacagccgtatccctgatatgtatttatgtaactcaaaagtgtttattggaatcttttgactactataaggttggttggtgccgcgtttctcgaaatgatttcctgttcctgagataa

SEQ ID NO: 126639 - DNA, 1135 bp, Zea Mays
cttgtgtttatttatagcgagttgccgagttagcaaccaggtggtggcttcaacatttctcccctgaaatcccgtaatggaagaatccgaacacaagtgcagcatcttatgcagatagatttgaagggctggggggttggttatgtaccttcatttcagcagcattgcctacttcatatgctgaacagtgttgctgggctcagggaatggttttcacaaagtgatgagagtcaagtgcttcctaggattcctgttatggtcaacatgactcaatctgtttcttccaagaaaggcagaaaagcacaagagagtactacacaaaccggcattcagatggatccaagcagacattccacagttcttgaggaggagtctgatgaagatgacgaatttctgatacctgaatctgaaccagagccatcaaatcttgaggatgctgcagatgttaggaagtcagggcgcaatgaagaggattcagatctgattgatttatctgggttttctgggaatttacgtcgggatgaccgtgatagcagtcgtgactgctggagaatgtctgatggaaataatttcagagttcgaagcaagaattttgtatatgataaaagcaagattcctgcaggaaagcctcttatggagcttgtcgctgttgactggtttaaagatgcaaagcgaatggatcatgttgctagaagaaaaggctgtgcagttcaagtgagttcatgtttgaatcctgatatcattagctagtgtctaatacaaggaagaatggaaatgaataacaccctcttctaagttttttttaacacggagaagcaaaccctctaattttgggtctgatctgttcttattagtgcttgtggaagtccatgttgataggcacataaaacgatgcttggatatagccatagttgctgagagccagggttgcacttgtatgtggagttagtgtagcatcatgagttgcaccaagagccatgttttgttcttccttatcagatttagcttttctgtgtatatatttaagaatccttgcttagcattttttttaccttttgtgtttaaccatgaatgtgtttgatgtggtgaagctcagttcctgctaagtccttactttttccccatttgataatat

SEQ ID NO: 126640 - DNA, 777 bp, Zea Mays
gcgaacccgatgatccgattgatcatcgccggaccgatctgatgggctgcatgttttgatgcgcacccatcgcttgggctggtctttttcgccgtcgccattgtcgctatttacgggcaaacctttcccccgcccagctcgtctatccggaagtggtcgtgcgcttaacgctgtggtgtatcgttgttggcctctatccaaccttgctgatgacgttaatcggcgtgctgtgttttcccagtcgtgccatttcgcaaatgcatcaggcgcttaatgatcggcttgatgatcccattagtcacctgacagacagcctcgcaccgctacccgaaacgcggattgaaagagaggcgctggcgctacaaaaaatcaatgtcttttgcctcgcggacgatgccaactttcgaactcaaaacgcatggtggcaaagttgcgtggcaacggtaacctacatttactcgacgctgaatcgctacgatcccccctcttttgttgattttctggcaattattgaattccgacaaaaattagcttcagaaatcaacaagctgcagcatgccgttgctgaaggtcagtgctggcaaagcgactggcggatcagtgaaagtgaagcgatggcggcacgggaatgtaacctggagaatatctgccagtcgttgttacaactgggtcagatggacccgaatacgccgccaacgcccgcagccaaaccgccatcaatggccgccgatgcttttaccaaaaccagactatatgcgctacgcggtaaaaacgctg

SEQ ID NO: 126641 - DNA, 2829 bp, Zea Mays
atgggcgcgcttcaggtgatgctcctccgcttggtgctgctcgccgcgtccgccgcgacgacggctgtcacggtcacggccgcgccgccgcccagtgaggtggcagtgggcgcactcttcacctacgactccaccattggccgcgccgcgcgcctcgccattgagctcgccgtcgacgacgtcaacgccgaccgcaccgtcctcgccgggacccgcctcaacttgctcgcccaggacaccaactgcagcggctttcttggcgccgtcgaagcattgcagctaatggaaagaaatgtggttgctgttattggcccacaatcctccgggataggccatgtcatctcccatgttgttaatgagctacatgtacctcttctgtcatttgcggccacagatccaactctttctgcatcggagtatccttacttcataaggacaaccataagtgactacttccaaatgaatgccgttgctagcattgttgattactatcagtggaaagaggtgacggctatattcgttgatgatgattatgggcgaggtggtgtgtcggcccttggtgatgcgcttgcagcaaaaagggcgaggatttcatataaagcagctatccctcccaattcaaatacagatgtgatcaatgatgtactgtttaaagcaaatatgatggaatcaagggtcatggttgtgcatgtcaatcctgacacagggacgagaatattttctgttgctaacaagctccagatgatggccactggctatgtctggatagtaactgattggctagctgctgtcttggattcctcgacgtcaagagatcgtaaagaaatgagtcatattcagggactaattgttctgcgccagcacactcctgaatctgttgccaagaataagttcatatcaaaatggaataatgctgctcgtaatagaagtattacttcgggcttgaactcgtatggtttctatgcttatgactcagtttgggccattgctcgtggtgtcgatcaatttctcaataatgggcagcagatcaacttttctacagatccagtattgcacgatactaatggtagtagtttgcatctatcaactctcaagatatttgatggcggtgagcagatgctacagcaacttctgctcacaaattttacaggcctaactggtcgagtccaatttaattcagatcgcaatttggtgcacccagcatatgacatccttaacatcggtggttctggctcccggttgattggctattggtccaattactcaggcctctctgttgctgcacctgaaatattgtatcagaagccaccagatacttcttcaattgctcagcggctccacaatgtggtttggccgggtgattccacaaccactcctaaagggtgggttttcccgaacaatggccagccgctgcgggttggtgtcccaatcaagccaagctttaaggaattagtggcagctggaaaaggccctgataatgtgactggttattgcattgatatattcaacgcagcaattagactgcttccttaccccgttccatgtcaattcatagcaattggggatggtagaaagaaccctaactacgacgacattattagtatggttgctgccaattcccttgatgcagctgtaggcgactttgctattgtgagaaacagaacaaagattgcagaattcacacagccttatattgagtcagggcttgtgatagtagcgccagtgaaacaagcaacttcaagtgcctgggctttcctcaaaccgttcacattggagatgtggtgtgtaactggtgctctttttatttttgtggggatagttgtctggattcttgaacatcggagtaatgaggagtttcgaggatctccacgacgacaacttataacaatattttggtttagtttctcaacaatgttcttttcacacagacagaacactgtaagcgcgctagggcggtttgtgttgatcatatggctcttcgttgtgctgatcatcaattcaagttatactgccagcttgacgtcaatcctcacagtccaacagctcgcaacaggaataactgggatcgatagtttgatttcaagtggtttacctattggatatcaggctggaaaatttaccagaaattacctgattgaagagctcaatattcctgagtctcgattggtaccactaaatacaatccaggagtatgctgatgcccttaagcgtggaccaaaagatggtggtgttgttgcaattgttgatgagatgccctatgttgagatcttcctgtcataccactgcaatttcagaatagtgggacaggagttcaccaaggagggatggggttttgcattcaagagagacttcccccttgctgcggacttgtcgacagccatccttcaactctcagagagtggtcagcttcagagaattcatgacgagtggttcacccggcctagttgctcctctgatgacagcgaagtgggggcaaccaggcttggcctcggaagcttttggggccttttcctcgtgtgtgccctgatatgcctcttggctttgctggtgtttttcatacggatatgctggcagtataacaagtactccaattctgaagctgctggtgagcccagtgcagcagcagctgctgctgcagcagtagatgctgctgctgccgccgccgatgctgtcgaaagacagaggaggccatcacgtcttggcagcttcaaagatattatacagtttgtcgacaaaaaggaggaggaaattaagaagacgatgaaacgaagagtaagtgagaaagacaataaccaagctgcaggatcctcagaagctcattcagtggct

SEQ ID NO: 126642 - DNA, 171 bp, Zea Mays
atgatgcggacagctcaggtggaggtgtggttgtgcagcgagtggttcatgaggaacaactacaccgacttggcatcattgatgatgctgaggctcaaggcccgagcgctcaaggcagtaatcgatccaggtggcaacatctacatgaggatatggtggcgctatacgtga

SEQ ID NO: 126643 - DNA, 3000 bp, Zea Mays
actaaccgatgcgactggcggttctggtgctcccggcggcggcggcggcgcccatcgtgctctagactagccaaaggcaagcgcttgggtggggattaatgatgggcggtgtggctcagttggtggtggtggctgcgctcttggccactgcggccgccgcgccgacggcggcggcggcgggggcactgccaagcgaggtggccgtgggcgccctcttcacgtacgactccacgattggccgcgccgcgcagctcgccatcgagctcgccgtcgacgacgttaacgcggacgacaaggtgctcgcgtggaccaagctcaacttggtgtctatggacaccaactgcagcggcttcctcggcaccatcaaagctttggagctaatggagaaaaatgtagttgctgtgattggcccacaatcctctggaataggccatgccatctctcaagttgtcaatgagttacatgttcctctcctatcatttgcggcgacggatccaactctctctgcatcagagtatccttacttcttaaggacaaccacaagtgattatttccaaatgaatgctgttgctagcattgttgattactatcaatggaaaagggtgactgctgtatacatcgacgacgagtatgggcgaggtggcgtctcggctctcggtgatgcgcttgcattgaagagggcacaagtttcatataaagcaactattcctccaaattcaaacacagatgtgatccgtgatgtactgtttaaagcaaacatgatggaatcaagggtcatggttgtgcatgtcaatcctgacacgggtttgagggtattttctgcagctaagaagctccagatgatggccagtggctatgtctggatagtaactgattggctagctgctgtcctagattcttctgcatctagaaatcctaaatatatgagtaatattcagggagtaattgttttgcgtcagcacactcctgattctgatgccaagaacaagttcatatctagatggaacaatgtggctcgtaatagaagtatgactcctggactgaactcatacggtttctatgcttatgattcagtttgggctgttgctcgttctgtggatcaatttctcaatgctggaaaccagatcaacttctcaacagatccaaggctgcacgatccaaatggcaccactttgcgcctgtcaactctcaagatattcgatggtggtgaccagatgctgcagcagcttctcctcacaaacttcacaggtctaacaggtgcagtcaaatttgattcaggtggcaatttgctacacccagcatatgacatcctcaatgtcggtcgctctggcacccacttgatcggctattggtccaactattcaggcctttctgtggctgctcctgaaattctgtatcagatgtcaccaaatgcgtccacaagtacccatcagctgaacagtgtggtatggcctggtgactccactgatatacctagaggctgggtgttcccgaacgatggccagcctctaagagttggggtcccggttaaaccaagcttcaaggcattggtgtcaggcagcacccctgattctgtgaggggttactgcattgatgttttcaagtcagcaattaaactgctcccttacccagttccttaccagtttattcctattggggatggcacaaagaaccctagttatgtcagcatcgttgggatggttgcttccaatacacttgatgcagctgtaggcgactttgcgatagtgagaaatggaacacggcttgcagagtacacgcagccttacattgattcagggcttgtgatagtggcgccggtgaaacacataacctcaagcgcttgggctttccttaaacccttcacatgggagatgtggtttatcacaggcgctcttttcattttggtgggaattgtggtgtggctacttgagcatcggagtaatccagaatttcgaggccctccatgtaatcaagtcataacaatattctggttcagcttctccacaatgttcttctcacaccaggagaataccagaaccgcgctcgggcgtttcgtgttgatcatatggatgtttgtcgtgttgatcatcacttcaagctacactgccagtttgacgtcaatcctgacggtccaacagctcgcgacaggaattacaggccttgacagtctcatatcaagctctttacctattggataccagaccggaaaattcaccaagaaatacctgatgctaaacctcaacgttcctgagtctcgattggtgcaactgaacacgatcgaggaatacgctgatgcccttaaccgtggaccaaaaaatggtggggttgctgctattattgacgagaagccatatattgacatcttcctgtcacactactgcaacttcaagattgttggacagcagttcacaagggaaggatggggatttgcattccagaaagactccccccttgctgcagatatgtcgaccgccatccttcagctttcagagagtggccagcttcagagcatccatgacgagtggttcacacagccgagctgcgccaccaatgatgagagcaatgtgggtgcaaccaggcttggcctcggaagcttctgggggcttttcctcatctgtgccctgatctgtctcttcgctgtggtggtgttcttcatacgagtctgctggcagtacaagcagtactccaattctgaagatgctgacgagtccaatgaagctggcgctgatggtgctggcaaaagacagcggaagttgtcacgccttggcagcttccaggagattctaaagtttttcgacatgaaggaggaggaagtcatgaagagctcgatgaaacgacggccaggtgagaaagataaccatgctgctggattctagatgcgcaatcagtggcttcagcatagaacatgcatccccgatcgacttcaacgctattttttatacgacgatccgagaatctgtcttttatcacggttattagaattttgcaaagatatacatg

SEQ ID NO: 126644 - DNA, 432 bp, Zea Mays
atgggagatgggcagggcgagcaggaaaaagggaacgagggcgcacactggaagctcggaccaagacacagggagccggccatggaggttggggagctacgcacggaggcgaacagagagacgggcgccatgggcgagctgcacagccggcgagcatgcacgcgcagagaaacagagcgcgcaggggagctggaacgagaggagagagttccgagcgtgagcagggggattagcgcgctggacagcaggagaagcagaggccaagttgagagcagggagggacgcgccatggagatgggcggccgagctcggcggccatggaatgcgctcggccatgggaaggactcgacgcgtggagatgtcgtcctggtggccgacgagcaggaagggcgcgacacgagagagagcaggagcaacgagctgagagggtga

SEQ ID NO: 126645 - DNA, 577 bp, Zea Mays
ccgctctgcgcgcttgggtcatgcgtgactcacacctacgcattctgtgagttcggaatcagatccgatagagttcccagagttagagttagctcgggtacagtccgtcggttgcctcaaagcttatcccggcatcccgcggaatctcgctttgcgatgaaaccatagctccacccaattcttgcggcttcagagaaccagcgctccctgccgtcgctgtccctcgttctcccagcgcctctcattcagtcatccctcctctccgaactgaccgatgcggttggtgccaaggttccggccctctaatgctgcttgaactccagccttctaatgggcgcggctcagttggtgattctgttcttggcccttgccactgcggtgggggcgccgccgagcgaggtggccgtgggcgctctcttcacgtacgactccacgattggccgcgcagcgaagctcgccatcgagctcgccgtcgatgacgtcaactcggacggcaaggtcctcccgagaacccaactcaatttggtgccccaggataccaactgcagcggatttcttgggaccatcgaaggttcgg

SEQ ID NO: 126646 - DNA, 167 bp, Zea Mays
ggaatcaagggtcatgattgtgcatgtcaatcctgacacagggatgaggattttttctgtagctaagaacctgcaaatgatggccagtggctatgtctggatagtaactgattggctagctgctgtccttgattcctcagcaaatagaggtcttaaagatatgagtc

SEQ ID NO: 126647 - DNA, 2399 bp, Zea Mays
ggctaggctgctagctggtgctggtgctgctggttttctccgagctcccattgaataacacgctggagcattgatggtccctttcagatggtagatggcgcgcatttacgccgccacggtacgagccgagctcccctcgctcctctgctatatagcgctagctccaccatccaggccactaccctcccccaccgccattgctcagcagcagtagtaaagccacgcctgacagacagctggttcatttctggttgctgccttgctggtggtagccctcggcgcaggcagccaagaacagagagagcgagatggatgtgaacgacgtgctgctagtggtgctggcggcggcgctggctgccatgtggtggcgtcggtgctccaagaccggcggtgtcgacggcctcccgccggggcctccgggttggccggtggtggggaacctgttccaggtgatcctgcagcgacggcccttcatgtacgtggtgcgcgacctccgggagaagtacgggcccatcttcaccatgcggatggggcagcgcaccctcatcgtggtcacctcggcggagctcatccacgaggcgctggtgaagcagggccccatgttcgcgagccggcccgaggacagccccacccgcctcctcttcagcgtcggcaagtgcaccgtcaactcggcgccctacggccccctgtggcgtgctctgcgccgcaacttcgtcgccgagatcgtgtccccgcaccgcgtcaagggcttctcctggatccgggagtgggccgtggacgcgcacttgcgccgcctccgcgccgagctcgcggcggacggtgccgtgcgggtcatggccagctgccgcctcaccatctgcagcatcctcatctgcatctgcttcggcgccaagatccccgacgagctcatccgggagatcgaggaggtgctcaaggacgtgatgatgatgaccatgcccaagctcccggacttcctgcccctcctcacgccgctcttcaggaagcagctcaccgaggcccgcggcctgcgccgccgccagctcaactgcctcgtgccgctcgtccgcgcgcgaagggacttcctccgcgacggcaccgcggcagcggcggacggcgtggagatgatgagcgggcccggggaagcgtacgtggactcgctcttcgacctggagccgcccggccgcgggaagcgcctcggcgaggaggagctcgtcacgctctgctccgaggtcatgagcgccggcacagacaccagcgccacagcgctggaatgggccatgatgcacctcgtcctcgaccccgccgcgcaggagcgcctctacgacgaggtcgtcgccaaggtcggcaagaccgcccggatcaccgaagccgacgtcgaggccatgccctacctccaggcggtggtgaaggagacgttccggcggcacccgccgagccacttcgtgctgtcgcacgcggcgacgcgggacacggagctgggcgggtaccgcgtgccggcggacgccagcgtggagttctacacggcgtgggtgacggagaacccggcgacgtggccggacccggacgcgtggcggccggagcgcttcctggagggcggcgagggcttcgacaccgacatcaccggcacccgcgcgctgcgcatgatgcccttcggcgccggccgccgcatctgccccgccgccacgctcggcgtgctccacatccagctcatgctcgccaacatggtgcgcgagttccgctggctgccgcccgccggtgagggcccgccggaccccaccgagaccttcgcattcaccgtcgtcatgaagaacccgctccgggcagccttcgtcgagcgggccacgacggagacggcgacaaccgcgtgatgagcgacaacgaaaagtaaaaaaaaacagagagaagttactagtacaagttactctttcactgggctctggcagggtgggtaagttgctgcaacgtgcgtgtcgtgcggggttaattcggtcccgcactctgcggtataaattacagttattaattaattagtccacggggaaggtgcgtgatcatcatatactgtatggatggattgatcggttcatcctacctgttggctggtcgacggatggctggatggacacgtgccgccaggcggatggatggggttcatgggaatgcaacgcacgatgctgtcctcatatcataatttttttttctttagtgtttctatgtgctattaattttaatagtagaagtactgtttcttagctttctatttctcttttctctgttcaatttcatccaaaagtgtacctacgtacgtactagctattgcatgatcgatgtggtcaatatattggttgtcatctcatgtgcaaaaataacgatgttaaatgattttctcttgagaccaa

SEQ ID NO: 126648 - DNA, 2042 bp, Zea Mays
ttctgaagtttcggcagcggtgtaggcagcggcggcgtgctcgtgtaatcccatcccgaagtctccggtcacctgtcactctacgcaaccatgtcgaggaggaagaccagggagcctaaggaggagaatgtgacccttggccccactgtccgtgaaggagagtatgtctttggtgttgctcacatctttgcatccttcaatgacactttcattgtgcgatgaaggtcaaggctgatcgtgatgagtcgttaccttatgctgctatgcttgctgctcaagatgctgcacagcgttgcaaggagcttggtattactgcactgaacattaagcttcgtgccattggaggcaacaagatcaagacccctggacctggtgctcagtctgctctcagggctcttgctcgttctgggatgaaaattggacgcattgagaacgttacccctgttcccactgacagcatccgcagaaagggtggtaggaaggggaaggaggctgtaggcgtatttgacatctcttggaggtggccatcaagcagctagtcctctctggatagtgttgctgtttctatgcttgtcaagaggagctttgattttgctatatgttgatgaccatttaccgtggttgaggaattgagttgtcatatttatcttctagatatgcattttcacttataaacgtgggttcccgttagcttaattgcgctgttttgcttatatcttgctgaccccagaacattcgttctgagtgttaaattttagcatcgggtgatgatcgtgtggtaattgcgtcgtcgaggattactttctagtttctgaagatgtggccgtttgcctgtattgagcatctcaataaagattgcggcaagggagaagcgatatacaaccaaaagcaatcgtgcatgtatttgtttattatattccacaaatatttgaacaaatgcgaatgctagtacaattgtacaaatgatccctcttcactggcaaaagaaaagagcacgacacgtgggtctcatgcggcaagcatggcgaaaccgatgaaggcgccgagcgagccgacgaagcccgcgacaacgggggcagccgtggaaggctgtggcggcgttgtggagctgccgccctcagcggccggcgcgctggcggaagcggttggcggtggggagcctcctcctgctggtgttgtcggagtcggcgccggtggcgagctaggagttgtcgtgggaacgggcgccggtggcgagctaggggttgtcgtgggggcaggcgccggagctaaagctggggacgtcggcgaggtgggggtggctgcgggagcagcggacgagggtggcgacgaggatgggctcgtcgcaggtgcgggggcagcagcaggaggcgagggcgggctcggcagcggcgcggatgatggcgtcggggtgcggctgccggagcggtcggcgaggacgacgacgatgagcttctcgttggcacggcagctggcctcgttgccgctgacgaagaagaaggcccccgagcggtcgaacgtgaacaccgtgctgccgtcgtcgaacctggagacgtaggacgaggtgttgcaggcgttgtaggcggcggcgtccaccaggagcacggagtccgtctccttggggtacacgaacactgcacacgctcacgcaaagaactcgtcatcaccatgcaccagcgacgacgaccaagatgagcagcagcaggtgacgcggcgcgcggtggcgactactcctacttacgcagctggtcgccgatctggaaccggagtcgccccgcccaggtgttgtagggctcggagccggcgcccggcacgctccacccactctgcccgcccaccctgaactgcgtcgcgtcggccgacgctgccagggcgcagacgagggccagcagcggcagagccagagcgaccggcctcgccgccatgtctggaagcaggaacagtggaaggcaggcagcacgcgcactgcagctcggtcggagggagtcgcggtcgaagaggcgaaacgggtctgtgccgtgtgcggttggactctggagtct

SEQ ID NO: 126649 - DNA, 2255 bp, Zea Mays
ttctgaagtttcggcagcggtgtaggcagcggcggcgtgctcgtgtaatcccatcccgaagtctccggtcacctgtcactctacgcaaccatgtcgaggaggaagaccagggagcctaaggaggagaatgtgacccttggccccactgtccgtgaaggagagtatgtctttggtgttgctcacatctttgcatccttcaatgacactttcattgtaagtagtgtatgctccaactatggatagacctttttattcctttccctagttaactgtatgatgttgtaatatgcaacatatcactgatttgtctaggagggaaacactggttcggatcactggtactatcgtaaacccttggtccatgcttgacctatatggcagttgcatttggttttaactgtgatgtgctaaatataaatcatgtaggtgcgatgaaggtcaaggctgatcgtgatgagtcgttaccttatgctgctatgcttgctgctcaagatgctgcacagcgttgcaaggagcttggtattactgcactgaacattaagcttcgtgccattggaggcaacaagatcaagacccctggacctggtgctcagtctgctctcagggctcttgctcgttctgggatgaaaattggacgcattgagaacgttacccctgttcccactgacagcatccgcagaaagggtggtaggaaggggaaggaggctgtaggcgtatttgacatctcttggaggtggccatcaagcagctagtcctctctggatagtgttgctgtttctatgcttgtcaagaggagctttgattttgctatatgttgatgaccatttaccgtggttgaggaattgagttgtcatatttatcttctagatatgcattttcacttataaacgtgggttcccgttagcttaattgcgctgttttgcttatatcttgctgaccccagaacattcgttctgagtgttaaattttagcatcgggtgatgatcgtgtggtaattgcgtcgtcgaggattactttctagtttctgaagatgtggccgtttgcctgtattgagcatctcaataaagattgcggcaagggagaagcgatatacaaccaaaagcaatcgtgcatgtatttgtttattatattccacaaatatttgaacaaatgcgaatgctagtacaattgtacaaatgatccctcttcactggcaaaagaaaagagcacgacacgtgggtctcatgcggcaagcatggcgaaaccgatgaaggcgccgagcgagccgacgaagcccgcgacaacgggggcagccgtggaaggctgtggcggcgttgtggagctgccgccctcagcggccggcgcgctggcggaagcggttggcggtggggagcctcctcctgctggtgttgtcggagtcggcgccggtggcgagctaggagttgtcgtgggaacgggcgccggtggcgagctaggggttgtcgtgggggcaggcgccggagctaaagctggggacgtcggcgaggtgggggtggctgcgggagcagcggacgagggtggcgacgaggatgggctcgtcgcaggtgcgggggcagcagcaggaggcgagggcgggctcggcagcggcgcggatgatggcgtcggggtgcggctgccggagcggtcggcgaggacgacgacgatgagcttctcgttggcacggcagctggcctcgttgccgctgacgaagaagaaggcccccgagcggtcgaacgtgaacaccgtgctgccgtcgtcgaacctggagacgtaggacgaggtgttgcaggcgttgtaggcggcggcgtccaccaggagcacggagtccgtctccttggggtacacgaacactgcacacgctcacgcaaagaactcgtcatcaccatgcaccagcgacgacgaccaagatgagcagcagcaggtgacgcggcgcgcggtggcgactactcctacttacgcagctggtcgccgatctggaaccggagtcgccccgcccaggtgttgtagggctcggagccggcgcccggcacgctccacccactctgcccgcccaccctgaactgcgtcgcgtcggccgacgctgccagggcgcagacgagggccagcagcggcagagccagagcgaccggcctcgccgccatgtctggaagcaggaacagtggaaggcaggcagcacgcgcactgcagctcggtcggagggagtcgcggtcgaagaggcgaaacgggtctgtgccgtgtgcggttggactctggagtct

SEQ ID NO: 126650 - DNA, 2068 bp, Zea Mays
ttctgaagtttcggcagcggtgtaggcagcggcggcgtgctcgtgtaatcccatcccgaagtctccggtcacctgtcactctacgcaaccatgtcgaggaggaagaccagggagcctaaggaggagaatgtgacccttggccccactgtccgtgaaggagagtatgtctttggtgttgctcacatctttgcatccttcaatgacactttcattgagggaaacactggttcggatcactggtgcgatgaaggtcaaggctgatcgtgatgagtcgttaccttatgctgctatgcttgctgctcaagatgctgcacagcgttgcaaggagcttggtattactgcactgaacattaagcttcgtgccattggaggcaacaagatcaagacccctggacctggtgctcagtctgctctcagggctcttgctcgttctgggatgaaaattggacgcattgagaacgttacccctgttcccactgacagcatccgcagaaagggtggtaggaaggggaaggaggctgtaggcgtatttgacatctcttggaggtggccatcaagcagctagtcctctctggatagtgttgctgtttctatgcttgtcaagaggagctttgattttgctatatgttgatgaccatttaccgtggttgaggaattgagttgtcatatttatcttctagatatgcattttcacttataaacgtgggttcccgttagcttaattgcgctgttttgcttatatcttgctgaccccagaacattcgttctgagtgttaaattttagcatcgggtgatgatcgtgtggtaattgcgtcgtcgaggattactttctagtttctgaagatgtggccgtttgcctgtattgagcatctcaataaagattgcggcaagggagaagcgatatacaaccaaaagcaatcgtgcatgtatttgtttattatattccacaaatatttgaacaaatgcgaatgctagtacaattgtacaaatgatccctcttcactggcaaaagaaaagagcacgacacgtgggtctcatgcggcaagcatggcgaaaccgatgaaggcgccgagcgagccgacgaagcccgcgacaacgggggcagccgtggaaggctgtggcggcgttgtggagctgccgccctcagcggccggcgcgctggcggaagcggttggcggtggggagcctcctcctgctggtgttgtcggagtcggcgccggtggcgagctaggagttgtcgtgggaacgggcgccggtggcgagctaggggttgtcgtgggggcaggcgccggagctaaagctggggacgtcggcgaggtgggggtggctgcgggagcagcggacgagggtggcgacgaggatgggctcgtcgcaggtgcgggggcagcagcaggaggcgagggcgggctcggcagcggcgcggatgatggcgtcggggtgcggctgccggagcggtcggcgaggacgacgacgatgagcttctcgttggcacggcagctggcctcgttgccgctgacgaagaagaaggcccccgagcggtcgaacgtgaacaccgtgctgccgtcgtcgaacctggagacgtaggacgaggtgttgcaggcgttgtaggcggcggcgtccaccaggagcacggagtccgtctccttggggtacacgaacactgcacacgctcacgcaaagaactcgtcatcaccatgcaccagcgacgacgaccaagatgagcagcagcaggtgacgcggcgcgcggtggcgactactcctacttacgcagctggtcgccgatctggaaccggagtcgccccgcccaggtgttgtagggctcggagccggcgcccggcacgctccacccactctgcccgcccaccctgaactgcgtcgcgtcggccgacgctgccagggcgcagacgagggccagcagcggcagagccagagcgaccggcctcgccgccatgtctggaagcaggaacagtggaaggcaggcagcacgcgcactgcagctcggtcggagggagtcgcggtcgaagaggcgaaacgggtctgtgccgtgtgcggttggactctggagtct

SEQ ID NO: 126651 - DNA, 1017 bp, Zea Mays
cgacgggcgagggccggagtaccaacgacgatggtgagaaggacggtgctggcggcgctgctggtggccgccgccctcgccggcggcgcgcgggcgcagctcaaggaggggttctacgactactcctgcccacaggcggagaagatcgtcaaggactacgtgaaggcgcacatcccccacgcgcccgacgtcgcctccaccctgctccgcacccacttccacgactgcttcgtcaggggctgcgacgcgtcagtgctgctcaacgcgacgggcggcagcgaggcggagaaggacgcggcgcccaacctgacgctgcgcggcttcggcttcatcgaccgcatcaaggcgctgctcgagaaggagtgccccggcgtggtgtcctgcgccgacatcgtcgcgctcgccgcccgcgactccgtcggcgtcatcggcggtccgttctggagcgtgccgacggggaggcgcgacggcaccgtgtccatcaagcaggaggcgctggaccagatccccgcgcccaccatgaacttcacccaactcctccagtccttccagaacaagagcctcaacctcgccgacctcgtctggctctcaggggctcacacgatcggcatctcccaatgcaactccttcagcgagcgcctgtacaacttcacggggcgcggcgggcccgacgacgcggacccgtcgctggacccgctgtacgccgcgaagttgcggctcaagtgcaagacgctgacggacaacacgacgatcgtggagatggaccccggcagcttccgcaccttcgacctgagctactaccgcggcgtgctcaagcggcggggcctgttccagtccgacgccgcgctcatcaccgacgccgcctccaaggccgacatcctcagcgtgatcaacgcgccgcccgaggtgttcttccaggtcttcgcgggctccatggtcaagatgggcgccatcgaggtcaagaccggctccgagggcgagatcaggaagcactgcgccctcgtcaacaagcactag

SEQ ID NO: 126652 - DNA, 1603 bp, Zea Mays
cagtagccagcgcacacgtcgacgtcgtcaccgtgccttgctggcaggcactgtgtatttatagcccagcacccggctcggcacagcaagagctcgagaccgacaggacgagactcgcagctagctgacacggccgagaagcagcttgcattgcaggcgtagtacgtacccagcagcagctagcactagcagtccatcggagcgacgatggtgagaaggacggtgctggcggcgctgctggtggccgccgccctcgccggcggcgcgcgggcgcagctcaaggaggggttctacgactactcctgcccacaggcggagaagatcgtcaaggactacgtgaaggcgcacatcccccacgcgcccgacgtcgcctccaccctgctccgcacccacttccacgactgcttcgtcaggggctgcgacgcgtcagtgctgctcaacgcgacgggcggcagcgaggcggagaaggacgcggcgcccaacctgacgctgcgcggcttcggcttcatcgaccgcatcaaggcgctgctcgagaaggagtgccccggcgtggtgtcctgcgccgacatcgtcgcgctcgccgcccgcgactccgtcggcgtcatcggcggtccgttctggagcgtgccgacggggaggcgcgacggcaccgtgtccatcaagcaggaggcgctggaccagatccccgcgcccaccatgaacttcacccaactcctccagtccttccagaacaagagcctcaacctcgccgacctcgtctggctctcaggggctcacacgatcggcatctcccaatgcaactccttcagcgagcgcctgtacaacttcacggggcgcggcgggcccgacgacgcggacccgtcgctggacccgctgtacgccgcgaagttgcggctcaagtgcaagacgctgacggacaacacgacgatcgtggagatggaccccggcagcttccgcaccttcgacctgagctactaccgcggcgtgctcaagcggcggggcctgttccagtccgacgccgcgctcatcaccgacgccgcctccaaggccgacatcctcagcgtgatcaacgcgccgcccgaggtgttcttccaggtcttcgcgggctccatggtcaagatgggcgccatcgaggtcaagaccggctccgagggcgagatcaggaagcactgcgccctcgtcaacaagcactaggcggcggaattcatgcgggagatggctccattgctcgcaaaaaatccttgtgagacacacaacatgctctgcatctgcaggcgttgtcgtcaccttggtggacgtagtacatcggtgcatggattatctgttgtttaatttgtacgttcagttcattctgtttcttgtattcttttggttcctttcctcttgtttattcatggatgatgaggtgtttctgttttattctctggttcagctgtaaccatgtaacatgtaaggtgcgcgttttgtcctcgtgatctctgcaactgtatttattttaatggatggtatacatggagatatgatcatgataataacaataaggtgattacaatcatgtgcctccaccactgtcaattagatcctgttgcatttttcctccggg

SEQ ID NO: 126653 - DNA, 1566 bp, Zea Mays
aagagctcgagaccgacaggacgagactcgcagctagctgacacggccgagaagcagcttgcattgcaggcgtagtacgtacccagcagcagctagcactagcagtccatcggagcgacgatggtgagaaggacggtgctggcggcgctgctggtggccgccgccctcgccggcggcgcgcgggcgcagctcaaggaggggttctacgactactcctgcccacaggcggagaagatcgtcaaggactacgtgaaggcgcacatcccccacgcgcccgacgtcgcctccaccctgctccgcacccacttccacgactgcttcgtcaggggctgcgacgcgtcagtgctgctcaacgcgacgggcggcagcgaggcggagaaggacgcggcgcccaacctgacgctgcgcggcttcggcttcatcgaccgcatcaaggcgctgctcgagaaggagtgccccggcgtggtgtcctgcgccgacatcgtcgcgctcgccgcccgcgactccgtcggcgtcatcgtcagtgctcctgatcgagtcccccccccaccccatgcatctgcgcttcctaagccggcaaaacctatatataaaccggtcgaacgcgcatgcatgcagggcggtccgttctggagcgtgccgacggggaggcgcgacggcaccgtgtccatcaagcaggaggcgctggaccagatccccgcgcccaccatgaacttcacccaactcctccagtccttccagaacaagagcctcaacctcgccgacctcgtctggctctcaggggctcacacgatcggcatctcccaatgcaactccttcagcgagcgcctgtacaacttcacggggcgcggcgggcccgacgacgcggacccgtcgctggacccgctgtacgccgcgaagttgcggctcaagtgcaagacgctgacggacaacacgacgatcgtggagatggaccccggcagcttccgcaccttcgacctgagctactaccgcggcgtgctcaagcggcggggcctgttccagtccgacgccgcgctcatcaccgacgccgcctccaaggccgacatcctcagcgtgatcaacgcgccgcccgaggtgttcttccaggtcttcgcgggctccatggtcaagatgggcgccatcgaggtcaagaccggctccgagggcgagatcaggaagcactgcgccctcgtcaacaagcactaggcggcggaattcatgcgggagatggctccattgctcgcaaaaaatccttgtgagacacacaacatgctctgcatctgcaggcgttgtcgtcaccttggtggacgtagtacatcggtgcatggattatctgttgtttaatttgtacgttcagttcattctgtttcttgtattcttttggttcctttcctcttgtttattcatggatgatgaggtgtttctgttttattctctggttcagctgtaaccatgtaacatgtaaggtgcgcgttttgtcctcgtgatctctgcaactgtatttattttaatggatggtatacatggagatatgatcatgataataacaataaggtgattacaatc

SEQ ID NO: 126654 - DNA, 1231 bp, Zea Mays
aggagttagcaaacaaggcgctagccgctagctgcgtgcgcggcgacgaatgcccgatatgccgatgccgacgatgactgaccgcgccatgcgctcccgccgttgcacgcagggctgcgacgcgtcagtgctgctcaacgcgacgggcggcagcgaggcggagaaggacgcggcgcccaacctgacgctgcgcggcttcggcttcatcgaccgcatcaaggcgctgctcgagaaggagtgccccggcgtggtgtcctgcgccgacatcgtcgcgctcgccgcccgcgactccgtcggcgtcatcggcggtccgttctggagcgtgccgacggggaggcgcgacggcaccgtgtccatcaagcaggaggcgctggaccagatccccgcgcccaccatgaacttcacccaactcctccagtccttccagaacaagagcctcaacctcgccgacctcgtctggctctcaggggctcacacgatcggcatctcccaatgcaactccttcagcgagcgcctgtacaacttcacggggcgcggcgggcccgacgacgcggacccgtcgctggacccgctgtacgccgcgaagttgcggctcaagtgcaagacgctgacggacaacacgacgatcgtggagatggaccccggcagcttccgcaccttcgacctgagctactaccgcggcgtgctcaagcggcggggcctgttccagtccgacgccgcgctcatcaccgacgccgcctccaaggccgacatcctcagcgtgatcaacgcgccgcccgaggtgttcttccaggtcttcgcgggctccatggtcaagatgggcgccatcgaggtcaagaccggctccgagggcgagatcaggaagcactgcgccctcgtcaacaagcactaggcggcggaattcatgcgggagatggctccattgctcgcaaaaaatccttgtgagacacacaacatgctctgcatctgcaggcgttgtcgtcaccttggtggacgtagtacatcggtgcatggattatctgttgtttaatttgtacgttcagttcattctgtttcttgtattcttttggttcctttcctcttgtttattcatggatgatgaggtgtttctgttttattctctggttcagctgtaaccatgtaacatgtaaggtgcgcgttttgtcctcgtgatctctgcaactgtatttattttaatggatggtatacatggagatatgatcatgataat

SEQ ID NO: 126655 - DNA, 920 bp, Zea Mays
acatagggttccgactactgccgccgacggcgtcgatgcatctacatatgagtactctcgccgcctcttttttttaacttggatcacctatttttgatttgaacattcaagcttcgtcgtgtatcaagattgtttcttttattttatgtgtggaatggttgatttttgcgataggagcggtgatgagcaatctttgtggactagagtttctgatactacgaaggtagtatttgacgaccaaacccttggctgtctgagctcccaattcacagtcttagccttttttgctgttcatatatgtactagactagtggtctttatttcctgttataatgctatggtatagtgagattttgagcaatgatgaacaactgtgttttggactagagtttctgatgctactacttcgttggtggtagttgaagaccaaacccttggctgtctgaactcatctcacaaaccatcattatgcttgttggttcttcgtagttattaaaaatatattttgttgcatgcgtccattaccaattccggaggatgattttgttccctcacggtataatggctcgggcgcaacatgctattctcttgatgtgcggtcatatccttattggttgcgttcttatgccaatccggccctggaaagctcgcatatagtattgacatgttaaatattctacattttcccccatttgtttcaggatctaaatgatgtgaaactttgaaagggaaagcgtccaatctgttcgattgtgatgtaccatgacagttctttcatattgaataggaagatctgatagattcttgaaacttgtttttgattctttcctctgtttagagatgtggatgatgacaacacaattaaaatacagttatccctgtctgattccttcaaaaagggtgctgagaacatttttctg

SEQ ID NO: 126656 - DNA, 790 bp, Zea Mays
gggttccgactactgccgccgacggcgtcgatgcatctacatatgagagcggtgatgagcaatctttgtggactagagtttctgatactacgaaggtagtatttgacgaccaaacccttggctgtctgagctcccaattcacagtcttagccttttttgctgttcatatatgtactagactagtggtctttatttcctgttataatgctatggtatagtgagattttgagcaatgatgaacaactgtgttttggactagagtttctgatgctactacttcgttggtggtagttgaagaccaaacccttggctgtctgaactcatctcacaaaccatcattatgcttgttggttcttcgtagttattaaaaatatattttgttgcatgcgtccattaccaattccggaggatgattttgttccctcacggtataatggctcgggcgcaacatgctattctcttgatgtgcggtcatatccttattggttgcgttcttatgccaatccggccctggaaagctcgcatatagtattgacatgttaaatattctacattttcccccatttgtttcaggatctaaatgatgtgaaactttgaaagggaaagcgtccaatctgttcgattgtgatgtaccatgacagttctttcatattgaataggaagatctgatagattcttgaaacttgtttttgattctttcctctgtttagagatgtggatgatgacaacacaattaaaatacagttatccctgtctgattccttcaaaaagggtgctgagaacatttttc

SEQ ID NO: 126657 - DNA, 307 bp, Zea Mays
tttttttcacatgtggattggagcctgatgacagtggctctgagttttattaggttttctggattgtttgttgaaacagtgttgttttactatcttttgattctttgttgttggctgctgtggtggaggttgatgatatggttttgtcgccccagtcttagatccggacttcccgtatctgtgctgattgacatcttatcgaatctgactccattgtatcaatttgcagtcaagtctgcttacgtagtctgttctttttctcatttacatccgattggttcatgacatgtttttcttcatttacaca

SEQ ID NO: 126658 - DNA, 1680 bp, Zea Mays
atgatccctgtaacccaccacatccagtggcagtgctgccggctcgcttcatcaattttagaatggtaacagagcctatcagctctgttcccccagtagacacctaaactttgccacatagccaataacggatcggatcgccttcgtacttttcctacttgctatctccagcgctaggctatcagctagcactagcagcgccgtcactgttcgaagagatcagcgcagcgaactcgcagccgagagatcgatcgaggccggccggggccgagatgggcagcgtcggcgtcggttgcggctcgccggacgaggagcagcagaccgagggcagtggccctctgccgccgccggctgtctgcgtcacggggtccaccggctacgtcggctcctggctcgtccgcacgctgctgcggcgaggctaccgcgtccacgccaccgccagggacacaggcaaggccttgcaggtgctcgccgtcgtggaagaagggagggaccggctcagggtgttcagggccgacatgggcgaggaagggagcttcgacgccgccgtcacgggatgcgtggcgctcttccacgtcgcggcctccatggacctccacgtatcacccgcccatcaggacaacctcgaggagcacgtgaggtcaagcatgctggagccggccacgaggggaaccatcaacgtgctgcggtcctgcgtccgcgccgggaccgtgcgccgggtcgtcttcacgtcctccgtcagcacgttgacggcggtggacgcggtggggcggcggaaggccgtgctcgacgagtcttgcctcagagccctcgacgacgtgtggcgcaccaagcccgtcggctgggtctacatcctgtccaagcggctgactgaggaggcggcgttcaggttcgcacgggagaacggcgtccacctcgtgtccctcgttctgccaaccgtcgccgggccgttcctcacgacaagcgtccctacgagcatccagctcctgctgtcacccatcacaggtgacccgaagctctactcggtgctggcctcagtgcacgccaggttcgggtgcgtcccgctggcgcacgtccaggacgtgtgtgacgcgcacgtcttactgatggaggcgccgcgcgccgaggggcggtacctgtgcgccgcgggcgggtacgcggcggcgcagctcgcgcggctcctcgcttcgcgctaccttccggccggtgacaggctgagcaaagatttcgacgacgtctcctgctcgccgccggtggtttcgtccaggaggctgttggatctggggttcaggttccggcacgacgtcgaggacgtggtgaaagacagtgttgcgcagtgtcttgcccatgggttcctggagcatcctgagacctgaatgcggcagagctgcaattcctagttggtttcaggcgttcagcaaatcagcggcgatctgaaggagaaggatgaatgcatggttgggctggggcctgggcccttaggctatccacatgttactctatatttactctacagactataccactattcctagcttaatcaccaaaattccttactctaaattactcaccaaaatttgtagcctcatatacctctatatatcaactactactacatagtctattttattctatttcattctaactacttttttctctatataatacaagattttgata

SEQ ID NO: 126659 - DNA, 154 bp, Zea Mays
ttttttcctattttctcttttgttttttctatttcaaatttctatttgatatctccaaattatatgcacaatcaaactccaacatgatgcaagtaaatctattatttattttatttattcaagtaaatgcttttgttatgcaatgcatgcacac

SEQ ID NO: 126660 - DNA, 1473 bp, Zea Mays
ccacgacacgtcattgccgtggcccagcgctagtttccagaagcagccgcgagcttccaccgccttcttcccgtgcattttctcgagcgacggagcgatccgttcgggccgtccaccacagcgagagagagcggcagaggcgcagagcgcaaccgagcgagagagagaggacggcgacggcggagatgatggggtggggagaggaggtggtggctctgtccctgcgaggctacggctatggcaacgaggaggacgaccggccggagaagccgcggcggtacggggtgacggagatgcggagccccttctactccttccgccccgcaaaccaggcgctccaggaaatattggattctcttagtccattcgttgatggtttgaagttctctggcggatgccatagtttgatgggaaaggagttggttagagagatcactgatctagcacacaggcatgacatttatgtgagcacaggtgattgggcagagcatttgctgcgccaaggaccctcttctttcaagcaatatgtagaggaatgcaaggccttagggtttgacacaattgagctgaatgctgggtctctcaacctccctgaagaggctctgttgagactagtccgcctcatcaagagtagtggtttaagggcaaagccaatgttttcggtgaagtttgacagttctgatattcctgcgtctggtgatagggcctttggggcttacatagctccagtcaaagggaagacctcagaaagagttgaagatgttgacctgctgattaggagggcagagagatgcttggaagcaggcgctgatatgatcatgatcgatgctgatgatgtttgccagcgtgctgaatctctgaggacagacatcatcgccaagattgtaggccggctcgggcttgataaaaccatgtttgaagcttccaactccaacacctcggagtggttcgtcagacgttatggcccaagggtaaatctctttgttgaacactctgacgtgatgaatctggagcgcctccggggcttcaacatgcgcagaagcaactcggcctcccgttttgcctcgccgttcttcctgatctaatgggctaatggccattccccttcctgagatgtgtaagatacttctacatgttctcaccctcgcagagcttgttatggcctagagatgtaaccgcctttgttaatgcctcgatgtagcccccagcgagcagcgcatagcacctgttatgttgtcagcgtcgctactgataatcggttctgttggtcaatgctactataataatcggttgtggtgcaagtaatgtgaatagtgtaagagtgttttgtgttccattgcatcggtgagccaggtccttggattcatgtttgtactattgtatgcgtgtgaaatatcggaactttcagtttccagggcatgagagcacgtctccacatgaacttcaaaaattatttggtctcaaaagcaggac

SEQ ID NO: 126661 - DNA, 1247 bp, Zea Mays
acgacacgtcattgccgtggcccagcgctagtttccagaagcagccgcgagcttccaccgccttcttcccgtgcattttctcgagcgacggagcgatccgttcgggccgtccaccacagcgagagagagcggcagaggcgcagagcgcaaccgagcgagagagagaggacggcgacggcggagatgatggggtggggagaggaggtggtggctctgtccctgcgaggctacggctatggcaacgaggaggacgaccggccggagaagccgcggcggtacggggtgacggagatgcggagccccttctactccttccgccccgcaaaccaggcgctccaggaaatattggattctcttagtccattcgttgatggtttgaagttctctggcggatgccatagtttgatgggaaaggagttggttagagagatcactgatctagcacacaggcatgacatttatgtgagcacaggtgattgggcagagcatttgctgcgccaaggaccctcttctttcaagcaatatgtagaggaatgcaaggccttagggtttgacacaattgagctgaatgctgggtctctcaacctccctgaagaggctctgttgagactagtccgcctcatcaagagtagtggtttaagggcaaagccaatgttttcggtgaagtttgacagttctgatattcctgcgtctggtgatagggcctttggggcttacatagctccagtcaaagggaagacctcagaaagagttgaagatgttgacctgctgattaggagggcagagagatgcttggaagcaggcgctgatatgatcatgatcgatgctgatgatgtttgccagcgtgctgaatctctgaggacagacatcatcgccaagattgtaggccggctcgggcttgataaaaccatgtttgaagcttccaactccaacacctcggagtggttcgtcagacgttatggcccaagggtaaatctctttgttgaacactctgacgtgatgaatctggagcgcctccggggcttcaacatgcgcagaagcaactcggcctcccgttttgcctcgccgttcttcctgatctaatgggctaatggccattccccttcctgagatcccccagcgagcagcgcatagcacctgttatgttgtcagcgtcgctactgataatcggttctgttggtcaatgctactataataatcggttgtggtgcaagtaatgtgaatagtgtaagagtgttttgtgttcc

SEQ ID NO: 126662 - DNA, 1414 bp, Zea Mays
acgacacgtcattgccgtggcccagcgctagtttccagaagcagccgcgagcttccaccgccttcttcccgtgcattttctcgagcgacggagcgatccgttcgggccgtccaccacagcgagagagagcggcagaggcgcagagcgcaaccgagcgagagagagaggacggcgacggcggagatgatggggtggggagaggaggtggtggctctgtccctgcgaggctacggctatggcaacgaggaggacgaccggccggagaagccgcggcggtacggggtgacggagatgcggagccccttctactccttccgccccgcaaaccaggcgctccaggaaatattggattctcttagtccattcgttgatggtttgaagttctctggcggatgccatagtttgatgggaaaggagttggttagagagatcactgatctagcacacaggcatgacatttatgtgagcacaggtgattgggcagagcatttgctgcgccaaggaccctcttctttcaagcaatatgtagaggaatgcaaggccttagggtttgacacaattgagctgaatgctgggtctctcaacctccctgaagaggctctgttgagactagtccgcctcatcaagagtagtggtttaagggcaaagccaatgttttcggtgaagtttgacagttctgatattcctgcgtctggtgatagggcctttggggcttacatagctccagtcaaagggaagacctcagaaagagttgaagatgttgacctgctgattaggagggcagagagatgcttggaagcaggcgctgatatgatcatgatcgatgctgatgatgtttgccagcgtgctgaatctctgaggacagacatcatcgccaagattgtaggccggctcgggcttgataaaaccatgtttgaagcttccaactccaacacctcggagtggttcgtcagacgttatggcccaagggtaaatctctttgttgaacactctgacgtgatgaatctggagcgcctccggggcttcaacatgcgcagaagcaactcggcctcccgttttgcctcgccgttcttcctgatctaatgggctaatggccattccccttcctgagatgtcccccagcgagcagcgcatagcacctgttatgttgtcagcgtcgctactgataatcggttctgttggtcaatgctactataataatcggttgtggtgcaagtaatgtgaatagtgtaagagtgttttgtgttccattgcatcggtgagccaggtccttggattcatgtttgtactattgtatgcgtgtgaaatatcggaactttcagtttccagggcatgagagcacgtctccacatgaacttcaaaaattatttggtctcaaaagcaggacaacgccgaaaattgttttctggcacgg

SEQ ID NO: 126663 - DNA, 788 bp, Zea Mays
tccgggcaactcgaagaagccgcgtgcgttatcctttgagcagtttgggcgctgagcaagtccagtgagagagggagagcggcgagaggatggctgggatggcatcgctgcagggcgccatggcgtcgctctccatctccgcgctaggcgcggcgacggcgagcagcagcagcttctggggcaaccggctcgccacctactccgcgccgcagcctggggtctgttcctgcttcccaattccgttccgttctgctgatggtttggtagataataagtagctgttctggtgaaagattttactctggagtttctggatagcgttgcaaagcgcggtcggatggaattgttctagggacattcgagcttgcattacggttttggagctagtctgtatggattggatgcaatgaaatggaaaattacctttgcattgttattaattgtgcattttcaaggatgacaaaccaggcttctaatatgactatgtttaggggtgtttgacatcactctagagcaaaactttaaggaagacctggacaaagtcaactaaacaccctaattctagagttgcaaactctatagagttttgagagttgtagtataattttttggagtacattttttgctactttgaaaaatccttcaaaaacaatcaagacacatccaatgcactggttatgagaaagcaatctacacttcggagcagatatacttcacccaaagttttggagtagaactatgccaaactcgcccttattagatttcatattacattaagtttctatttg

SEQ ID NO: 126664 - DNA, 508 bp, Zea Mays
tccgggcaactcgaagaagccgcgtgcgttatcctttgagcagtttgggcgctgagcaagtccagtgagagagggagagcggcgagaggatggctgggatggcatcgctgcagggcgccatggcgtcgctctccatctccgcgctaggcgcggcgacggcgagcagcagcagcttctggggcaaccggctcgccacctactccgcgccgcagcctggggtaaggtttatggtcaagatatgcccaattgaaatgagacttaagagatgggagcgaaagaagtgtaaaccaaacagtcttcctgtgctgcacaagatgcatgttaggatcggggacacggtacaggttattgcaggccgtgagaaaggaaaggttggagaagtcacacgccttttcaagcacaacagcacggtgatcgtgaaggacctgaacttgaagtcgaagcacaagaaaggcacagacgatgaacccggtgaaatcgtcatggtcagcaaaatttctattgaact

SEQ ID NO: 126665 - DNA, 399 bp, Zea Mays
atggcgtcgcagcagaggcaacagcaggcgggagcggcggcggcggcgtcctccgccgtgggcttcgaggactacctgccggtgatggcggagcggctgggcgaggacgggctgatgcgggagctggcgagcgggttccggctgctgatggacccggcgcgcgggctcatcaccttcgacagcctccgccgcaacgcgccgctgctgggcctgggcggcatgtcggacgccgacctccgcgggatgctcgccgagggcgacttcgacggcgacggcgcgctcagcgagacggagttctgcgtcctcatggtgcgcctcagccccgagctcatggacgagcccaggcggtggctcgacgacgccgtcgaccaggcggcccgcttcctcttcaccagctga

SEQ ID NO: 126666 - DNA, 707 bp, Zea Mays
accttacggtctcaggctcaacgcatgccgtctgtttcccatttctcctccttctctgtcttcctctcgcacgcagcgccatttccttcctccctcctcctctgtcgaagcttggatttctaggcacggtgcacaggggcgaagcttggatttctaggcatggcgcacagcggcagcgcctccttgtccgtggtgtagtcggtggcgacggtgggcgccgaggaggcggcgacgttgatgttgaagccggtggcggccgtcggggacaaggatgctggcatcgctggcctgaacagcaagacgcacatgaagatcctactgaaatggatgacggggagaaatgtcgtgaagctgacctgcgtgcacgtgggcaacgcgaagaagtcctctactcccggtccactgaaagcagcagcagcgccggcgcatcaccgtcatccacatcggcctcgcagtgacggtcagtcgccgttaagccttggtgtggttcttgatgttgctttgtagatcgatggaggctgcctccggtcatggtgatcccatgtttaaccttgatgacgaacattggaaaaagcattttgttttatggactggaatagtctgcaaacatcacgatagcaatattgttctgctgctcatcagctgaggatgctgccctgtcctgaactcctgattttgcttttgatctactatgtgatgatttgctc

SEQ ID NO: 126667 - DNA, 657 bp, Zea Mays
atgctgcgggtgcaccgtcctcttgtcactggcagcatgctgctgtgccaccctttgtcggcctgcctcgtcggcggcggaagggcggcgccgggcgggcgccgggggctgcgcgggggtgataacaacgggccgtcgcgaccggagccgtcggcgagcacgtggaggaagccggagcccgggcgactgaagctcaacttcgacgggtcgtcgaggcacgcgtcccggcgcgcgagcatcggcggcgtgtaccgcgaccacgagggcgggttcgtgctgggctacgcggagcggatcggcgccgcgaccagctccgtggcggagctcgcggcgctccggcgcgggctggagctcgcggtggccaacggctggcgcagcgtctgggtcgagggcgacgccatggcggtggtcgacgccgtgcggagccgcgcgcgcgtgcgggtacgggccccggaggacctgcgcctgttcggggagatcgagaagctgctgctgctgctcgacgacatgagcgtctcgcacgtgcggcgcgggggtaaccgggtggcgcacggcttcgccaagctcggccacggcgccgcgcggccccgggtgtggcgcgacgtcccgcccgacgaggtgatcaggctcctgcagcgcgacgccgaagggagatga

SEQ ID NO: 126668 - DNA, 833 bp, Zea Mays
gaccgattcccctgctatttttttctctgagtgccatctccctgcagccatggtcgagctccttttcccctgccatggacgtgcccctccctgcacctcccctccatggtggcttccaacatccacgtcgccgagcttctccctggccgagggcaccctggagctcgtcgcgccccatgctcgggcttgctccctgtctgtacccatctctcaagctgctgccacatgcccctatgtttcccctcgcagttgtagcctcggcgtcatcgtcaagatttccttgttgtgccttgcaccgtcgacgttagttgggcgttcgataaaattcctaaaccaaccagcatgttttgaatagccccgtccgtggcgtcgtcgaccctcgctagctgtcgccatcacgtttggcgctttgcttgatcagtgaagtgtcgccgagtgggcaatgcgcgcaactagtctctgttcttccagggtaactacagtgatggtttactgtattttataaaaaattgattgatgtcgtgcgtatgtatgtgcgtacatgtatgtgtgtggtggtggttgtttccgcatttgaaaagcaggcgtagtgttgacatgagaattcggtttatagtgcaaatcatgtgaacaatgcatcagtaattatgtatgcaaatcatgtgaatgggggggggtcaatggggacggttgatgtgtgtggggacggagtgccctgacatgtcgtgtatttaggtttaccttgcaaggttaaaactcgattcaaatcatctacttctcgcagctaatgagactgcttgatccattatactgcattgagtaataagtggaaa

SEQ ID NO: 126669 - DNA, 1324 bp, Zea Mays
acaccatctctaggccgcgtctcgcctcgtctcgtcgtccgatcattatctccctgactcgcctcgtcctccagatatcggccgccaccttcacctccaccgccccggcgcacctgtgcgtctccatcgtcgccgcctctcctccttcggacacgactgaccttccactggcgccaacgaagaaaacacataggaagaagctcaccgccaaacctcatccagatccagtcgctgccctccgaaggccgcatacggaacgtctcgtctcttcctttggatccggcggtcaactccatcacccccagcttcacctcccttagtccccctccgtccgctctcacccaccgcttctatatcgccacctctctcgttgtagaagaagacactgaggatctggctttctggaatcacatttcttgagaactatctgttggagaactaaactaggctcttgttcatattatggatcagcaagctaagattgatgctgattttcttgaaccaactgtactcttagatgagacacattaccaggaggggtacaaaaatggctataatgatggtttggcatctggaaaggaagaggggaggcaggttggtttaaagatgggtttccaggtcggtgaagaactgggtttctttcagggctgtctggatgtgtggacgtctgcaattctcattgatcagaatgccttcacagctcgggtcaggaagaatatcgagcaactggctgcactggtgggcagctatccgctgtctgatccggagaatgaacaaattcaagacgtgatggagaagataaggctgaaatttagggtcatcactgcaagcttaggggtgaagttagagtatgaagggcaccccaaatcatctaaacaggatgctgaggatctatgagcagtgattgaaattacattttagtttctccgcccttgctgtttaaagctcttcaactcattggcatcacgaggaactgccgtgagacatcaatggccagagtccgaccaaaaccacatatatagttttaacaatgtctcaagttttgtgttattacctgctatctgccatatgtaatagtttcctttcagaaggcaaaagcacttccttcccattttcttgaagtacttgttgacttgtattctacatgttgggagcatatagatctttcataaaaacacacgtcccatgtattgcaaatcttcatagatccaattatctcatgggtatgttcattatgttcatcccaagtgtagaaaatcagtgctagccccttgcattgcatggatttaatcccaaatcttggacagtgtgtttgttactctgc

SEQ ID NO: 126670 - DNA, 1493 bp, Zea Mays
aacgaaagcaaactcagcagtgaacacaaaggaagctgaccatgccggggctcatgacgatgatggcgttggtgccatcgccgcccatgtcggtgaagcaatgcttctggagcagcagcaagaagacgagcggttgtacggtgttgctggtcaagaagtgttcttcttcgcaagcacatctcctcggccgcagctgggctccggcagcgacggcggccaccgcagccgcaactgcctttcgttgtgatgagcaggagctgatgatgatgcaccgcctggcggacgacgggtgggtggacgagcatatgctgccgttgctcacccccgtggaggaggcctggcagccagccgacctgctgccctccttctccgtctctgccgacgagcagcggagccaggtggcagacctccaggcccgcgcggccgccgtacccgacgacctcctcgtctgcctcgtgggcaacatggtcacggaggagggcctgcccacctacatgaccatgggcaaccgcgtgaccggcgccagcgacgccaccggctgcgacgaccatggctgggcgcgctggctgcgcggctggaccgctgaggagaaccgccacggcgacctgctcaaccgctacctctacctgtgcggccgcgtggacatgcggcgggtggagacgacggtgcaccacctcctccgccgcggcatgcgcaccatgctgcggccctccagcgcgtaccacagcctcatctacggctccttccaggagcgcgccaccttcgtctcccacgcccgcaccgccaggctggccggcctccacggcgacgcctgcctcgccaagctctgcggcgtcatcgcggccgacgagaggcgccacgaggccgcctacacgagggcgtccgacagggccttcgaggaagacccggacggcatggtgcgggcgctcgccgccgtcatgcgcgccaaggtcaccatgcccggcgagctcatggccgacggccgcgacgatcgcctcttcgatcacttctccgcggttgcgcagcgctcaggggtgtacacggcggcagactacgccgacatggtggagcatttcgtgcgcaggtggaaggtggcggagctcgacgctggcctgtccggcgaggggcggcgcgcgcaggactacgtgtgtggcctgccgcgcaagatacgcaggatggaggagctggctcaagaccgtgcggctcaaatggaggcccagtcggtatgcttcagttgggtgttcgataggcccgtccgcatccactgatcagctagcttcttccaatccaaagcaagcttggaggcccatttgtccctcatcaactgaagaaggcccagctacttctacttattttactttcccttaataaaaaaaaacttttcgttgcttaatcagccataataaatactcctatatcctagtataatacagcctggctgcatttgtactctgtttatcactactacgtatctgaaatgttgtttcctataa

SEQ ID NO: 126671 - DNA, 407 bp, Zea Mays
tcgtcgcttctactactgctatgctatagcatatactccagtcgttgcccccgccgccgccgccgccgccgcctcgacgcatccgaggaggaggagaaggagaggccggccgggtagccattcgcgtgcgatcgcggcagaggagggcggcggtatatagacgatgggcctcgtcggcggtgtcgtcggcttctgcctcggcctccccatcggcctcgccgccgcgtacttcgtctacctccgctacttcgccgccgctcgccgcctccaggatcctgtcattaaacctctacgagatttagattctgaaaccctgcaggcaacaataccacatattccattatgggtgaagagcccagactacgagcgggtgtaagtcaactgctttgtttactcaaaccttgagg

SEQ ID NO: 126672 - DNA, 1766 bp, Zea Mays
gcatatactccagtcgttgcccccgccgccgccgccgccgccgcctcgacgcatccgaggaggaggagaaggagaggccggccgggtagccattcgcgtgcgatcgcggcagaggagggcggcggtatatagacgatgggcctcgtcggcggtgtcgtcggcttctgcctcggcctccccatcggcctcgccgccgcgtacttcgtctacctccgctacttcgccgccgctcgccgcctccaggatcctgtcattaaacctctacgagatttagattctgaaaccctgcaggcaacaataccacatattccattatgggtgaagagcccagactacgagcggattgactggatgaacaagtttatttttgacatgtggccttttctggataaggcaatatgcaagcatataaatcgtgctacaaggccaatatttgatcaatatgttggacaatatggtatagaatcaattgaatttggagagttgacacttgggactcttccacctacatttcaaggcattaaagtttacgaaatgttagaaaaagagttggtaattgagcctgtgattcggtgggctagtacatcaaatgtaacagtgaacgtaaaggtgcaatctttcgaagtgacggttcagcttgaagatttgcatataatgctgacaccacgtgtgattttgaagtcacttgtgccaagctttccctgttttgctaacttgtgtgtttcactaatggaaaagccacgtatagattttggattgaaactcttgtgtggagatgtcatggcaataccaggcttgtatcaatatgttcaagatcaattatcaaagcaaatctcaaatttgtatcactggcctaaggttatacagattcctatcttagatggagcaagtggcgctacaaagaagccagttggaatcttgcatgtaaaggtaattagagccctgaatcttctcaagatggactttctcggcaaatctgatccctatgtgaagatgcgcctgagtggtgagagactgccctcgaagaaaacatctgtcaagatgagcaacctgaatcctgagtggaatgaacacttcaggttcatagtcaaggatcctgatacccaagtccttgagcttcacatgtttgattgggaaaaggttaagatgcatgataaattgggcatgcaagtaattcccctccgcttgcttacaccttacgagagcaaattattcacgctcgaccttgttcgaagcatgaacccaaacgatccgcagaacaagaagaacagagggaagctcatcgttgagttgacatttgatcccttaagagaagacaatatgtcttcagatgctgaaggtaatgctagcgtgagaagggatgcggacggtggtggtgggggggtgctgttggtttcggtagaaaatgcggaagacgtcgaagggaagcggcatactaatccatacgctgaggtccttttcaggggagagcggaagaaaacaaaggtgataaggaaaacaagagagccaagatggagcgaggagttccagttcatggtagacgagcctccggtggaagataagatccacatccaagtcaaaagcaaacgccgcgggcttcccttccgcaacaaggaatcgctggggcatgtgaatataaacctggtggatgtggtgaacaacggccggatcaacgagaagtaccacctcatcaactccaggaacgggatgatacacgtggagatcaaatggagcactgtgtgattattcagctcgtgtaatgttta

SEQ ID NO: 126673 - DNA, 1360 bp, Zea Mays
aaaatcaacacaatttaagcatagaccatatcatatctctagaaatttaagcatagaacatgtcgatctctctagaaatttaagcatgccatacaattctcgatacatattttttgttcaaattaaacatcttttaaagatgcgtcaactggcatcacgtgacttgactttcaccttctctagggatgctgataatatctttatctttggaccctgaaacacatgagacaaataatcttaaaaattacagtaatctattgttttatgtaaagacaaagtactactatttgaaagttgcctgactgcaacttgaaaataacaatttgtccctcaataacagcagctgaacacctatttcctaatcagactatagcaattatgtcagcttttccatccaatgatagcaacaacaaacatatggactacacagaaattcaagccatgtgccttgtgaactacacataaattctagaaaattagaagttatcacaatggtcgtttaaaatataatcaattctctgaactcactgcaaatatggagaatactgctatctcgggtattactaatagaaagacctacaaggaactggagatatatagtttataggctggatggtgtaaaggttaagaacatactgaatggtgaggtctcggatcttcaggtgtcttcaggaacatactgaatggtgaacgccagccaatgggtaacttcaggaataataatggaagagcaaggaaagaagacaaaactattttaggtcaaagaaataactgtcttacgaccctgctagattctgttctctctccttcaatcacccaaccgctgctacaagaaatctagtgatacatgaatcgactactcggtaagaaggtgggctagcctacggactgccaagaagttacaaaacaagatggcgtggtctttatggtatgaaattaaactgacatagtctattaatgaaaaaactaactttataataccgtcacagccacgcagaatactactgtattatagaagaagggggtaggaatgcgttgtttgtatgaaactcatgacattagtacaacaaacctccagatctagccagcagcacggacggctctagccaggacctacctccaggcttagctccagcgccggacggaactcctgttgctcaaggcggcggtgagacgagacgaggcagcgacggcgagacggggacgaggcggcaacggcaagacagggacgaggcggcaacggcaagatagggacgaggcggtgagggcggcgtgctcagtcgcgtgcggcggcgcgctcagtcgcgtgcggcgtgcggcgtgcggcgagttggatgcgttccagaacaaacgagctagg

SEQ ID NO: 126674 - DNA, 608 bp, Zea Mays
tgaaaacaacaacacttgtcgatttagcgtgtggtcccgtctgtttgtttccttctgatgctgattgagatttcagagagagagagcagagaacggctacgggacagcagtggataatggtacaatgatgcagctcatcgtgcggtgggggggagagaaaaatcatcatcagcgctggcactttggctgcgcaactgaaaaaggtattaataaacaattaattaagccactactaaccaggagtttagtggtagtagtactagtaggcagtggtacttgcttcagatgcagaattggctgctgcttccccgccttcttgactgcctgcctttctccctcctctgacctctctctctctctatttagctgttttgctgaaccccatgtcagctgcagtctgggggaatctgagcctgctgctcacctgagagagcctgtgggtggggaggcaaagcgctgcagaggctgcagcagagaggagcgagcgagggagggagacgacgagccctgtcgagctgttccgattttgcccccccgaatacgtcgctgcccctgctttggagggatctgaagctgctgctgcctgccaaagcccggaggtgagtgac

SEQ ID NO: 126675 - DNA, 2151 bp, Zea Mays
atggagcgggagcgggagagtgacaggtgcctggacccgcagctgtggcacgcctgcgccggcgggatggtccagatgccggcggtgcactccaaggtgtactacttcccgcagggccacgcggagcacgcgcagggccccgtggacctccccgccggccgggtccccgcgctcgtcctctgccgcgtcgccgccgtccgcttcatggccgatccggacaccgacgaggtcttcgccaagatccgcctggccccggtccgtcccaacgagccgggctacgccgacgacgccattggcgccgcggcggcgtcgggcgcgcaggaggacaagcccgcgtccttcgccaagacgctcacgcagtccgacgccaacaacggcgggggcttctccgtgccgcgctactgcgccgagaccatcttcccgcggctcgactactcggccgacccccccgtgcagaccgtgctcgccaaggacgtgcacggcgtggtctggaagttccgccacatctaccgcggcacgccccggcgccacctgctcaccaccggctggagcaccttcgtgaaccagaagaagctcgtcgcgggggactccatcgtgttcatgcggacggagaacggggacctctgcgtcggcatccggcgcgccaagaagggcggcatcggagggccggagttcatgcaccaccaccaccagcagccgcccccgccgcagggcggcgggtacgccgggttctccatgttcctgcgaggggaagaggacggcggcaagatgatggccgcggccgccacgagggggaaggccgccagggtgcgggtgcggccagaggaggtcgtcgaggccgctaacctggccgtgagcgggcagccgttcgaggtggtgtactacccgagggcgagcacgccagagttctgcgtcaaggcgggggcggtgcgcgccgccatgcgcacccagtggtgccccgggatgaggttcaagatggccttcgagacggaggactcgtcccggatcagctggttcatgggcactgtctccgccgtgcacgtcgctgaccccatccgatggcccaattcaccctggaggcttctccaggtcgcctgggatgagccggacctgttacagaacgtgaagagggtgagcccatggctggttgagctggtgtcgaacatgccggtcatccatcacctcacagccacgcccttctcgccgcccaggaagaagctgtgcgtcccactgtacccggagcttccgctggagggccagttcccggcgccgatgttccacggaagccccctcctcggccgtggcggcgccggtggcccgatgtgctacttcccggacggcactcctgcaggcatacagggagccaggcatgctcaattcggcatatccttatcagatctccacctgaacaagctgcagccgggcctgtcaccgcacgggctccaccgccagctcgaccacggcgtgcaggtgcaggtgcagcagccgaggatcgccgccgggctcatcgtcggcggccacccggcggcccgagacgacgtctcgtgtctgctcaccatcggcaccccaaagagcaagaagccaccgtcagacgtcaagaaggcgtccacggcggcggcaccgcagctgatgctcttcgggaaagcgatcctcaccgagcagcagatatcgctaggcggcggcaatgtcgtgccggcgctggcgaagaagagcccctccgacgacgacgacgacgtggccgagaggacggtgagcaactcggacgtgtcgagccctgggaggagcaaccaggacggcacgtccagtggcggaggcccggcggcgcgggcgtgctggcaggaggaggagtgcaacaacagggcggcaggttctgaggacgacctcctcgggcactgcaaggtgttcatgcagtcggaggacgtcgggcgcacgctggacctctccgccgtcgcgtcgtacgaggagctctaccagaggctcgccgacatgttcggcgtcgacaaggccgagctgaccagccacgtgttctaccgcgacgacgcttccggagcgctcaagcaccctggcgacgagcctttcagtgagttcaccaagaccgcccggaggctgaccatactgacggacgagagcagcgacagcttagcgaggtag

SEQ ID NO: 126676 - DNA, 867 bp, Zea Mays
gcaatccccgcggcctcgctccggttctccatcctcgcccacatgtcgtccctaaaccccgccccggctctctccatggaaagcgcgtcctctgcgctcggctctccgcgctcgtccctaaaccccgccccggctctccgctatccatggaacgtgggtcctctgccccggatcaccgcgccggccctcgatccgcgtccgcgacagcccgatctcgcgtgtggattgggtacccctctgccccagatcgtcgcctccgcccggcatcagcgtccgtgtccgcgttgtggcgtccgcagtctccatggaaggcaatcccgtgcgtggattaggcacccctctgctggcgccagcaccgcccattcgggaccacgcgcagccctcgccgtgccatgcgccaccattggcctcctcaggtgggacttcccctttcgaattctcagatctgaggccgccgccggatctagaggtgacaacgatttccccgagttcaagcgccattgaccgcagcaagacctgaaggacaccagtgcttccttgattccatcctagacgaaccgaggcccccaaatcaggcatcaacaaactcattaaccgagcgacctgaaagacatgcatatatcagagcaaagtgataatgacgccacaagagaagacttcagggatgatttacttcagtcttacagcttgacgcacaaatcactattgaccctacgaaaattattttgtttaaatactacaaagatatgctgtcacagattaactgtttgcggcctctatgtcttgttaccatgtaagttaagcaaagtatttattacaacctgtgcagtgtataaacctccatatgagcaaataataattattcaa

SEQ ID NO: 126677 - DNA, 2046 bp, Zea Mays
atggctggctctggagagtcgtcggcggtggtaggagatggcgttcgtcttgatccagagacagagggagtagttgatggtaactcactggtcacaccacctcctgctctactgggtcctgtgatcgacgagatgagcataggggaagaaggagaacaaagggttcgacctcctatgtccaatattagctccagggagatggatacgcctcaaatactgcattcacataaatacagagagaagacgttcagtaagtggataaattgttcacgtgaagctgcaaaaattgaactggtaaacttggagcataaccatgagttcataactgacgaagcagagaaacaacatttacattgcaacaaaagtagggatgctgagttcataaattttgttgatgcaatgcatgatagccgagtgccgcagcattgcatagttgattttatatcagaaatgcatgatgggccggagaacgtaccagtaactgctcaagatctgaaaaacatgagggcagcaatgagaagagaaaactgcgcaaatgatgtagccaaacttttggctttctttacagaatgcaagaaacagaatccacaatttttttgtgatttccagctagacaatgatgggaaaataaacagatttatgccattcctaaatgagatatatgcaagggaccaaggacaacagatacattgtataggttcgaaagtgagagtctttagagcatacgccagagctgttatgaatagatttgaggaatcaatgaaatacgccactgcatacaaaatattaaaggacgcagacagttgtgataaagattggatcgtacaacatacaaaaaggtctaataaaattgtgtggggacaacatcaattcaagataacagcggacatagaagctggggagtatacatgcgagtgcaaacagtgggaacatacaggtctattgtgtgttcatcttttaagagccttcatgcatcttcaagttgaaaagataccttcaaagtatatattgcaatggtacactgtctcatcaagaaaagatgtatcgtttgaaagaattgataagagcttcaggagaaaggatggagttactaaatcatacagacagaaaatgttgttaacgaaaacaatgaaagtagttcgccagacgtgtatgtcaaaagcagggtacgacaaggcgatggatgtgttggatgagctcgatggcgttctatgccgattagatccagatattggatataatgagtcatgtgatgttagtgatgatgaggaagacaaggaaggagaattgaacaaaaataatgctggcgatgggatggaagatgacaatacaattacatgccataaaatggatgagcataacaccatgactggatgtgaacatgcgttaacattaataacagctggtaaccaggaggacaacatgagaattccacctgaggttggtgatacaagttctccgtgtcacgtagcacaggaacaaatggaacatattgatgcatcctcagaagctaaaaagaggttgaattttaatgtggatgttataaatctgagtatgccggatcgtgcaagaccaaaaggacggacaataaaaaattcagaagataggattatgaggctaggtgcgaaaggagaaaaaaagaagaataggagatgccaattgtgtggtatagcagatggacataacagcagaacgtgtctatctgtggaagagaacagggcaagactagcaaaactggctcatcgaaagagaggacgaccagccggatcaagactaaacaataaaacaactgctccacagtggaacgaaacatcgactgctaaaaaacaccgtattgatgaagaagaggaaaatgaagaagccgatgagcatatggaattgggtgaataatttgaagtgtgactaaagagtggtcgatgtagtagaaacttgtaatagcataatgacctatgttttagtttttttggaaattaatagtttgcatgactgggttatataatgcgttgatataaaactataaaatgttgcgtaaaactagaccattac

SEQ ID NO: 126678 - DNA, 2369 bp, Zea Mays
aagttcgtgtgtgtggagactgaggctgaacttcagctaaacgtcttcggtcactcgtgctggtcgcgcggcgatctacgcctctccgtcctccaaacgaaaccctaacccgcgcatccaacctccatccatcctccgagccccaaactccaaaccctagacccctccccctgccttcgcggccgatgggcgcagatgagcagccatctccgacgcggaaacgcgaccgcgaggaaggggaggacctctccgacgggggcgccgccgagaagcggccgcgcgccgaggtcgcgtccctgctggggctggccacctacgaggacgaggaggaagacgaagcggccaggggtcacacgaatggccgacacgcggtggagcctgagctagaggacgacgaggatgatgatgatgaggacgacgacgtgaggagggctcctgagaggaggcccagacaggtagagctgcgccgggactgcccatacctcgacaccgtgaacagacaggttcttgattttgatttcgagaagttctgttcaatctccttgtcaaatttgaatgtgtatgcgtgcttggtctgtggaaaatatttccaaggaagagggttgaaatctcatgcatatacgcacagccttgaagcaggccatcacgtgttcattaatcttcaaactgagaaggcttactgtcttcctgatggatatgagattaatgatccatcgttagaagatattcgacatgttctgaatccaaggttcactaaggagcaggttctaaatcttgacaaaaataagcagtggtctagagcacttgatggctccaattatctacctggaatggtgggtcttaacaacatcaaggagactgattttgtgaatgtcacaatacagtcattaatgagagttacacctctgagaaatttctttctaatccctgaaaactatcagcatagcaaatcaccattggttcatcgttttggggaattgacacgtaagatttggcatgctaggaacttcaagggccaggttagtccacatgaatttctgcaagcagttatgaaggccagcgacaaaaagtttcagattggtgtacagtcagatccagtggaatttatgacatggctcttaaacacactgcatgcgaaactaaaaagttcaaagaagaaaaacagaagcataatacacgattgttttcagggagaacttgaagttgttaaggaggttcataggaagcatataatggaaaaaagagaggatggcggtgagctgaatggtgaggcaggttcagtggtgggaactgcagatggaattgttactgaaacatccaaggtcccattcctgatgctcggtcttgacctgccacctccacctcttttcaaagacgccatggagaaaaatatcattccacaggtaccattgtttaacatactgaagaagttcgatggtgagacagttacagaggttgtccgaccttccattgcccgaatgaggtaccgagtcactagactgccgaagtatctgatccttcatatgcgaaggtttaccaaaaataacttttttgtcgagaaaaaccctactctagttaattttcctgtgaagaacttggagttgaaggactacattccattacctaagccgaaagagaatcataagctacgttcaaagtatgacctcatagcaaacattgtccatgatggcaaacctggcgagggatgctacagagtatttgtacagcggaaatcagaagaggcctggtatgagatgcaggatctccatgttactgagacccttcctcaaatggttgctctctcagaaacctacatgcaaatatacgagcaacacgaatgagtaatggacagtggtcatcctatggtcagtctgtttgcttaacagagatcagaatatcacaaactaatccttatctttggagcagctttttttggggcagaattttgtagtatcttcacacatgtccagacttaatttcttgacaagcagagatcgagggaatgtacttgggtcatcaagtcaatgctatggaggctgaaacatcgtgaattgtttttagagctgctttgatagaggaacgatttcccacatatttcatgtttgtagtgcagcactgcagcctgtatctgttgtgaaccggtacgcttccaaccgttatcagcaaacttttgaagctcataaagtataattttttatgctacgtgctactcatttctgctttttttttgctacgctttaggtagagcagggttccagctgtatggtttagtattgcttttcgaagccttgagtttgtttctgtacaggaccggcaaatcacagtttcaaacaattgcggcagggtggttctggtccagttgtttcaaa

SEQ ID NO: 126679 - DNA, 922 bp, Zea Mays
gagactgttttacaaaaggcactaggcaccacctttcgtggcttcctctgctctcctccacaaaggcagggaagcagcaacactgtagcagggaggagagggtaggcagtctgtccactgtccacgctgcagaagagagagatgggggtgcgggcggcggcggcagcagtggcgctggtggcggtgatgggcatgctggcgccccgagcggcggcgcagacgccgaactgcgcggcgaagctggtcccgtgctcgtcgtacatgaacacgacggggacgccgccggacacctgctgcggcccgctcaaggacgccgtcaagaacgacctcaagtgcctctgcgatctctacgccacgccggagatcttcaaggccttcaacatcagcctcgacgaggccctcggcctctccaagcgttgcggcctcagcgacaccaccgccgcctgcaagggcctttcacctacccaatctcctccaggttcaccatcaggtggtggcagtggcagcaactccggtcatcacactctgtcggtcggtttctcaggattcatgagcttcttgtcgctagccttgtggtctgtattagcataaagtttaggatgctgcagtggacattgcctgtcttatcccacaagatgatttgcacctacgacacaatcaacatttgtcttgctgtgtattgatatggccagccagtagactgatgtctctgaaccatgtgcttgcattagactgcacaattggtccttcgcccaattgttccaaagagtgcttccatgaacttagaccgaagagtgtctccaaggtcagctgtgggaaggttcttaagtccttcgcccaattgttccaaacctctgcaagattattggtaatgtgatcacattttatctcctctgaaaatttgcaattggtccatttcaaa

SEQ ID NO: 126680 - DNA, 867 bp, Zea Mays
gactgttttacaaaaggcactaggcaccacctttcgtggcttcctctgctctcctccacaaaggcagggaagcagcaacactgtagcagggaggagagggtaggcagtctgtccactgtccacgctgcagaagagagagatgggggtgcgggcggcggcggcagcagtggcgctggtggcggtgatgggcatgctggcgccccgagcggcggcgcagacgccgaactgcgcggcgaagctggtcccgtgctcgtcgtacatgaacacgacggggacgccgccggacacctgctgcggcccgctcaaggacgccgtcaagaacgacctcaagtgcctctgcgatctctacgccacgccggagatcttcaaggccttcaacatcagcctcgacgaggccctcggcctctccaagcgttgcggcctcagcgacaccaccgccgcctgcaagggttcaccatcaggtggtggcagtggcagcaactccggtcatcacactctgtcggtcggtttctcaggattcatgagcttcttgtcgctagccttgtggtctgtattagcataaagtttaggatgctgcagtggacattgcctgtcttatcccacaagatgatttgcacctacgacacaatcaacatttgtcttgctgtgtattgatatggccagccagtagactgatgtctctgaaccatgtgcttgcattagactgcacaattggtccttcgcccaattgttccaaagagtgcttccatgaacttagaccgaagagtgtctccaaggtcagctgtgggaaggttcttaagtccttcgcccaattgttccaaacctctgcaagattattggtaatgtgatcacattttatctcctctg

SEQ ID NO: 126681 - DNA, 2443 bp, Zea Mays
aggttcaatgaaaatgtaatgaacaagccaggttttgtggatgtatatccagcttcacgaataacaaggaatatacagcatcatttcgagtctgtttcccgttttaatactagcaaactgatgaacactgagaagcaaaaaggcctaaggattgtaacagaaccaagaaatctgtcatcagcactaagatggatttctgatgaggaagtaacttttcttccacttgcagaacatctcttacattcatattaccaaattttgtatcttggataaagatgtctctatagcatcgaacaattcttgtatttcttatgtcaccactaacctttcgtctggatttattcaatgagtacagttgtatattattagtccagtgccagtggaaagctaactattttaaaatttccaaaggtcagaaaacaggtatatatcgttgggaactctgaacctcgtgaaaatattggcgttcttaatgaacttatacatgctcgtgatgaacttgcaaagattatgggatgcaaatcttatgctgaatttgctattcgtcctaacatggccgcgtcagccgatgtggttatgtcatttcttgaaaatttgagcaacactgttaagcataaagctgaagaggaatttaagaccatacataatttcaagagaagaacatgtaatgaaaagagtgccgatctagaaccctgggatgaggattacttcattggaatgatgaaatcatctgtatatgacctggacgcttcagttattgcaaaatactttcccttgtcgcagtgcctaaaagggttaaatgttctcgttgaatcattatttggtgcaacatttcatcaaattcctatgagggatggggagtcatggcatccagatgtgataaagctccgtctccatcatcctgatgagggtgatttaggattcatgtatctggacctctactccagaaaggggaaacatccaggatgcgcacattttgctatccaaggggggcggagattatcagactcaaactaccaattgccgatcattgccttaatatgcaacttctcaggtgcttgtagaaaaactgcaaggcttaaccatggggatgttgaaactctttttcatgagtttgggcatgcccttcactctctgttgtcaagaacggaatatcagcatttctctggtactagggttgctcttgatgtggctgaaaccccctcaaacctatttgaatattatgcctgggactatcgtgtcttgaagacatttgctctagatgaaacaactggagatgcaataccagaaaagctggtaaaggcactaaatgcttctcggaacatgtttcctgctactgagctccagaggcagatcttctactctataatggacctaaccttgtttggcgagcaatcatccaagcctatggacacgatttccactgttgccgatttgagaaggaagcatacaagtgggaaatacgcagaaggcacacactggcatacacgatttactcatctcgtaacctacggtgctggctactatacctatctatatgctagatgttttgccacaactatatggcaagaagtatgccaagaagacccgttgtcccgcagtgcaggcagtgccatcagggacaaattcttgcggttcggcgggtcaaaggacccatcatccctgctgaaggattttgcaggtgatgccgtcattagaaactccgggagtggaataatcccgaacgctagttccttgtgcaaagaaattggattgtgaaatagcactgtgggggcggaggctggcatctttctgcttgagcttggctgaagggccaagaactaaacctcgagggcttgaggtagtttgagggagattggagatgatttaatcctctcctattcaattcacctctaaccggacaagtccgaacaagtcatgaaggggcagagtcgctggagttccggtgcttgacctctcggcatacattaatggtgtggtgctagcggaagatggttctcctagacatactttcttcaaagtttcacctgcggatggttttgcaatctgtcaaattttactagaggacggttgacggtaccatattattactcccattgcctgggatttttccttcaaaatgttatgatgaagtctgtcagccctgtagcttatagcactgattcataggagccataggtcttccttgctcgtttcatggaaatgagaccccgtttggtaaagattagtgcctttatttttgtcctatttagtctctgaattgccaaaaggtgggactaaaacataaacagaactattttagtctctagtctctcaaggagtgactaaaagagagtaaaccacataaatttcaccttttgtctctcctttattttagttgtactaatagtgtgagaatgctaaaagatattttgacactcttatatatgttttgaatactttt

SEQ ID NO: 126682 - DNA, 2557 bp, Zea Mays
aggttcaatgaaaatgtaatgaacaagccaggttttgtggatgtatatccagcttcacgaataacaaggaatatacagcatcatttcgagtctgtttcccgttttaatactagcaaactgatgaacactgagaagcaaaaaggcctaaggattgtaacagaaccaagaaatctgtcatcagcactaagatggatttctgatgaggaagtaacttttcttccacttgcagaacatctcttacattcatattaccaaattttgtatcttggataaagatgtctctatagcatcgaacaattcttgtatttcttatgtcaccactaacctttcgtctggatttattcaatgagtacagttgtatattattagtccagtgccagtggaaagctaactattttaaaatttccaaaggtcagaaaacaggtatatatcgttgggaactctgaacctcgtgaaaatattggcgttcttaatgaacttatacatgctcgtgatgaacttgcaaagattatgggatgcaaatcttatgctgaatttgctattcgtcctaacatggccgcgtcagccgatgtggttatgtcatttcttgaaaatttgagcaacactgttaagcataaagctgaagaggtttgaatggatccagctaatactggcatattttggcaaaatgcactgcggctcctgttgaaatgcatcattaaattctatgatccatctctcttgataacatctcttatgcaggaatttaagaccatacataatttcaagagaagaacatgtaatgaaaagagtgccgatctagaaccctgggatgaggattacttcattggaatgatgaaatcatctgtatatgacctggacgcttcagttattgcaaaatactttcccttgtcgcagtgcctaaaagggttaaatgttctcgttgaatcattatttggtgcaacatttcatcaaattcctatgagggatggggagtcatggcatccagatgtgataaagctccgtctccatcatcctgatgagggtgatttaggattcatgtatctggacctctactccagaaaggggaaacatccaggatgcgcacattttgctatccaaggggggcggagattatcagactcaaactaccaattgccgatcattgccttaatatgcaacttctcaggtgcttgtagaaaaactgcaaggcttaaccatggggatgttgaaactctttttcatgagtttgggcatgcccttcactctctgttgtcaagaacggaatatcagcatttctctggtactagggttgctcttgatgtggctgaaaccccctcaaacctatttgaatattatgcctgggactatcgtgtcttgaagacatttgctctagatgaaacaactggagatgcaataccagaaaagctggtaaaggcactaaatgcttctcggaacatgtttcctgctactgagctccagaggcagatcttctactctataatggacctaaccttgtttggcgagcaatcatccaagcctatggacacgatttccactgttgccgatttgagaaggaagcatacaagtgggaaatacgcagaaggcacacactggcatacacgatttactcatctcgtaacctacggtgctggctactatacctatctatatgctagatgttttgccacaactatatggcaagaagtatgccaagaagacccgttgtcccgcagtgcaggcagtgccatcagggacaaattcttgcggttcggcgggtcaaaggacccatcatccctgctgaaggattttgcaggtgatgccgtcattagaaactccgggagtggaataatcccgaacgctagttccttgtgcaaagaaattggattgtgaaatagcactgtgggggcggaggctggcatctttctgcttgagcttggctgaagggccaagaactaaacctcgagggcttgaggtagtttgagggagattggagatgatttaatcctctcctattcaattcacctctaaccggacaagtccgaacaagtcatgaaggggcagagtcgctggagttccggtgcttgacctctcggcatacattaatggtgtggtgctagcggaagatggttctcctagacatactttcttcaaagtttcacctgcggatggttttgcaatctgtcaaattttactagaggacggttgacggtaccatattattactcccattgcctgggatttttccttcaaaatgttatgatgaagtctgtcagccctgtagcttatagcactgattcataggagccataggtcttccttgctcgtttcatggaaatgagaccccgtttggtaaagattagtgcctttatttttgtcctatttagtctctgaattgccaaaaggtgggactaaaacataaacagaactattttagtctctagtctctcaaggagtgactaaaagagagtaaaccacataaatttcaccttttgtctctcctttattttagttgtactaatagtgtgagaatgctaaaagatattttgacactcttatatatgttttgaatactttt

SEQ ID NO: 126683 - DNA, 2135 bp, Zea Mays
cgttttaatactagcaaactgatgaacactgagaagcaaaaaggcctaaggattgtaacagaaccaagaaatctgtcatcagcactaagatggatttctgatgaggaaaaaacaggtatatatcgttgggaactctgaacctcgtgaaaatattggcgttcttaatgaacttatacatgctcgtgatgaacttgcaaagattatgggatgcaaatcttatgctgaatttgctattcgtcctaacatggccgcgtcagccgatgtggttatgtcatttcttgaaaatttgagcaacactgttaagcataaagctgaagaggaatttaagaccatacataatttcaagagaagaacatgtaatgaaaagagtgccgatctagaaccctgggatgaggattacttcattggaatgatgaaatcatctgtatatgacctggacgcttcagttattgcaaaatactttcccttgtcgcagtgcctaaaagggttaaatgttctcgttgaatcattatttggtgcaacatttcatcaaattcctatgagggatggggagtcatggcatccagatgtgataaagctccgtctccatcatcctgatgagggtgatttaggattcatgtatctggacctctactccagaaaggggaaacatccaggatgcgcacattttgctatccaaggggggcggagattatcagactcaaactaccaattgccgatcattgccttaatatgcaacttctcaggtgcttgtagaaaaactgcaaggcttaaccatggggatgttgaaactctttttcatgagtttgggcatgcccttcactctctgttgtcaagaacggaatatcagcatttctctggtactagggttgctcttgatgtggctgaaaccccctcaaacctatttgaatattatgcctgggactatcgtgtcttgaagacatttgctctagatgaaacaactggagatgcaataccagaaaagctggtaaaggcactaaatgcttctcggaacatgtttcctgctactgagctccagaggcagatcttctactctataatggacctaaccttgtttggcgagcaatcatccaagcctatggacacgatttccactgttgccgatttgagaaggaagcatacaagtgggaaatacgcagaaggcacacactggcatacacgatttactcatctcgtaacctacggtgctggctactatacctatctatatgctagatgttttgccacaactatatggcaagaagtatgccaagaagacccgttgtcccgcagtgcaggcagtgccatcagggacaaattcttgcggttcggcgggtcaaaggacccatcatccctgctgaaggattttgcaggtgatgccgtcattagaaactccgggagtggaataatcccgaacgctagttccttgtgcaaagaaattggattgtgaaatagcactgtgggggcggaggctggcatctttctgcttgagcttggctgaagggccaagaactaaacctcgagggcttgaggtagtttgagggagattggagatgatttaatcctctcctattcaattcacctctaaccggacaagtccgaacaagtcatgaaggggcagagtcgctggagttccggtgcttgacctctcggcatacattaatggtgtggtgctagcggaagatggttctcctagacatactttcttcaaagtttcacctgcggatggttttgcaatctgtcaaattttactagaggacggttgacggtaccatattattactcccattgcctgggatttttccttcaaaatgttatgatgaagtctgtcagccctgtagcttatagcactgattcataggagccataggtcttccttgctcgtttcatggaaatgagaccccgtttggtaaagattagtgcctttatttttgtcctatttagtctctgaattgccaaaaggtgggactaaaacataaacagaactattttagtctctagtctctcaaggagtgactaaaagagagtaaaccacataaatttcaccttttgtctctcctttattttagttgtactaatagtgtgagaatgctaaaagatattttgacactcttatatatgttttgaatactttt

SEQ ID NO: 126684 - DNA, 710 bp, Zea Mays
ccatcccactctctgtccctccggcgagtggcggcggcagagacggaggccgagtgagcagtacaacgccgccgacaccaatcacgagggtatatcaactacaagtagagggaggccaagcacgaaaccatcaaagctgaccaactgagcgcccgccgcaatgctctcgcgcgccgccgccatccgtcgcggcgctgcggcggcgttctccacagtctcggagaaaccggagacggggctatacggcttcgacgtgcttcgcacggcgaaggggttccgccgcttcgtggacgacgccatccatcggtcggacgaactcgtggcacgcgtcgcgcggctgccgtcgtccaccgagatagtgcggaccatggacgagatttccaatacagtttgttctgtcattgattcggccgagctgtgcaggaatacacaccctgatagggagtttgtggatgaggcagataaggcgtcgatgaggatttatgagcatcttcagtacctgaatacaaacactactttgtacaatgctgtactgaaagctgagggtgaaagtgtcctgctcacagaggaagctcgaagggcagcaactaccttgcatattgactttcaaaaaggagggattcatcttcctaaagataaacttgagaatgctaatcagctgaaccttgagattgcccagctgggtagaaagtaggtacattaattggaca

SEQ ID NO: 126685 - DNA, 1884 bp, Zea Mays
atggggtgcgcgcaggggaagtcctcgcggggctcgcccgcccgcagcgacggccgcggcgtggaccgcctgaagcgcgacaacgactaccgccccggctccagcgtgtcccgcctctccgacccgctcccggccaccgccgagagcgttccggctccggcagctccgccgaccaaagagcacgcccggcgagccgctgccgtcgtcccaggagggaagacaccggacgacggcaacggcgacgccgcggcacagcaggcgacgacggccgcaacgccggcgaccccgccactgctcccgccacacccgccgcggcgcgaggacgagctggtggacgggtggccgacgtggctcctggacaacgtcccccgcgaggcgctgcagggcatcgtgcccaagagcgccgacgcctacgacaagatcgagaaggtggggcagggcacgtacagcaacgtgtacaaggcgcgggagcgcgggacggggcggatcgtggcgctcaagaaggtgcggttcgacacgtcggagtcggagagcgtgcggttcatggcgagggagatccggttcctgcagcgtctggaccaccccaacgtgatgaagctggagggcatcgccacctcccggatgcaccgcagcatctacctcgtcttcgacttcatgtactccgacctcggcaggctcgtcttgcgctcccaacagcgcctcaccgagccgcagatcaagtgctacatgcagcagctgctcgcggggctgcagcactgccacgagcgcggcatcctgcaccgggacatcaagggctccaacctgctgatcgaccgccacggcgtgctcaagatcggcgacttcggcctcgccaactactacggcgctgggcgccggcacccgctcaccagccgcgtcgtcacgctctggtaccgcgcgcctgagctgctgctgggctccaccagctacggcgtcggcatcgacctctggagcgcggggtgcctcctcgccgagatgttcttcggcaagcccctcatgcccggcagcggcgaggtggatcagctgctgaagatcttcaggctgtgcgggtcgccgccggacgactactggcggaagatgaagctgtccccgtcgttcaagccccccaagccgtacaaggcaacgacgggcgagcggttccgcgacctgccgccatcgtcgctcggcctgctcgccactctcctcgcgctcgacccggccgcgcgcggcaccgccgggcaggccctgcagagcagcttcttcaccacgccgccgatgccgtgcgacctctcgtcgctccccgtcgtgtacaaggaggaggaggaggtcgactcgaggaagccgaggacgaggcagcgctcgcataggcggaaggacggcaacggcaagcggtcggagaccaacagcgggtctcctcctgagaaagaggcgcagcccatgcagccgttggacattaccatttctctgtccggtccaggtttccagcgcttgggtctcggtgcatctccactacgtgcccccctgaatttgttccaggaccaggaggatgatgaattaactggcacggcgaactcagtaactgacacgacgcgagaacatgacataggccaaggatcagctgccgctgtgatgactgccgctaaagcctcttctggcgttcacgactcatcatcatcagagaaaaccatcgtcaacggctcatccagcacagtcgcgaagcagctgccgacggcccgccactcgggcagcgacgacgacgatcacgggaacatccacctggttccggctccggacgaggaggaggccgatggcgagccggcgtccggcagcggcgtgaaccgcgtcggcccggagagcaagtcgtctgctttcgtgtcggacttcgag

SEQ ID NO: 126686 - DNA, 1767 bp, Zea Mays
atggggtgcgcgcaggggaagtcctcgcggggctcgcccgcccgcagcgacggccgcggcgtggaccgcctgaagcgcgacaacgactaccgccccggctccagcgtgtcccgcctctccgacccgctcccggccaccgccgagagcgttccggctccggcagctccgccgaccaaagagcacgcccggcgagccgctgccgtcgtcccaggagggaagacaccggacgacggcaacggcgacgccgcggcacagcaggcgacgacggccgcaacgccggcgaccccgccactgctcccgccacacccgccgcggcgcgaggacgagctgcgtctggaccaccccaacgtgatgaagctggagggcatcgccacctcccggatgcaccgcagcatctacctcgtcttcgacttcatgtactccgacctcggcaggctcgtcttgcgctcccaacagcgcctcaccgagccgcagatcaagtgctacatgcagcagctgctcgcggggctgcagcactgccacgagcgcggcatcctgcaccgggacatcaagggctccaacctgctgatcgaccgccacggcgtgctcaagatcggcgacttcggcctcgccaactactacggcgctgggcgccggcacccgctcaccagccgcgtcgtcacgctctggtaccgcgcgcctgagctgctgctgggctccaccagctacggcgtcggcatcgacctctggagcgcggggtgcctcctcgccgagatgttcttcggcaagcccctcatgcccggcagcggcgaggtggatcagctgctgaagatcttcaggctgtgcgggtcgccgccggacgactactggcggaagatgaagctgtccccgtcgttcaagccccccaagccgtacaaggcaacgacgggcgagcggttccgcgacctgccgccatcgtcgctcggcctgctcgccactctcctcgcgctcgacccggccgcgcgcggcaccgccgggcaggccctgcagagcagcttcttcaccacgccgccgatgccgtgcgacctctcgtcgctccccgtcgtgtacaaggaggaggaggaggtcgactcgaggaagccgaggacgaggcagcgctcgcataggcggaaggacggcaacggcaagcggtcggagaccaacagcgggtctcctcctgagaaagaggcgcagcccatgcagccgttggacattaccatttctctgtccggtccaggtttccagcgcttgggtctcggtgcatctccactacgtgcccccctgaatttgttccaggcccagacacgaatggcaatccctgtttctgctattagttccattgctaatgctcgctcacacgtgccccaggaccaggaggatgatgaattaactggcacggcgaactcagtaactgacacgacgcgagaacatgacataggccaaggatcagctgccgctgtgatgactgccgctaaagcctcttctggcgttcacgactcatcatcatcagagaaaaccatcgtcaacggctcatccagcacagtcgcgaagcagctgccgacggcccgccactcgggcagcgacgacgacgatcacgggaacatccacctggttccggctccggacgaggaggaggccgatggcgagccggcgtccggcagcggcgtgaaccgcgtcggcccggagagcaagtcgtctgctttcgtgtcggacttcgaggcggccgccgcggcgctacgcgcgtcggaggaactcccttcttccaattaa

SEQ ID NO: 126687 - DNA, 451 bp, Zea Mays
tgcatttcggccggccgcccgcccgccgctctagaggtgtcgccatcttcgttgccaattggcgaagcctgacgcctccatccagctgcgacattgccagtagacaccgctaactcatggccctgctcccgctgttcctcaggccggtggttcggttcgcggcgcgcgtggtggaaggtgggccggcggtcgcggtggcaacgatcctgcaccgcgccggcgcactgcccaggaaccggggcctggagcgcctcgtccgagacgacgcgctccacggccgcggacaggactgcatcgccagcttcgtcgtcggcgtcatgcgctgcctctgctagtagattcggttgcctagctagagctagagagaggggaagtggactccattgttcggagaaaattcaccttgaaatttgtagcaggaaacttgaattgcaatgctgaccctttacct

SEQ ID NO: 126688 - DNA, 447 bp, Zea Mays
taagagtctaatctctattcgggtctctctattaggtcctagcagattgtcgtggctaaactaggcccacatgtcagtcgtggtggtcgattggacccatccacccttctccctcctcgaccccttcctcgccaccgcactggagcagacaagctcgccggtgtccatgtgctccacgatgaatcagcacaagatgcagacgagttcgccggcgtcgaccagcccggacgcccacagtcctgccgagctgatcatcgggtcgtccctgttggtgccctccagcagcgcaagccgcgtgtacctaccgcatacctcggtggtgaggtatgcgtcacgcgggcactccagctccacgtgcgtgcgggcctcgccagccatggccggcgcgaagagggagccttggatcaggacagcggggcccaggccccttttctactagactagatc

SEQ ID NO: 126689 - DNA, 1936 bp, Zea Mays
attttttccagcagcaacagcaaacactgacgaactgagccctatctatatcaacctcacatggcctcccataccatctggcatcggtccaactattcagtccaattgccacacactgcctgacgcaagctcgctcgtccaagtccgacgttgataccattggccgctgcgccgccatggccgtgtcgccggaccagcagcagccacctgcaggggtagggtctcccttgccgtctcctcgcctccgcgtccgcgtccgcgacaccaccctcgtgccgccgtctccgtcaccaccggagacctcgctcccgctcaccttcttggacatcttctggctgcactccccgcccgtcgagcgcctcttcatctaccgcctcgcccccgacgctgacgtcgacgccatcatctccagactccgggactccttgcaccaggccgtccgcgccttctaccctctcgccggccgcctccgcctcacccccggcacgtccgaccgctacgagctgcactaccgcccgggtgacgccgtcaccttcaccgtcgccgagtgcgacgacgatgacgcggacgcgcacttcgacgccctcgccaccgacgagccccgcgaggttgccaagatcgccacgctcgtgccgccgctgccggagcgcggcgggctgttcgccgtccaggccacgctccttcccgcgcgccgcggcctctccatcggcgtcaccgtgcaccacgccgcctgcgacggctcgggctccacgcatttcctgcacacctgggcggtcgcctgcagagccggcgcagaagcgccgccgccgccgccgcctgtcatcgaccggtcactcatcgccgacccaaggcgcatgtacgacgtcttcatccaaggagcgccgagcactgaagagtacgagttcgtcaagatgtccgccgaccagctcttcgctacgttcgcgctgtccaaggacgaactgaagcgcatcaaggacgctgtggccgaggaggctgcgaggcgcggcgtcgcgccgccccggtgctcctctctagttgccaccttcggcttcgtctggtcgtgctaccagcaagccaaggaggccagcagcggcgccggagagttccctatgacctgcatggcctttcccgtcgaccaccgctcgcggatggagcctcccctgccggacaagtacctcggcaactgcgtcggcccagcgttcgcgctggcaccaacaggcgagctggcccaggccggcgcaggcgggttctttagcgcgtgcgccgccgtcgcctcctccatcgacgaagctgtacgcgacatcgagacatcaaacgtggaggtgtggtttgaccgcatcagggatttaatcccgatgggttttctgaccgtggccggttcgccgaggttccgcgtctacgatatggacttcggattcggccggccggcgaaggtggatgtcgtgtccgtggcgaggaccggcgcagtggcggtggcggagagttgggatggtaacggcgggatagaggttggggtctctctacagccggctgccatgaagaggtacaggaagtgcttcgcggatgctatcgcgtggctccaccagaggacatgagagcgacaactcgatctaatcaaatatggagaaacgggtcttttacggagtctatcatgtgatgaaaaatcaacttgcactttcttccttttaaattatactaccatattctagcttttcaactagataaaccttttctattcgtttagatatgcacactatctagatatgttataaaacacgattatgcatttaaaattatttaaaaagcttacactttaatatagtgagaggaataaggggttttgtttgttgcctcacatgtcacaattagtcacgtctaaagttaggtaagtttgactaagttaagcatatatttgatttcgagccacagctgtggt

SEQ ID NO: 126690 - DNA, 377 bp, Zea Mays
ggcttttctgaaaactttttgggggtacttccttactattaattgtaggttattaagtatattacaacttttctatttggcccaaaccatgatcataaggtttacatgatcttttgatcatggcttaaattagggttcccattgcctatgggggttttgctttagggttttgggagatccccacttagatgtgcatgataagctagggcatgacatccaaggtggattacacttgcttaggacctagaattccaagtttggtatactttgcccaattcaatcttcatgtgataatgggtgaaaagggggtaaccctggggtggacaccctgagtaacacctggggtgttacagccctccccccttaaaggaatctcg

SEQ ID NO: 126691 - DNA, 136 bp, Zea Mays
aatttttctaaccctggtcaaacaatattcctatttttccttctaatattgagttttgagtggttttcttatttaattcaaaacttcagaaaggaatacagaagccatgggttctattatttttatctgatagttc

SEQ ID NO: 126692 - DNA, 363 bp, Zea Mays
ggtgcaaaactcatcccatacccatacacattcgggtttcgggtccccaatgggtccccatccccaattaagggataactaggtattaacaggtagcacaaactatctagatttcagacatcaccacatcagcaagcactcatccatgaaccatgacttgccattttgccttattgggctaggacctggggcctaatgcgctgtcatgctaggattggtggccggctcggcctcaactcattcatacaaacatgacatgtgtacacgtatgaaatacccatgggtaatcgggttcggattattgcttcccaaacccatacccgtttacccaatgggtggagattttgtcccatatccataccc

SEQ ID NO: 126693 - DNA, 226 bp, Zea Mays
ctttactgataaatgaactactgaaaggcttccacaatgtctacagggaaaatgtaccaacatcaagttcatgtcctacagttcctctgcccaaaagaggggggcaaaaatgaactccctaaaactgcacacaaatacaagaggagcagagcatcctgtttcagagcatatcaatgtctggaatttggtgctgtatacattaatatgaatcgagtcattttgaaag

SEQ ID NO: 126694 - DNA, 444 bp, Zea Mays
atggcaagcagcgtcgcgtcggttcggccggtggcgctcggcgacgagccgatggagatcccccgcctgaagatcgacgccgagacgtcgcatctcctgcgcatcctgctggcgctgtggcgctggagcagagcaacctggcggaggcgggcagccatggtcgccgtcgtctgcgtcctcttattcatgtccgccacgcttgcgcaccgcgtcgtcgacgtctctgcctttaccaccggccggctccaacttcaccgccctcgttcgtacacgacggtctacgacctgcagcggttcgccacctcctccgacagtccgagcctccgacttcgacgcggcggtggccgacggcgacggcgacatggagtcagtaccccttgccttcacagattcgttgccttcacagcaacgccgccgcctgaagatctggactcagatacgtaa

SEQ ID NO: 126695 - DNA, 1831 bp, Zea Mays
cgacccaactctgtcctcacttctctcgggagccgggactcgggagattacttcgccgccgtcgcctcgcctccgcaaccgcgacacgacacacaccagcgccgccaccgcggaaggagcaaggttgaagaagaagcggcacccgccacagatacgccgcgcggcggcgccatggccgagctgcggcacgccacggcggcgacccgcgccaccagttccccatccaagcgcgacgccgaggccgcgtccgcgtcctcgcccttggtcgcgtccccccgcgtcgacggcggcaaggacggcctccgcccccagccaagaacgcgccgtacctgtgccgcaaggaggggattcggctccactgccccagggtgaggcagcgggactctctgtgggagaatcctcatgctgcagcaacttggtggaagccgtgtgctgagcgtcagagtcatgaagtctcagacctcgtgtcagagaatgaaacttctgggtttatatttattcatgccgagggtggattaaaccagcaacgtatagctatatgtaatgctgttgcaattgctaagataatgaatgccacacttattctgccagtgctaaagcaggaccaaatatggaaagatcaaacgaaattcgaagacatctttgatgtagaccattttataaattatttgaaggaggatgtgcgcattgttcgagatattcctgactggtttacagaaaaggatgagcttttcactagtataaagcgcactgtgaaaaatgtcccaaagtatgcatcagcacaattttatattgataatgtctttccaaggatcaaagagaaaaagataatgtcaatcaagccgtttgttgataggttaggatatgataatgttccaatggagattaaccgactgaggtgccgagttaattatcatgctttgaagtttctacctgacattgaagagatggctgacaagctagcaacaaggatgaggaatcgaacaggaagtttaaatccatacatggctcttcatttgcgatttgagaaaggaatggtgggcctttcattttgtgattttgctggaactagggaggagaaagctatgatggctacttacagacagcagcaatggccaaggcggtacaagaatggatctcacttatggtcactagcactagaaaagagaaaagaaggccgctgtccgcttgagccgggggaaataggaattattttgcgtgagatggggtatactaaggaaactcagatatatgttgcatcagggcaggtgtatggtggaaacaacagaatggcacccttgagaaatatgttccccaatctggttagcaaagaagatcttgctagcaaggaggagatggagcctttcaagaagcatgtaactagtcttgctgcactggacttcttggtgtgcctgaagtcggatgtgttcgtcatgacccacggtggcaatttcgccaagctgatcatcggctaccgccgctacatgggccgccacaggctcaagtcaatcaagccagacaagggtctcatgtccaagttcttcggggacccttacatgccttgggcgactttcgtggagaacgtgatgatcacccatgagacacgaaccgggctccccgaatccaccttcccacactatgacctatgggagaaccctctcaccccttgcatgtgtagagcttaaattatagactacgagtgatggtgcatagttattctttgttcatttgctgatatgcaaactgcaaattttgtgtagttttttaccactttttgatgtacgatttttttttaccaaagcaaagttcagttcatgcacaatcctcggca

SEQ ID NO: 126696 - DNA, 2059 bp, Zea Mays
attgatttttttcccaaatgatgaggatgagacagatgacatagttgaggtggctcttgctgaacttgagatgatagaacaatatagtgccttcatgtctcctgtcgcggctgcggacagcatgacacccaaaaagttcatggcgcttgtctctgctaaaatccaaacatacttttgcaggggcgggtcgatccagagggcggtgcggaggatggccggcggcggcggcggccggaggagacccggcgccttggcggacccgaggaccggcgacgcgtcgtcggcgtcggctagctgctccggggatgataccagcattggtagtgccactgccaagagggaaggggcacgaaggtgcatcatgcagcggtacaggtcccagctcgagcaggaagtcaagaaactgcaaaggcaactgcaagaagagattgatttacatctggcgttggcagatgccattacatataatgcggcgctgatacttaagtcgtctataaagcttccagataaggcgcatgagctattaattagcatatcctctttggaaatcgctatcacaaagcttgaagaggatctaaatcacctgcattaccaattataccatgcaaggaatgaaaggtttcttgcggaaaataagccaggatacttgctacctacaagatcagattgtcaaccctccacagcttgcaattgtacatgggaagaacctgaacaaatgttaagagaattgatattcagagattatcactcagtccaagaagatttttcaactgaacctgaagatcaacaggatgatgaaaaatacgttaaaggtagagaacgtgtatctctaaatatgctgctagaaaagcaccaagatatttcttcaactgggctgtttgtacaccgagatgaagagatgcaagaggcatgctctatggaaaaagaaggcgaagaagatcagaagatagatatgttaccatttaacctgcccaatttgaagaaaggcaacatgagtgaaaatctgtggaataatccaaatcagctctctgaagagatggtgctctccatgaaagatatattccttaatttatctacatcttccaagatgtcaccagaggagcctttttctaattcatcttcatcagcagagcatctatctggttcaacattgactactttgtcggattcatctgtaatagcctcagtgcagcccagtccttcaatgtacctgaaccacgatgatggtaactttgacccgtacaatgttaatggaaaggaagcacagagagacattggcagctatagttcagtagctgaagtgtcttggatgtatattggcaatgaacaacttgaatatgcatctggagctctgagaaagttcaggtttcttgtggagcaactatcaaaggttgacacttcttgtatgaactgtgatgaacggttagcattttggattaacctttacaatgcattaatcatgcatgcctatttggcatacggtgtccctgaaaacgacattaagcttttcgcgctaatgcaaaaggcctgttacacgatctgtgggcagcctgtcagtgcagctgaaatagagtttgtgattctgaaggtgaagactccagtgcaccggccacaactctccttgatgctggcccttcacaaatttaaaacatcagagaatctcaagaaatattcaatcgatggtactgagcctcgtgtgctctttgcactctgttgtgggatgttctcttcgcctgcggtaaggattttctctgctgaaaatgttcgagccgagctacaagaatcaatgagagactacatccgagcatctgttggtgtcaatgacaagggggagcttatggtccccaagttactgcagagctatgccaagggcattgtggaggactctctgcttgccgactggatctgccgtcatctaacactagaccaactcgctgcagtccaagatacatcgtcgtcacatacacagcgccttcttggagtgcgcagtttcagcgtcatcccattcgattcaagattccggtacctgttcttgttcgacaacagtagatgacagaac

SEQ ID NO: 126697 - DNA, 3322 bp, Zea Mays
ctcagcaggtctatggcgattcggcagcggcctatacagctgagttgccatgtcatcggctcatcgcctcgagaggtgacgacaccgctactaatcctgctgctgctgctgcaatgtctctgcagccgcgccggcgcgtgcacgggggaggagagggaggccctgctgtccgtcctcgccgacctctcgccgccgcccggcgacggcctgaacgcgtcgtggcgcggcggctcgcccgactgctgcacgtgggacggcgtgggctgcggcagcgatggcgcggtcacgcgcgtctggctgccgcgccgcgggctcagcggcaccatctcgccggcgctcgccaacctcagcgcgctcacgcacctcaacctctccggcaacagcctcggcggcgcgttcccggcggcgctgctctcgctgcccagtgccgccgttgtcgacgtcagctacaaccgcctgtccggctcgctgccggacctgccgccgcccgtgggcgtgctgccgctgcaggcgctcgacgtgtccagcaacaacctggcggggcggttcccttccgcgatatgggcccacacgccgagcctcgtgtccctcaacgcgagcaacaacagcttccatggcgcgatcccgtcgttctgcgcgagcgccacggccctcgccgtccttgacctctccgtgaaccagctcggcggaggcatccccgccgggttcggcaactgctcgcagctgcgtgtcctcagcgtcggccggaacaacctaaccggagagctccccagcgacgtcttcgacgtgaagccgctgcagcagctgctgatcccgtcgaacaagatacaggggaggctcgaccccggacgcatcgccaagctgagcaacctcgtctctctcgacctcagctacaacatgttcaccggagagctgcccgagtccatcagccagctgcccaagctggaggagctccggcttgggcacaacaacctgaccgggacgctcccgccagcgctcagcaactggaccgggctccggtgcctcgacctccggtcgaacagctttgtcggggacctcgacgccgttgacttctccggcctcggcaacctcaccgtcttcgacgtggccgccaacaacttcaccgccacgatcccgcagagcatctactcctgcacgtcgctgaaggcgctccgctttggcggcaaccagatggaagggcaggtcgcgccggagatcggcaacctgcgccggctccagttcctgtccttgaccataaactcgttcaccaacatcagcggcatgttctggaacctccaggggtgcgagaacctcaccgcgcttctagtgtcgtacaacttctacggcgaggccctgctggacgccggctgggtcggggaccatctcaggggtctccggcttctggtgatggagaactgcgagctgacgggtcagataccaacgtggctgtcgaagctgcaggacctcagtatcttgaatctcggcgataaccgcctcaccggcccgatcccgcgctggatcggcggcatgaagaagctctactacctggacgtgtccggcaatctgctgtccggtgggattccgccgtcgctggcggagttgccgcttctcacgtcggagcaggccatggcaaacttcagcacaggccacatgccactcaccttcaccctgacgcccaacaacggagcggcgagcaggcaaggccgcgggtactaccagatgtccggcgtcgccacgacgctcaacttcagcaacaactacctcaccggcacgataccgcgcgagatcgggcggctggtgactctgcaggtgcttaacgtcggcaacaacaacctctccggcggaatcccgccggagctctgcagccttaccaagctgcagtttctgatcctgcgccggaaccgtctgacggggccaatcccgccggcgctcaaccggctcaacttcctcgccgtcttcagcgtctcgtacaacgatctggaggggccgattccgacgggcggccagttcgacgcgttcccgccggggagctttcgggagaaccccaagctctgcggcaaggtgatcgccgtcccgtgtacgaagcccaatgccggaggcgtgtcggcttcgtccaaactagttagcaaaaggactctcgtgaccatcgtccttgcagtttgctctggagtggtcgccatcgtcgtcttggcaggatgcatggtgatcgccgtcaggagggtgaaaccgaaggggtcagtcgacgacgccggcaagtttgcggaggcgtccatgttcgactcgacgacagacttatacggcgacgactccaaggacacggtcctgttcatgtcggaggccggcggcgacgcggcgaggcatgtcacgttctcggacatcctcatggcgaccaacaacttgggcccggcgagcatcatcgggtcgggcggctatggcctggtgtacctcgcggagctggaggacggcacgcgcctcgcggtgaagaagctcaacggcgacatgtgcctggcggatcgcgagttccgcgcggaggtggagacgctgtcgtcggcgtcggcgcggcacgagaacctggtcccgctccagggcttctgcatccgcggccggctgcggctgctgctgtacccgtacatggcaaacggcagcctgcacgactggctccacgaccggcccggcggcgcggaggcgctgcggtggcgggaccggctccggatcgcgcggggcacgagccgcggcgtgctccacatccacgagcactgcacgccgcggatcgtgcaccgggacatcaagtccagcaacatcctcctggacgagtccggcgaggcccgggtggcggacttcgggctcgccaggctgatcctccccgaccgcacccacgtgacgacggagctggtgggcacgccggggtacatcccgccggagtacgggcaggcgtgggtggccacgcggcgcggggacgtgtacagcttcggcgtcgtgctgctggagctgctcacgggcaggcgccccgtggagctggtgccggcgcagcggcagcagtgggagctggtcgggtgggtggcgcggatgcggtcacaggggagacacgcggatgtgctggaccaccggctcaggggcggcggcgacgaggcgcagatgctgtacgtgctcgacctcgcctgcctctgcgtcgacgccgcgcccttcagccggccggcgatacaggaggtggtcagctggctcgagaacgtcgacaccatcggcgcgccgtccgaagatgtaaaaatctcgggtggccacggacaaacttgaaattggaataactccgcgtccttttgtgatc

SEQ ID NO: 126698 - DNA, 86 bp, Zea Mays
ataattggcaacaatatacaacgagctactgccttgcatgtaccgagagtttatttataccacagctgaatactagcaaaccaata

SEQ ID NO: 126699 - DNA, 766 bp, Zea Mays
gcggtgaacgcccgcgacgccttccccggccgcggcggcctccccgcccgcacagccactggccgtgacggagcggcccctcccgttcctcatggattcgcgcgcgttcttcctttctgggcgagggcgaccaccggaaggcagcagccggcaaccgcgactgttgacatttgcgttagagctctacgtgcaaaagtccaacttcgctgtacgaaggcttagctgttatccttctctgggtcgtcatcaaacttcggaagttgccacagaatatctttttccagagcccagatctggggggaaaaaggcgaaagcaacagccgatcaggcgcccaagattcgcgtttccagtgggcacttgtggagggagtggcaggtgcatcgaagagcactacacactcatcttggcagcgcggtctgtggctgattgagcaagcagcaagtggatggaggaggccggcaggataatggcgcggccgggggtggtgtggcccacggctgtgcccggccggggccgtttacttttggcccccttggtgcgtcgggtgatgtgtacgtctgcggaaggaaagcgtctctgtttgccttggccctacggcgcagcgtctctgttcaaggaaaaaaaaagagtggaattttatatctggtcagatttaaaactatcgtagtttaactaaaactttttaaaaactaatatggcatcaaactagtacgctataaaaacaatataatagtacttatttgttatggtaataaatattagtaa

SEQ ID NO: 126700 - DNA, 843 bp, Zea Mays
gcggtgaacgcccgcgacgccttccccggccgcggcggcctccccgcccgcacagccactggccgtgacggagcggcccctcccgttcctcatggattcgcgcgcgttcttcctttctgggcgagggcgaccaccggaaggcagcagccggcaaccgcgactgttgacatttgcgttagagcatggaggaggaagaggaagaagaagctgtttgctctctctggtggggttgatctttcctcgtcttcttgttccccgaggaatagtggcaaagctctacgtgcaaaagtccaacttcgctgtacgaaggcttagctgttatccttctctgggtcgtcatcaaacttcggaagttgccacagaatatctttttccagagcccagatctggggggaaaaaggcgaaagcaacagccgatcaggcgcccaagattcgcgtttccagtgggcacttgtggagggagtggcaggcgcggtctgtggctgattgagcaagcagcaagtggatggaggaggccggcaggataatggcgcggccgggggtggtgtggcccacggctgtgcccggccggggccgtttacttttggcccccttggtgcgtcgggtgatgtgtacgtctgcggaaggaaagcgtctctgtttgccttggccctacggcgcagcgtctctgttcaaggaaaaaaaaagagtggaattttatatctggtcagatttaaaactatcgtagtttaactaaaactttttaaaaactaatatggcatcaaactagtacgctataaaaacaatataatagtacttatttgttatggtaataaatattagtaactgtatttatttatttat

SEQ ID NO: 126701 - DNA, 773 bp, Zea Mays
gcaagctggccatcgagcagggggctcattcatccgcacagaccggcacccagctcaagtcacccccgaaacgcaagctaagcgcgcagccatggcggcggctccagagcggccgctggcggtggacttcgaggcgctgagctacatcagcagcctggtggaggcgttccaggcgttcgactccgacaacgacgggctggtgacggcgcccgagctccggggcctgctggcgtcgctgggcctggccaagtcggaggccgaggcgcgcgacatgctggcgcgcgccgacgccgaccgcgacggccgtctcagcgtcgaggagttcctggacgtgatgaacgccggggagctcggactgggcgcgctcggggcggtgctgcagtcggcgctccccacgctggaggccgcgggaggcgcgctggtcggcgcggacgagctcgcccgggcgctcggcgccctcggcagcgctagcgccgaggactgcgcggctattgttgagtgcctggacggcgacggcgacggcgccatcaccattgaggagttcaggctcatggccgacctgctctaggtctagcttggagctagcccaggctgcgcacgtacgcacgcgtggaacaccatgccaaaggtttgctgtgtagatcgaccatctactcagatcgacaataatcaaacaagagctacacggtttgtgtgtgtctatgctaatcgagttattgaactgtgtgaacctcaactatgtgtctgcttacggtggaatctattcatccaga

SEQ ID NO: 126702 - DNA, 1614 bp, Zea Mays
gcgcgggcccgtcccggcgctaataatgccaagcccccacctagacgacgcgcccattcctccacctccctccattttgccgccgctgccgctccagcaccagcctgctccggcgcagcacctcagcccaggcgcccatcgcttcgccagtctcatacggccatggaccgcggcggccacgcggcgctgctgctgctgctgctggcgctggcggtgatccccgtgacgggcgccgccggcgcggcgttcctggaggaggacgcgatcctgggcgccgtggagcgcgcgatgatgcgcggcggcggggggaagggcgccgcgaccgcgaacgcgagcgggaggcaccagcaccggcgccagcgctacggcgtgggggcgccgtggagggaggagatcgcggggctggcggggcggcccgagctggcggcgtggctgcgctcggtgcggcgccggatccacgagcgccccgagctggcgtacgaggaggtggagaccagccgcctggtccgcgacgagctgggcgcgctgggcgtcgggttccgccaccccgtcgcgcgcaccggcgtcgtcgccacgctcggcaccggccgcccgcccgtcgtcgcgctccgggccgacatggacgcgctgcccatccaggaggccgtggagtgggagcacaggagccgggtccccgggaagatgcacgcgtgcggccacgacgcgcatgtggccatgctgctcggcgccgccagcatcctcaaggctcgcgagcaccaactcaagggcacggtgaagcttctgttccagccggcggaggagtcgggctgcggcgcgaagcggatgatcgaggacggcgcgctggagggcgtggaggccatcttcgccgtgcacgtgtcgcaccagcacccgacgtccgtggtcgggtccaggacgggggccctcctcgccggctgcggcttcttcaaggccgtgatacgcggcggcggcggcggcggcgaccgggcgtccgaccccgtcgtcctggccgccgcctccaccgtcatcagcctgcagggcatcgtctcccgcgaggcggacccgctggactcgcaggtggtgtcggtggcggtggtgaacggcggcagcgagcaggcccagcctcaggagcaggagctggtgctgggcggcacgttccgcgccttctccaacgccagcttctaccagctgcggcggcggatcgaggaggtggtcacggcgcaggcgcgcgtgcacgggtgcgccgcgtccgtcgacttcttcgagggccagagcttctacccgccaacggtgaacgacgcgcgcatgtacgcccacgtgcggcgcgtggcgaccgacctcctgggcgcgcaggcgtaccgcgacgtgccgcccatgatgggcgccgaggacttctccttctactcgcaggccgtgcccgccgggttctactacatcggggtgcgcaacgagacgctgggatccgtgcacacgggccactccccctacttcatgatcgacgaggacgtgctccccaccggcgcagccgtgcacgccgccatcgccgagaggttcctcgccgaacacgactccatcatgggcgtggccgcctccgacgaccaggacccctaggccgag

SEQ ID NO: 126703 - DNA, 1746 bp, Zea Mays
gcgcgggcccgtcccggcgctaataatgccaagcccccacctagacgacgcgcggaaaaaaaatcagccactgccgtcgcccggcctggccgcgcaatttaatccccgccattcctccacctccctccattttgccgccgctgccgctccagcaccagcctgctccggcgcagcacctcagcccaggcgcccatcgcttcgccagtctcatacggccatggaccgcggcggccacgcggcgctgctgctgctgctgctggcgctggcggtgatccccgtgacgggcgccgccggcgcggcgttcctggaggaggacgcgatcctgggcgccgtggagcgcgcgatgatgcgcggcggcggggggaagggcgccgcgaccgcgaacgcgagcgggaggcaccagcaccggcgccagcgctacggcgtgggggcgccgtggagggaggagatcgcggggctggcggggcggcccgagctggcggcgtggctgcgctcggtgcggcgccggatccacgagcgccccgagctggcgtacgaggaggtggagaccagccgcctggtccgcgacgagctgggcgcgctgggcgtcgggttccgccaccccgtcgcgcgcaccggcgtcgtcgccacgctcggcaccggccgcccgcccgtcgtcgcgctccgggccgacatggacgcgctgcccatccaggaggccgtggagtgggagcacaggagccgggtccccgggaagatgcacgcgtgcggccacgacgcgcatgtggccatgctgctcggcgccgccagcatcctcaaggctcgcgagcaccaactcaagggcacggtgaagcttctgttccagccggcggaggagtcgggctgcggcgcgaagcggatgatcgaggacggcgcgctggagggcgtggaggccatcttcgccgtgcacgtgtcgcaccagcacccgacgtccgtggtcgggtccaggacgggggccctcctcgccggctgcggcttcttcaaggccgtgatacgcggcggcggcggcggcggcgaccgggcgtccgaccccgtcgtcctggccgccgcctccaccgtcatcagcctgcagggcatcgtctcccgcgaggcggacccgctggactcgcaggtggtgtcggtggcggtggtgaacggcggcagcgagcaggcccagcctcaggagcaggagctggtgctgggcggcacgttccgcgccttctccaacgccagcttctaccagctgcggcggcggatcgaggaggtggtcacgccgccatcgccgagaggttcctcgccgaacacgactccatcatgggcgtggccgcctccgacgaccaggacccctaggccgagcgcggtgggaaccgcgtggggagtttggccccgtcgctcggtcggcacggcagggatggtggcggaatgcgggctcgggctgctttttagattttgtggccgatgggctcttggtgggccgacctgtccgcgggctgacgtgcccacggttcaggttttttttccctccgtgttccgtttgggcgagcaaggaaaggaaccatgctgtgctggtgcagtgatgctgatgcaaatagtaggctgctctacgtatgtgtttttgtccctttttgggatgtcctgaaaactcatgatgtatagcacggtagctcctgcctacttggtagcaggacctctctggctgccacgcatgtttatgcactttcctctttattattatatcaatctattatt

SEQ ID NO: 126704 - DNA, 1691 bp, Zea Mays
gcgcgggcccgtcccggcgctaataatgccaagcccccacctagacgacgcgcccattcctccacctccctccattttgccgccgctgccgctccagcaccagcctgctccggcgcagcacctcagcccaggcgcccatcgcttcgccagtctcatacggccatggaccgcggcggccacgcggcgctgctgctgctgctgctggcgctggcggtgatccccgtgacgggcgccgccggcgcggcgttcctggaggaggacgcgatcctgggcgccgtggagcgcgcgatgatgcgcggcggcggggggaagggcgccgcgaccgcgaacgcgagcgggaggcaccagcaccggcgccagcgctacggcgtgggggcgccgtggagggaggagatcgcggggctggcggggcggcccgagctggcggcgtggctgcgctcggtgcggcgccggatccacgagcgccccgagctggcgtacgaggaggtggagaccagccgcctggtccgcgacgagctgggcgcgctgggcgtcgggttccgccaccccgtcgcgcgcaccggcgtcgtcgccacgctcggcaccggccgcccgcccgtcgtcgcgctccgggccgacatggacgcgctgcccatccaggaggccgtggagtgggagcacaggagccgggtccccgggaagatgcacgcgtgcggccacgacgcgcatgtggccatgctgctcggcgccgccagcatcctcaaggctcgcgagcaccaactcaagggcacggtgaagcttctgttccagccggcggaggagtcgggctgcggcgcgaagcggatgatcgaggacggcgcgctggagggcgtggaggccatcttcgccgtgcacgtgtcgcaccagcacccgacgtccgtggtcgggtccaggacgggggccctcctcgccggctgcggcttcttcaaggccgtgatacgcggcggcggcggcggcggcgaccgggcgtccgaccccgtcgtcctggccgccgcctccaccgtcatcagcctgcagggcatcgtctcccgcgaggcggacccgctggactcgcaggtggtgtcggtggcggtggtgaacggcggcagcgagcaggcccagcctcaggagcaggagctggtgctgggcggcacgttccgcgccttctccaacgccagcttctaccagctgcggcggcggatcgaggagccgtgcacgccgccatcgccgagaggttcctcgccgaacacgactccatcatgggcgtggccgcctccgacgaccaggacccctaggccgagcgcggtgggaaccgcgtggggagtttggccccgtcgctcggtcggcacggcagggatggtggcggaatgcgggctcgggctgctttttagattttgtggccgatgggctcttggtgggccgacctgtccgcgggctgacgtgcccacggttcaggttttttttccctccgtgttccgtttgggcgagcaaggaaaggaaccatgctgtgctggtgcagtgatgctgatgcaaatagtaggctgctctacgtatgtgtttttgtccctttttgggatgtcctgaaaactcatgatgtatagcacggtagctcctgcctacttggtagcaggacctctctggctgccacgcatgtttatgcactttcctctttattattatatcaatctattatt

SEQ ID NO: 126705 - DNA, 2084 bp, Zea Mays
gcgcgggcccgtcccggcgctaataatgccaagcccccacctagacgacgcgcggaaaaaaaatcagccactgccgtcgcccggcctggccgcgcaatttaatccccgccattcctccacctccctccattttgccgccgctgccgctccagcaccagcctgctccggcgcagcacctcagcccaggcgcccatcgcttcgccagtctcatacggccatggaccgcggcggccacgcggcgctgctgctgctgctgctggcgctggcggtgatccccgtgacgggcgccgccggcgcggcgttcctggaggaggacgcgatcctgggcgccgtggagcgcgcgatgatgcgcggcggcggggggaagggcgccgcgaccgcgaacgcgagcgggaggcaccagcaccggcgccagcgctacggcgtgggggcgccgtggagggaggagatcgcggggctggcggggcggcccgagctggcggcgtggctgcgctcggtgcggcgccggatccacgagcgccccgagctggcgtacgaggaggtggagaccagccgcctggtccgcgacgagctgggcgcgctgggcgtcgggttccgccaccccgtcgcgcgcaccggcgtcgtcgccacgctcggcaccggccgcccgcccgtcgtcgcgctccgggccgacatggacgcgctgcccatccaggaggccgtggagtgggagcacaggagccgggtccccgggaagatgcacgcgtgcggccacgacgcgcatgtggccatgctgctcggcgccgccagcatcctcaaggctcgcgagcaccaactcaagggcacggtgaagcttctgttccagccggcggaggagtcgggctgcggcgcgaagcggatgatcgaggacggcgcgctggagggcgtggaggccatcttcgccgtgcacgtgtcgcaccagcacccgacgtccgtggtcgggtccaggacgggggccctcctcgccggctgcggcttcttcaaggccgtgatacgcggcggcggcggcggcggcgaccgggcgtccgaccccgtcgtcctggccgccgcctccaccgtcatcagcctgcagggcatcgtctcccgcgaggcggacccgctggactcgcaggtggtgtcggtggcggtggtgaacggcggcagcgagcaggcccagcctcaggagcaggagctggtgctgggcggcacgttccgcgccttctccaacgccagcttctaccagctgcggcggcggatcgaggaggtggtcacggcgcaggcgcgcgtgcacgggtgcgccgcgtccgtcgacttcttcgagggccagagcttctacccgccaacggtgaacgacgcgcgcatgtacgcccacgtgcggcgcgtggcgaccgacctcctgggcgcgcaggcgtaccgcgacgtgccgcccatgatgggcgccgaggacttctccttctactcgcaggccgtgcccgccgggttctactacatcggggtgcgcaacgagacgctgggatccgtgcacacgggccactccccctacttcatgatcgacgaggacgtgctccccaccggcgcagccgtgcacgccgccatcgccgagaggttcctcgccgaacacgactccatcatgggcgtggccgcctccgacgaccaggacccctaggccgagcgcggtgggaaccgcgtggggagtttggccccgtcgctcggtcggcacggcagggatggtggcggaatgcgggctcgggctgctttttagattttgtggccgatgggctcttggtgggccgacctgtccgcgggctgacgtgcccacggttcaggttttttttccctccgtgttccgtttgggcgagcaaggaaaggaaccatgctgtgctggtgcagtgatgctgatgcaaatagtaggctgctctacgtatgtgtttttgtccctttttgggatgtcctgaaaactcatgatgtatagcacggtagctcctgcctacttggtagcaggacctctctggctgccacgcatgtttatgcactttcctctttattattatatcaatctattattacacggacggttatggtcgaac

SEQ ID NO: 126706 - DNA, 1060 bp, Zea Mays
ttttgccgccgctgccgctccagcaccagcctgctccggcgcagcacctcagcccaggcgcccatcgcttcgccagtctcatacggccatggaccgcggcggccacgcggcgctgctgctgctgctgctggcgctggcggtggtgaacggcggcagcgagcaggcccagcctcaggagcaggagctggtgctgggcggcacgttccgcgccttctccaacgccagcttctaccagctgcggcggcggatcgaggaggtggtcacggcgcaggcgcgcgtgcacgggtgcgccgcgtccgtcgacttcttcgagggccagagcttctacccgccaacggtgaacgacgcgcgcatgtacgcccacgtgcggcgcgtggcgaccgacctcctgggcgcgcaggcgtaccgcgacgtgccgcccatgatgggcgccgaggacttctccttctactcgcaggccgtgcccgccgggttctactacatcggggtgcgcaacgagacgctgggatccgtgcacacgggccactccccctacttcatgatcgacgaggacgtgctccccaccggcgcagccgtgcacgccgccatcgccgagaggttcctcgccgaacacgactccatcatgggcgtggccgcctccgacgaccaggacccctaggccgagcgcggtgggaaccgcgtggggagtttggccccgtcgctcggtcggcacggcagggatggtggcggaatgcgggctcgggctgctttttagattttgtggccgatgggctcttggtgggccgacctgtccgcgggctgacgtgcccacggttcaggttttttttccctccgtgttccgtttgggcgagcaaggaaaggaaccatgctgtgctggtgcagtgatgctgatgcaaatagtaggctgctctacgtatgtgtttttgtccctttttgggatgtcctgaaaactcatgatgtatagcacggtagctcctgcctacttggtagcaggacctctctggctgccacgcatgtttatgcactttcctctttattattatatcaatctattattaca

SEQ ID NO: 126707 - DNA, 1869 bp, Zea Mays
ctcatgcatgcttcccttcttgagagagaggaaaaaaacgtgatcgtcctttgttctagccccaccacctacacaacactacacttgccctggtcctgtggtcctcgcgacgacgatgcaacggggatggaaacacacgacgtgatggcagacggctggctgttgttgagttcgtcaggaccagcagctgtggtcaccgaatctcgagggaccattcacggccaccgcacccacccatctcagacagacgcagagagagagagagggggagagcagcggccagcggggtaaaccaaaaaaaaggagggctttctggttccttgcccgaaatggcatgagccgttggtaaacccgggggcgagcacgccgatttcgcccggggggagaagatccgcctgagtgcccagaacgggcacttcttccacgcccaaaaagctcgaggacgatgcaatgctgactgtgtgtggctgtggctgcaggaggccgtggagtgggagcacaggagccgggtccccgggaagatgcacgcgtgcggccacgacgcgcatgtggccatgctgctcggcgccgccagcatcctcaaggctcgcgagcaccaactcaagggcacggtgaagcttctgttccagccggcggaggagtcgggctgcggcgcgaagcggatgatcgaggacggcgcgctggagggcgtggaggccatcttcgccgtgcacgtgtcgcaccagcacccgacgtccgtggtcgggtccaggacgggggccctcctcgccggctgcggcttcttcaaggccgtgatacgcggcggcggcggcggcggcgaccgggcgtccgaccccgtcgtcctggccgccgcctccaccgtcatcagcctgcagggcatcgtctcccgcgaggcggacccgctggactcgcaggtggtgtcggtggcggtggtgaacggcggcagcgagcaggcccagcctcaggagcaggagctggtgctgggcggcacgttccgcgccttctccaacgccagcttctaccagctgcggcggcggatcgaggaggtggtcacggcgcaggcgcgcgtgcacgggtgcgccgcgtccgtcgacttcttcgagggccagagcttctacccgccaacggtgaacgacgcgcgcatgtacgcccacgtgcggcgcgtggcgaccgacctcctgggcgcgcaggcgtaccgcgacgtgccgcccatgatgggcgccgaggacttctccttctactcgcaggccgtgcccgccgggttctactacatcggggtgcgcaacgagacgctgggatccgtgcacacgggccactccccctacttcatgatcgacgaggacgtgctccccaccggcgcagccgtgcacgccgccatcgccgagaggttcctcgccgaacacgactccatcatgggcgtggccgcctccgacgaccaggacccctaggccgagcgcggtgggaaccgcgtggggagtttggccccgtcgctcggtcggcacggcagggatggtggcggaatgcgggctcgggctgctttttagattttgtggccgatgggctcttggtgggccgacctgtccgcgggctgacgtgcccacggttcaggttttttttccctccgtgttccgtttgggcgagcaaggaaaggaaccatgctgtgctggtgcagtgatgctgatgcaaatagtaggctgctctacgtatgtgtttttgtccctttttgggatgtcctgaaaactcatgatgtatagcacggtagctcctgcctacttggtagcaggacctctctggctgccacgcatgtttatgcactttcctctttattattatatcaatctattattacacggacggttatggtcgaac

SEQ ID NO: 126708 - DNA, 737 bp, Zea Mays
gcctctctaactaaagtaaccactgcattgtcaacttcttcttacctaactgcaaacctattctatcttcacattgtggatgtcaaaattccattgagataagcaatgggttctactaatttaaatatgagaaaaatgggtactgcaatgatggagaaattcaataagtatgggaagaaaagaacaatgttatggtcattgctactatcctagatccaaggtataagatgatatatattgagtggtgctttggcaagatttttgatacataccaagttggaattgagatagaagaagttagaggtgaactagaaaagttgtttgaagactatgagatgcaacatagagagagaaaagctgctcaaagcaagcctagtgcatcttcatccttgaccacagatagatcatgtagttttccttttgcttcatgtgagtttcagtcatacttatcatctactgaagcgaacccatcaaagagtgagttgctcatctatttggatgaaacaaatgtgagtttagctgacaaggagtttgatttgcttaactggtggaaggttaactcatatagatttccagtggtgtcgaggatggcaaagaagttcttaactgttcctggtacctcagtgtcttcagagtctacttttagcactagtggtcgaactctagatgactatcgtagctctctaagcccttctatggtggaggcattggtatgctcctctagttggattcgaggt

SEQ ID NO: 126709 - DNA, 1494 bp, Zea Mays
tccttatccgatgctcttatcctgcgttctgtggcctctgctcagctgctcgtagatggcgacaaactcacccgccctcacaaagcgcccttcacgacacgcacccacccaccagacagacagaggagaggagaaagggcaaaaggcaacaccgcccgcgacgaccacgatggcagcctcgctccaagtccaagccgcggccaccttgatgcaaccggccaagatcggcggccgggcgccgtccgcctcgctgccgtcgtcccgcccgtcgtcgcaactcgccagggcgttcggcgtcgacgccggcgccgccaggatcacgtgctccctccagtccgacgtcagggacgtcgccagcaagtgcgtcgacgccgccaagctcgccggcttcgcgctcgccacctcggcgctcctcgtctcgggcgcgagcgcggagggcacgcccaagaggctgacctacgacgagatccagagcaagacgtacctggaggtgaagggcacgggcacggcgaaccagtgcccgaccatcgacggcggcgtggactcgttcccgttcaagcccggcaagtaccagatgaagaagctgtgcctggagccgacgtccttcaccgtcaaggcggagggcatcgccaagaacgcgccgcccgagttccagaagaccaagctcatgacccgcctcacctacacgctggacgagatcgagggcccgctcgaggtcgcctccgacggcaccctcaagttcgaggagaaggacggcatcgactacgccgccgtcaccgtgcagctcccgggcggcgagcgcgtgcccttcctcttcaccgtcaagcagctcgtcgccaccggcaagccggacagcttcggcgggcccttcctcgtgcccagctaccgcggctcctccttcctcgaccccaagggccgcggcggctccaccggatacgacaacgccgtcgcgctccccgccggaggcagaggcgacgaggaggagctccagaaggagaacatcaagaacgccgcctcgtccacgggcaacatcacgctgagcgtcaccaagagcaacccggacaccggcgaggtcattggcgtattcgagagcgtgcagccgtcggacaccgacctcggggctaaggcgcccaaggatgtcaagatccagggggtctggtacgcgcagctcgagtgattcgttttaactgttagaggcgtcggaccgtcatggagaacttttgagagaggaggaggaatcgtgtatgtaactattaatgcaaattcgggctgttggtttttaatttcagtttgggtttcttctttctttcttgtgtactccagtggactcccgtgtgcaaacacgaagagtggctgtttgacaccagagattaattgttacttcctccgtctcagattataatatattttgatctttttagatacacttttactatatacttaaacagaagtatatattcagatgcacataaatatggtaatggatcacgatct

SEQ ID NO: 126710 - DNA, 609 bp, Zea Mays
atggacgctgaggacatggaggatgtacaagcccccacggccgtccaggttgtcaaaccagttgattccttcagtataaaccagaaatacttcaagatgtgcccaaggaaacaaaaaagatctgaagctgccgaaaaaggacttgtaggattgggaatgacagtattttttacttttgccaggcatgtgaaggcaacctatgaaatggggttaactgatatttgtagaaatttaaaaggctatgaattgcagttctggccattttttggctatggtgaaaagattttagtcgttttctcatatgtctttctcaagaatgggccaaggttgcggtgacttgctcttgacacttttagtaaggaagctgcataatgctcttacttctcttaacaattttccagttataatgagccaccacttcaagctaaggagcagtattgctcatatccctacaaggcactcaacaattactccatgtatgcgattagacctcgtgttgctattataatgggatctcagactgatcttcctgtgatgaaagttgttgagagggtttcaaaagagttcaacataccttgtgaggatgtagagattcttcgtagagtgtag

SEQ ID NO: 126711 - DNA, 2570 bp, Zea Mays
ccggtaccggccggcatgagctccacctcatcgggccgccgcgccccctcatcttcggcggcggtcgcctcgtcgccgggacagaagcgggcgagggatgaggccagcagcgggtccccatccgaccccgacgccgccaaaaaccctcgccgcgcttttgcctcctccccgttcgccgacttcggcacctacatggctgcgaagaacagcaagctcgctgcgcagttcgatgccgacgccaacacctcaggcacggacgccggcggtctattcgatggcgtctccatcttcgtggacggcttcacagtcccttctagccaggagctgaaagagattatgctgaacaatggaggccggtttgtcaactacttttccaggcacacggtaacacacattgtttgcagcaacctgcctgatagcaaaatgaagaatctgagagcattcagcagaggacttcctgttgttaagccagcatgggtggtggattccctggcagagaaccggctcctcaactgtgctccttatcaaataaatcagaatagttcttcaagccgaaagcagatgaagctttcttctttcttttctgagaaacaaaatgaaatatgccacaagggggaacaaaacaaccaaaataaggatattgagttccaaccttcatctgctcaggagggatcacagtatcaaagtggggattgtgaaagtgaagcttcaatggatactttggagctatcaaaggactcgttgtcctcagatgaacagaaggcatcagcatttgaagaaagagagagcggagatttcacggttgatgagggtgaatacgattatgaaactgcctgttcggagagccgtaatgacacagatggtaaccttggtgtgcctcaatcccctaatgcaaagtcaaggtgttcaaacttattcagtacaagatctacaggcagtcatttgtccttgtcattggagaaaagtgcagctaaaccttctggccgaccacattcaaccctaacagatccaaattttgttgagaactatttcaagtactctcgactgcacttcattgggacatggagaaaccggtatcggaagcgcttctcaaatttgctagaagctaaaggcattaagttgagtgctgatcattcagggaagaagaaaacaatcattcatattgatatggattgctttttcgtgtctgtggtcatcagaaatatgccagagctgcatgataaaccagtagcagtttgccattcggacaatcctaaaggaacagcagaaatatcgtctgcaaactatcctgctcgaaactatgggataaaggctggcatgtttgttagagatgctaaagctcggtgccctcacctaatgatcgttccttataactttgatgcatatgaggaggttgctgatcagttctatggtactttgcacaaacattgcagtaaggttcaggctttgagttgtgatgaagcttttttggatatgactgaatgcttacatgacaatcctgaggaagtaacacagagaataagaagtgagatttttcatgcaacaaagtgtactgctagtgcaggaattgctgaaaacatgctcctagctcgattggctactagatctgcaaagccgaatggacaatgctttattccatccgaaaagggacacctctccgatacctgtgggatacgtcccaacactagttcaaagtatatgctcgtgctcctgtatcgcacagctgctgcccaaagccgcctctctgcctcctcttgtgtgctctcagtcgccgcagtttgtcggtccttggtcgcctccgccgcaattcgcggattcgcggccgccttcgccgcagttcgtcggtctgtggccgcctccgccgtagttcgccggtctgtggccgtcgccgccgtcacccgtcagtcgccgattgaagcagtcgccagcgcgctgcgaggtttgtggctgtcagcctgccagtcgccggcgcgccgcgaggtctgtggctgtcagcctgtcagccgtcgattggagctgccgccgcaaggtctgtggccgcgttcttcccctcttgcttctcaaactcctttcttctcaatttgctgactgctacttctctagtcttgttagatctcgttgcgatgagttcaagtgcatctattgaagccagtggtagcagaggaagctttcttgtcgccaataaccctgctattgcaggacaggtcttagctgttgctcgtgtggttcttcgcgatgacgatgagaaaaagccattctggaggtatgctgagatacttaaaagaactagaaagggtccgggggggatgtgaggattagatgtagactttctaaccatgattggaatggaagctattctagagttaaagcacatctgttgaaaattcgtagttttggggtgaagttttgtcgagtggtgacagtacatgtttttgaacaactgaaagttgaagttgctgcagccagtgttgttgctgatagaaccatgcctagagatatcccacttctagttgagggcaatgagaagaggaagaggaggggtgttttagctattgaatctagcttcaatt

SEQ ID NO: 126712 - DNA, 747 bp, Zea Mays
gactaaaattctgtggtgtagtgctaaacgggctatatgggctaaacgggctatatgggctaaacgggctaaacgggccggcacggcacggctaagcaggcttagtgccgtgcttgggcctggcctcaggcactagtgccgtgccggcacggcacggctattaaacgggccaaacgggccgtgccctaaccgtgccgtgcctggccgtgcccgggccgggccgtgccgtggcgcccatttggccatctctactttaaaggcgtaagttttgtttcagatggatggtcagatgctcaaagacgcccactctttctgttacagaagatggcccaatgtttcttagagcgatcaacactgagggaatatccaagaccaaggagtatattgcagagaagatgttagcagtaattgatgaggttggggcacaaaatgttgtgcaagtgatcactgacaatgctgccaattgcagagccgctgccgtcataattgagcagaagcaccctcatattttttggaccccttgtgttgtgcatactttgaaatcttgctttgaagaacatatgtgctgctagggaaattgaagatgtgctttatacttaattccagtggattagcgaagtcattggagatgccagcatgattaaaaattccatcatgaatcactccatgaggttggctatgttcaatgagcaaagcaacctgaaattccttgcaattgctgacacaagatttgcctctgctattgtg

SEQ ID NO: 126713 - DNA, 90 bp, Zea Mays
atatatgcactatggttgtgcaccatttcaaaaattttgagaatttctaggtatgtgtttcaagggatttttcatgattgcattgcacca

SEQ ID NO: 126714 - DNA, 2125 bp, Zea Mays
gactgcaacatgtatctcttacaggctgatgattatctgagtagtctctctatcaaagcacttccaggcattggtcatacagtttcatctaaactgaaaagcaaagaaattgaatattgtagtcaacttcgcaatgtttcaaaggatgccctccacaaggatttcggaaaaaagactggtgatcttttatggaattattgtagaggaattgatcattcaattgttggatctgttcaggaaacaaaatctgtgggtgccgaaattaactggggagtcagatttaatgacaacaaagatgccgaacattttcttaacaacctttgcaaggaggtttctctacgcttgcagggttgtggagttcagggacgtactattacccttaaggtgaaaacaagaagggaaggtgctggggaaccaataaaatatatgggatgtggtgactgtgaaaccacgagtcgttctatgacgattgcaggtgcaactgacagttttgtcactctccagagaattgcaaaacaattattttcagctcttcatcttgatgtgaaggaagttcgtggaattggactgtcactatcaaagcttgagcatgcagatttgggccggggagcatcgcaaggacatatgcttgaatcgtggcttgcttcaccagccgccaagctcaagaaacagcagagtgagatactggggaatgttaatgttgcagggaccagcggactgaaggatttgagatctggaccatcacatacagcagaagcgaaccttagaaatgataggtctactgtatttcacaatgtcgagctgcctccgttgtcccaacttgatttggaggtcctgaagaaccttcccccagagataatgtctgaaatgaatgaaatgtacaagggagaattacaaagtcttgtggacaccctcaatagtgacaagggcaaggaaaatagttcaaaatctcttgctttgcctgcagttattcgtaagtctgtacctgccgatgcaaagcttcaaggatacagagaccacagagactccatgcatttggaggaggaacatactaagggaaaatctgacaaacaactatcagaagctaaaccagccaataatgcttcatgctcaagagttagtgcatcaattgagaaaacaacaaaaagtgttacacaacttgatttgatgcctgattcgctaagccaggcagatctaacagttctgcaggaattacctgaggatgtgaaggctgatttgtttagtgcacttccactgcatagatcaggagatcctgcatgcagcacttccaatgtatctgaaagtaaatcacctaatgtggttagagctgaaaatagatcttctaatgatggtggaactgatgatctgaaaaccccaaggtcttttctcccaccaggaagttctcaaaaatggatcgaacagtttagagttagcagttgcctgattttgaacgtaattgcagagcaacacacagattccagctgtcaacgaccattgtcttctgttctagagcctgtagcttcgttcctacctttgtgtcctaacccaggtagtgaagaatggaatgaaactcattcatgtctctccgagcttcttagacactacatacaactgaaagttgaatatgatattgaagagctctacaaatgtttttgccttttgaaaagattctcgtcagcatcagagttttttctggatctacatgatagcatccttcctttcctacaggattctatcagccagcattacggtgggacactgcaattctagctccttgctcaagttgtagccattctattttgctagaaaggaagaagcaatgccgtgaatgtgcggagagacgtgttatgacaatctgcgcctccaagcagctactcaaatcccgtgctggcagattccttggacgcgtttataactttattataactaattgatgccaatgctggaagttttattgatatattcattgcatctatggatcaatagatgccatgtggttcgatatatcattcgtggagcaatggtttgaagggacctttgctgtgctttgatgttcccaggcgaatttcatgtttgcttcataacccatatgaatttcatgttatctttgtgttgctaccaaaaa

SEQ ID NO: 126715 - DNA, 264 bp, Zea Mays
tcagagcaggacgcctcaccgccgtgtcacgggaagttgaggaagagaccagtggcacttaggtcggcgaacccagcgctggcccagcatgcacctaggtcgaacaccactggtcacgcgaaggagtcgtcatcaagcaacgccttccctgcttaggggaagtcggaaaggccgaaccctagcgtgatggcctcggtgtcatccatcccactcccgacctgcagcagtaggtgcgatagggagtcagtcgggtcggctgtgggg

SEQ ID NO: 126716 - DNA, 2476 bp, Zea Mays
caaccccgtggtggaccagtcctctttcctcagctactgctcaccgccggcaccacgagcgtcaaccgcttcgccgacgcgatctcctccagcccccgctgccgcgatgcaattcctcagcgcctccgcctcagcctcctctctggtgccgccgtccgcgcacctcctccgcctctcgcggccccagcccttcccgcagctcctccgccgccgctccccgcccagacccctcgcgctcacgccccgactgccgctccccctcgtctcgcgaccctcccttctctccaccccacgcgcgcacggcggccacggtcacgggcaccaccacggccatgaccaccatcaccaccacggccacggccacggtcacggtcaccacgaggtggacgtgcacgggggaggcgggggcgcggcggtcatgcgggtggcgcgggcgatcggctgggccaacgtcgccgacgcgctgcgggagcacctccacctctgctgcatctccctcggcctcctcctcatcgccgctgcttgcccgcacgtcgcgctgctcaactcagtcagccgcctgcaggccgctctcatcgccgtcgcctttcctctcgtcggggtttctgcagcgcttgatgctcttgtaaatattgcagacggtagaataaatattcatgtcctcatggctcttgcagcatttgcttctatatttatgggaaatgcattggagggtggcctgcttcttgcaatgtttaatttggctcatattgctgaagagtattttacaagtaagtcaatgtttgacgtgagggaactgaaggaaaatcacccagaatttgctttgttgttagaaacaagtggagaagaatctgtacagttttcaaatctaagttacaccaaggttcctgtgcacgatcttgatgtgggttctcatatcttggttagagctggcgaggctgtgcctgttgatggtgaagtctaccaaggttcatcaactgtcacaattgagcacctaactggtgaaacaaaacctttagaaaggacagttggagatgccataccaggtggcgccaggaacttggaaggaatgatgattgtaaaggtgaccaagtcatgggaggattcaacgctcaacagaattgtccaattgactgaagagggccagctaaacaagccaaagttgcaaagatggcttgatgagtttggggagtactatagcagagttgtggtagccctttctttggttgttgcacttttgggaccattactttttaagtggcctttttttggtaactcagtctgtaggggttcaatttaccgtggattaggacttatggtggctgcatctccctgtgcattggctgtagctccattggcatatgcaactgcaatcagttctcttgctagtaagggaattttgttgaaaggtggccatgtcttggatgctctttcgtcttgtcagtctattgcttttgataagacaggcacactaacaactgggaagcttatgtgcaaagcaattgagcctatccatggacatttgggtgtgaaaagtggtcgtagtaatccttcttgctgcactccaaactgtgaaagtgaggcattagctgttgctgcagccatggagaaaggaacaacccatcctattggaagggctgttttagaccactctgttggaaaggagcttccagttgtcgctgtagaaagttttgaatgcctacctggtaggggagttgttgctactttgagtggtgtaaaggtaagggaaaatgaaaatgagctatccgaggcatctatcggttctgtggattatatttcttcactatatagatccaatggtgaatcagagcaaataagagcagcagcaaaaagttctgcatatgggcctgaatttgttcaagctgctctatctgttgacaaaaaagttactcttttccactttgaggatgaaccccgctctggtgtttgtgaagttatatccaccttaagagagaaagctaaacttcgcattatgatgctaactggagaccatgaatcaagtgcccagagagttgctaaagctgtttgtattgaagaagtccacttctctttaaagccagaggataaattaaataaagtgaaagcagtttcaagggaaggaggtggaggtttaataatggtcggtgatggtataaatgatgcaccagcccttgcagccgcaacagttggaatggttctagcccaacgtgccagtgcaactgcagtggctgttgcagatgttctgctgttgcaggataatatttgtggggtgccattctgcattgctaaggctcgtcaaacaacttcattggtcaaacaaagtgtagctctggccttaacttgtattgtttttgctgcgcttccttctgtcctgggatttcttcctctttggttgactgtaagttccttttaatgacttagctacgcacctgtgtttgtgtaacaaggaaattaaacaaattgttctggtgccctg

SEQ ID NO: 126717 - DNA, 2891 bp, Zea Mays
caaccccgtggtggaccagtcctctttcctcagctactgctcaccgccggcaccacgagcgtcaaccgcttcgccgacgcgatctcctccagcccccgctgccgcgatgcaattcctcagcgcctccgcctcagcctcctctctggtgccgccgtccgcgcacctcctccgcctctcgcggccccagcccttcccgcagctcctccgccgccgctccccgcccagacccctcgcgctcacgccccgactgccgctccccctcgtctcgcgaccctcccttctctccaccccacgcgcgcacggcggccacggtcacgggcaccaccacggccatgaccaccatcaccaccacggccacggccacggtcacggtcaccacgaggtggacgtgcacgggggaggcgggggcgcggcggtcatgcgggtggcgcgggcgatcggctgggccaacgtcgccgacgcgctgcgggagcacctccacctctgctgcatctccctcggcctcctcctcatcgccgctgcttgcccgcacgtcgcgctgctcaactcagtcagccgcctgcaggccgctctcatcgccgtcgcctttcctctcgtcggggtttctgcagcgcttgatgctcttgtaaatattgcagacggtagaataaatattcatgtcctcatggctcttgcagcatttgcttctatatttatgggaaatgcattggagggtggcctgcttcttgcaatgtttaatttggctcatattgctgaagagtattttacaagtaagtcaatgtttgacgtgagggaactgaaggaaaatcacccagaatttgctttgttgttagaaacaagtggagaagaatctgtacagttttcaaatctaagttacaccaaggttcctgtgcacgatcttgatgtgggttctcatatcttggttagagctggcgaggctgtgcctgttgatggtgaagtctaccaaggttcatcaactgtcacaattgagcacctaactggtgaaacaaaacctttagaaaggacagttggagatgccataccaggtggcgccaggaacttggaaggaatgatgattgtaaaggtgaccaagtcatgggaggattcaacgctcaacagaattgtccaattgactgaagagggccagctaaacaagccaaagttgcaaagatggcttgatgagtttggggagtactatagcagagttgtggtagccctttctttggttgttgcacttttgggaccattactttttaagtggcctttttttggtaactcagtctgtaggggttcaatttaccgtggattaggacttatggtggctgcatctccctgtgcattggctgtagctccattggcatatgcaactgcaatcagttctcttgctagtaagggaattttgttgaaaggtggccatgtcttggatgctctttcgtcttgtcagtctattgcttttgataagacaggcacactaacaactgggaagcttatgtgcaaagcaattgagcctatccatggacatttgggtgtgaaaagtggtcgtagtaatccttcttgctgcactccaaactgtgaaagtgaggcattagctgttgctgcagccatggagaaaggaacaacccatcctattggaagggctgttttagaccactctgttggaaaggagcttccagttgtcgctgtagaaagttttgaatgcctacctggtaggggagttgttgctactttgagtggtgtaaaggtaagggaaaatgaaaatgagctatccgaggcatctatcggttctgtggattatatttcttcactatatagatccaatggtgaatcagagcaaataagagcagcagcaaaaagttctgcatatgggcctgaatttgttcaagctgctctatctgttgacaaaaaagttactcttttccactttgaggatgaaccccgctctggtgtttgtgaagttatatccaccttaagagagaaagctaaacttcgcattatgatgctaactggagaccatgaatcaagtgcccagagagttgctaaagctgtttgtattgaagaagtccacttctctttaaagccagaggataaattaaataaagtgaaagcagtttcaagggaaggaggtggaggtttaataatggtcggtgatggtataaatgatgcaccagcccttgcagccgcaacagttggaatggttctagcccaacgtgccagtgcaactgcagtggctgttgcagatgttctgctgttgcaggataatatttgtggggtgccattctgcattgctaaggctcgtcaaacaacttcattggtcaaacaaagtgtagctctggccttaacttgtattgtttttgctgcgcttccttctgtcctgggatttcttcctctttggttgactgtacttcttcacgaaggaggaacccttctagtgtgcttgaactcgatacgagccctgaacactccgacatggtccttggtagatgacatccggaagctcgtcgatagcttaaggaattatttcccatccaagttcaacagctctccctcaagctacaccgcaaacactgctcccttgtagattaccatgtccagcaacggccgtctttggttaaccttgttgtttctgtggcaccgtttgaatttaggcgaggggttctaacctaattttgtaggcgcccgctgtactcttttcaccaccatgtaaagaaagaaacttggcttgaggttgagctgaaggtcaaaggacagtgatgaaacatccagttacgacgtggcgcagaatcaacgtctgtgtctgttgggcccgttcgttatgtggaatacaatacatacaggtgctatacgactgttgagatcagggaagtctaatcgcctgtttcttgcttgcagaa

SEQ ID NO: 126718 - DNA, 836 bp, Zea Mays
aaaagaccaacaagcatctaatgaacgcacgaatgggaatggcaatctacataatatattggacccacctaggaaaatgaaaaggaggagctcaccatggaagagtttttgtttgtaggaaaagcagagagccaaggcaaaagagaagcttgataagtgtgtaaaagacactctgttggacccttggtattccaactccgaaagcaaacattagaaaggaagatattgtgtcgaagttgttggacttcattgctgaacctcactctgcagctgaatcttgtggctctgatgaccaggttacaacacattcgtacattgtgattctattttcttatcaacgagatgttgttgttaatgttttatggttgaatcagaattagtttacaagattattctctctacatgctttatcgttttccactgaccagggattaaattctaaaaacgcaagagaggaggtgaaagtgcaagtaagacgcctgatggcacacctagtaggtcgaggaagaaatttgtcgatgacgatacttctagtaaaaggcagaataaagcgctccagtatgatattgatgaggatgaatccatgaagtctgacagtgaggaaaacatagatgaagattcagatgaagctgctaacaaacaggaaggctatggatgtgggaaagaaaaggcagggatgaagttatcggaggtaaaagaatcctcaggtaaaaagaagtcaaacacagggagtggccacaaatcaggtcctccaaacaaaattataaaaaatctggaaaaaagtatcaaccaagattcacgaggaaaaagaaagccccaatgatagtgccaaggta

SEQ ID NO: 126719 - DNA, 249 bp, Zea Mays
gacactctgttggacctctgctggacccttggtattctaactccgaaagcaaacattagaaaggaagatattgtgtcaaagctgttggacttcattgctgaacctcactcttcagctgaatcttggggctctgatgaccagggatcaaattctaaaaaacgcaagagaggaggtgaaagtgcaagtaagacgcctgatgacacacctagtaggtcgaggaaggtacagtgctaaaattgccttgcatgg

SEQ ID NO: 126720 - DNA, 312 bp, Zea Mays
atggaagaggaagatactgtgtcaaagctgttggacttcattgctgaacctcactctgcagctgaatcttggggctctgatgaccagaataaagcgctccagtatgatattgatgaggatgaatctatgaagtctgacagtgaggaaaacatagatgaagattcagatgaagctgctaacaaacaggaaggctatggatctgggaaagaaaaggcagggaagaagttatcggaggtaaaagaatcttcaggtcgtgccctctctgtcatcggcgctgacgagctcgggggtggagaacggcggcaagactaa

SEQ ID NO: 126721 - DNA, 1206 bp, Zea Mays
atggagaaccagacggcggcggcggaggcggaggaccatatcagcaagctgccggacgacgttctcgtccacatcctctccctctgcccttactatactctcatgagaacggtttcggtttcaacatcgtggcagcgcctcctcacccaacaactcccggacctgatcttctacttgtcgtatcctgtgcacaaggatccgtccatggaaacgccgagcgaggagcgcgtccagagcatggcgcggacgctccgccgccggtgccacggcacagcagcagactacactatcaagaatcttcgtctggtctacagaaaggacgtggccatggaatgccggtacgtagacgagttcatcgcgctcgccaacgccacgaagctggagctcgccccccacatgggcgccgagtccttctcctcctcacttgtcgcggacgcagccggcgactggtctgtcgagctgccgccggctacggtcgagttggaggtgcggccgttctgctttgccgtgaggccgccgcgcatccacggccccggcgtcaacgtccttcggtcccttacgctgcatgggcacacggtggttcgcgaggacttccccctcaccgtcaccgtgttcccgtcgctggaggacctgcacatcggcaactgcacccttgctgccagtatgaccatctcgtcggacaccatgcctcgcctcaaacacctccgcttcaccgaggtcagcgtgagcgcggatgacaccaaagccgccatcaccgtgctcgccgatgacctgaggactctccgcatgtcatgccggcagtgtagctatactgtatcgccatcggagccgctcatgttcacgtgcggcgggcacggctcggccttgttcaccaaatactctttgttccgcttacgcgcacccaagctggcggtgttcgagtggcgatgctgctatgctgatgaggtgcgcgttgacgccgtgggccgcctctccgacgtcacgatcgagatcgccgccggtaggacacggacgagggttcccataggcacggaacctaagttcgtgacagtacaacaacgtgacaaacttatgaccgacatccttcaagggcttatgccagggctgcagccgcgcacctggaaagatgtcacgaggcaatgcatgcaacgtgatgagaggtggttgtgctttgaagtcaccgatggttaccctgctaccgaatga

SEQ ID NO: 126722 - DNA, 1763 bp, Zea Mays
ctttctctctccatatatagcgcacctccgccgagtcgtctctccacactcgctctcgccactgtcgtccaccgatccgtcatggcgactgctgcgccattgttgctcttccacggtctcctcctcctcctctccctggcgctcggcgcccatggcgtgaacgtgaagcccggggagcaccacatcctcaacaggcagagcttccccccggggttcgtcttcggcacggcgtcgtcggcgtaccaggtggaggggaacacgcacaggtacgggcgcgggccctgcatctgggacaccttcctcaagtatccaggcactactcctgataacgcgaccgcggacgtgacagtcgacgagtacaatcgctacatggatgatgtggacaatatggtccgggttggcttcgacgcgtaccgcttctcgatctcatggtcgcgtattttccccagtgggattgggagggttaacaaggatggtgtggactattaccacaggctcatcaactacttgctggcgaaccatattactccctacgtggttctctaccactacgaccttcctcaggtgctgcaggaccagtacaatggctggttgagccccaggatcctgggtgatttcacagctttcgccgacttctgcttcaagacgtacggcgaccgggtgaagaactggttcaccatcaacgagccgaggatgatggcccagcatggctacggcgacggcttcttcccccccgccagatgcaccggctgccagttcggcggcaactccgccaccgagccgtacatcgccggccaccacctcctcctcgcgcacgctgccgctgtcaagctgtaccgcagcaagtacaaggttcgtcaggccggcaagatcggcatcctgctggacttcgtgtggtacgagccgctgaccaagtccgtggaggacgagtacgcggcgcaccgggctcggatgttcacccttggctggttcctgcaccccatcacctacggccactacccggagacgatgcagaagatcgtcatggggaggctgcccaacttcaccttcgagcagtctgccatggtcaaaggctcagcggactacgtcgccatcaaccactacaccacgtactacgccagcaacttcgtcaacgccacagagaccaactaccgcaacgattggaatgcaaagatttcgtatgagcgagatggtgtgcccattggcaaaagggcgtactcggactggctttacgtcgttccatgggggctctacaaggctctgatttggaccaaggagaagttcaacagccctgtgatgctcatcggagagaacggaattgaccagcctggaaatgagaccttgccgttcgctctgtacgacaagttcaggatagactacttcgagaagtacctgtacgagctccagtgcgccatacgcgacggtgcaaacgtcttcggctacttcgcgtggtcgctgctggacaacttcgagtggcggctcggcttcacctccaagtttgggatcgtgtacgtggaccggaacacgttcgtccggtaccccaaggactcagctcgctggttcaggaaggtcatcaagaacgagaactgaatgatcgatcggccggtccattattaaggaacgaactccatgcgtttctttttagctaggggtatagtagtgcgtgtagggggtgcatcgatcagtttggtcatttcaataaaatgcttgtagttgttgttttggacttcgaataataaaaatactacttcccttctcaaata

SEQ ID NO: 126723 - DNA, 333 bp, Zea Mays
atgggatggacaataatacatgtagtagagaccattcctttcatcagttgcaggctattaggcttgtcattgcgcttcctcggtccatgcgttaatcctgatcacaatgccatttcagcttgtagtgcagccagctcatcgtatttagctataactttctgtgaagtagggcaagctagttgcttgtttcctgggacatgcactggatgcaccgaaagagctgcaacaggctctagaagcttagattccaactcttctccttccagctcttcaggttttgcatctagttcatccttgcaaaatatttccacgtcgatctggttgtctgtgtga

SEQ ID NO: 126724 - DNA, 693 bp, Zea Mays
atggatcccacaccaaccgcagaaaacaccactgtgctggggaagcaacgaacccaatctcctgcgttgagaaatctagttaccattcaaaatataactgacccgatgagtggccaagccacgaactacaatgttgcaatgttcttcttcgcatgcacactgaatagatggttttccaagctccctttggccatgaactcatacacgagaagtagttcacagtcctcccatccaagagcttcacaaggttcagatgggagagtcttcctagaaaatttatctccgacggcgtggatggcgctcaccttgattacctcaccgaagggaagcttcctcccatcccatgtcacggccgcgacagcaggggccaacaacctgcagcagttctttctagctaccccgccaacaccttacgcttgtgcttcttcttcaagctgtccacccacacatccgtcgccccctccaccgaccagcccgacctcatcccttgcgctgatcctagggcagcataggagggagagtcaggacaaagacgctgacatcgggaacgagatcccagcggggaccacctccgcttcccttgccctgggtcccttgcccgcctctgtgacgccaggctccactgcgtgcggatgggggttgagtgcgagcggtgaggggcggctacgactggctgtggctcgcatagactaa

SEQ ID NO: 126725 - DNA, 1552 bp, Zea Mays
tcggctttcactcgcttgcgcctcccgcgacactcgccagtcgccaccccacctcgcctccccgttactccccccgccatcaatgccctcttcctccacctgcgtccctctcctcctccgccgcttcgttctcctcctctgctccgaccaccacttcgcagctggctcgctctcgacggcgttgccgccaccgagcccgtcggcgagacggaaatgaagcctctgcacctgcggagcagcggcagcttcaagcgcctgctgctcctctccatcggccaccggtcgccgccgaccacaaatccgccggtggcggacgccgacgccagggagtccccggaggagccgggttccccgcggtgtagcagcagcgggcccgcgtggcgctgcttctcgtacgacgaggtcgaccgcgccacgggcgggttccacgagcgcaacctggtgggccgcggcgggtcctcggaggtgtaccgcggcgagctccccggcgggcgcgccgtggcggtgaagcgcctgctgggcgcgtcggcgtgcgagcggcgggagcgggacttcctggcggagctgggcacggtggggcacgcgcgccaccccaacgtgtgcggcctactggggtgctgcgtcgaccgtgacctctacctcgtcttcgacttgtcccgccgcggctccgtcgccgccaacctacacgacgaggcgttgccggcgatgggttgggcggcgcggtacggcattgcggtgggcacggcgcgggggctggagtacctgcacaaggggtgccggaggcggatcatccaccgcgacatcaaggcctccaacgtcctgctcaccgacgacctgcagccgcagatctccgactttggcctcgccaagtggctgccgtcggaatggacgcaccgcgccatcgcgcccatcgaaggcaccttcgggtgcctggcgccggagtactacacgcacggcatcgtggacgagaagacggacgtgttcgcgttcggcgtcttcctgctggagctcgtcaccgggcggaagccggtggacggcagacaccggagcctcctcagctgggtaacagtggcccggccgctgctgagcggcgacggcaaggtggaggcgctggtggacccgaggctcggcggcgactacgacggcgagcaggcgcggcgggtgacgttcgtggcgtcgctgtgcgtcagggcggcggcgacgtggcggccgtccatgaccgaggtgctggagctgctggaaggcggcgagatccggcaggaccggtgggcgatgccagagacggcggtggccaacgacgacggcgagcagcagccatggtggttcgacgttctcgacgacttcgacgacgacgacgacgaccaagacgcaggcggcgaggagttcagcaccccgtccccttcctcctcctcgtcgtcgtcaaccacaagcaattagccatttacatccccagatacctggactcactgtgacgtggagttctgctagtttgtcctgataggggggagggcgggtcccaccacctgtaaatacaaaaaaaggttatctcttg

SEQ ID NO: 126726 - DNA, 1555 bp, Zea Mays
tcggctttcactcgcttgcgcctcccgcgacactcgccagtcgccaccccacctcgcctccccgttactccccccgccatcaatgccctcttcctccacctgcgtccctctcctcctccgccgcttcgttctcctcctctgctccgaccaccacttcgcagctggctcgctctcgacggcgttgccgccaccgagcccgtcggcgagacggaaatgaagcctctgcacctgcggagcagcggcagcttcaagcgcctgctgctcctctccatcggccaccggtcgccgccgaccacaaatccgccggtggcggacgccgacgccagggagtccccggaggagccgggttccccgcggtgtagcagcagcgggcccgcgtggcgctgcttctcgtacgacgaggtcgaccgcgccacgggcgggttccacgagcgcaacctggtgggccgcggcgggtcctcggaggtgtaccgcggcgagctccccggcgggcgcgccgtggcggtgaagcgcctgctgggcgcgtcggcgtgcgagcggcgggagcgggacttcctggcggagctgggcacggtggggcacgcgcgccaccccaacgtgtgcggcctactggggtgctgcgtcgaccgtgacctctacctcgtcttcgacttgtcccgccgcggctccgtcgccgccaacctacacgacgaggcgttgccggcgatgggttgggcggcgcggtacggcattgcggtgggcacggcgcgggggctggagtacctgcacaaggggtgccggaggcggatcatccaccgcgacatcaaggcctccaacgtcctgctcaccgacgacctgcagccgcagatctccgactttggcctcgccaagtggctgccgtcggaatggacgcaccgcgccatcgcgcccatcgaaggcaccttcgggtgcctggcgccggagtactacacgcacggcatcgtggacgagaagacggacgtgttcgcgttcggcgtcttcctgctggagctcgtcaccgggcggaagccggtggacggcagacaccggagcctcctcagctgggcccggccgctgctgagcggcgacggcaaggtggaggcgctggtggacccgaggctcggcggcgactacgacggcgagcaggcgcggcgggtgacgttcgtggcgtcgctgtgcgtcagggcggcggcgacgtggcggccgtccatgaccgaggtgctggagctgctggaaggcggcgagatccggcaggaccggtgggcgatgccagagacggcggtggccaacgacgacggcgagcagcagccatggtggttcgacgttctcgacgacttcgacgacgacgacgacgaccaagacgcaggcggcgaggagttcagcaccccgtccccttcctcctcctcgtcgtcgtcaaccacaagcaattagccatttacatccccagatacctggactcactgtgacgtggagttctgctagtttgtcctgataggggggagggcgggtcccaccacctgtaaatacaaaaaaaggttatctcttgaaaatgtttatt

SEQ ID NO: 126727 - DNA, 1801 bp, Zea Mays
gccaacgtcagaaccaaacgcggcccccttgccctctcctacttctcctcccccgccccgccgccattccccccccactcttcaccaccgcagcgccgccgcgtacaaggcgattaggcgaagctgcaccggaaggagaaggagagaagcgagagtctccccagccagagcaagccgaatccgaagctagcggagaggagagagggctgagtgaggatgccgacggttacctgcaacgcgtgcaacgcggggttcgacgacgaggagcagcagcggcttcactaccgctctgaatggcaccgttacaacctcaagcgcaaggtggctggagttcctggtgtcacagaggctctgtttctggctaggcaagctgctttggcggaggggagcaagcctgctagcaccccaatgctttacagctgtgctctttgtggaaaggagtacagaagctcgaaagctcacgagcagcatcttaactcgcgatcacatcttttgaaagcctctcaggagcccaatgcctctattgctggtatcacgatagtcaagccacttcctgaacgagtctcacgaagagctccatctgcagtagaggaggatcaagacgacgatgaggaagaagagtgggttgaagttgacccaagtgagatggagttggctgatgagtctacttcaaacatgcaagaagatgagcactcctcaaaatcagatgatgacatggatgaccttgaagagttggatatctcgtcgtgtttcatgtgtgacctcaagcatgacaccatagaagactgcatggtccatatgcataagaagcatgggtttttcatacctgacagtgaatacttgaaggatcccagtggtcttcttacttatgttggactgaaggtgaagcgtgattttatctgcctctactgcaatgacagatgccagtccttcttcagtctagaggctgtcaggaagcacatggatgcaaaggggcattgcaagttgcggtatggagatggtggagatgatgaagatgctgacctcgaggaattctatgattacagcagcagttatgttgattcagaaggcaagcagttgattgctgttgatgacttgaacaacaacattgagctgggaatcggtgggtctgagctagtaataacaaacaagagcgagaaaggcactcgggtcagaacccttggctctagggaatttatgcgctactatcgccagaaaccacggccttctgttgcaccagaccgtgcgcttgcactttcactagcttccagctacaagagcatgggtttggtgacagtgcagtctaaggagcagatggtgaggctgaaagttctccgtgctatgaacaggaccggggtcgagactatgcggaacaagatcggaatgaagagcaatgtgatccggaacctccctaagaattgcccgcactagacaacactgccttctcctgcaccctatctggagcttctcctggcatttatatggtgtcttatggtttcttgtctgtcgctgacaacgttggcgcttaagatatttggaataggactacaccttccatagtttttgttgaactctgtggtgcggaagcagctgttgccattatggcggaaattgctgacgcctcattgaacatgtttagtttttattttgttaaaaaattgggcaaaaaagtttgatgctcatattcatcacaaaaaattgtacttgtcgggttatttatatccgttccctgaatactatctttcactctaatatattaatcactcaaaaagtcaaacaatcaaaaaaaagtttgatttca

SEQ ID NO: 126728 - DNA, 792 bp, Zea Mays
tttttgtgagtcaacgaagcttgtacgcatcttacaatattacttctgctgcagttatgttgattcagaaggcaagcagttgattgctgttgatgacttgaacaacaacattgagctgggaatcggtgggtctgagctagtaataacaaacaagagcgagaaaggcactcgggtcagaacccttggctctagggaatttatgcgctactatcgccagaaaccacggccttctgttgcaccagaccgtgcgcttgcactttcactagcttccagctacaagagcatgggtttggtgacagtgcagtctaaggagcagatggtgaggctgaaagttctccgtgctatgaacaggaccggggtcgagactatgcggaacaagatcggaatgaagagcaatgtgatccggaacctccctaagaattgcccgcactagacaacactgccttctcctgcaccctatctggagcttctcctggcatttatatggtgtcttatggtttcttgtctgtcgctgacaacgttggcgcttaagatatttggaataggactacaccttccatagtttttgttgaactctgtggtgcggaagcagctgttgccattatggcggaaattgctgacgcctcattgaacatgtttagtttttattttgttaaaaaattgggcaaaaaagtttgatgctcatattcatcacaaaaaattgtacttgtcgggttatttatatccgttccctgaatactatctttcactctaatatattaatcactcaaaaagtcaaacaatcaaaaaaaa

SEQ ID NO: 126729 - DNA, 1891 bp, Zea Mays
gaaaatgtcaaaggaccgcagatcgccggcccgaggacactctctcccctcctctcccatccggcatccccgcccactctctctcctcccctcccctcccctcccctcctttctctccactcgtcgcacgcaagcgcaaatggctctaaaaagtccaactccaaacctagactagaggcccctcaccgaggcgacgacgcacgcagccgagcgccactccgccgccgccgcctcctcctcgtccccgtcccgcgccgcaacggcctcccccaccctgcgcccgccggccgcccctcgacgggtcgagcggagcggggaacccatccgtccggccgttggtcgctctcgctcgtctggtgttggttgtaatgagaagctggacctgttaggccgaagagttctcgttgcaagtctgtgcctcagcgatgggttcaggcaacttgatcgtgaagaaggtggtaaagcacagctcctttgatctggacatacagcttgataagagttggatggaggatgttacctgcccgatctgccttgattaccctcacaatgcagtgctactgaggtgcacgtcttatgagaagggatgcaggccgtttgtttgcgatacagaccagacccgctcaaactgtcttgagaggtttaaatctgcatatgaactgccttccaatgtgaaagtttcatctttagccgtgcctcctcttgatagcattattcatattgtgccgtctaacgcaaacaaccgccccagctgccctttgtgtagaggtgatgttattgggtgggttgttattggtgaggctcggctgcatcttaatcagaagaaaaggtgctgtgaagaggattgctgctcgtttgttggcaacttcaatgagcttcagaagcacacgcaacaaaagcatcctgattcacgcccttcagagatcgatcctgctaggcaagttgattgggagaatttccagcaatcttctgatatcgtagatgtcttgagcacaatacatgcacaagttccaaacgggattgttctgggagactatgtgattgagtatggggatgatgacactggtgaggactatgaagttttccgcagggtcaggacgaactggtggtcatgtattttctgcagggcgttttcaagatcttcaagaagtcgtagaagatccagagcaagggaaagaataggcagtggaaggaggaatggcaaccaggttaatctagaaaattttaacctcgtggttccgacacaacctgttgaattaagggaaattaggtttgatgaaattgatgatgaatacatagtcacaggggccattcctagtatcgcagcaccgggaagaatggctagtttccattacagggatacaagatatggacgttgatgcatagggtctgcagtaaaaaaaggaatagatgttatgcaatttaccgatcaacgtaacgttgtaactccgctcatttggattccttttccacctgccctcggtaggtgctgccgcagttcaaacttatctgtgcataaaaagtagcaacagaacctcgctgttcgtttgaatcaggcctcgtcattctagtttcgatcttgtatatatttagcacccgtctctataggatgttggtgacagttcttttcggaatgcttctgcgatgtagcgcggttttacatagtaaccctgaaacaaacttcagcccgctctaatggggatttgtttggagactcgtgtctcgctgggtagcccttcagataagagcttctgagccgtccatggtgatgctgttcagttagtttaagatgctataatattgagacaagcagggaaggcacgtactgttgacgtttccttttgaccctaccgcctgtgttattctaataaacgcatgtcttgtacattct

SEQ ID NO: 126730 - DNA, 1709 bp, Zea Mays
gcctccccctctcagtagcggcagcgcccacttgcctggagcgcgaattttacccgagcaaatcgcggcggcgctcgtgcccgtgcctcccgcgccgaaccctagcgcaaccaccagatccggagatctagtgcgggcgcgggcgggaccccaagcctctgactcaactcaatccccgcacccaccaatgccacccctcggcgctgatccgatcccgccgccaccgacactcgcggacccgcccccatggattccgcccggagctggctccaaaagctgcagccacgggacaaggacatagagcggggcgccaagacgccggcggctccacgaggatggcaaacagactggagctgtttgtcaggcttcttcatcttccgtttgggatacattccgcccagaaccggttcctggcctgcgggaggggaggagtaaatgagcggccacgcgccgcctccccactgtcgatcgatacatgccgttccactaggtggaatttatggcgactcggacacggcactgcttttagtagtaaccaatgcagcttcctcctcagggcctggaagaagctgcgaccttctttgttttttggcaacgagatctgacgatagtggcggcggttcaaggttcggtgcgagagcgcgatgtcccaggatcgacggcggcgaagatgtcggtgagccacgcggaggacatcgagatatcgctgtgtgacggcaactcgaaggacgagcggaggcggtgcaagatcggctcgctgcggcggaaggccatccacgccttcaagaagcgagggaggcgccacgtcgacttccgcttctcgctggcggccatctccatcgaggacgtccgcgacgccgatgaggagcgcgccatcgcctcctttcgggaccgcctccccgcgctcggcctcctccccgacaagcacgatgactaactaccacatgatgctcaggtcacattaaagcccacccctctttttccttgcatgcgctgcatttggacgcggtttgttgaatgccactatgccagtgcttgaaactcacggtttggttcaggttactcgtgcttacagaatacagatctgtttgtagtttattcagtttgattgttattgatttcttcaggggtttaagaatttctccaagactgcaagagaacttgtgcaccggatgcaaaagattgatagcgactaatatcccgaggtaattattcttttcaatgggtaatatgttatggtattttccctgttgatccagttaagtaatatgtgatgaatgcagacactccaccaaatgtttgttgtgaacgctagcagtggatttaagtggatctggaacggcgtgaagggcttccttgacctaaaaacttcatcaaagattcatgtgcttggttcaatctaccagagcgggcttcttgaagtaatagattcgagtgagctaccaaaattccttggcggttcatgcacatgtagtgacaagggtggttgtctagggtcgaacaaagggtcgtggaatgatccttatatattgaagctgatccacaatttggaagctggatgcacgagggaaatcaaacctgtttctgagggggaagaaagaaacagctcctcctttcggttggaacagatgaaagtaacattgtaaaactatataaacttcattagttatattgtaggaaactgattgcctttttggattcttgttcta

SEQ ID NO: 126731 - DNA, 1580 bp, Zea Mays
aacaaaataccgatcgcccgaccccttcagtgccttgactcacgcccgcggcaaccggcgacgaggcggcacgaccctccagtccggagtccgccatgcctcacgccgccgccaccgccgctgcggcgctcccgcgtgcctctctgctcgttatctcggcgccgctccgcgactccctcgccgcggcgccgtacgagccccccgcgggcgcatccgcctccgtcaagtccctcctcgcctctctcctcccttcgccttcccctccccagccccagcttcaggagccggcgggtaaggagtctggggacctcctcctcttctgcgctgccgtactcgcggcctccccggagtaccccgcgctgcactgggtcccggcgagcctcgtgggcgcggccgccgccgcggtgaacgagctggcggcggcgggaggttggggcagcgttggggatatggtggtggccgtggcaccggaggtggtgcctcctctcaaggccgtggtgaaggactcgtgcgtcgatgctgacagcgacgagattggggctgtgaagccgcccaaggagcacgcagcagtcgccgcgcaccagttccggtggctggtgtctcaggtaagctaccctaagctcggggatttgtgttcgttagtcattccatgtgccctgacaaccttagatcattggtcaccagaagttaaggtacagggaatggtaagctttgtacacatagcgaagaatgtgaaagcaacggaattaagtttgtatgaagatgccatacttgatgcgtgctgtcagaacattcctgcagatgatgagttatggtaccaggttattgaggtatctgtgatgttgctgacattcacccagcggagcaatcctcgtagcccctggtatgatcgaatgcttagtgagatgttgggccacctggaacggcagccactaaataaagagcgtcgtgttgcatggttgacccttattgggccagtttttgatgctatgggcctcttcctgttggcacattttcgccgccttttctcactgtttttccaatggatgcacactgatgataataagacagttcttctgactttaaagcaaatacatgccattatcaagcttacctggatcaggaagtcaccttatactttgaggctggtggacgagcttgttctattatataaagaatcagccacaaggagcaaccgtgaaatcatgcgagatcatatcctggagatacttgtactgcttcagaactgcaagggacatcaatttgaggaagcttggaagaaacatgaactagacccagacttgacgatgctgctgtccactttcaataagctttgtataaaaaacagttcaccgtgatgttgagttcaactacatgtgttatcagtgtaaatatttcaccatcgcctatcctgtcactgaatatttcactactgcctattctgccactctcatctgctgaaggaaatcagccttgattcttgtggcagatccattttaaaaaaaaatctagtacctgtagaggcagctggacaaggtaatgaacaactcatgccttgtcgacagccttcttcctctgca

SEQ ID NO: 126732 - DNA, 209 bp, Zea Mays
tttgacttcatgtgaattattttagaaacttgagctcacaaactctcttatttggtctctatatggtagaattatatcattttataatctttgttcgttcagtcagtcgttgtgaactctcatctaatcgctcacttcattggtcgtgttgtaccaagacatattgcatggagtaaacaataacatcagttagccaaatcaaaaaaata

SEQ ID NO: 126733 - DNA, 2128 bp, Zea Mays
gccgcgcccgcgagccgcgacgccgacgctcgtctgtctccatggcgccgcaccctgcctcatgcacggcgcggccatgacgcctccgcaccgccgcatggttcacctcgccccgcgccacggccacccgcccgcgcagcttcccgctccacaactgcccccgacagacttgccgctatcgctcctcccgccgccgtcgctggcctcgctgctgctcgcggccgtcgcgtcctcgccctcctttcctcacctccgccacctccatggcctccttgtccgcctccacctcccgccgccgttcaacccgttcctcctttcccgcctgctccgccgcctcgccgcgctccctcgcccgcccttgggcgcgccgctccgctacgcggtcgccgtattctcctccctctcgccgccggacccgttcctcgccgccgcgctgctccgcttcgcgcacctcacgcagccgcccctggagaccttccgcctcttctcccgcctacgctgcgcgcacggcagcgacctccctttcctcccgttcgccttctccccgctggccaagtctgccgcggcggcgcgctcgctgcacgccgctgccagtgcgcacgcggtgtcgctccttctcggagggttcgataagcatcggtttgttgagaactcgctgatcagtgcctatgttgcgtgcggtgatgttggtgccgcgcgtaaggtgtttgatgaaatgctggtgaaggatgtcatttcgtggacaagcattgtggtggcgtattctagaatccgtgatatgggttcagctgaggaagtgtttgcgctctgcccggttaaggatatggtggcatggacggcaatggtgacagggtatgcacaaaatgccatgccagtgaaggcactcgaggcatttgagcagatggcggtggccggcatgcccattgatgaagtttcactcaccggtgctatctcagcttgcgctcagctcggtgcggtgaagcgagccgcctgggttcaggaaattgcagaacggaatggtcttgggaggaatgtggttgtcgggtcagggttggtggacatgtatgccaagtgcggtctcattgacgaggcgcgcaaggtttttgaagggatgcacgataagaatgtgtatacctatagctcaatgattgttggcctagcatcgcatgggagggccaatgatgtaattgctttgttcaatgatatggttaggagggcagatgtggaacccaaccatgttaccttcattggagtattgacagcctgcagccatgcaggtatggtaaaagaagggcgctactactttgcgcagatgaaggacaggtatgggatattgccttctgcagaccactacgcttgtatggttgatttgcttgcacggtctgggctggtaactgaagcccttgaccttgtgaaatcaatgactgtggagcctcatggtggtgtctggggggcactgttaggggcttgccgaatccatggaaatactgaagttgctaaaattgcagctgaacatctttttaggcttgagccagagggcatagggaactacgtgttgttatcaaatacacttgcatcagcaggagaatgggatgaagtttcaaagcttaggaaactgatgagaatccgggggctgaaaaaggatcctgcagtgagctggtttgaaggccgtgatggatttgtgcatcagttctttgctggtgataatacccacccatcgatgcatgaaataaagaaaagattattggagctacgggaaaaattgaatcttgcaggttatgtgccaatccttagttcagttgtttataatgtaagcgaggaagagaaagaaaggttgttaatgggccatagtgagaagcttgctctgtcatttgggttgctcacacttgagtctagatcctcaattaggatagtaaaaaatctaaggatatgtgaggactgccatttgtttataaggttggtgtcaaaagttgagcccatcgagattctagtcagggacaatatgagatttcatcacttcagagatggagaatgctcatgcggcggattttggtgaatgcaggatatggattttattagtagaaaataaacatgtgagaataaacctccatcaattaatagtaccttg

SEQ ID NO: 126734 - DNA, 1350 bp, Zea Mays
attgactgaaaccaccagctagccacagcttgaaaccccacacttttgaagcgctcacgcaacagccttcggtaagcaactcttgcattggtaggttaaatttgcagattccttcgaacgagtacgtactagcagtagcttaagagtactgcgatcgatggcgagtggtgggctgagcttcgtcgtcgtcgccaccctcgtcatcgtgtccgcgggcctcatgccgccgcctgccgttgccgagctggcgacggactactatgccagcacctgccccaacctggaggtcatcgtccggagctccgtgaagcagtccatggcgcagtcacccatctccgcgcccgccgcgctcaggctcttcttccacgactgcgccgtcaggggctgcgacgcgtcgatcatgatcgtgaactccgacggcgacgacgagtggcggaacagcgacaaccagtcgctcaagccggaggggttccagaccatcctggacgccaaggctgccgtggacagcgacccgcagtgccgctacaaggtttcctgcgccgacatcatggccgtagccgccagagaatccgtctaccagagcggcggaccctactacgaggtggagctgggccgttacgacggccgggtgtccaccagggacggcgtcgtgctgccgcacgccaacttcgacctcgaccagctcaccgccttcttctccagcctcggcttcacccaggccgaaatggtcgcgctgtcaggcgcccacaccatcggcgccgcggactgccctttcttccagtacaggatcggcagcgacgcgaccatggaccccggcctcgcgtcgcagctgaacggcacctgcagctccgaccccaacgctttcgccttcctggacccctcgcccgtggccttcgacaacgccctgtaccggaacctgcagggcggcaagggcctcctgggctccgaccaggtgctctactccgacccgaggtcgcgcggcacggtcgactactacgcgtccaaccagggcgccttcttcgccgacttcgtggcggcgatggccaagcttgggagagtcggcgtcaagacgccggccaccggcggcgagatacgccgggactgccggttccccaactagttactggttaattaacctccatcgtacattgccacattgacctcgatatatatatactggtattagttagtagtctatacaacgactgtacaattacaaaattttacaataagttcatggctttgatttaggagcctcaccctgatgtgtgtataatacgtactagctagcttctcgtgtgggcaagccaagtgtgttcttttcaatgttgtcatcccaagcaaccattc

SEQ ID NO: 126735 - DNA, 1339 bp, Zea Mays
gttccattccgattccaacgcaccattcttttttatcgctttcggccagcctctcggtcgaaccaaaaaactgcccacggctagctgccacgcgctttctcggagagatcgacaagctgcaccctcatatcattcatcgatggcgagccttgggctggtcctgcttgtcgccgtcgtcgtgtccgcggcgctcatgccaccgtccgccgtcgcgcagcagctgacgccggactactacgccagcacctgccccaacctcgaggccatcgtccggcgctccgtccagcagtccatggtgcagtcccagatcgccgcgcccgccgcgctcaggctcttcttccacgactgcgccgtcatggtacgtgcgctaacgctacgcacgtacgggcacgtacgcacagccaacccagtcgctcaatggtgcacgcgcgcggatgcagggctgcgacgcgtcgatcatgatcgtcaactcgaacggcgacgacgagtggcggaacaccgccaaccagtcgctcaagccggaagggttccaggccattctcagcgccaaggccgccgtggacagcaaccagcagtgccagtacaaggtgtcgtgcgcggacatcatggccctcgtcgccagagaagccgtcttcctgagtggcgggccgtactaccaggtggagctcggccggttcgacggcagggtgtcgactagggacagcgtccggctgccgagtgtcaacttcaccctggaccagctcaacgccttcttctccggcctcggcttctcccagaacgaaatggtcgccctcttaggcgcgcacaccctcggcgcggcggactgccctttcttccagtacaggatcggcgacccgagcatggacccgagcctcgcgtcccagctgcgcggcacctgcggctccaaccccagcggtggcttcgcgttcttcgacccctcgccggtgaggttcgacaacgccttctaccggaacctgcaaggaggcagggggctcctgggcaccgaccaggtgctgtacagcgatcagagatcacgcagcgcggtcgactcctacgcgtccaaccagggcgccttcttcaccgacttcgtggcggcgatcaccaagctcgggaggatcggggccaagacggcggctactggtgagatacgccgcgtctgcaacttcccaaactagcgagcgagtatctgagcttagtttattggcaacgactgctatgcatgcaagcagtccttctttataagcatgcaagcaaactatctgttccattagattacgatccaaccacagatataaccatgatttgttagaggagttttttataaagattattgagctgg

SEQ ID NO: 126736 - DNA, 1501 bp, Zea Mays
gttccattccgattccaacgcaccattcttttttatcgctttcggccagcctctcggtcgaaccaaaaaactgcccacggctagctgccacgcgctttctcggagagatcgacaagctgcaccctcatatcattcatcgatggcgagccttgggctggtcctgcttgtcgccgtcgtcgtgtccgcggcgctcatgccaccgtccgccgtcgcgcagcagctgacgccggactactacgccagcacctgccccaacctcgaggccatcgtccggcgctccgtccagcagtccatggtgcagtcccagatcgccgcgcccgccgcgctcaggctcttcttccacgactgcgccgtcatgggctgcgacgcgtcgatcatgatcgtcaactcgaacggcgacgacgagtggcggaacaccgccaaccagtcgctcaagccggaagggttccaggccattctcagcgccaaggccgccgtggacagcaaccagcagtgccagtacaaggtgtcgtgcgcggacatcatggccctcgtcgccagagaagccgtcttcctgagtggcgggccgtactaccaggtggagctcggccggttcgacggcagggtgtcgactagggacagcgtccggctgccgagtgtcaacttcaccctggaccagctcaacgccttcttctccggcctcggcttctcccagaacgaaatggtcgccctcttaggcgcgcacaccctcggcgcggcggactgccctttcttccagtacaggatcggcgacccgagcatggacccgagcctcgcgtcccagctgcgcggcacctgcggctccaaccccagcggtggcttcgcgttcttcgacccctcgccggtgaggttcgacaacgccttctaccggaacctgcaaggaggcagggggctcctgggcaccgaccaggtgctgtacagcgatcagagatcacgcagcgcggtcgactcctacgcgtccaaccagggcgccttcttcaccgacttcgtggcggcgatcaccaagctcgggaggatcggggccaagacggcggctactggtgagatacgccgcgtctgcaacttcccaaactagcgagcgagtatctgagcttagtttattggcaacgactgctatgcatgcaagcagtccttctttataagcatgcaagcaaactatctgttccattagattacgatccaaccacagatataaccatgatttgttagaggagttttttataaagattattgagctggtggtgaaaaggtttaagtgttaaatgtgacctacggttagattacgatctaatgaaccagatggtttgcttgaacgcttgcaaaaaaagactgtttgcataaccgtcgttgcctttagtagccttactggccggccgttttcacgtcagaatatttaacagtgtacactacatctacacgtaattcagggcggcgactctgtacaatcaaagtttatatacaagcgtaaaaacgagtcttttaa

SEQ ID NO: 126737 - DNA, 667 bp, Zea Mays
ctgtgcaattccttccatgtttatccccctgtagccatctctctcccaaaacataccatgaaacatccgttgagggctttcttcagtacgagacgtagatcttctccttgctgtctgactacttgatccttgacgattagatgaataaattgcatgaggtagttctgcataaaagggtcttcctaatctctctgggggagtaccatccatgtgaaaatgtccgcattctggatgaatgcttgcaacagtctcatgcagagcaaatacactgtcctccctttcacctggcatcatcctctccctggcacgtagagtaaaaggtcgtctagtccttattgaatctgtatgatccggaatatttcggctattggtccttgctgtttgttgagaagctgattgttcagcagctctagctctaggaccagtactgccaggataactagcacgtggctgactgaaattagattgttcacttatccttgatcttgaagaacttcctgcaccagaagttctcttctttgtaacttcgattctcctatcacgagcagaatcagatgaagagcatcctgaaggcagaacatcagatattgaagtgcaaccaagatttttgaggccacgtctctgtgctccagtgccaggggcagttggagcttttgaagagcttaca

SEQ ID NO: 126738 - DNA, 107 bp, Zea Mays
ctggaatggtgtggctgtgtcggttaagttgggttcagttgtgcggcctgccaagaaggaagcccagttaagagagcgcgcggaacaaaaggctatctatcttgcgg

SEQ ID NO: 126739 - DNA, 1929 bp, Zea Mays
accggcaaaacaaacaattgacaaatctctctgtctctgatgcagcggaagccgcccatggccacgcggccgtcgctgcggtcgagcgacggcgcgcgcccaagaagcaagagcggggccggcaggcccccgtccagctcgcgcagccccggcccgtcgcgcccgtcctccgcggcggcggccgacaagccggtgccgtccttcctccgccccaccgttagctcgtccatgcacagctcctcgtcgtcctcctctctgccgttgccctgcgcctcctcctcatccgccgcaggctccaagggcgccgccgccgctacggcgaggcggtccgccgacaaggccccggcgcggccggtgggcgcgccgcggccgatcacgcccaaggacagggcctccgcgcagcctgtgggcgcgccgcggccgatcacacctaaggacagggcctcggcgcagccggtgggcgcgccgcggccgatcacgcttaaggacaaggccccggcgcagccggtgggcgtgccgcggccggccaaggccaaagcgccggcttccgcgtcgctgtggggcgcggtgtcgccgaggcagttgatgcagagggcgtccaacgcgttcaaggctagcagtaggtcccgcagcaagaagggcaaggaggaggccgcggcatcagcgtcgtccggcggcaagggcggcgctggtgcttccgccagggccaaaggccagacgtcgagagcgcagcaccagcagcagcagccggagacgcccgccgagccgtcgcctgccgtgactcccttggaactggaagcggaggagcctgtcctgttggagtccgacgctgcaggccagaatggacaggacgtcgcgacgtcgcaggaggctgccagcactgacatcacgactgtggcggtgaggtgtcaagaggagcaggtcggcgcagggcagccgaaggaaaaagcggaggcggagatgtcggatttgcaagaggagaggccgcagagcagcgaggtcgtggagacagaaacgggggcccatgagcgcacggacgatggctcaccggccgtcgttggagaagcagcagcaacacctgagggagaagatgagcttgcaaccagcgcggcagaagagaagatcgtcgaggagatccagcgagcagaggcgactgagaactcgaaggcgaacgcgaaccctgaggaaccagaccaagaaaccggcgtgatctccgaagaacccaaggagggaacgagcgtggtctctgaagaaccaaaaccaaaggaggcagctgatcctaccactgcgcagaagcgcgaggaggcgtccgacgagccaaaaacggctgccggatcgaacgcgtcagctccgacgacgccactgacagaagcggccaactacgacggcaacgacgacgtggaggcaacgcctaaacaggtgagcgcttcggagcccgtgacgccggtggcagaaggcatcagcaagggcaaggaagtgatggagacgcagcagcagagcgcgtcggcgccgacgacgccggcgtcgaagcaggcggcgatccccgaggacgcggcgtcggcgctggcgttcagggggcgcagggtgaggacggccatggagaggcggtcggaggaggagcagcccaagcggaaggaggtggcgcggagcaacgacgtgatcgaggaggccaagagcaagctgatggagaagcggaagagcaaggtgaaggcgctggtgggggcgttcgagaccgtcatggacagcccccgggcgagctgattcgagttttttttttttggagggaagatcggtcgagtctcgactggcgctggcggtggtgtctgtctggtttgaattttggtagggttctctttggatcgttgctttcttgtttgttggtcggtcgttttgcttcttgtgatcactcgaacaaacggagatgtgcgt

SEQ ID NO: 126740 - DNA, 100 bp, Zea Mays
atgattttgaaagacagtaacagcatccgatacggcagaccgtaccgtcgtctccgagtcaccgaccagaaatactgctgcagtgcatgccaccagtgcg

SEQ ID NO: 126741 - DNA, 1577 bp, Zea Mays
gatccaggcaagagccgtgtgtgcgtggctccgtacgtctgccccgccgcgtcaacgtcggcgtcgtggacgggcggcgcaagccatcatatcggatggatggcgcagccagctcacgccacccctgggttgcgagacgatatgatccatcgaccgatcgatcatcctctctggtccaatccaaccatatatccgcccggccggaagcgtcaatccggccggcgcgagctataaataccgcggctcggtcgcctcttcgtcgtcgtcgtcgtcgcatcgcacgcaccatcgtcctgccgatcgatcgcagccagccagtcttgctgagagacgaactgaagcctgaagtgaaccgatcgatcgatcgatcgagcgagcgagctcccatgaaggcgttgattctggcggcggtgctgctgctgcagcacgggggagccgcgagcgccggcggcaacttctaccaggacgtggacatcacctggggcgacggccgcggcaagatcctcgacaacggccagctcctgacgctgtccatggacaggtcctccggctcgggcttccagtccaaggcccagtacctctacggccgcttcgacatgcagctcaagctcgtcccgggggactccgccggcaccgtcgccaccttctatgtacgtactactacgtacatactacaccgccgccgcctcctcgtcctagcttcgtatatattcgctgtcgtctctctctctcgcgcgctgaacacatgtcgtcggtcacgcacgcacgcgcacagctttcgtcgcagggttcgcagcacgacgagatcgacttcgagttcctggggaacgcgagcggggagccgtacacggtgcacacgaacgtgtacagccaggggaagggcgggcgggagcagcagttccggatgtggttcgaccccacggcggccttccacgcctactccgtgctgtggaaccccgcccacgtcgtcttctacgtggacggcgtccccatccgggagttccggcgccgcggcgacgggaccgtgccgttcccgacgtcgcagccgatgcgggtgtacgccagcgtgtgggacgcggaggagtgggccacgcagggggggcgcgtccggaccgactggtccaaggcgcccttcgtcgcgtcgtaccgcgggtacgccgccgccgggtgcaccgcgccggacgccgccgcctgcgcgcgctccaacggcgcatggatgtcgcaggagctcgacagcgccggccaggagcagctccgccgggcgcaggccagctacatgatctacaactactgcaccgataagtaccggttcccgcagggcccgccgcccgagtgctcgtcgccggccaagtagtagatgagtagaattgatcggatacagagagcaatcaattaattaaatcgacccgtcgcttggtttttggtttacacattgtactacggcataagttcggcggatatatgtatacgtagacggctagacgccatgcatgtgtcttggcatgtatcgtattcgtatatatcgtaattcgtatgtacctcagtatacctgcatcgtacatttacatgcatatata

SEQ ID NO: 126742 - DNA, 1739 bp, Zea Mays
gatccaggcaagagccgtgtgtgcgtggctccgtacgtctgccccgccgcgtcaacgtcggcgtcgtggacgggcggcgcaagccatcatatcggatggatggcgcagccagctcacgccacccctgggttgcgagacgatatgatccatcgaccgatcgatcatcctctctggtccaatccaaccatatatccgcccggccggaagcgtcaatccggccggcgcgagctataaataccgcggctcggtcgcctcttcgtcgtcgtcgtcgtcgcatcgcacgcaccatcgtcctgccgatcgatcgcagccagccagtcttgctgagagacgaactgaagcctgaagtgaaccgatcgatcgatcgatcgagcgagcgagctcccatgaaggcgttgattctggcggcggtgctgctgctgcagcacgggggagccgcgagcgccggcggcaacttctaccaggacgtggacatcacctggggcgacggccgcggcaagatcctcgacaacggccagctcctgacgctgtccatggacaggtcctccggctcgggcttccagtccaaggcccagtacctctacggccgcttcgacatgcagctcaagctcgtcccgggggactccgccggcaccgtcgccaccttctatctttcgtcgcagggttcgcagcacgacgagatcgacttcgagttcctggggaacgcgagcggggagccgtacacggtgcacacgaacgtgtacagccaggggaagggcgggcgggagcagcagttccggatgtggttcgaccccacggcggccttccacgcctactccgtgctgtggaaccccgcccacgtcgtcttctacgtggacggcgtccccatccgggagttccggcgccgcggcgacgggaccgtgccgttcccgacgtcgcagccgatgcgggtgtacgccagcgtgtgggacgcggaggagtgggccacgcagggggggcgcgtccggaccgactggtccaaggcgcccttcgtcgcgtcgtaccgcgggtacgccgccgccgggtgcaccgcgccggacgccgccgcctgcgcgcgctccaacggcgcatggatgtcgcaggagctcgacagcgccggccaggagcagctccgccgggcgcaggccagctacatgatctacaactactgcaccgataagtaccggttcccgcagggcccgccgcccgagtgctcgtcgccggccaagtagtagatgagtagaattgatcggatacagagagcaatcaattaattaaatcgacccgtcgcttggtttttggtttacacattgtactacggcataagttcggcggatatatgtatacgtagacggctagacgccatgcatgtgtcttggcatgtatcgtattcgtatatatcgtaattcgtatgtacctcagtatacctgcatcgtacatttacatgcatatatatctccctatatataaatatatatggttttattacacgggaagaatggctagctgcaccgaccgaatattattggctttgttgtcggaccgactgcgtcaagccggccgtcaacacggcaacgttcgctttgtcaaaaggggctttgacaagaacctgtggagggcgcgcgattgtcaaaaccgtgcactggaaaccctgcgcacagcacacgtactaaccggaagaatccaacacgtatactaaagctttggcgccgcggagacgggacgacgaccgggctctccgc

SEQ ID NO: 126743 - DNA, 328 bp, Zea Mays
ttgtagtagttgggaagtggaaaacttggatgcaatgaatggtggggtgttggctcactgcaacctcttcctcccggcctcaagcgattctcccgcctctcaagtagctgggattacaggcatgtgccaccacacccagctaatttttgtatttttagtagagacagggttttgccatattggccaggctggtctcaaactcctgacctcaagtgatccgcctgcctcagcctcccaaactgctgggattacaggcatgagccaccatgcccaaccccaacaattttaaaaatctaaaatgttttttgtttgttgtttgtctgagaat

SEQ ID NO: 126744 - DNA, 1031 bp, Zea Mays
actcctacaactctttccgtccacgaatactgctcccgtttgtttcaccacctcacctcagtcctcagcgcgctcagctacacttgagcgcagcgtctctccctcccgcgccgtctcgtctcctcgtgctgtcgtgcccgtgcggcagccaggccaagagcgtcagccccattcgcccgtgaggccgtgacgcaatcgagccccatgaggcggcgacggtgggcacgcgccgccgccgcagcggtgctgtcgtgcttcgccatcgccgtcgtgctgcagctcgccgtcgccgagtgcaggacgcagtcgaggcgcgcgcgcggtgacgacggccacgcccacgcgcgccctcgcactcacagcgggagtgggctgccgccgtcgacgggtgcaacggcgacgaccgtgcaccaccagcaccgtgctgtgcccacggcggctgctgccgacgcgttagtccgcttcgacgccgtcgtgggcgcctcccggtgtaagagcggcaggcggaaagcagcgagcggcggcgctactgctgctggtggtcgtggtcgtgatcgtggtcgtggtgcatgcgccgacgacgacgatgacaagcggcgcataccgacggggcctaaccctctgcacaacagatagctagctgatcgtgcatgcagcccagcaagatccatcaatcctataagacgagaggagcaagcaacgagaaatgcaatgcaagccaagccaccagagttcagggctttcttggtacttacgagcgagctcatcatcatctcctaccaccctctgttctgttctgttcaccacggacatggaccagaagacacgatagcgatcggcagtagtggttgagcttcaggagttgcgaaaactctctggacgctgtcgtccattaatttcctcctcttcttttttttgttcttcccgagcttttcgtctgccagcaccgggtgtatattcttcctagctagctgcgctgcgcctctcttgttcagttgttctgtcagaagcaaagcaaaagaatcgttgcg

SEQ ID NO: 126745 - DNA, 212 bp, Zea Mays
ggcttaacctctaggccttaatgacataaattgaatttggaatgtaattatggataatacttaaaagataatcaatttctaaatgagagtagtttatcttataattctagctttcatttgttttaatcactacttaacctttttgagctatgttccaaacatttagagagtaatcaattccccaattaggattagtccatttttataacttg

SEQ ID NO: 126746 - DNA, 631 bp, Zea Mays
atggccgagcacatcttcaaaaataaattcgaggtgagcaagctcgatcctgatggcgacgaagtcaatcgtattgaggctcatagcgtgaacgaaatgtacatgcagctagatgttgccactgaggtctatgagcctatcccatttttattgggagcacaacatgatggcattcctttcatgctgttgggaagaaaaacgcttgttgacgattatgaatacatcatgcttggaaagcttttcaaggtctcaaaagacagtactaaagacgatctacatggtgatgaaatactgcctcagtttgtggccatgtgcccatgtgtaaaaaaagatggaaatcgttgctaagccagtctatttaaaaaaataaagcaattggtttaattagataagtttgatggatgggttatagagcatgcatgttattaattaatacgacacaaagcagatcaaacacatagaagacacatatttagggtctgtttgagagagctttgcttcaaaaacttcagctttggtttccagtttcactataaaacaactctagcaaattgttaaggtgagttccaggagcgtttggtttgtatatggactccaacttctatagtacaattgatttgtgtgggtttcc

SEQ ID NO: 126747 - DNA, 1062 bp, Zea Mays
aattaaaaatatatatttgcatttcatgatggatactttttggttgttgcatttaaatcaagtttgaagttgaaacgtgaccttgatttggaaaagtgtgaatagaaattgaaaagaaaacataaacgactaaaaaaacacaaaccaccatcgggctcaaattagtgtgctcagcctcctctccccttcctactcaagcagctccacgcccacgtcttcttttattttattttatttctccttattttattatttagatgacgtaacgatgacatcaaacacgtcctagggtccgttgcccagttatgcatcttcgtcacgaatcagaacagaaaccaacagaaatcccgataatcctgtcgcatgatcttctcgctgaacaccttcttgaccggctccagggtatttaaatcgatgcccagcaaaccgtttcacccatcctgcctctcccgtgagccaccatggctggctcgtcgccgtgagagaccatgcctactccgtcgtcgagccaaactcgcgaagggaacaacgagagccaaggatcctaggccaccgtcgaaccatgagcgtcgccgagataagaccagagtgacgccgctccctgtcgctcagattgagggcagttgcctggaacctcgccggcatcaaactccgccgcggtgttgccgagcgccgccgtgtcggacgagcgaagaaagagagagaagaaggggttagcgtgtctgcggggagaaacaactccggccacccgcatccggtagcaaggtatgaatcacctccatggtttctgttgagcaccatattgagcgggcggacggtccggccctgaggccggacggtccgcggtccggacagtccgcgcctgtgggccggacggtccgtgcatgcgcagagcagtttaagggttccgagttttgtgctatgtttgttggctagatttgcggaattaacccggaatccagtcgtgtaaagggtccagcccccctcctctatataaagagaggtctacggccgatttgtaatcaacaatcgaatcaatacaacttctacttcgcattttat

SEQ ID NO: 126748 - DNA, 1784 bp, Zea Mays
cattcacaaaacatacaccattaattattggtacattcacacgtcactgccagaggaaaggaccttcgcgagcggcggcacatgaggacggtggctctgagctggagctccctgggctcgctcgtggccacggccgtggtggtgcgcacggcggtgcgcgacgtgctcccgccggaggcgcacggcgcgctgcgggcgctcctggcgtgcgccgcggccgccttcgcccagccgtccgacaccatcgtggtccacgagacggacgccaacggcgtgcccaacgagctctacgacgcggcgcagctctacctcggcgcgcgctgcctcgcgtcggcccccgcgctgcacctccacaaggcgcacggcgcgggcgacgtggtggcgtcgctgccggacgaccacacggcgcgggacacgttccgcggggtccgcgtcctgtgggcgtcgcggcgcgcggagtcgagcggcgcctactccccgtccgggttcggcggcggcgggggcgggagaggaggctggtcgcgtgggttcagctacccggtcggcggcgggcaccagcagcagcggtgcctcgtcctccagttcccgcgccgccaccgcgacgtcgtgcgcgacgcatacatcccccacgtcctcgacatggccgccaggctgcggctcaagacgcgggagcggaagctctacaccaacaactacggcggctgcggcgggccggacgcgcacgagatgctgtggtcgtcgcacccgttcgcgcacccgtccacgttcgacacgctcgccgtcgacccggcgctccgcgacggcatccgctccgacctgctccgcttcgtgcgccggcgggaccactacgcgcgcgccggccgcgcctggaagcgcggctacctgctgcacggcccgccggggaccggcaagaccagcctcatcgcggccatcgccaacttcctcgagttcgacatctacgacctggagctcaccgcggtgcagtccaacaccgacctccggaggctactcgcctgcacgcgccccatgtcgctgatcgtcgtcgaggacatcgactgctccctcggcctcctcgaccggacgaaggccgccgacgacgccgagcgggacattgcgccgccgcgccatctcagcttgtcgcgattcccaccgatgggagggccagggatgtacggggataagatcagcctgtccggcgtgctcaacttcgtggacgggctctggtcgtcctgcgtcggggagcgcctcatcgtgttcaccaccaaccacgtcgaccgcctcgacccggcgctgctgcggcccggccggatggaccgcaagatcgagctcggctactgcaagggccccgcgctgcgcgtgctcgccaagaactacctcggagactgcggcactcccggcggcggcgatcacgaaccggctaatggtgaccagaggtacgaggagctggtcggggaggcggaggtgttgctggaggaggtgcacttgacgccggccgatgtcgcggaggtgttcatggggtgcgacggcgacggtgccctcgccgcgctacagaagctcgtcgacgatctcagaagcaagaaagtcgttcaggaatgcgccgccagcgacgtgtgacgccatgtgcccatgtgtgtagtacacgatcaaggtcgctgtcaggttgtcacctatcaaaaaacagtttgattgaaaacgccatgagtggaagctttcacatggtacattggtgaatcgggtgaaaagttgttaactattattggaaagttgcatcatgaaccaatata

SEQ ID NO: 126749 - DNA, 98 bp, Zea Mays
aggcttatccctgcaagcacaatcaagaacacaagcaagaacaggaagaacgcaaccaaaactatgttgattacgacataaggtctcacaaaccaatg

SEQ ID NO: 126750 - DNA, 1288 bp, Zea Mays
ataactacggccaccagtcttctcccactcccagtgccagccgccttgcgcttgccctctctgcgacgactgggtgcgccgccgccgccgctgtcctacgtcaggtgtcgaagccttcgccggcgaagagcgctcaccagattatccatctactagattcacccctggtggaggaggagaagaaggtaagcgaagatgctacggcggaacatacgtcagcgtcgggagtacctgtactccaagagcctcgagggcccccagcgggcgctgttcgagaagaagcgccggatccgggcggcgctcgaggagggcaagcccatccccaccgagctccgcaacgaggagcacgacctgcggaggcagatcgacctcgaggaccaggagcgtcaagttcccaagagcatcgttgacaacgagtacgctactgccaccattcgggagcccaagatactattgaccacttctcgcaatcctagcgcgcccctaactcagtttgttaaggagctcaaggttgtcttcccaaactcacaaagaatgaaccgtggtggacaggtcatatcagaaattgtggaggcctgccgctcacatgatataacagatcttattctggtccatgaacaccgtggtcaacctgatggtttgattgtctcccatctaccacatggtccaactgcatactttgggttgctcaatgtggtgacacgtcatgatatcaaggacaggaagacgatgggcaaaatgtcagaagcttacccccatttaatactggacaacttctcaacccagattggcgaaaggactgcaactattctgaagcacctctttcctgtcccaaagccagattcaaagcgaataattacatttgctaacagagacgattacatctctttcaggcatcatgtatatgaaaaaccaggtggccccaaatcgattgacctgaaggaggtcggcccccggttcgagttgcggctgtaccagatcaaactaggaaccgtggaacaaaaggaagcgcagagcgagtttgtgctgcggccctacatcaatactgccaagaagcaaaagacgcttggagcgtgagctacactgcagtacagaacttaatttttttttggtcttcatcgtttatgctgtagtagcaacattcacagggtgattagatcaatatctgtcaatctaatagaagccgcaatgtacccctgactcgaacccaagctggctgacttttttttttttgtcacggatgtgggttccacatgtcagtcctttgtgtcttcttttctcttccatt

SEQ ID NO: 126751 - DNA, 1422 bp, Zea Mays
ataactacggccaccagtcttctcccactcccagtgccagccgccttgcgcttgccctctctgcgacgactgggtgcgccgccgccgccgctgtcctacgtcaggtgtcgaagccttcgccggcgaagagcgctcaccaggtatcccccccccttattttccctgtcctgctgtgccagagcgagttttcaagctatttgactatttgatgcctgctcccaaagattatccatctactagattcacccctggtggaggaggagaagaaggtaagcgaagatgctacggcggaacatacgtcagcgtcgggagtacctgtactccaagagcctcgagggcccccagcgggcgctgttcgagaagaagcgccggatccgggcggcgctcgaggagggcaagcccatccccaccgagctccgcaacgaggagcacgacctgcggaggcagatcgacctcgaggaccaggagcgtcaagttcccaagagcatcgttgacaacgagtacgctactgccaccattcgggagcccaagatactattgaccacttctcgcaatcctagcgcgcccctaactcagtttgttaaggagctcaaggttgtcttcccaaactcacaaagaatgaaccgtggtggacaggtcatatcagaaattgtggaggcctgccgctcacatgatataacagatcttattctggtccatgaacaccgtggtcaacctgatggtttgattgtctcccatctaccacatggtccaactgcatactttgggttgctcaatgtggtgacacgtcatgatatcaaggacaggaagacgatgggcaaaatgtcagaagcttacccccatttaatactggacaacttctcaacccagattggcgaaaggactgcaactattctgaagcacctctttcctgtcccaaagccagattcaaagcgaataattacatttgctaacagagacgattacatctctttcaggcatcatgtatatgaaaaaccaggtggccccaaatcgattgacctgaaggaggtcggcccccggttcgagttgcggctgtaccagatcaaactaggaaccgtggaacaaaaggaagcgcagagcgagtttgtgctgcggccctacatcaatactgccaagaagcaaaagacgcttggagcgtgagctacactgcagtacagaacttaatttttttttggtcttcatcgtttatgctgtagtagcaacattcacagggtgattagatcaatatctgtcaatctaatagaagccgcaatgtacccctgactcgaacccaagctggctgacttttttttttttgtcacggatgtgggttccacatgtcagtcctttgtgtcttcttttctcttccattggtgcgtttcctcttaacacgttataggacaggcttgccggtctttcgcg

SEQ ID NO: 126752 - DNA, 1156 bp, Zea Mays
gccgccgccgctgtcctacgtcaggtgtcgaagccttcgccggcgaagagcgctcaccagattcacccctggtggaggaggagaagaaggtaagcgaagatgctacggcggaacatacgtcagcgtcgggagtacctgtactccaagagcctcgagggcccccagcgggcgctgttcgagaagaagcgccggatccgggcggcgctcgaggagggcaagcccatccccaccgagctccgcaacgaggagcacgacctgcggaggcagatcgacctcgaggaccaggagcgtcaagttcccaagagcatcgttgacaacgagtacgctactgccaccattcgggagcccaagatactattgaccacttctcgcaatcctagcgcgcccctaactcagtttgttaaggagctcaaggttgtcttcccaaactcacaaagaatgaaccgtggtggacaggtcatatcagaaattgtggaggcctgccgctcacatgatataacagatcttattctggtccatgaacaccgtggtcaacctgatggtttgattgtctcccatctaccacatggtccaactgcatactttgggttgctcaatgtggtgacacgtcatgatatcaaggacaggaagacgatgggcaaaatgtcagaagcttacccccatttaatactggacaacttctcaacccagattggcgaaaggactgcaactattctgaagcacctctttcctgtcccaaagccagattcaaagcgaataattacatttgctaacagagacgattacatctctttcaggcatcatgtatatgaaaaaccaggtggccccaaatcgattgacctgaaggaggtcggcccccggttcgagttgcggctgtaccagatcaaactaggaaccgtggaacaaaaggaagcgcagagcgagtttgtgctgcggccctacatcaatactgccaagaagcaaaagacgcttggagcgtgagctacactgcagtacagaacttaatttttttttggtcttcatcgtttatgctgtagtagcaacattcacagggtgattagatcaatatctgtcaatctaatagaagccgcaatgtacccctgactcgaacccaagctggctgacttttttttttttgtcacggatgtgggttcca

SEQ ID NO: 126753 - DNA, 2003 bp, Zea Mays
ggtcgctatagagcaaggatcactatcaaatcttatagcctgaacgtacctgtagatgttagtgactaaaaattaattaaaacaagtaaacattaatcgctaaattgcatggtgatttatttctttttaatattgcttgtatatttatttcatggtttgtttatgtatggacatgactataatatgcaattgtgttctttgtgcttatatgatattagattcgagttgaaagtcgtttcaaatgtttgttatttatttgcattcgtaataatttattcaaatgtctattatttatttggtaatttttttaatcaatttttgattaatttaaaaatgcatttcgaaataaaaaaagaaaagaaaaccctccctaaccctaaggcccactagggcccatctacctaactctccctcccacgccgtccctatctcctcccgacatcgccgtcgtcgcccattcgcccccgtccctgcagtcgcccgtgctccgcctgctccaccagggcgcctcgccctaggggatggtctccgaccacctcccttcaccgccaccacgtgctcagtgacgcctaggtcatcggcgctgaagtttggaggccctgtacgtgcttcacagagatcgccgaccatgggctacgcagagatcgccatccgcccctctgggagcggcaagaggttcctggagaccatgaaggccatacagggggcactgataatgtcctccagcattcagatcattctaggctacaaccagctatggggtattttctccagaaaatacagaggcagggtggcctatctcgaagattttcaaatgtgtcctattacggtctcacaaccccgccatataaactggatgctctggaaccttatatgagcaagaggacagttgaacttcactggggtaagcaccatcaagattacatggatggcttgaataatcagctggctaccagccctctgtatggatacactctggaggatctgataaaaaaagcttataacaatgacaatccattaccagagtataacaacacagcacagtgaagagaaatgagagaaagcttttggttgttcatacacgaaatgctatctccccacttgcttttggtgacattcacgcttactacttagactacaaggatgataagctaacatatgtcacaaacttcatggaccatcttgtctcttggcatactgtcactctacgcatgatgcgtgcagagtcttttgtgaaccttggtgagccaaatatcctagaggcttgagctacagatacaccctagttatcatcatgaggcattcttcggatacatcggatcaaatcctgctggaggagccagagagttggaaaatctcatgtctcacaagaaatgcttatcaccccaatgtcatatacgccaagataagctgctgggatttcaccattgcccttggatattcctacaaggaaatcactagtcagcatccagtttgaagacatgcaacaaaacaactctagaagctatggagctggtagattctggagttggcagtaaggcagtgatccaacttgggctttgaagccatggtgctttctctagacagctattatgtctgtagtgttgttagaataatcctggttctgtgttttcataacttcatcatgctagtgttctgctgtagcggaacacagaatggaacggaacgatattcttgttttactggttgagcactacacgacgattgtttttctagggtgttctggacaaagaaagcttgtaccttaaaacaggaggatacaagaagctggagtggttgtctgaaggcttttgaactgcttgaagcattaggttagctctggagattttgtgaatgatctagctagctatctgtaaatgatctagttgtgaatgatattataattctgatgcttttgtgaatatataattgtgtttgtgtatattgattaactgtgtatgtctttatgatttgtgtataaaaatctgtgatttgtggtgctt

SEQ ID NO: 126754 - DNA, 1735 bp, Zea Mays
ctttttaatattgcttgtatatttatttcatggtttgtttatgtatggacatgactataatatgcaattgtgttctttgtgcttatatgatattagattcgagttgaaagtcgtttcaaatgtttgttatttatttgcattcgtaataatttattcaaatgtctattatttatttggtaatttttttaatcaatttttgattaatttaaaaatgcatttcgaaataaaaaaagaaaagaaaaccctccctaaccctaaggcccactagggcccatctacctaactctccctcccacgccgtccctatctcctcccgacatcgccgtcgtcgcccattcgcccccgtccctgcagtcgcccgtgctccgcctgctccaccagggcgcctcgccctaggggatggtctccgaccacctcccttcaccgccaccacgtgctcagtgacgcctaggtcatcggcgctgaagtttggaggccctgtacgtgcttcacagagatcgccgaccatgggctacgcagagatcgccatccgcccctctgggagcggcaagaaaatacagaggcagggtggcctatctcgaagattttcaaatgtgtcctattacggtctcacaaccccgccatataaactggatgctctggaaccttatatgagcaagaggacagttgaacttcactggggtaagcaccatcaagattacatggatggcttgaataatcagctggctaccagccctctgtatggatacactctggaggatctgataaaaaaagcttataacaatgacaatccattaccagagtataacaacacagcacagtgaagagaaatgagagaaagcttttggttgttcatacacgaaatgctatctccccacttgcttttggtgacattcacgcttactacttagactacaaggatgataagctaacatatgtcacaaacttcatggaccatcttgtctcttggcatactgtcactctacgcatgatgcgtgcagagtcttttgtgaaccttggtgagccaaatatcctagaggcttgagctacagatacaccctagttatcatcatgaggcattcttcggatacatcggatcaaatcctgctggaggagccagagagttggaaaatctcatgtctcacaagaaatgcttatcaccccaatgtcatatacgccaagataagctgctgggatttcaccattgcccttggatattcctacaaggaaatcactagtcagcatccagtttgaagacatgcaacaaaacaactctagaagctatggagctggtagattctggagttggcagtaaggcagtgatccaacttgggctttgaagccatggtgctttctctagacagctattatgtctgtagtgttgttagaataatcctggttctgtgttttcataacttcatcatgctagtgttctgctgtagcggaacacagaatggaacggaacgatattcttgttttactggttgagcactacacgacgattgtttttctagggtgttctggacaaagaaagcttgtaccttaaaacaggaggatacaagaagctggagtggttgtctgaaggcttttgaactgcttgaagcattaggttagctctggagattttgtgaatgatctagctagctatctgtaaatgatctagttgtgaatgatattataattctgatgcttttgtgaatatataattgtgtttgtgtatattgattaactgtgt

SEQ ID NO: 126755 - DNA, 3400 bp, Zea Mays
ggagactggagttcacaactgttttcgctgtttctctctcccgtagcccagtttacctcgcctagggcgaccaccgccgccgccctacgccagctgcccaggtcttgggcggaccctttgccggcgacgagcacccaccacaccagatcaaactctagatattgccactctacgtcccagcatcctatgaccacatggtttagacagtgctgtccaggtggatgatgaattgtggtgcccaaacggaggcacgtggcacgcctcttgaagataggcactggttggaaacagattttgttggcgctccaagagttcatacttatgtactttcctttctcaaatcataacaaatcttaggcagttcaagcttagctgaatgtcaacttgcctccacgtgcaagatcccagaaacattgctatgtctcgtccgcttgattttgctgtgcttaaatacaaaaaccaaaagcttgcggaacaactggaagtccacaaatttgagttctgtgctcttgagagtagatttaatgatctaaaagagaaacaaaggacacataataagacacttgttctagtcaaaagttattgggagcgactcatagcagatctgggtatagtttctgtttgcaaaaatgaatcttcacgttcaagctgcagtacagggaacaacaatatacgaaaggactttttaaatggacttttggaggctggtgccacagaaagttcaggttctcccaattgccaactaggaaatgacgtctcttcagaacaatcaacaacaattgatattctgcagaagctattccttccatcaagtggtccatggcatgtgaataacgagtttgtttctgctgctctcatgaagttgccagaaaatgaacacagcaggcaattgcacaatgctaccagcgatgtgttatccaagcttcatgtggtgatgcgtacagtagataatcttcacttgaaacacaggcagttagcagcgaactatcaaaaacaaagagattcgagtgcctggaacagagctgaacagaaacgtctgaaagaggagttgactagtgttgttgccaagttggaaggaagcaaacaaaaactggcagtactgaaagcacagggagacaataaacaagcaacaccgatcctggttcctacgctgggaaacaaaaatatgactgcagaaaaggtgagagataaacaaacagaactgcaagatcttgaagctactcacaaggagttaatggaattgatttcaaagcgtctggaggaaattagaaggctgcatacagagagaattgaaattttgaacaagttagcaacttttcagaatatactaacggatttcaaaagcattcactcttccaaagcttttcaacttgtcaatgaccaacttcagaagtcacaagcagaactggatgatcaccaaacgttgttagagaaattacaggttgagatggatacctttgtttggcgagaaaggcaatttaatcaaaaagttgatttggctgaaatcccccagaaggtttctgcatactgtgtgtctagaattgctgaccttgaaaaggatgtccagaaactgtgtaatgaaaagaatatgcttgtgctgaaacttgaagaggcttcgagagaacctggtcggaaccaggttatctcagagtttaaagctctggtgtcatcactaccgagggaaatgggtgccgtgcaaagtgaactgtccaaacacaaggatgcttccttacagttgcattctttgcgagcagaagttcattcactttctagtatccaaaccagaaaggaacaagaaattgaagaaatgtcatttagatctgcccatgctggatctgatataagccaacttcaatctctggtccgtgagctgagggaaaatacacaggagcttaagctatttgtggagttgtataagcatgagtccactgattccagacagctgatggaatcgagagatagggaactcgctgaatgggctcgagttcacattctcaaatattctcttagtgaaagtaaattagagcaacgtgtaatttcagccaatgaagctgaagcaatctctcagcagaggttggcaactgctgaagctgagattgctgaattagggcagaagctagaaacttctaggagagatctagtgaaacaatctgatatactgaagtctaaacatgaagaatgtgaagcgtatgttgtggagatcgagagcattggccatgcctatgaagatataatgtcacaaaatcaacaattgctacagcagattattgaaagagatgatcataataccaagcttttcatggagggtgttaaatcaaaacagtcacacgatgctttgcatttggaggtgcgctcgttgcaaagaaatttgcagcatgcaagtactttgatggatttgtgcaaccagaaaactatccgcctagaggaccagctaagaggttggtcagagcggttgaggagactgtcagaggatggaatgcagcagtctatttcattgggcaattatcaaaaaaagctgtctggtatgcatggagaagctccaaagctcaggcagtcaatggatgttctacaagcgaaggctgggagcaatcggctggaaattgctgagctgcttatagaactagagaatgagaggtttggtaaaaagagactagaggatgatcttgatctaatgtcaagtaaagctaattctctaagagagaagacagataattcagcagttcttcagaaacttctccatgaggccaaggagtacaggggaatattgaagtgtggtatttgtcatgataggcagaaagaggttgtgattgccaaatgctaccatctcttctgcagtcagtgcatacagaagccacttgggagccgtcagaagaggtgtccatcttgtggactaagcttcggtgttaatgatgtgaaacctatctacatatgaaacagaaggttggcgcctgtgtcgcagcaccaaaacaaaactgcttggcgcttactaatttccggtatatggtaggcggccatggtaattcagtcggtgatgtagcataagattatgtagcatttaagttgctacatgtgattgctggtacccgctggcatatatgatgctggtgttacctcaagcgccttttgtaaagtctgcttgccttgcccaatctggtagaatagcctgacatcgtcaaccattagttccttttaggagaaaaaaatatccaacaaatgaggattgatgcttcctgcaatagtgagcaatgtacaatatatagctttagtcagtttcattgttgtagctgacagtaagaatgtagttttcttttctttttaatataccggttatccagtttgtatgtttctggagtttgccaattctgtttatcaaaaaaaggagatttagtcatttctaacc

SEQ ID NO: 126756 - DNA, 2850 bp, Zea Mays
cgcccccgcacctctttcttccccatatggccatactatcacactagactcctctcctctccgctccgcgccggcatggcctcctgttcccagcgcctctcacctaccgtgtgccagtccccctcacgcgccacgccccccctcggataactactagttgccgtaccgtgggagcgccgcctcgagtctcaccaacaacacctgctggtgcgtagccgcgcccgcgcccccgccgcggctctctggttggattcccgtgcgggatcggcgggcgaacctccgactcaccgccgcgaccgttcccgcattacaggggcgtccgtgcgtgcgtgctccggatgggggcgtcccacgacgacgaggcggggccgctggcgagcctcctggcggcgcgccgcgcgctgcgggccggcctggacaagtcgcgcgcgctgagccgcgcgctggcgccccggctggaggggatccaggcgcggctgccggccatggaggcgtcagtgcgcccgatccgcgcgccgccggaggcgctcgccacggcggggcccaacatcgaccgcgccgtgggccccgccgccgccgtgctcaaggtgttcgacgccgtgcacggcctcgagccgccgctcctcgaccgcgccgccgccgccgccgacctcccgggctacctcgccgtgctcgcgcagctcgaggccgcgctccgcctcctctccgacaactgcggcctcgccacgcagtggctggccgacatcgtcgcctacctcggggagcgcaggctcgccgacgcccgcttcgtggccggcctcgccgccgcgctcgaccgcctcagggacgacgcctccgccggcctcgacgccgggctgctcgccgccgcgcttgacatgctccaggctgagttccgccggctcctcaaggaccactccgcgccgcttgctatgaaggaccccgacggctctggctccgatccgccccccgtcgtcccttctcggatccctgccgcagtcgtgcacaagctcagcctcatccttgaccgcctcgctgccaacggccggcttgaccactgctcctcggcgtatggggacgcgcgaggggataccgtgtgcgccagcctccgcgcgctcggccttgattacctcaaggagacgtcgggggacgcgcaggcgctcagcccgagcgtcgagcgctgggcccggcatctggagtttgcggtgcaccacctccttgaagctgagagaaagctctgtgtcgcggtgtttgaacggcggcctgaggccgcgcccttgtgctttgctgagattgcagctcgtgctggcattcttgatttcctcgactttggccgtgccctggctgatgccaggaaggaccccatcaagctattgcggctgctcgatgtgttccattgtttgaacaagctgaggctggatttcaaccgtttgttcggtggaaaggcctgcgtagagatccaaagcaggactagggagctcgtcaagagggtcgtggatggtgctgttgagatctttgaggaattgcttgttcaggttgagctgcagcgcactataccgccaccagttgacggcggggtgccacgcctagtgagctttgtcgctaagtactgcaatcagcttcttggggagcagtatcgatctgtgctaacacaggtgatcaccatccaccgcagctggcgcaaagaagtgtttaatgacaagatgcttgttgatgcggtgcttaatatcgttaagacacttgagctcaactttgatacatggtcaaaggcttatggagatacaacactgtcgtctctcttcatgatgaacatacactggcacttcttcaaacacctaaagggtactaagctgggcgagctgttaggtgatccatggctccgggagcatgaacagtacaaggattactactcagcgatgtttctgagggagagctggggaacacttgcacccctgttgagcagggagggcctgatcatgttttccaagggccgggctactgcaagagatttagtgaaacagaggctcaaatcattcaatgctagcttcgacgagatgtttcaaaagcagtctaaatgggtgatatcggatagggatttgcagcagaagacatgccacctcgtggtgcaggccgtagtgcctgtttacaggagcttcatgcagaattatgggccgcttgttgagcaggacgttagtgcgagcaggtatgtgaagtacagcgccgaggatctggataagatgctcaacacgctcttcctgtccaagccaggcaggccaatgagagctggaagcttccaaatcaaaaattcgaatgacaagattaccagtgcaatgacaggattgtatcggagtgcttctactctgaagtagcttcagtggcagttgggaaatactgaatgcacaatttgtgcaataagccaataacttcgtaggcaaaggtggttcgggccagtaagtcaagatccccacttatgtggggggtgcaataatggttccatgattagagcagctggagcataagatgaacataaaactcttccagaactgatattgtgggggagaaagatgacaggagtgtttcctcagcgggtctccttcctgtcgatcatcttttcaccttctattgcattcttatctgtagcaagtatactcaattcattttaggaacttgtgtgggagcagaggatgtgtaatcagttatctggtacatggtagaagattggttgtattataggaggtgttaagttgttgcatatggttatggtatactatgttttagatctcatgaacatgcagtgaattatatggagtacattataactggtggcgaatggtaattacagcagttaattat

SEQ ID NO: 126757 - DNA, 1804 bp, Zea Mays
ggcaagcataagcatgcaatggaagcagtctgaaccacacgatcgttcagagcagagagaggttctcgatctctctctctcggggtatcaaatatatacatgatcttgcgttgatcggtggccacggccatgggcgcctgagccgttgatgagagcagcagtaccgttggtcgcagcggcgacggcgggcggccggcggacgcgatgtccgttgtggcggccgtggggcccgcggcggcggcgtcttacgggcagccgctgtgcggcggcggggcgaggaagaggaaggacgcgggcgtggtccaggaccaggaccaggaccaggatgcagggtcgtcgttgcggggtggtaagaacgccgcgctgttcgtgctggaaacggtggaggaagaggcggacgcggacactgagaggtcgtccatcggcgcggcgtccgaggacggcgacgacgaggaggaggaggaggtggctagcggcgggacgaagggcgccggcgccgcgctcgcgtgcatggacatgggcgccctcgacgacgcgctccccatcaagaggggcctgtccaacttcttctccggcaagtcgcggtcgttcgtcgcgaacctgcgggacgcggcgtcggcggggagcagcgcccggggcctggccaagccggagaacccgttcaacaagcggcggcgggtgctgcgctactgcgccacccgctggaggcccgcgcgtccgcctcgctcgccgccgccgccgccgccgacgtaggcagcggctgtggctagcactgaagaagacatgtacgcgcacgcagcgatgaagcaggcggacggacgaattgaaatgaaaacacaccagctagcaagcatgaagatggatcctctcctgttttgggaccccttctctcgtcttcatcaacatccgacggcgtcatgcatgcatggatatatacaccgtacctagtggtagactgatatataggtgatttctttttttcttttttttgtgtgtgtggtttgatatcaacatccagtagctagctagcaaaccaagcactccgacccatttgcatgcctgcatgtattgacctgagcacctggtactgctgtgtgatgccattagaaaagcaagcaagagagcttgctagctagctacagctcaagtgatcaggggccaagagcacaaggcgtgcagctgattaattaagcaagtttcatcccagcctgtcgtccattgatctggcgacagtactcagtagtatgtatatgcattggatatgtgctctgatggcagaggtcaggaagacgatggacccaccagccaccactgtcctgtccactgcgtggccgaccctatccgcttcacgcggggcccatccatgttgccacctgcctgattgatcgatgccactgccatcgctaataaatagttagacctaattaatagtgtatttggtttgagggatgagctagttcatcatcttctcgttcctcattttttttgtttggtttgtagattggaatgagttgatccatcaccatctcattcctcatagttaattagttagtactaatatgaggattgaggccattccaccaaatttgaggaatggatccatgatgcaccacctcattttagatggaatgattcctcaaaccaaacaactcctaaatgagtgttggggatcggatcggtaaaagacgatgaaccgctctactaaactgtatgtatgcgtgctggctcctcctagttgtgcctactggttctatccctctttatggatattttggttctggtgatcttcgttgattaccgtgaa

SEQ ID NO: 126758 - DNA, 1004 bp, Zea Mays
ctctctctctcggggtatcaaatatatacatgatcttgcgttgatcggtggccacggccatgggcgcctgagccgttgatgagagcagcagtaccgttggtcgcagcggcgacggcgggcggccggcggacgcgatgtccgttgtggcggccgtggggcccgcggcggcggcgtcttacgggcagccgctgtgcggcggcggggcgaggaagaggaaggacgcgggcgtggtccaggaccaggaccaggaccaggatgcagggtcgtcgttgcggggtggtaagaacgccgcgctgttcgtgctggaaacggtggaggaagaggcggacgcggacactgagaggtcgtccatcggcgcggcgtccgaggacggcgacgacgaggaggaggaggaggtggctagcggcgggacgaagggcgccggcgccgcgctcgcgtgcatggacatgggcgccctcgacgacgcgctccccatcaagaggggcctgtccaacttcttctccggcaagtcgcggtcgttcgtcgcgaacctgcgggacgcggcgtcggcggggagcagcgcccggggcctggccaagccggagaacccgttcaacaagcggcggcgggtgctgcgctactgcgccacccgctggaggcccgcgcgtccgcctcgctcgccgccgccgccgccgccgacgtaggcagcggctgtggctagcactgaagaagacatgtacgcgcacgcagcgatgaagcaggcggacggacgaattgaaatgaaaacacaccagctagcaagcatgaagatggatcctctcctgttttgggaccccttctctcgtcttcatcaacatccgacggcgtcatgcatgcatggatatatacaccgtacctagtggtagactgatatataggtgatttctttttttcttttttttgtgtgtgtggtttgatatcaacatccagtagctagctagcaaaccaagcactccgacccatttgcatgcctgcatgtattgacc

SEQ ID NO: 126759 - DNA, 84 bp, Zea Mays
tacgaaaaatcaactgcgccattgacgagaaaggaaggatacggtgagaaagattcatcctccctcacgcctcttctgcggaat

SEQ ID NO: 126760 - DNA, 132 bp, Zea Mays
ttcatttttttcctcgaacatgcaagagagttgtgtatcattatattaaaaggagaaacaaacaaggtccaaaaaatcaccaaggtacaagaatcaccttacggcggcctaaacgtaacaaacaaaaactaa

SEQ ID NO: 126761 - DNA, 2038 bp, Zea Mays
gctggcaaatagccgcccccgcgcccggcggggctgccgcgtgcccgcgtctgcgcagcctcggctgccgccgcctgctcccacactcaccctcacacgcacgcacccccctctgccgcgggtctccccaataaaaatagcaagccacgacgccagtgctctcccggcccgcgcctcgctctctcttgtctcgcccgctagctcccatcccagcctcccaccgcgcccgcctgccccaacatcccccctccccgctccgctccacgcacggctccagatctgctacggcggcggccggtggacgccgcgccgcgcgtgccggaggcggtgacgtgagcggcggatcctgcccggccgtgccatcctggcgacgatgacagcgtaagcgggcggcggacgaccgcgcccccccggcccctactcccgaggtcattggcgtgtgctccttggcagaaaatggcgatgatggtggatccccccaatggcatggcaagtcaaggaaagcattactatactatgtggcagacactgtttgagatcgacaccaagtacgtgccgatcaagcccatcggaagaggagcttacggaatcgtttgctcatctgttaaccgcgagaccaatgaaaaagtcgcgataaaaaagataaacaacgtctttgacaaccgtgtggatgcgctaaggacgctgagagagctgaaactccttcggcacctgaggcacgagaatgttattgctctcaaggacataatgatgcctgcgcatagaaggagcttcaaggacgtttacttggtttatgagctcatggacactgatctgcatcaaataattaagtcatctcaaccactatccaatgaccactgccagtatttcctttttcagctgctccgaggcctgaagtacctccattcagccgggatactccacagagacctaaagccagggaacctcctggtcaacgcaaactgtgacctgaagatatgcgacttcgggctcgcccgcacgaacaacaccaagggccagttcatgacggagtacgtggtgacccgctggtacagggcacccgagctgctgctctgctgcgacaactacggcacgtccattgacgtctggtctgtggggtgcatattcgcggagctgcttggccgcaagccgatcttcccaggaaccgagtgcctgaaccagctcaagctcatcgtcaacgtcctcggcaccatgggcgaggccgacctcgcgttcatcgacaacccgaaggcccgcaagtacatcaagtcccttccgtacgccccgggcgcccccttcaccggcatgtaccctcaggcgcaccctctcgccatcgacctgctgcagaagatgctcgtgttcgacccgtccaagaggatcagcgtcaccgaggcgctggagcacccgtacatgtctccgctctatgacccgagcgcgaaccctcccgcgcaggtgccgatcgacctcgacatcgacgagaacctcggcgtcgacatgatcagggagatgatgtggcaggagatgatccactaccaccccgaggtcctcacgagaatcagcatgtgagtatgtgatgtgaccagacaggcagcaatgaaacatgtggacagaggtctgctgcgccaggatcatcacatgttcgcccttcttacgagcttaactgcgattacggcaccgagtcgaggtatcactacatgtatcggaaccgtcaggcggtctcttgtgtaaatatgcgctgaataagatgtgtggcaatctcttgttttttggttgtacatggacctcgctgttgtacgagtctgtgaagtggaaccctggtactaagacctgtaatttcagaccctaatctgttgtatggaaatctgaaggccttgactcccatctgtttgtgtcacacccagatttaaaacctgtttgtatcacacccggatttaaaacccggaagaacatcacatacaatttgagataaatatcataaatgtcattattacataacaaaagtcttataagaggataaataataataaaacaaactaaa

SEQ ID NO: 126762 - DNA, 1143 bp, Zea Mays
cggccgtgccatcctggcgacgatgacagcaaaatggcgatgatggtggatccccccaatggcatggcaagtcaaggaaagcattactatactatgtggcagacactgtttgagatcgacaccaagtacgtgccgatcaagcccatcggaagaggagcttacggaatcgtttgctcatctgttaaccgcgagaccaatgaaaaagtcgcgataaaaaagataaacaacgtctttgacaaccgtgtggatgcgctaaggacgctgagagagctgaaactccttcggcacctgaggcacgagaatgttattgctctcaaggacataatgatgcctgcgcatagaaggagcttcaaggacgtttacttggtttatgagctcatggacactgatctgcatcaaataattaagtcatctcaaccactatccaatgaccactgccagtatttcctttttcagctgctccgaggcctgaagtacctccattcagccgggatactccacagagacctaaagccagggaacctcctggtcaacgcaaactgtgacctgaagatatgcgacttcgggctcgcccgcacgaacaacaccaagggccagttcatgacggagtacgtggtgacccgctggtacagggcacccgagctgctgctctgctgcgacaactacggcacgtccattgacgtctggtctgtggggtgcatattcgcggagctgcttggccgcaagccgatcttcccaggaaccgagtgcctgaaccagctcaagctcatcgtcaacgtcctcggcaccatgggcgaggccgacctcgcgttcatcgacaacccgaaggcccgcaagtacatcaagtcccttccgtacgccccgggcgcccccttcaccggcatgtaccctcaggcgcaccctctcgccatcgacctgctgcagaagatgctcgtgttcgacccgtccaagaggatcagcgtcaccgaggcgctggagcacccgtacatgtctccgctctatgacccgagcgcgaaccctcccgcgcaggtgccgatcgacctcgacatcgacgagaacctcggcgtcgacatgatcagggagatgatgtggcaggagatgatccactaccaccccgaggtcctcacgagaatcagcatgtga

SEQ ID NO: 126763 - DNA, 1684 bp, Zea Mays
cggtggcgacgtcacctgaagacacacactgcatccgttccactggaaggcaatgagtgcaatggttgagacgcatcctccaactccaaccgccgctgccgacgtggtctccatcctccgcggagctgaccccgcccgcctcctcgccacttccggcatcgccccgacgcccgagctgctccagcacctccgccccgcgctcccgaccctcccggactccgcgattccggccctcgcccgctgggccggcgccgccaccgccgtctccctcctcgcctcccgccgcctcttcgccgccgcctggcgcttcctcctgttccagcccgccgccgcctccccgccgcccccgctcgccgcgttcgcaccgctccttcgccgctacgctcgcatcggccgcaccgactccgcggtccgcacgttccggtttctccaacgccacccgggccgctacgccgtcgaaagcgatgtcacgccgtctgccgaggcgctctccccgttgatcctgaccatcgacgcgctttgcaaggagggccaccctcgcgccgccgcgctgctcgtcgcgcagatccggcgcgaggacgacgggtgggcgcccgacgtgcggatctacaacatcctgctcaacgggtggtcccgcgcgcgccgactcgacaaggcggagaagctctgggcggcgatgcgcgatgaaggcgtgcggccgacggtggtcacctacgggaccttcatcgacgcgcactgcgtcatgcgcaggcctgaccacgcgatggcgctccttgaccagatgcgggaggagggtatcgaggccaatctgctcacctgcaaccccatcgtttatgcgcttgcacatgcaggccgtttcggggacgcacacaaggcacggagaccttgctggggctagtcgagtgctcaaggccatgctggggcggggcatttcaccaactgcaaggacatacaactattttttcacggtctttgccaggaatcttagcatcgatctgggaatgaacctctacgtgaagatggtcagcaatggctacgcgccagaccggctcacttaccaccttctgatcaagatgttgtgtgaggcgaaccggcttgaattaacgctgcagatgcttcaggagatgagaaacagtggttttgagccagatcttgcaaccagcaccatgctgatacatttgctttgccgacgccatcagtttgaggaggcttttgcggagttcgagcagatgtttgagagagggatggtgccccagtatatcacgtaccggatgcttatgagagagctaaagcggcttggtctagtcaaactggtacagaagttggcagatctaatgcgctcagttccacattccacaaagttacctggcggttacagggataaggaaggagatgatgctatagagaagaagaaatcaatattactgaaagcccaggccgtttcagacgttctgaaggattgcaaggatcccaagaaactgcgcgagctcagagatcctgaagaaactgacgtccaaattgcagacaggattgtagccaacattaggagaagagtatacggagacatctcaaggatagtgccatctgtttcttgaaacattgatttgcattgtgtagatgtatcgatattaattgcgtgactatggtttatcagccagttgaattattcatagtgagttttcag

SEQ ID NO: 126764 - DNA, 1761 bp, Zea Mays
cggtggcgacgtcacctgaagacacacactgcatccgttccactggaaggcaatgagtgcaatggttgagacgcatcctccaactccaaccgccgctgccgacgtggtctccatcctccgcggagctgaccccgcccgcctcctcgccacttccggcatcgccccgacgcccgagctgctccagcacctccgccccgcgctcccgaccctcccggactccgcgattccggccctcgcccgctgggccggcgccgccaccgccgtctccctcctcgcctcccgccgcctcttcgccgccgcctggcgcttcctcctgttccagcccgccgccgcctccccgccgcccccgctcgccgcgttcgcaccgctccttcgccgctacgctcgcatcggccgcaccgactccgcggtccgcacgttccggtttctccaacgccacccgggccgctacgccgtcgaaagcgatgtcacgccgtctgccgaggcgctctccccgttgatcctgaccatcgacgcgctttgcaaggagggccaccctcgcgccgccgcgctgctcgtcgcgcagatccggcgcgaggacgacgggtgggcgcccgacgtgcggatctacaacatcctgctcaacgggtggtcccgcgcgcgccgactcgacaaggcggagaagctctgggcggcgatgcgcgatgaaggcgtgcggccgacggtggtcacctacgggaccttcatcgacgcgcactgcgtcatgcgcaggcctgaccacgcgatggcgctccttgaccagatgcgggaggagggtatcgaggccaatctgctcacctgcaaccccatcgtttatgcgcttgcacatgcaggccgtttcggggacgcacacaaggtgctcgaaaaatttcccctctatggcgtggctccgaatatctcgacattcaactccctcgtcttcggatactgcaggcacggagaccttgctggggctagtcgagtgctcaaggccatgctggggcggggcatttcaccaactgcaaggacatacaactattttttcacggtctttgccaggaatcttagcatcgatctgggaatgaacctctacgtgaagatggtcagcaatggctacgcgccagaccggctcacttaccaccttctgatcaagatgttgtgtgaggcgaaccggcttgaattaacgctgcagatgcttcaggagatgagaaacagtggttttgagccagatcttgcaaccagcaccatgctgatacatttgctttgccgacgccatcagtttgaggaggcttttgcggagttcgagcagatgtttgagagagggatggtgccccagtatatcacgtaccggatgcttatgagagagctaaagcggcttggtctagtcaaactggtacagaagttggcagatctaatgcgctcagttccacattccacaaagttacctggcggttacagggataaggaaggagatgatgctatagagaagaagaaatcaatattactgaaagcccaggccgtttcagacgttctgaaggattgcaaggatcccaagaaactgcgcgagctcagagatcctgaagaaactgacgtccaaattgcagacaggattgtagccaacattaggagaagagtatacggagacatctcaaggatagtgccatctgtttcttgaaacattgatttgcattgtgtagatgtatcgatattaattgcgtgactatggtttatcagccagttgaattattcatagtgagttttcag

SEQ ID NO: 126765 - DNA, 2333 bp, Zea Mays
cgcccgatgctcggttcacttcactccaaccaagtcgaaccacgcctccgctgtccgcccgtccacgctgcctctctctgcctgccctcctctccttcctccactccttgccgaaactgccacgagcacctcctgagcccaagctcgtttactttccaagtttggtgcggtgctcgcagctcgctggtgctgctgacgcggccgccgccttgattagcgacaagccacacccgctgttcctggcttcctgctcgggccggccgctttgattattcgtctctttttctttctcggcgatcgcctttttcccgagattgcattttttttattttgtcggcggtacggcactttggctccttccgcgaggccgccggccgtgcagatgcagcagcagcagcagaagctggtggtggcgtcgtgaacaagaaattcctccggttccacgcggtcccctcccctcgctttggccccatttattttcttccttttccgctggttttctggtggggggcggggggttttgcgctggttgttccggttgggtttaggacgccaaccagctggttttccccaccccgcttgcgcttccatccgtgagctcatccgcccagctggaaaacaagaatcctcatgagttctagaagggaagtcgcgatctctgggtgaggtgtccgtttcctcccgttgctggatccgctgactgaccgatcggcagagccgccatggcgtcgtcgtgcatcccggccggcggcatccggctgccggacctggagatggtcaaggccgcgccgccggcgcactccgcggcgtcctccacgctctcggaggcgtccagcgcgtccgcagtctcctcgtcggccacctcgtcatcggtggcgtcgctgtcgctcaagcgcccgcgcacgccgcggaagcggtccagccagacgtacaacgaggcggcggcactgctcgcgtccatgtacccctccgtcttccccgtcgccaggggcggcgccgcgccgcgccgcctcctcggcctcgcctccgcgctcgccgacgactcgtcctgctccgacctcctcccgccgttcccagtccccggcggccacgccgccttcctcctccgcgacctgacgccgcggatccccgccgccgaaagctgcccgtcgcccgctgccgtcagcagcgtcttcagcgagttccgcgacccggcgccgtctcctgcgacccctgacgacgctgcggcggcgcctgacgagcgcagggatcttggcttcgacgatgacgacggtttcgacgccgattctattctgtgcggcgtcgaccagagcgcggccgagggcatcgatggcatcatgggtaagctctctatggaaaacaacggggcgtccgtatcaggctcaagcgttgactccaacatgcccggatccaagatgcacccctacctcaggaaccttatggtgctcgggctcagcttccggcaggatcagaatatcatcatcaatcaagcgctgaagcggcatagtgtcgatcctgaatggtggatgtgccctgccatacctgtgaaagacattaccccggcaccaccgccttcagtggcaatggccaaggtgacagacaagaagaagactaagaagaagtcactggggacaatatacgaggaggggagtcctgagcctgccaatggcgatgacgatggagctttggcactgccagagacaggattggggcttagcttgaatactgacggggtgctcaaggcgtggtgtggcagaggctctgcgtttgctgatggcaatgggcctgacttgccattgtcccctgctcatgtggtagttaaacatgaagacaatgatctcttcccaaagaatggtaccggcgctgttatcagggaaggcaacattctgaagatgcagcgcaagcagaagccatgcactcccctcccctccaacaagcagagtcggtactaccggcctcgggtcaaggggaggtttgtcagcaaggcttgtttcctccagcgacagcaagcgttagagaaggagagctagagaaagatggatcctgctccaaggcgcatttctggggctctcttggagaagcagcagagcttctccgttttcatctctgcggcggtacagtgcggcagatgtagagatgcctgtagagtggtgcttgtgaacctcaattctcagtttcttctatccattccaggttcccatattgtggagggttcgaacgtgcctaaagtgaagacagaaaacaacaacagactcctagttcacacacaatacgttttcagagcccaggtcacgtacccagcactcgaaaagaaaaaaaacagtaacctccag

SEQ ID NO: 126766 - DNA, 3088 bp, Zea Mays
ccaagccagcaccagcggaactgtgctgtgcaagcactcagcttcgcctccattccgctcacttcccgcggccactccgctccccaaaccctaacgccctcgagcggagcgatctctttgcttcgccagtgccgcgcccgggcatgccgccgccactgggtggcgcggtcaaggccgactgatccgtgcgcttgggagccgccaccgccgccgccgccgccgctgccattcctccctcggtgcccactggggtggagcggagactggagattctgccgtctgtcgcaagtcacacactaggtttctcgggcgctgacattgttggaagatgtggaggatcaagctcgcctgtttgcttcttatctttgtgcaagtgcaacgagtggtccttggaacacatgacgtgtacatcgtggtgatggaaggggatccggttgtgagctaccgaggtggcgttgacggatttccggcaactgctgtggatttggacgaggaaatggacgttaccagtgaagctgttacatcgtatgccctccacctccgagggcaccatgacaagctcctagactcacatttagtagaaggaacgtatgagaagctttatagctaccaccatcttatcaatggctttgcagttcacatgtcgtcactgcaggctgagttcttgaggaaagcgccaggagttaagcatgttgagagagacatgaaggtacagaaattgactacacacacccctcagtttctcggattgccaactggggtatggccaacaggaggtggacttgatagagctggtgaagatgttgtgatcggttttgtggattctggaatttacccccaacatccgagcttcgcggcgcacaagactgatcgatatggtcctgtccctcgttataaaggaaaatgcgagaaggatctagtaacacaaagaagcttttgtaatgggaagatagttggggctcagcattttgcaaaagctgcaatggctgctggtgcgtttaaccccgatgttgaatttgcatctccattagacggtgatggtcatggaagccacacagctgcaattgctgctggaaacaatgggattccggtgcgaatgcatggtcacgagtttggcaaagcaagtggcatggccccacgtgctagggtagctgtctacaaggttctttacaggcttttcggtggttatgtggctgatgttgtggcagctattgatcaggctgttcaggatggtgttgacattctcaacctttctgttggacccaatagcccaccaacagctacaaggactacttttttgaatccttttgacgctgcacttctttctgctgtgaaagctggggtatttgttgcccaagctgcaggaaatggcggaccatttccaaaaacactggtgtctttcagcccatggataaccactgttgctgctggagttgatgaccgcagatacaagaatcatttaacactaggaaatggaaaacttatttctggacttggagtatctcctgcaacacatgggaatatgtcgtttagcctgatttctgcagctgatgctcttctgggctcatctgcaagcaagtacagtgcattagactgtcagaggccagaactattgaataagaggaaagttcagggaaaaattcttttgtgtggctattcattcaattacatttctgggacagcctcaataaagaaagtgtctcagacggccaggagtctcggcgcagctggctttgttgttgctgtggagaatagttacccaggaacaaaatttgaccctgtaccagtcagcatccctggaattctcatcacagatgtcagcaaaaccgaggatcttatagactactacaattcttccaccgtaagagattgggctggaagggctacagcctttaaagcaacagccggtattgcagatggtttggcaccaacactatacaattcagctccccaggttgcgctgttctcttctcgaggacctgatgtgaaagattttagctttcaagatgctgatgtccttaaaccagacatacttgctcctggcaatctcatatgggctgcatgggcgcctaatggaacagatgaatcaaattatgctggtgaaggatttgcaatggtttctggaactagcatggctgcgccgcatattgctggcattgcagcactgataaagcagaagaacccaaagtggagcccctcagcaataaaatctgccctgatgacaacggccaatacactggacaaagggagccatcctcttagagcgcagcagtacaccgcatcagaaatgatgacactttcacgggccacaccgttcgattgtggcagtggcgctgttaacccaaaaggcgccctcgatcctggccttgttctagacgcaagccatgaagactacatcacgtttctgtgctcgatccccgacgtcaaccagagcgaagtatcaaacatagccggctcggcttgcaactccaactccaagggacaacgccccttcgacctcaacatcccctcgatcgccgtctctcagcttcgaggcacggtggtagtgaagcggaccgtcacgagcgtgtccgacgaaaccgagacctacaccatcatgacaaggatgccgccagaggtcgccctggaggtgacgcctccggcggtgaccgtggtccccggagcatcacgagagataactgtgaccctgacggcgaggtccgtgaccggcacctacagtttcggtgagattgccatgaaaggtgaccgcggtcacctcgtcagaatcccagtcgtagctatgggattcaagtaggtagaagacgactgtgacatctcctagggagtagaggataggaagagcgagttgtgcctctgtaatctgaggtcttgagctgcagaggaacgttgtataattttttcataggttgtagagaataagagttggcacaatgctgtaagtgttatgcatgccccctccaggttgtaaaatatatttgggtgccctaaatcctctgacatggtgactagaggacctcttgtattgtagtccagccttgttctgattctctaatgcatgaaggtttgaatctcatctggttttcttcta

SEQ ID NO: 126767 - DNA, 3025 bp, Zea Mays
ccaagccagcaccagcggaactgtgctgtgcaagcactcagcttcgcctccattccgctcacttcccgcggccactccgctccccaaaccctaacgccctcgagcggagcgatctctttgcttcgccagtgccgcgcccgggcatgccgccgccactgggtggcgcggtcaaggccgactgatccgtgcgcttgggagccgccaccgccgccgccgccgccgctgccattcctccctcggtgcccactggggtggagcggagactggagattctgccgtctgtcgcaagtcacacactaggtttctcgggcgctgacattgttggaagatgtggaggatcaagctcgcctgtttgcttcttatctttgtgcaagtgcaacgagtggtccttggaacacatgacgtgtacatcgtggtgatggaaggggatccggttgtgagctaccgaggtggcgttgacggatttccggcaactgctgtggatttggacgaggaaatggacgttaccagtgaagctgttacatcgtatgccctccacctccgagggcaccatgacaagctcctagactcacatttagtagaaggaacgtatgagaagctttatagctaccaccatcttatcaatggctttgcagttcacatgtcgtcactgcaggctgagttcttgaggaaagcgccaggagttaagcatgttgagagagacatgaaggtacagaaattgactacacacacccctcagtttctcggattgccaactggggtatggccaacaggaggtggacttgatagagctggtgaagatgttgtgatcggttttgtggattctggaatttacccccaacatccgagcttcgcggcgcacaagactgatcgatatggtcctgtccctcgttataaaggaaaatgcgagaaggatctagtaacacaaagaagcttttgtaatgggaagatagttggggctcagcattttgcaaaagctgcaatggctgctgccacacagctgcaattgctgctggaaacaatgggattccggtgcgaatgcatggtcacgagtttggcaaagcaagtggcatggccccacgtgctagctgtctacaaggttctttacaggcttttcggtggttatgtggctgatgttgtggcagctattgatcaggctgttcaggatggtgttgacattctcaacctttctgttggacccaatagcccaccaacagctacaaggactacttttttgaatccttttgacgctgcacttctttctgctgtgaaagctggggtatttgttgcccaagctgcaggaaatggcggaccatttccaaaaacactggtgtctttcagcccatggataaccactgttgctgctggagttgatgaccgcagatacaagaatcatttaacactaggaaatggaaaacttatttctggacttggagtatctcctgcaacacatgggaatatgtcgtttagcctgatttctgcagctgatgctcttctgggctcatctgcaagcaagtacagtgcattagactgtcagaggccagaactattgaataagaggaaagttcagggaaaaattcttttgtgtggctattcattcaattacatttctgggacagcctcaataaagaaagtgtctcagacggccaggagtctcggcgcagctggctttgttgttgctgtggagaatagttacccaggaacaaaatttgaccctgtaccagtcagcatccctggaattctcatcacagatgtcagcaaaaccgaggatcttatagactactacaattcttccaccgtaagagattgggctggaagggctacagcctttaaagcaacagccggtattgcagatggtttggcaccaacactatacaattcagctccccaggttgcgctgttctcttctcgaggacctgatgtgaaagattttagctttcaagatgctgatgtccttaaaccagacatacttgctcctggcaatctcatatgggctgcatgggcgcctaatggaacagatgaatcaaattatgctggtgaaggatttgcaatggtttctggaactagcatggctgcgccgcatattgctggcattgcagcactgataaagcagaagaacccaaagtggagcccctcagcaataaaatctgccctgatgacaacggccaatacactggacaaagggagccatcctcttagagcgcagcagtacaccgcatcagaaatgatgacactttcacgggccacaccgttcgattgtggcagtggcgctgttaacccaaaaggcgccctcgatcctggccttgttctagacgcaagccatgaagactacatcacgtttctgtgctcgatccccgacgtcaaccagagcgaagtatcaaacatagccggctcggcttgcaactccaactccaagggacaacgccccttcgacctcaacatcccctcgatcgccgtctctcagcttcgaggcacggtggtagtgaagcggaccgtcacgagcgtgtccgacgaaaccgagacctacaccatcatgacaaggatgccgccagaggtcgccctggaggtgacgcctccggcggtgaccgtggtccccggagcatcacgagagataactgtgaccctgacggcgaggtccgtgaccggcacctacagtttcggtgagattgccatgaaaggtgaccgcggtcacctcgtcagaatcccagtcgtagctatgggattcaagtaggtagaagacgactgtgacatctcctagggagtagaggataggaagagcgagttgtgcctctgtaatctgaggtcttgagctgcagaggaacgttgtataattttttcataggttgtagagaataagagttggcacaatgctgtaagtgttatgcatgccccctccaggttgtaaaatatatttgggtgccctaaatcctctgacatggtgactagaggacctcttgtattgtagtccagccttgttctgattctctaatgcatgaaggtttgaatctcatctggttttcttcta

SEQ ID NO: 126768 - DNA, 1955 bp, Zea Mays
cccatcgcgaggcgaactccttgggcctccccattcccagaaaaaaaaaatgatggtgacccgttcgcgtcggctcgccccgccaccatgacccataagcgccacgccgccaccggcttgcgcacgggcggcaccatactgcacgcgctctccgccgcctcggccgcccacctgcacgcgcacgccctgaaggtcggcgtcctcttcacctgcctccacctctgctcgggcttgctcaaaacctacgcgtcctccggccgcatcgccgccgcgcggcagctgttcgacgaagcgcctcgccggaacgtcccgctatggaacacgctggtgtccgcctacgcgcgctgcggccacccgcgcagcgcgctggccgccgcgtccgccatggcgcgcggcggcggcggcggcgcgggggcccggccgaacgtcgtcacggtggcgatcctgatgtcggcgtgcgcgaagctgaggaggccggcgcccgggcgggaggtccacgggtacgcggcccggaacgtggccgcgctcgacctccacgcgctcaacgcgctggtgcacatgtacggcaggtgcgggcggctcagggacgcgaggacggcgttcgccggcatcggggccggcgcgaggaacgccgtgtcgtggacggccatgatcgacgcgtgccgcgagaacgggcgccccgcggaggcgctgggggtgttcgaggagatgcgtcggctcgctggcgccgaggtcgacgaggccgccctgctcgccgccgtgtcggcgtgcgcgagcctggactgcgcggcggggctaggggactgggtggaggcgtgcgcggcggagagcgggttcctgcggcgggggacgacgagcgcccgcgtcgccaacgcgctcatacacatgcacggcaaggcggggcaggtggagaggtcgtgcgcgatattcgactcgatgggcgccgcgaggaggacggtggtctcgtggacggccatggtccaggccctggccacgaacgggcacgcggtggccgcgctcgtccggttcgcgcagatgctcagggaagggttcgtgcccgacgaggtggccttcctgagcgcgatcggcgcctgcgcctgcgcggggctggtgagcgaggggcgccggctgttcgagtccatggtggaggagcaccgcatcgcgccgcagatggagcactacggcagcatggtggagctgctgtgcagggccgggtcgttggccgacgcgttcgagttcgtcctggccatgcccgtcgcgcccgaccctgtgatctggcgtgccctggccggcgcctgccgggaccatggggacgccggcttggccaggagggtgatggatcatgtgatcgcgatggagccccaccatgcagggaactacctgctggcgtccaacttgtgcgcggcggatgaggactggggacgtgtcgtggatgttaggctggagatgggagccaggaaagcgacgatctcgaggactgctagtggtgccgtgtcttcagttcaagtcaacggtgagtgatgacagagcttggcttttacgcatcacccggtagcttttccaaccacgctacttcaagttcaagatgccactgccacgttgttaatgaattttctcaccttgtcaccacgtcattcgcgtgcatttacaagtgtttatattctgtactacttgtctaggccagaagaacctggcgagagaactgagtttacttgtctagtgctgcctaagattcgtttttttttgggtttaatctcttttcctaaactgttgactgagacgttaaaccagatgtggtaggaaacccccaaagtcaaaagatctggcgtccaaagccgagaatgttttatcattgggcccagcgagtgataaacgctgaggacctgaggtgatgcagcagggtccaaatggcagatggatgttctgtcaagcttgacaatgacaaatgttttatc

SEQ ID NO: 126769 - DNA, 1185 bp, Zea Mays
tttttttctccagcaaacctatatagtaactagactactagatcaaacaccctgcaccggcgatcttagtctacatttacgccggcgagtcacactcacctcacagttgcttgttcatatgtgcacacccttctcccacggtggaatttccaccctactacagtactactactactctaccacgatctcgggcagcttcagcatgctgtggccgcagcagctgctcctgctcgccgccgccgtcctggggcacttcacgtagctccggcagcacgggccggtctccctagcacgcgcggcctgcacgctcgagcaggcgtctccacctttgacgccgcagcagttcttgctcgcagcgcagtcggtgggagcagcgccgccgccgccgccgcagtctttcgccttcctgcagtgctccccattgtgttgttcctcgctgtggtggtggccttcgtctttgggcagggcagcgattgagatcgtgacctcttcaactggctcggccgcgaccttgtccttgccgtgaggctcatggcagcagtggtggctgtggtcgtggcagtccttctcaggttcctcgatctccccaagctcatgctgtccgtgctcatggtcgtggtcatggcagtggtgtgtttccacagcgtgcacagtttggtgctcaccatggcactcatgctcgcaagcatgctcaacagcggtgtctgaatggccgtgctcctcgcagtggctgtgcgcatcatgttcatggcagccatgctcacctgtagcgtgtgagtggctgtccccttcgcagtgccgatgttcgtgtccatggccatggccatggcaagcagcctcactgtcagcacacggagtcttgggctctttgcagtggctatgctcatggtcatggcactcgtgcttgctggtgaagcgcgggctgctgagctctttgcagcggtcatggctatgcccatggccatggtcattgcaaccgtggctctctacaagcagcagctggttgcctgcctcttcgcagtggctatgggtgttgccgtggtcatggcagacatgcttttctgtaaccacatggctgctgggctctttgcagtggttatggctgtggccgtgatcatgacaggcatgcctttccggccggtggttgctcggctctttgcagtgggtgtgggcatggccatgatc

SEQ ID NO: 126770 - DNA, 800 bp, Zea Mays
aatgatagagccgcgccctccccaaccagagtcgagacgcggcggcggcgttctgtccctctggcggagaagtgcctccatggcggagccgtcgccggagaaggcgatgttgcgcccccataacccaaacctcgacaaaaatatgttatgcgaaaaaggaggtcacgaggaatagaatgaagggctccctacccgaagccgatgcatggagatccatggccgcggaagtagcagcgagcggcggaggaaacaatccgatgaaaaatatccaggctccggtggatttccccgcgtccgagaaggccacgagcacgcctctgggtcccgtcacggcgcccagaagcttctaccagagcaggacgcggcccgcgacagcgctaatggcgttgatgaagaatcccttttactctagtgtcccagattgcctccgcgaagcccagtgatgcataacggtgacgcgtcaacggccgagcgatggcgtgtcgtcgtaaagcccagtgtgtcaagctcggattctctactcttccacactcgtcttccttgtttctctgtccgagcattggggatgtcaacgaagacgccggcccatgacgaccagtggattcatggcgccgaagggaccttggtgagcaatccacccgcccgagatgatcctctagactggactaagccatgtgcacatccgccatgtttgggcgagtcaccacggctacttcacagaggctcgtcgacaaccaaggtgtgggtcgacgccggctacttctctctctgccttcttttgcttggcggtagggatctcg

SEQ ID NO: 126771 - DNA, 126 bp, Zea Mays
atttcctgttttctattgcaattcaaatccaggtttaaatttcaaatttttaaattatatgcacaaacaaactccaacatgatgcaggtataatttatattaattttattcatttattcatgcaaa

SEQ ID NO: 126772 - DNA, 686 bp, Zea Mays
gtttgtcgttttctctagtgccgccgagacgctttccttccacctgccgaccgacgcacgcggacgcctccgttcgtactcccgccgcctgtagaggcctcgtcctctcgcccaccggcgaaaaaccgttcccctctgccgtttccgggtctcttagtgcaagcaaggaggccgttccacgctcctccagcgagctccgttctgaagcggcaagaaagatgattaatcttttcaaaataaagggtcaaaagaaagatgaggcagcaagtgctactggaaaggcccctgttaagaaacagtctgctggggagctccgtcttcataaagctcccatggccacgttctatcctcaatgagttaccctaggaggctggagcagccgcatcgcaagatggttaatgagtggactccctcactgagtgcaataaggagccattgcccattaccaatggcagagacttagttggttacttggttttatatcttcttcattttcagacattttcttgtgccagttttttttttttcacatattccttttctctcatgtattcctgtccctgttatgaagttctttttattttgcccctgatttttttcaaaccaaaggcagagtttgcctctattctgtcaagagaacttaatgatgttgattcagctataaactggctagtttcccatgcaga

SEQ ID NO: 126773 - DNA, 1097 bp, Zea Mays
gtttgtcgttttctctagtgccgccgagacgctttccttccacctgccgaccgacgcacgcggacgcctccgttcgtactcccgccgcctgtagaggcctcgtcctctcgcccaccggcgaaaaaccgttcccctctgccgtttccgggtctcttagtgcaagcaaggaggccgttccacgctcctccagcgagctccgttctgaagcggcaagaaagatgattaatcttttcaaaataaagggtcaaaagaaagatgaggcagcaagtgctactggaaaggcccctgttaagaaacagtctgctggggagctccgtcttcataaagatattagtgagctcaacctgccgaagaccacatcaatttcttttcccaatggcaaggatgatctgatgaattttgagatcaccatccgacctgatgaaggatattacatgggaggcgctttcgttttcacctttcaagtgtccccatcttatcctcatgatcctccgaaggtcaaatgcaagaccaagggcaatgtctgtctgaacattctgcgtgaagattggaagcctgttctcaacatcaacaccgttatttatggcctgaatcttctttttacgcaaccaaacgacgaggatcctttgaaccacgaagctgcagctgtcctccgtggcaacccaaagatgtttgaggcaaatgtgaaaagagccatgaccggaggctacgtaggccaacactatttccaaagatgcttggcttgatgtgatggcttcaagccagcgggcccatgtatcagcaccagcgcgcccaggtttggaggatttttgtggatttagggcgcttctggaagcaaaggtcaaatcggtcgttgttgataatgtgatgtactccctcagttctttttatttttcatgttttagtataaaaatgaactaacaaacgacaaatattcgataacgaggtagtatctgtttgccctgtgacgtgtttaaaaccggtgaatttggggatatggtggtgtcacaagggaaaatgcttctccaattatatcactcgataaatactaaacgagaaatgggaactggattgtaaagaagatcgcttcttttcca

SEQ ID NO: 126774 - DNA, 1270 bp, Zea Mays
gtttgtcgttttctctagtgccgccgagacgctttccttccacctgccgaccgacgcacgcggacgcctccgttcgtactcccgccgcctgtagaggcctcgtcctctcgcccaccggcgaaaaaccgttcccctctgccgtttccgggtctcttagtgcaagcaaggaggccgttccacgctcctccagcgagctccgttctgaagcggcaagaaagatgattaatcttttcaaaataaagggtcaaaagaaagatgaggcagcaagtgctactggaaaggcccctgttaagaaacagtctgctggggagctccgtcttcataaagatattagtgagctcaacctgccgaagaccacatcaatttcttttcccaatggcaaggatgatctgatgaattttgagatcaccatccgacctgatgaaggatattacatgggaggcgctttcgttttcacctttcaagtgtccccatcttatcctcatgatcctccgaaggtcaaatgcaagaccaaggtgtaccatccaaatattgatttggaaggcaatgtctgtctgaacattctgcgtgaagattggaagcctgttctcaacatcaacaccgttatttatggcctgaatcttctttttacgcaaccaaacgacgaggatcctttgaaccacgaagctgcagctgtcctccgtggcaacccaaagatgtttgaggcaaatgtgaaaagagccatgaccggaggctacgtaggccaacactatttccaaagatgcttggcttgatgtgatggcttcaagccagcgggcccatgtatcagcaccagcgcgcccaggtttggaggatttttgtggatttagggcgcttctggaagcaaaggtcaaatcggtcgttgttgataatgtgatgtactccctcagttctttttatttttcatgttttagtataaaaatgaactaacaaacgacaaatattcgataacgaggtagtatctgtttgccctgtgacgtgtttaaaaccggtgaatttggggatatggtggtgtcacaagggaaaatgcttctccaattatatcactcgataaatactaaacgagaaatgggaactggattgtaaagaagatcgcttcttttccagaaaaaacaaaattgaggtggtatctttgattttgtactcggctgtcttcaatgtccgatcttccaggtaaacaccctctatttcaaacgtttcgattttttgtaagtttttagtctgatgtgcatttattttaaattataaggta

SEQ ID NO: 126775 - DNA, 1516 bp, Zea Mays
gagacgctttccttccacctgccgaccgacgcacgcggacgcctccgttcgtactcccgccgcctgtagaggcctcgtcctctcgcccaccggcgaaaaaccgttcccctctgccgtttccgggtgagtctacgcggcgcaacttctccggtcccatcggttttgggtgcgcgaccctccttcggcttctcatcgtcgttcttcggtgcgcggacgcaattcatggatccgggggccggatcccgcgccttctgcgacgatggctgctcccctccccttgcttctttgcgcgcactcctcctccactgccttcctgtttttaaacagggagaggggtggccctccgctagccgcacggatcctctccatcctcaccgtttcttcctctctgcaggtctcttagtgcaagcaaggaggccgttccacgctcctccagcgagctccgttctgaagcggcaagaaagatgattaatcttttcaaaataaagggtcaaaagaaagatgaggcagcaagtgctactggaaaggcccctgttaagaaacagtctgctggggagctccgtcttcataaagatattagtgagctcaacctgccgaagaccacatcaatttcttttcccaatggcaaggatgatctgatgaattttgagatcaccatccgacctgatgaaggatattacatgggaggcgctttcgttttcacctttcaagtgtccccatcttatcctcatgatcctccgaaggtcaaatgcaagaccaaggtgtaccatccaaatattgatttggaaggcaatgtctgtctgaacattctgcgtgaagattggaagcctgttctcaacatcaacaccgttatttatggcctgaatcttctttttacgcaaccaaacgacgaggatcctttgaaccacgaagctgcagctgtcctccgtggcaacccaaagatgtttgaggcaaatgtgaaaagagccatgaccggaggctacgtaggccaacactatttccaaagatgcttggcttgatgtgatggcttcaagccagcgggcccatgtatcagcaccagcgcgcccaggtttggaggatttttgtggatttagggcgcttctggaagcaaaggtcaaatcggtcgttgttgataatgtgatgtactccctcagttctttttatttttcatgttttagtataaaaatgaactaacaaacgacaaatattcgataacgaggtagtatctgtttgccctgtgacgtgtttaaaaccggtgaatttggggatatggtggtgtcacaagggaaaatgcttctccaattatatcactcgataaatactaaacgagaaatgggaactggattgtaaagaagatcgcttcttttccagaaaaaacaaaattgaggtggtatctttgattttgtactcggctgtcttcaatgtccgatcttccaggtaaacaccctctatttcaaacgtttcgattttttgtaagtttttagtctgatgtgcatttattttaaattataaggta

SEQ ID NO: 126776 - DNA, 441 bp, Zea Mays
ctttagcaatttcacttgagatggttccattccaaagtaagagtttgactccaaaagcttgatagttagtgcatttgtatcatcagaagtcataatgacaaatggaatctttttttggcacccatcatcaaccgttttgcagctggcctcttgtaaaaccaggatagactctatataatgttgaatgaaacattttccagttgttgtttcccggggaaaacataccttaattcctttgtaaccaagcctttcaccaagccctccagctacaagaacaaatgcagcattgtgggcttcttttatcccagctgcttccagtgaaacaaaattgtcatcgccgaagttcaaaatttcccctgaaggcacctaaggggtgaaaccatcatatgggttttttcctgcctttgaatctgcaagaagttttttggcattcttgatgta

SEQ ID NO: 126777 - DNA, 438 bp, Zea Mays
gcggttgccagcgcgcggaggacaggggcgcacacgtcgtcgttcgatactatgtagatggccttcccgcccgcggcgtccgtctctacgcacacgtcgtcgtcctcgccatcctccaccgccactgcagcgtcctcgggccgcgacgtcttggtcaccgacgtcgccgaggacgaggagagcgcgctttccagcacaggccggcggttcgaccgcagcgcccgcgagcgggaccaccgattgagttgcgggctagcgcgcagcgcgagggacgaggcgacctcatctgggcgtggtggcggcggggcaccgtcagactaagactggcctggcctctcgacggcgggggtgagagctggggaggaatcaggtgcgcaggacagggggcgaggcggcgaccagaggggcacggctagatcgtggacagggaaagggcgc

SEQ ID NO: 126778 - DNA, 795 bp, Zea Mays
atgaagaagaacaaatcaggggcatccaactacctgtgccttgcacccatcttcaactcctgcgtttcctccggcaagcagcagccgtccaacgccgacgctgccgccaggaaccgcctgagcttctccttcccggaacggcagcagcagccggcgccggcggaggaggagcagaactcggagagcatcatcgacccggccgcctcggtcatcgccaggaaggagaaggagaaggacggcggcaagcactgcgccgtcatcgtgggcaccatcttcgggcggcgcgccgggcgcgtcaccttctgcgtgcagcgcgacgcggcggtgccgccgccgttcctcttcgagctgtccgtgcccacgcagtccctggccaccgagatgggctccggcctcctccgcatcgcgctcgagtgccaccgcggcgccggcgacgaccaccggagcagcgtgtggagggcgtcctgcaacgggcgcgacgtggggcacgccgtgcgccggcggccgacggagtgggaccgccaggtgctggacagcatgcggaccatgacgaccggcgtcggcgcgctcccgcccgcggtggcgatgggacggcccaacgacggtgatgatggagacgcgcagcaggacggcgacggcggcgccgcaggggaggtgctgtacatgcgggccacgtacgagagggtcgtgggctccagggacgccgtgtcattccacctcatcaaccccggcggcggcggcgccagcccacctcaggagctaagcgtcttcttgctgcggaccaggggtgactga

SEQ ID NO: 126779 - DNA, 2733 bp, Zea Mays
cacatcacaaaatttcccctcgctcctagcactcgagcactcaactgtcgcaccatcgggacgccgcggcggcggccagcacgttcgaggctgcggcggcaaggtgggctgtcgtgcgaggtcagcgaggacaggtcgtctgggagcacctgaggctgtgcgaggtgccggcaggctatgacatttctagagtaagtaatactctgggggcatctcccgctcgcttagctgtgcccgccaggccatggagcgtgaggacgccgacggcgctctcgattcgtgggctcaattctgcactctttccaacgagcttctcgccggagacggtgatctcgccgtcggcccacgcctagctcccgtcgttggtgacctctgcacacgcggcctcgccacgctcgtccgcgactacttcctccactccctcgaggaaacatttcgaaaccatgcagtcaagaagttctggcagcactttcatccttattgcagtgcctcaaccgtagacagaattaagttctgtacatattgaatatctatttcaagaagaagctggaagaacttaatagtattatggctggatcttatgagagtgatcaacttgtggatcatgaaccttttcaaaggagtaatacatctgactggcattctggaatggacattgatggttctgaagtttcagaaaatagctccttggtaaagaacattggcaaagttgttcgtgatcttagatgtattggttttacatcgatgactgaagatgcttattcctctgcaataatctggcttttaaagtctaaggtttatgaactagctggtgatgattatagagtgtcagtcctttggtgtgtgaagaagtggattcaggctgttcctcttcagtttctgcatgctcttttaacatatctcggtgactctgtggaccatggcagtggatcttctggtctcaaatcaccattagcttcacgcccttcttccttcccagggattggtgttccttctgaagcccttgtgagatggcacatgcgccttgaatattttgcttatgaaaccttgcaggacctacgaattggcaaactttttgaaataattgtagattaccctgagagctctcccgctattgaagacctaaagctgtgtttagagtacacgggccaacactctaagcttgttgactcatttatctcatcgcttcgatatcgtctacttactgctggtgcatcaacaaatgatatattgcaccaatatgtgtccactataaaggcattgcggacaattgaccccaccggggtgttcttggaagcagttggtgaaccaattagggattatctgagaggtagaaaagacactatcaaatgcatagtgacaatgctaactgatgggtcaggaggaagtggaagtggaacaggcaatgcaggtgacaatcttctggaagagttgaacagagatgctgaaaaccaggaaaatgctgattacgacgatcatgcaaacattgatgagaaacaagcatggctcaattctgaaagctgggaacccgatcctgtagaagcagacccattgaaaggcaacaggaacagaaggaaggtcgatatacttggactaatggttagtataattggctcaaaggaccaactagtcaatgaataccgtgtaatgctggcagaaaagctgctcaacaaatctgactttgaaattgattcagacattcgcacattggaactcctgaagattcattttggtgagagcagcatgcagaagtgtgagattatgcttaatgacttgattgactcgaagagaaccaattcgaacattaaaacatctttgctgaagtcatctcaaactgttcctgggcaagaggaggcagaagtgtctcatgatgttttggatgccactataatatcatctaatttttggccaccaattcagatagaagaccttgttgttcctgcttcagttgatcagttgctatcggattacgcaaaacgatttcaccagataaaaactccacgaaagctattatggaagaaaaatcttggaacagttaagttagaactgcaatttgacggaagaagcgtgcaatttactgtagctcctgtgcatgctgcaatcataatgcggtttcaagagaaatctagttggacttcaaaggcacttgctacagaaattggcatacctatggattctcttaacagaagaataagtttctggacaagcaagggggtcctgactgaatcagcaggaccagatgccgatgatcgcaccttcactgttgtcgatagcatgtctgatgtcaacaaggacagtattgtgaatgaacgcatggcagagtatcagatgactgaggaggaaggtgaaagctctgtggcttcagtggaggaacagcttaagaaagaaatgacagtctacgagaaatacatcgtcggaatgctaacaaattttgggagtatgtcgctggacaggatacataacactctaaagatgttttgtattgccgagccatcgtatgacaagtcgctgcagcagctgcaaagttttctttctggtctagtagcagatgaaaagctagaaacgagggatgggctgtacttgctaaagaggtagcagccgtttctatactaggatagtgggttgttagactagggttgtacacttgtactatttgctaatgagttgtttagactagagatgtcaggtaatcagatataacacacttcattatcaaagctatgttatcgggtt

SEQ ID NO: 126780 - DNA, 3106 bp, Zea Mays
cacatcacaaaatttcccctcgctcctagcactcgagcactcaactgtcgcaccatcgggacgccgcggcggcggccagcacgttcgaggctgcggcggcaaggtgggctgtcgtgcgaggtcagcgaggacaggtcgtctgggagcacctgaggctgtgcgaggtgccggcaggctatgacatttctagagtaagtaatactctgggggcatctcccgctcgcttagctgtgcccgccaggccatggagcgtgaggacgccgacggcgctctcgattcgtgggctcaattctgcactctttccaacgagcttctcgccggagacggtgatctcgccgtcggcccacgcctagctcccgtcgttggtgacctctgcacacgcggcctcgccacgctcgtccgcgactacttcctccactccctcgaggaaacatttcgaaaccatgcagtcaagaagttctggcagcactttcatccttattgcagtgcctcaaccgtagacagaattaagttctgtgttaaggaacattggcctgaagaaatcttaagtaaagcactggaggacatatgcttggaaaggggttaccaggaaaaatgtgttcttgttcttgtccaagttttacaatcatatgaggataggatgccacgaaaaaaaatcaaagaagtggtctgtagttccagcttaatgcctaggtatcagttaatggtatcatcagtacttctgacaacactgcccttgagctttcctgacatattgaatatctatttcaagaagaagctggaagaacttaatagtattatggctggatcttatgagagtgatcaacttgtggatcatgaaccttttcaaaggagtaatacatctgactggcattctggaatggacattgatggttctgaagtttcagaaaatagctccttggtaaagaacattggcaaagttgttcgtgatcttagatgtattggttttacatcgatgactgaagatgcttattcctctgcaataatctggcttttaaagtctaaggtttatgaactagctggtgatgattatagagtgtcagtcctttggtgtgtgaagaagtggattcaggctgttcctcttcagtttctgcatgctcttttaacatatctcggtgactctgtggaccatggcagtggatcttctggtctcaaatcaccattagcttcacgcccttcttccttcccagggattggtgttccttctgaagcccttgtgagatggcacatgcgccttgaatattttgcttatgaaaccttgcaggacctacgaattggcaaactttttgaaataattgtagattaccctgagagctctcccgctattgaagacctaaagctgtgtttagagtacacgggccaacactctaagcttgttgactcatttatctcatcgcttcgatatcgtctacttactgctggtgcatcaacaaatgatatattgcaccaatatgtgtccactataaaggcattgcggacaattgaccccaccggggtgttcttggaagcagttggtgaaccaattagggattatctgagaggtagaaaagacactatcaaatgcatagtgacaatgctaactgatgggtcaggaggaagtggaagtggaacaggcaatgcaggtgacaatcttctggaagagttgaacagagatgctgaaaaccaggaaaatgctgattacgacgatcatgcaaacattgatgagaaacaagcatggctcaattctgaaagctgggaacccgatcctgtagaagcagacccattgaaaggcaacaggaacagaaggaaggtcgatatacttggactaatggttagtataattggctcaaaggaccaactagtcaatgaataccgtgtaatgctggcagaaaagctgctcaacaaatctgactttgaaattgattcagacattcgcacattggaactcctgaagattcattttggtgagagcagcatgcagaagtgtgagattatgcttaatgacttgattgactcgaagagaaccaattcgaacattaaaacatctttgctgaagtcatctcaaactgttcctgggcaagaggaggcagaagtgtctcatgatgttttggatgccactataatatcatctaatttttggccaccaattcagatagaagaccttgttgttcctgcttcagttgatcagttgctatcggattacgcaaaacgatttcaccagataaaaactccacgaaagctattatggaagaaaaatcttggaacagttaagttagaactgcaatttgacggaagaagcgtgcaatttactgtagctcctgtgcatgctgcaatcataatgcggtttcaagagaaatctagttggacttcaaaggcacttgctacagaaattggcatacctatggattctcttaacagaagaataagtttctggacaagcaagggggtcctgactgaatcagcaggaccagatgccgatgatcgcaccttcactgttgtcgatagcatgtctgatgtcaacaaggacagtattgtgaatgaacgcatggcagagtatcagatgactgaggaggaaggtgaaagctctgtggcttcagtggaggaacagcttaagaaagaaatgacagtctacgagaaatacatcgtcggaatgctaacaaattttgggagtatgtcgctggacaggatacataacactctaaagatgttttgtattgccgagccatcgtatgacaagtcgctgcagcagctgcaaagttttctttctggtctagtagcagatgaaaagctagaaacgagggatgggctgtacttgctaaagaggtagcagccgtttctatactaggatagtgggttgttagactagggttgtacacttgtactatttgctaatgagttgtttagactagagatgtcaggtaatcagatataacacacttcattatcaaagctatgttatcgggttcagaggcagcttacatatcctatctcacatcctcctttattttaaacttcattatgtaaacaatgactatgaaggtgttactatggaggtatttgagatggctctaggttctagatccagtatggagctgtagtttatgtc

SEQ ID NO: 126781 - DNA, 4509 bp, Zea Mays
atgggcacagttgtcggtgagatgcttgcatcggctgtcctgaaggtggtcatggggaagcttggtgcggttattgggcctgaggtcaacatgctgtggaagttcaaggatgatcttgagtcgatcaggagcactctgttgactctccaagctgtattgaatgacgctgagaagcggtcttcacgagaggaacgtgtgcgcctctggctcaagaggcttaagtttgctgcttatgacattcatgacattttagaggaaatggaatcaaataatgacattggctatggttcgtttaagaagcttagcgcacacattaccattgctcacaagatgaagaagatgaggcagaggttggagaagattaaggaagaagcaaaactggatatattcaattttaaggctgattgttgctccttggatgaaaatgttaatagcagggctacgttttcttgtatcagtgaagatattgtggggaggtccacggagaaagaaactatagttgctatgttgacaacatatagtgaagaagagattttgaccatctgtatttatggttttggtggccttggtaagaccactcttgccaggttagctttcaatgatgaaaatgttgggggagttttcgattaccgagtatgggtctacgtatctatgaaatttgatctgaagaaaattggtgaatctatactttctgaaattgatgaaggcaactgtggccaccacggaaaccttcaggaggttactcgtcatctccaaagagtacttgatggcaagaaattcttggttgttcttgatgacttatgggaagacaattggatccaattgcaaaatctgaaggcaatgctcagctgtggtgcaaaaggaagtaagatcgttgtgactacacgcactgggaagattgcttccctgatggatcattgcatgccttacaagatggatgtcctatctgatgatgattgttggattttgtttaagagaagagcctttgttcctggaagggatgatcctaggatagaagtgattggaagggatatagtgaagaaatgcaatggtgtgcctttgtctgcacaagctttgggtttcatgatgcggttcaaggaaggggtggctgcatgggaagcagtgagggacagtgaaatatgggagatagaagatcagaatattatgccatctttgaagcttagttattgtctcatgccttgtcacctgaagttgtgctttgcatactgtgtagttttctccaaaggagctgccatagacaaggacatgctgatacagcagtggattgcacttggattcattcaacccactagtggaagcttgacacatgtaaagcgcggtgaggagtacatccgtgaactagcggataaccatcacatgaaagctgcaagggtattccagatgcatgatttggtgtatgaccttgcaagatgtgttgctaatgaagaattcctattcatggatgccaaaaagagtggcatgactagcgctagaaatgatcattatcgacatattgtgctgatgaattatgttgaggtaccaatgaacagcaaggctgcactttgtaaggcaaaatcacttcattttagagattgcaaaaggctgcagatttctgggagatcactctccctgaccctgagtaaattcttgcgagtcttggacataagtggctgttctatgttagggttaccaagtcaacttaaccagatgaagcagttacgttatcttgatgcatcgggaatgcagaatgaattgaaacaggagtctttcgctggtttaaaatgcctaaatgcactaaacctttcggcaggttattttcagaaactgccagttcaaatagttaaccttgagaaattgcattacttaaaccttcatggttgttctcgtctcatgttaattcctgagtccatttgtgaactaagggatctggtgcatctagacctatcaggatgcattaacctacgagttctgcccacatctttcggcaaactccataaattatcattcttggacatgtctggttgtctcaacctagttagcttgccagaatcattttgtgacctccgttccttggaaaaccttaacttgtcatccttccatgaacttagagagttgccgttaggcaatcatcaagaactcctcatactggacatgtccaattgtcataaaatccaaattttacccatgtcattttgcaatctcctacatttagaggatctcaatttgtcatgctgttatgaacttcaagaactgccagaagattttggaaaaaatcgtgggcttcgtattctggatctaagtaactgccacagacttcagacattgcctgattcctttactgaccttgtaaacatagagaaactgatcttatccgattgctgggagctagtacagcttccagaactgcttgggttcctacagaaaattcaggttttggacctatcatgttgttcacagctttttgcattgcctgagagtgttactaagctcacaaatttagagcacctaaatctgtcatgctgcattagccttgaaaagatgcctggagactacggcagcttaaagaaacttaagcttctgaacatatcatattgttttaaggtccgtatccctaatggcatagccaatatgtctaacctgaaatgtttgatggcggttgggttggacggttactcttgtgggaataaggatgatttcaatattgtaagtagcttactgtgtatgcctaggatagatttgagtaaaaaggacagccccattggtgacttccatgggatcttgaagcacaaaagactacatctttttggtctcggcaacgtgcaaagcattgatgagtttgagaacttgggattatgcaggcatcagcagctcaactcactaagacttagtagctcctacatgaatggtaatgaagtggctaaatttatcccagatgacattgtacttgaaaagatcatacctccaaggaccctggaacactttgaacttttgggctatcatggttcagaatttcctgagtggatgctgaatctgacaaccattttgccaaaccttgtacaccttaagctttctggccttgctacatgtgaccatctgccgcctcttggccagctaccaaatttgcagtccctggtcatagaatgtataccaaatgtcaaggctgttggagaagtttttgctggtggcagcagagcgtttctgaaattaagggacctcactatcagtggtatgccaaacctagaaaggtggctgacaactctatcaactaccaatgaagaggcccatgtgtatgtgttccctaaccttcaccatctgaaggtgtcatggtgcccaaagttgatatttgaaccatctcttccacagtgccttttattggaaattgatgcatgtggtgagatcttgcaaggatggacagcctcacattcacaaataaaccttaggccaacaagaaggttaagcttccagttctgtgacttatcattttcaaggggggaccaacttcatttttttagctccttaagttcacttaagttcctgacacttccattcttgcggcagctacaaattgtttgttgcaacgctaagttagagttacctggtgaaataaccagagccatcttggctcgtattccaaatatcagcatacacaatgtcggatgtgtcaggcatatagaacaggagaatggtatatgccaaaatgtttcagttgacaaggtcggatgtacgagctctatcgacgttatagttgtgcctccgcgagtccgagctgacccagcagcgagtcagaatccagcagttgttgccaggaggatggttctgaagtcaccacgcctaaggatcaaaaggcctgtcgtagtggcacagctgatgaagggcagccaccgcaagcggcccgcagccaggaaaacaagaactggggacaaggcttcgagtagcacccgccagggaacgccgaatgacagcaatatcacgggtgaggtagatattggagatcttatcgacttccttcgggaggagtacggatgtcgaggaacgtcgacaaggagctatcaggcgcggcaaatgacggtgatgagcggattctcatgtatgaacttattctgctagcgtcgtgtcgtgtataggcagagtcattgaaaaaaatgcaaacgtgaaggcggctcaagacggcttcgccaaaatgcccactgagccatgtaactcgtcaaaatacccatgtcaacatgaaaacattgatgtaatgctcatacctctttatatattatgttttgtagacttgtatagaccaaaatagccttcttagatatgcatacacaaataaaggtacaaaataaaacgtaccatatttcatcaccagcatacagtggccgcagatatagaatgataattcatgggggccaacaaaccgcacgataaaattaaacaagaccataaaaaactagtgttgcatataatttaacttttatatacaggtttaaagaatgaaactacataaacaaaagaaacaaa

SEQ ID NO: 126782 - DNA, 1511 bp, Zea Mays
cttcgattgcgtccccgccggtccatgctccatccggcttcccttgccgcaaccgcaagccccggccccgcaaggcgataggaagccggcagttcagccgcggcttcggttccgccgttccggagatggggtccggcatgagcagcgcccggcggcgccgcttcggcctggaggcgtcgcgggggatgctgcccctgctggctctgcaggtgctcatcgagtacggccgcgcgggggcctcccgcccgcccgtcacggccgcgctgctcgccgccaactcactcgtctacctccgccccggcgcgctcgacggggtcctgccctcgctcgcgcgcgtctccttcaaccctcagctcatcatcgagtatggcgacttgacgcgctttttcctgtcacccttctaccacttgagtgaaagtcacctcttctacaacatgacgtcgctgctgtggaagggcattcatctcgagacatcaatgggtagtgccgagtttgcttccatggtcgcggtgctgcttggcctgtcgcagggtatcacgctgctcctgtccagaggcttactcttgctcggtgacgataccatgtactatgatcagcatgccgttggattctctggtgttctgtttgccatgaaggttgtgctgaacgcctggtcagacgatttcgtgtatctgcacgggatggttattccagcgaaatacgctgcctgggcggagttgatcctcatccaggtttttattcctgggacatcctttcttggccatcttggtgggatacttgctggactggtttacctttggctgaagcgtgcatccaatgggccagatccgatcactcttttgatctcaagcgttgccaatgttgtgacctggccagtgaggttcgctcagaatcttctacggtctgcccgttcacagggccgcgtaacaggtcggggcagggttgggcgccgcatatcagcaagagatagccctcgaggtttttggagatgcccaacctgcacctatgataattcagtttccacagatatctgtgagatgtgcagcactgcacgagataaccatgcttttttgcggagacagcatcatcaagccgtaggtaacacggtggaactccctgttgatgagatgcgccgtaggaggctgcaaaggtttgacagatgatgtaaatcattgttgtcagtacacacattgtgcgctgctgaacacagttgaagtatggcaggtccattcctctgcttgatggttttggcacatttgtctcttctcatgatgatgaatgctttactttacacaattgaaattttcatcattatgtgaaggagactcctactgatttagcattatcctttacaagtttagattgtttcaaagccttggaaacaattagttattgcctaattttgtataaattatgccagggcatgttgaaatcaaagtacttgagcatatctatcttctgtttatggcaaccattgagatttaaccttcagaatatttgattattggaaa

SEQ ID NO: 126783 - DNA, 3491 bp, Zea Mays
cccaagccacctctgcttctcctccgtctcgtcgtcggccatgacacccgccggtggcgccaaccactccccggcgccgcgtagcctggtattcgccttctacctcaccggccatggcttcggccacgccacccgcgccatcgaggtggtgcggcacctgatcgcggacgggcacgaggtgcacgtggcgacggccgtgccggagttcgtcttcaccgccgaggtgcggtccccgcgcctccgcatccgcagggttatcctcgactgcggcgccgtccaggcagatgccctcaccgtcgaccctctcgccacgctggataagtaccgtgaggcggcagtgttaccccgcgagttcatcctcagggccgaggctgagtggcttagctccatcaaggcagaccttgtggtctcggatgttgttcctattgtgtgcaaggtggcttcagatctgggtgtccgctctgtatgcattgggaattttagttgggacttcatatatgctgaatacatcatggaggctggatatcatcaccgatctattgtgtggcagatagcagaggattactcccattgtgacatattacttcgactacctggatatggcccaatgccggcttttcgcaacgtcattgatgtgcctcttgtggttagaggattacgcaaatctagatctgaggtgaggaaggaactaggaattgaggagaatgctaaggtgctcgtttttaattttgggggtcagccagcaggatggaaactgaagcaagaatgtctccctgatggttggatttgtttggtctgtggtgcctctgattctcaagatgttccaccgaacttcattaagcttgcgaaagatgcttacacacctgatgttatggcagcatctgactgtatgcttggaaaaattggatatggaactgcaagtgaggctttggcctgcaagctaccattagtgtttgttcgcagagattacttcaacgaagagccatttttgcgaaatttgcttgagcactaccaaaacagcattgagatggtcagaagtgatttccttgctggacactggaaaccgtacctacttcgtgctctcacacttcaaccatgctacaatggcccaataaatggtggtgaggtggtttcccagattctccaggacactgctattggaaacaaatgtatttctgataaagctagtggtgcaagaagattgcaagatgccatggtctcaggatatgtacttcaaagggttcctgggagagatgcaggcattcctgactggtactctgtgtccgaaaccaaaactggtggcggtccgacctcacaaaatgttgctacaaaggaaagtgcagcattatgtattgaagacattgagatactccatggggaccttcaaggattaacagatacagtggactttttgaagagcttatctgaacttaatggaaatgatttgaagagccctaagaagcaagacctagagagaactgctgcatctgttctttttgactgggagacagaaatatatgtagcaagggcacctggacgtttggacgtcatgggtggcattgctgattattcagggagtcttgttttgcagatgcctcttcgggaagcttgccatgttgctgttcagagaaaccatcccagcaagcagaagctttggaaacatacaaaagcaagacagcttgttaacggaggcttggtacctgtgatacaaattgtatcatttggttctgatttgagtaaccgtgcaccaacttttgatatggacctgtcagattttatggatgatggtaaaccaatatcctatgagaaagccagggagcttttctgtcaggatccatcccaaaaatgggctgcctatgttgctggaacaattctagttttgatgactgaacttggtgcccagttcactgacagcattagcattctggtttcatctgccgtgccagaaggaaaaggtgtttcatcttctgcatcagtggaggttgctacaatgtctgctatcgccgcagcctatggtttaaacatcataccaagggatcttgctttgctttgtcagaaggttgagaatcatgtagttggagctccttgtggagtaatggatcaaatggcatctgcgtgtggagaagctaacaaactccttgcgatggtttgccagcctgccgaagtgaaggaattggttagcatacctactcatatacggttctggggtctagattcagggatacggcatagtgttggcgggggagattatggatctgtgagggtaggcacttacatgggacgaaagatgatcaagtgtacagcatcagatttagtttcagaatccttgacttcagggtcccctgctcagtctgattgttataaagaaaatggtgtgggcgtactgaaatctgaagctgcactggagtatttgtgcaacctaccacctcacagatatgaagctgtttatgcaaaagacattccagaggtgattagtggagaagcattttcagagaaatatggagatcacgatgacacagtgacagttattgatcctaaaagatcttacagtgtgaaggctcctactagacatcccatatatgagaacttccgtgtcgaggccttcaaaacgttattagaggcaggtaatacagacgagcagctgtcagcccttggagaacttatgtaccagtgccacaacagctacagcgcatgtggcctcggttctgatgggactgacagactagtcaacctggtacgagaagtgcaacacaggaggacatccgaaggcggaagccctagtctgtttggcgcaaagatcaccggcggaggctccggcggcacagtatgtgttgttgggaagaactgcgccaggagcagtgaagagattgcagagattcagcacagatacaaggctgagaccgggtatctgcccattcttttcgacgggtcgtctccaggagctgggaagtttggttacctgaagatccgacgtcgttgtccctagtggctgattgggaaacgaagaacttcagttcgagctttgtcacatatcactcaattgttaagaacctcactccaactctccaagccattgtagaacatagaggcgtattgccacttgcgatgattcgtcgttcacacacaaaatattatcatgtgctacaccaattctggaagctactagaggaaaatgtgaggaatataaagaaactcttgttgagcagatgtagtctagtggtctccgtgtgcttgctgcagtgtaaccaaactccaagtagatgtgctctgggctctggcatgtggtatgtgatgaagtcgaggatggtttcttgccgtttgatgaccagtgtagtcgttggttaacttgtcagtcgtaaactgatgttgtcagttaggagcggataaagtttgtgtgtgttgtcagtgtatctgtgtgtaagtttattggacagaccgaaagatacaccacgaacccagatgaagtaggtaatagtcgtatgtgaagtttt

SEQ ID NO: 126784 - DNA, 3231 bp, Zea Mays
atgatcaagcagcagcagcagcaggcgccgccggcgcctgctccggcggcagcgccgccgcccagcgcatgtgaaggggagaagaaggcgccgccgatcaactcggagctctggcacgcctgcgcggggcctctggtgtcgctgccgccggcgggcagcctcgtcgtctacttcccccaaggccacagcgagcagtttttggacatcaaactgaccgttaacggtgatcagtatggaaaggaggcgctgcaactatcggaactagcgctgaaacaaccaaggcctcaaacagagttcttctgtaagacactaactgcaagtgacacaagcactcatggaggcttctccgtgcctcgtcgagcagctgagaagatatttccaccccttgatttctccatgcaaccgcccgctcaagagatccaagccagagatttacatgataatgtgtggacattccgccacatatatcgaggtcagccaaaaagacatctgcttaccactggctggagtctttttgtgagcggaaagagattacttgctggtgattctgtcatttttgttagggatgaaaaacagcaacttctccttggaaccaggcgtgctaatagacagccaactaacatatcatcatctgtcctttcaagtgacagcatgcatataggaattcttgctgctgcagcccatgccgctgccaacaatagcccattcaccatattttataatcctagggccagtcctacagagtttgttgtcccgtttgctaagtatcagaaggcactctatggtaatcaaatatctttaggaatgcgcttccgcatgatgtttgaaactgaagaattaggcacaagaaggtacatgggtacaataactggtataagtgatctagatccagtaagatggaaaaactcacaatggcgcaacatacaggtcggctgggatgagtctgcagcaggcgaaaggcggaacagggtttcaatctgggaaatcgaaccggttgctgctccttttttcatatgccctccaccattttttggttcaaaacgtcccagacaattagatgacgagtcctcagaaatggagaatcttttaaagagggcaatgccatggcttggtgaggagatatgcataaaggatccacagacgcagaacaccataatgcctggtctgagcttggttcagtggatgaacatgaatatgcagcagaactcatttgcaaactcggctatgcagtccgagtacctacgatcgctaagcaaccccaacatgcaaaatcttggcgtggctgatctctcaaggcagttaaaccttcagaaccagattctgcaacagaacagcattcagtttagttctcctaaactgcctcaacaaatgcagctggccaatgagttgtcaaaggcatctcttccactgaatcagattggtgtgggcaccaaacctcaagaacagactcaagacccaaacaatctgcagaggcaacaacagtccatgaaccaactacttccattgagccaatctcaaaccaatcttgtccaggctcagcagcagttgtcaaattctcaaccactttcccagcaacaaacaatgccccaacaaagtattcaagttccatcacgggcaacaccaccaccaacaacaaccgtgcaacaagagtcacagcaaaagcttccacaaaagcatgttgggttcactgacacatcacataccaccattcctccgactacatcagtcaacaccatttcagttgtaggaagtcctctgatggcaactggtgccacacattctgtagttactgatgaaattccttcctgctcaacatcaccttcaacagctaatggcaaccatattgtgcaaccagtcctcggaaggaaccaactatgcagcatgatcaactatgagaaggtgcctcagtctactcctatgtcgatcccaagctccctggaagctgtcacagcaacgccaagatcaatcaaggaattgcctaagttgaattctaatgtcaagcaaagtgtaatggcttcaaagctaccaaatgcagggcatgtagctcaaaatttgactaacaatgcacccccgacggactatccggaaacagcttcatcagcaacttcagtgtggctttcccaagcggacgggcttctacatcatagtttccccatgtctaactttaatcagcagcagcagatgttcaaagctgcggctcctgagactgatattcagggtgcagatcccagtaataacacactctttggaataaacggtgatggtcagctgggctttcccatgggagcagatgatttcttatcaaatggaattgatgcttccaagtatcagggtcatatttcaacagatattgatggtaactacaggatctcaaaggatggccagcaagaaatatcgtcatccatggtttcacagtcgtttggtgcatcagatatggcattcaattcaattgactctggtatgaatgatggtggtttcgtgaacagaacctcttggcctcctgctcctcccttaaagaggatgaggacatttaccaaggtgtacaaacgtggagctgtaggtcggtccattgacattagtcagttcagtggatacgatgagttgaagcatgctctggctcgcatgtttagtatggaggggcaacttgaggaacgacagagaattggctggaaacttgtctacaaggatcatgaggatgacatcctacttcttggtgatgacccttgggaggaatttgtcaactgtgtgaagtgcattaggatcctgtcgcctcaggaagtgcagcagattagcttggatggggatctggggaacaacattctccccaaccaggcctgcagcagctccgacggcggcaatgcctggagagctcgctgcgatcagaactccggtaacccatctactggttcatatgaccagtttgaatgacctaacttgccggtccatacatgccggatcacaagtaggcgtctcgtgaggggatggcaggtgcagaatgtttgtagatgtgtcgccagatttacgtccgggagagcgaatcgctcgatggattggtagtgtttttgttcatatgtgtaggttttctcacatggaaggaatgtagtatagaggatgggagatgaagattaccgtaggtgaaagatgatgttgtaccatgaggggggaaaacatgcttgtagtagtaaagactgctgcttcagtccacgtatctaaaaagttcttctctgacca

SEQ ID NO: 126785 - DNA, 880 bp, Zea Mays
aaaggcctagaccgctcgtgccataccccaaaaccctaccaaatccagtggtttcgttctctgcggccgcacacgacacgaaccctcgtgattcctgctcgtcgaccgacaatggcggactccggcctcatcgacgtccagaagctgctcaccgacgtcgtcgacaagctgacatcgctcgagaccaagatgacgacggtcgagcgcgagctctgcaccgtcaagctcgatcaacggcgcctccaagatgccgtcgaggctgggaagcaggccgcgttccccggagtactcgagctgcgtttaccggagtacgacggcacggacgaccccgccatatggctccaccgcttcgagctgttcttcagcctgcagcggaccgaggacgacgacaaggtgtgcctcgcggccttccacatgaccggcgcggcgcagatctggtactccttgctcaagcacaaccgcggcgtccctacctggccgcagctcgccgagtcggtgcgtcgccgcttcggcgccccgacgagcgggtacgcgctccgcgagctcctccggctgcggcacactggctccgtcgcggagtaccgggacgagttcctgaggctgctggacagatgcgacggcgtgacggagccgctgcaggtggccttctttaccgccggtctccgcgatccgctgctcaccgacgtggagctgcggcaaccggcgaccctggatgacgccatgtggctggcctgtgcgctcgaggcctcgagcaccggtaagaactagggaaccagggtgtcgatcgaatctacacgaatattactctcccatatttgatttcatactttcactcgtgaatcagataatatggatattatcggcttgtgttggagaagat

SEQ ID NO: 126786 - DNA, 1098 bp, Zea Mays
ttcattcatgcgtagactgttcagataagacgagggccgacggcctctctcggctctacgagtctgcgtgaggaactccatctccatataagaacgagggcgtcacgctctagcgcagctcgcagcaggaacgaacgatactgatctagtgctcgcggtcatgtggaggctgaaggttagtgaaggtggcgggccgtggctgcggacggagaacggcttcctcggcaggcaggtgtgggagttcgacgccgacgccggcacgccggaggagcgcgccgaggtggagaggcttcgccaggagttcacccgccaccgcttccagaggaaagagtcccaggacctcctactgcgcatgcagtatgcaaaatcaagccaacgattaagcccttcaactccatcgatgaagcttgaaaacagtgaagaagtgactgaagaaataatactaacttcgttacggcgagctttaagtcaacagtctattttacaagcacatgacggtcattggcctggagattacagtggatttctggttattatgccaatgtttgtaagtactttagggttcatccgtcagcgaccgattgttttcatcttttttttctataaattatacccaaaacaaataaaaatgcagaatgaagatggcggttggagcacgcatgttctaacgacaagcaccatgctaggatcatgcttgaactatgcagccttgaggcttctcggcgaggtggcacatagggaggaagatgctttgtcaaaaggacgggcctggattttatcccatggaagtgcagctgcgctaccacaatggggaaagatatggctctctataattggtgcttatgattggtcaggaaataatccaattatccctgaattgtggatggtgccatatgctcttccaatacatccaggacgattctattgtttttttcggttggtatatatgccaatggcgtatctttatggaaagaaatttgttgggccgattactccaactgtattggcattaagggaggagctttacaacatcccatatggtaatattaattggaaagaagctcgtcgttcttgttccaaggtttgtttcaatctaaa

SEQ ID NO: 126787 - DNA, 321 bp, Zea Mays
tctcttttgttacaggaagatcttctctatccatactcacaagtgaaaaatattatttttacttgtctcaacaagtttgtggagccaatgttaaattgttggccaattaacaaactcagagagagagctctacataacctcatggaacatatacattatgaagatgaaactactaaatatatttgcctttgtcctgttaacaaggcacttaatatgatttgctgttgggtagaaaatccaaattcaaatgcattcaagcaacatcttccaaggatctatgattacttttggcttgcagaagacggcatgaaagcacaggta

SEQ ID NO: 126788 - DNA, 646 bp, Zea Mays
ttttcgacgccccaccacaatgcatgggtgacgacgcccacccaggtgtgtgcgacaacgacggtttcccaagaatgcgcgcgacggcggaactctgggcgccaccgccccgatccgaaggcaaggcgatggtggctccccgatccggacgcgcggtggcggcggttcctcgatccagagtcgcgatgacggttcccatatttggaggtgcggtggcagcggctccccgatccggagggcaagcggcgacaggtcgccgggacgagtgagcggtggcgacacctgggccctgaggtgggcgagcgacggcgaccccgacatgcaagtggcggcagcgccccatgaggcacgaccatcttcgctgatggttgtcatgctaggcatgggtgactccagcgacgacgacggtcgagcaagacgcgatctgcagggttcgatagtctgcatggtggtttgggtgtccttcgtttaccaactcctccgattcgatggcctcggcggcatcctccgacgacgacctcctccaatcctttgtttatgcatgcggctgttggatgagcccgtactaggatttttcttcattaattatgatgtatgatatatgtatttatgcaactttctataacgatttatgctttgcgcgata

SEQ ID NO: 126789 - DNA, 273 bp, Zea Mays
gtacagaattatattaatggaaatacccatgtagtgaacactgcttgggcgatgctgtcgttgatatatgctggacaggttgagcgagatcccataccactgtaccaagcggcaagagaattaattaacatgcaactagacacaggagactttccccaacaggaacatgttggatgctttaactctaacttttacctcaattatcctaactaccgcaacttataccccatttgggctcttggagaatttcgccagcggcttggtgcaaacaaa

SEQ ID NO: 126790 - DNA, 876 bp, Zea Mays
atattttctatgttttgttagcgattgatcttttttacatggtcaagttaagatgacattcatcagcgaattttcccaccgctcagcagtgacctcgttcccgtcctcctcgcatccctctcgtccgccgccgcctggctcgcgccgccgacagtttctcggcccagatcgagacacgcccgccatcctacaccaggtgccgaggccttcgccgatcaaagagatcccagacagcagatccgtccgtgccctgctcctcgaaccatggggacctctgcccaggaatcgcctctctggaagcgtatcgacgatgccgagtactatctagtcagtggatcatttgaccaggcggtgttgactgctttatccgtcgccgatgaaatacacatggcttctttggagagcgctagcgaccaggatgagctcctggagatgcttgaatcggctgggatggtgcttgtgcaggcactaaaagaactcaggagggcctctgagatgtttgctcagcttaagatgatgtttggttcagtgccatcagtgcctgctagagttttccttacaggaaggatctatatctgacctcagaccaatctttgaggagtaccttgccaattggagatatacggatgatgaggtttatgtttttgatggaggaaatgacagcacttcaaatggttttgtcgttaaatctattatgtcaactggccagtattttgaggtggcagaattgtatacagtaacattcctctgtattgtctctcaagatagtgaaactgctatctcatgggcagaaaaggctcatctaactgagcaaagccggcaggttttttttttttgtaaacgctacttaataattctactacagcataagaatct

SEQ ID NO: 126791 - DNA, 919 bp, Zea Mays
atattttctatgttttgttagcgattgatcttttttacatggtcaagttaagatgacattcatcagcgaattttcccaccgctcagcagtgacctcgttcccgtcctcctcgcatccctctcgtccgccgccgcctggctcgcgccgccgacagtttctcggcccagatcgagacacgcccgccatcctacaccaggtgccgaggccttcgccgatcaaagagatcccagacagcagatccgtccgtgccctgctcctcgaaccatggggacctctgcccaggaatcgcctctctggaagcgtatcgacgatgccgagtactatctagtcagtggatcatttgaccaggcggtgttgactgctttatccgtcgccgatgaaatacacatggcttctttggagagcgctagcgaccaggatgagctcctggagatgcttgaatcggctgggatggtgcttgtgcaggcactaaaagaactcaggagggcctctgagatgtttgctcagcttaagatgatgtttggttcagtgccatcagtgcctgctagagttttccttacaggagctaccattcaaatggcagaaggatctatatctgacctcagaccaatctttgaggagtaccttgccaattggagatatacggatgatgaggtttatgtttttgatggaggaaatgacagcacttcaaatggttttgtcgttaaatctattatgtcaactggccagtattttgaggtggcagaattgtatacagtaacattcctctgtattgtctctcaagatagtgaaactgctatctcatgggcagaaaaggctcatctaactgagcaaagccggcaggttttttttttttgtaaacgctacttaataattctactacagcataagaatctgagtgttccattatgctaacata

SEQ ID NO: 126792 - DNA, 1564 bp, Zea Mays
atattttctatgttttgttagcgattgatcttttttacatggtcaagttaagatgacattcatcagcgaattttcccaccgctcagcagtgacctcgttcccgtcctcctcgcatccctctcgtccgccgccgcctggctcgcgccgccgacagtttctcggcccagatcgagacacgcccgccatcctacaccaggtgccgaggccttcgccgatcaaagagatcccagacagcagatccgtccgtgccctgctcctcgaaccatggggacctctgcccaggaatcgcctctctggaagcgtatcgacgatgccgagtactatctagtcagtggatcatttgaccaggcggtgttgactgctttatccgtcgccgatgaaatacacatggcttctttggagagcgctagcgaccaggatgagctcctggagatgcttgaatcggctgggatggtgcttgtgcaggcactaaaagaactcaggagggcctctgagatgtttgctcagcttaagatgatgtttggttcagtgccatcagtgcctgctagagttttccttacaggagctaccattcaaatggcagaaggatctatatctgacctcagaccaatctttgaggagtaccttgccaattggagatatacggatgatgaggtttatgtttttgatggaggaaatgacagcacttcaaatggttttgtcgttaaatctattatgtcaactggccagtattttgaggtggcagaattgtatacagtaacattcctctgtattgtctctcaagatagtgaaactgctatctcatgggcagaaaaggctcatctaactgagcaaagccggcaggacctactaaaaaagcttcatgcagtgcaattagctgcaaataaaaaactgtccactgttgaaggggtaaaacaaacagcagagaggaacctttctacttctacaaatgactcaacaccatcgccacatgaggatcctccaaagatagttcctgcgtgcgatgggctcaaaaaggtcctgctgaagtctgctcaacaagctcagcatgttgcaaatcattttgatccgtttttctggtggtttcattcaattcgcctgaagtttgggaaaatacatattgttctacccagtggtaagttagtgtttctgttctctctgctgttctcagccatgtacgtgctgcgaaggaaaactgctggcttgaagagggctgtgttccagcaagctgcttccctgcgacgagcattttttgatgcacttcagcttgcgttctctgtccagatgaaccctctagctgctgttcaacaagtgccacaagcccctcgaggaagctggtgattggtgatgttctttatgccttgatctatgtaacattataactcaactgaaattcaacaggcaaccagatttcatgtcgcggaaaatgtggctgtgtaaatactagtgtgcttaatgcagcatgaatgtgatgatgacctgggtttttttgtgtccattctcacctgaagcatattggactggggattatttacaagagctatggcttttgaattggggaaac

SEQ ID NO: 126793 - DNA, 1459 bp, Zea Mays
atattttctatgttttgttagcgattgatcttttttacatggtcaagttaagatgacattcatcagcgaattttcccaccgctcagcagtgacctcgttcccgtcctcctcgcatccctctcgtccgccgccgcctggctcgcgccgccgacagtttctcggcccagatcgagacacgcccgccatcctacaccaggtgccgaggccttcgccgatcaaagagatcccagacagcagatccgtccgtgccctgctcctcgaaccatggggacctctgcccaggaatcgcctctctggaagcgtatcgacgatgccgagtactatctagtcagtggatcatttgaccaggcggtgttgactgctttatccgtcgccgatgaaatacacatggcttctttggagagcgctagcgaccaggatgagctcctggagatgcttgaatcggctgggatggtgcttgtgcaggcactaaaagaactcaggagggcctctgagatgtttgctcagcttaagatgatgtttggttcagtgccatcagtgcctgctagagttttccttacaggagctaccattcaaatggcagaaggatctatatctgacctcagaccaatctttgaggagtaccttgccaattggagatatacggatgatgaggtttatgtttttgatggaggaaatgacagcacttcaaatggttttgtcgttaaatctattatgtcaactggccagtattttgaggacctactaaaaaagcttcatgcagtgcaattagctgcaaataaaaaactgtccactgttgaaggggtaaaacaaacagcagagaggaacctttctacttctacaaatgactcaacaccatcgccacatgaggatcctccaaagatagttcctgcgtgcgatgggctcaaaaaggtcctgctgaagtctgctcaacaagctcagcatgttgcaaatcattttgatccgtttttctggtggtttcattcaattcgcctgaagtttgggaaaatacatattgttctacccagtggtaagttagtgtttctgttctctctgctgttctcagccatgtacgtgctgcgaaggaaaactgctggcttgaagagggctgtgttccagcaagctgcttccctgcgacgagcattttttgatgcacttcagcttgcgttctctgtccagatgaaccctctagctgctgttcaacaagtgccacaagcccctcgaggaagctggtgattggtgatgttctttatgccttgatctatgtaacattataactcaactgaaattcaacaggcaaccagatttcatgtcgcggaaaatgtggctgtgtaaatactagtgtgcttaatgcagcatgaatgtgatgatgacctgggtttttttgtgtccattctcacctgaagcatattggactggggattatttacaagagctatggcttttgaattggggaaac

SEQ ID NO: 126794 - DNA, 1544 bp, Zea Mays
atattttctatgttttgttagcgattgatcttttttacatggtcaagttaagatgacattcatcagcgaattttcccaccgctcagcagtgacctcgttcccgtcctcctcgcatccctctcgtccgccgccgcctggctcgcgccgccgacagtttctcggcccagatcgagacacgcccgccatcctacaccaggtgccgaggccttcgccgatcaaagagatcccagacagcagatccgtccgtgccctgctcctcgaaccatggggacctctgcccaggaatcgcctctctggaagcgtatcgacgatgccgagtactatctagtcagtggatcatttgaccaggcggtgttgactgctttatccgtcgccgatgaaatacacatggcttctttggagagcgctagcgaccaggatgagctcctggagatgcttgaatcggctgggatggtgcttgtgcaggcactaaaagaactcaggagggcctctgagatgtttgctcagcttaagatgatgtttggttcagtgccatcagtgcctgctagagttttccttacaggaaggatctatatctgacctcagaccaatctttgaggagtaccttgccaattggagatatacggatgatgaggtttatgtttttgatggaggaaatgacagcacttcaaatggttttgtcgttaaatctattatgtcaactggccagtattttgaggtggcagaattgtatacagtaacattcctctgtattgtctctcaagatagtgaaactgctatctcatgggcagaaaaggctcatctaactgagcaaagccggcaggacctactaaaaaagcttcatgcagtgcaattagctgcaaataaaaaactgtccactgttgaaggggtaaaacaaacagcagagaggaacctttctacttctacaaatgactcaacaccatcgccacatgaggatcctccaaagatagttcctgcgtgcgatgggctcaaaaaggtcctgctgaagtctgctcaacaagctcagcatgttgcaaatcattttgatccgtttttctggtggtttcattcaattcgcctgaagtttgggaaaatacatattgttctacccagtggtaagttagtgtttctgttctctctgctgttctcagccatgtacgtgctgcgaaggaaaactgctggcttgaagagggctgtgttccagcaagctgcttccctgcgacgagcattttttgatgcacttcagcttgcgttctctgtccagatgaaccctctagctgctgttcaacaagtgccacaagcccctcgaggaagctggtgattggtgatgttctttatgccttgatctatgtaacattataactcaactgaaattcaacaggcaaccagatttcatgtcgcggaaaatgtggctgtgtaaatactagtgtgcttaatgcagcatgaatgtgatgatgacctgggtttttttgtgtccattctcacctgaagcatattggactggggattatttacaagagctatggcttttgaattggggaaac

SEQ ID NO: 126795 - DNA, 75 bp, Zea Mays
gaacaattagttagtactccaacagcaagttggcaggcacacatcgtttcaagatggcaacatgctgatcccagt

SEQ ID NO: 126796 - DNA, 1250 bp, Zea Mays
agccagccaaccaaccaaccagaccagggatggatggtgcgcaccaagaaagggggcaccgcaccgagccaatgatctgcaagaagagaggtaggatttaggcacggcacctatagcccctgacgagagagagagggagagagatttggtcttggataagagtggagagactggagacgggtgggtggagtgagagaagtcactcggggagcctccagattctgaatctcccgcaacccgtctcatcgccggagtggagttccaggcgagtgattatcgagccagtaagccatttgcaagcactgaactgaaccctcagagcgttgttgcgatggaccaaatcgctacccccgacgaaacagcacatgcctctgcaccttcagttcataagctgtttgatgctaaattaggccaccatagcgtgatggatggcaccttggcatccacgagtcagtcatcaaacatcaagacccagctgatccggtcatcaagcttgtcaaggagcatatcagttaaccttgagaagaggagccctgaatctgatcctgaaagcccacagtctcacgtctcgcatcctaaatttgcagaacccatgttctcgaattcttcgacgttctgcacaagcttgttttcgtcatcttcgacaacagagccatgccgtcaaatgggcactttacctttcctgcctcacccccctaagtgtgagcagcaggtttcagctggtcactcatcgagctcctctctgcttttaagtggtgataccggtttagatgtggctgaacagtcagatgatctgaacgacttgctcaatctttcgggagatgcttctgatggcagcttccatggagaaaacaatgccttagcttttgacgaacagatggaatttcagttcctgtctgagcagctagaaattgccatcactgacaatgagaagaatcctcatttagatgacatatacggcacaccaccacagctgtcatcacttccagtatcatcttgctccaatcagaatctagggtcaccagttaaagtccagcttagctcatctcagtcatcttctagctctgcaacagctaacaagtcaagattgaggtggacacttgagcttcatgagcgttttgtggaggccgtgaaaaagcttgaaggtcctgaaaaagcaactcccaaaggtgtgctgaaactaatgaaggtagaaggtctaacaatttatcatgtgaagagccatctgcagaagtatcggcttgcaaaat

SEQ ID NO: 126797 - DNA, 102 bp, Zea Mays
atggagtacaacacaaaactatctgatttctgtttagcaaaagctggtccttcgggtgataaagctcatgtatctactcgggttgttgccacttatggttga

SEQ ID NO: 126798 - DNA, 2351 bp, Zea Mays
cgtgacacggccacgtagcccccgcgccgccccgcccgccggccgggccaatgagcgaccgagcgtttcaaaatttgaagaccctgttagaccaggcagtcaaaccaaacccaagatctcccgtgtcccgccctcctcgccagtcgcctccctgctcctgctgccggcagtggcggtggtgtcgcctctcctcagtcctcactcctcctcaccccagcggaagcgcgggcccgactccgtccgacctcgccgtctcggccccgagggcggggagaagccggcagggtgagcccgacgctacgccacgccgcgccaccatgccgctgccgctggccaaggcgaggagggggtcctccccgcagccgtcaccgcagcccgcgcggtcctcctgcaggtcgcagctggagcaggacgtgaagaggctgcgcaaggcgctgcaggacgagacggcgctgcacgccgtgctcgagggcgccctgggccgcgccgccgtcacgctcgccgacatggcctacctccccaccaacgcgcaggagctgctctcgaccatctgcatcctcgagacggcggtcacgaagctggaggaggagatggtctccctgcatttccagctcacccaggagaggaacgagagacggctcgtcgagtaccgcctcaagcacctgcccccgccgccgtccgcttgctcctgccactccgggaaactcggaccagacgaccccacaggcgaaaaatgcagtagccaaacggaggaggtttaccctcgcgccgtcttgcatgaacaggctgtgaaactgcagaggcagatctctgtcaagagcttcgtcgatcctaaccagctttccgaggacatcgtccgctgcatgaggaacatctttatttcgctgtcagattcctgcagggactcctcaaggaactcgaacatggagaatcagcagtccattccatctcccaccgggaactattcgatttctgccttctggactctgtcggaaccgtcgtccatttcttcttgggtacagagccctcaagtggatttgaactacaacaacaatgtattagcttcggagactgtttttgacccttacaaagctcgcgagaagcttagctgggctgacataggcagctacggtgcggcggccgaagtttcgtggatgtcagttgggaaaaagcaacttgagtatgctgcggagtcacttcgtaagttcagattgttcattgagcagctggcagaaataaaccctattcacctcagtgatgatgcaaggttggcattttggatcaacttatacaatgcgttgatgatgcacgcttaccttgcttatggtgttccacggagtgacatgaaactgttttcactgatgcaaaaggctgcatacaccattgggggccactcattcagcgctgcgtttattgaatacgtaattctgaagatgaaaccaccaagccataggccacagatggctctgcttcttgccctccagaagattaaggtacccgaggagcagaaaaagttctgcattgcggcacctgagccacttctgacgtttgctctcagctgtggaatgtattcttctcccggggtgaagatttacacggctaacaacgtgagggaagaacttcaagacgcacagcgtgatttcattagagcatcggtaggagtgagtcggaaagggaagcttctggcccctaagatactgcactgctttgcccgtggctttgtcgacgacaacagcttcccaatctggatctcgcatttcctaccccagcagcaagctacgtttgtcgatcactgcgtgtctcaacggcggcaaagtctcctgggcacccgtactttcggcgtcgttccatttgattctcggtttcgctacctcttcctgccagatgcgggatcgttaaattaactgctatccgagattcagatgcttccctgcctagacaacctgaatgacagcctaactgccatctgccaacagaagtgatgaagtccaaagccctgatagaccgctcaacagtgtaagagctgtctctcgagttaccatcatgtctggaaaagtaagtttatatccagcgaccatgagagtatcaagatttgagatagcagtcactggattgacccgtgtcattggaagtcagatgcatatctttggaattccttaatcggttcgtccgtctcgacatcttgtcgagtttcattaaaagaaaaactgtacataactcctactcccagataaaaacttaagttcatcatggtgctatttatgcattgtatctgttcatcatggtcctgacgttcatcgcattaacggttatcaagaccactacgcatcactcttaacagcttttctcgg

SEQ ID NO: 126799 - DNA, 2031 bp, Zea Mays
aggccggatctttatcgggcctgcggcacctagcccagcgcttgcacctcacccaggacgaggcccagggaggatcctcccgactccgacgctgcgtaggactccccgactccgacggcgtccgcccgcgtcgcgtgccacgcccacgccacgccggccgccgcgaggaaagaacaccgggtacttccccttcccttacgctccagtttcacaagtcgcgagccgtgcgtcgcgtcgacgcgagttccgcgtgagggagcaggcagttgcagttggaggcggtgacgaaaccctaggacttgagctccagcgcacggctcgggtcctcctcaccgttcccggcgatggaccggcggcaggagctctgcaggaacttccagcgcggcagctgcaagtacggatcgcactgcaggtttgtgcacgcctcctctcagcagcagcagcaggcgaagcccaacccgtttgggttcggcttagggagtaggcagcagcaacagcagcagtcttcgtttcgtgcgcagttccagcagcagcagcagcagaagcccaacccgtttggatttggagtgcaaggcagtgcggctgcacagtccagaaacgctcctggccaggcaaagccatttcaaaataaatgggtaagggacccctcagccccaacgaagcaacaggaagcggcacagccaccagcagcagcccacacctcctgtacagatcctgagtcctgcaggcaacagattgccgaggattttaagaatgaaactccactctggaagcttacgtgctatgctcacctcaggagcggtccttgtgacatcacgggagatattagctttgaagagctgagagctaacgcgtatgagcaaggcaggcaagggcatcctctgcagtcaatagtagagggtgaaaaaaatttgaaaaatgcaaagctgacggactttaataattttctgaacacgccacgtctatcggtatcacaaactccaagctttccaactgtggcttccttccctgaagtgaaaaataactcagcatttggggtttctcaaaataatggaccaccagtgtttagtagtttcagtcaaattggagtaacaactaatatgggacctgggtccagaactacaccaggagtcccaaccaatactctttttggtcaatctacccaaccaagccatccaacatttcctgcacctacttttggtcgttctgatatgaaatttggagtttcaggtccatttggaagccagatatcacaacaatcatctgggacttttcaaggctcaaacatgtccagttttggcaatttctcaaagcctcatgccagctaccagcagtccccttcctcctctagccatcacagagacattgataggcagtcacaagatttacttagtggaattgtggttcctacaagtgccacaaatgaagctcctgttgaggacaataaaaatgaaaatcaggatgatagtatctggttgaaggaaaaatggtcaattggagagattccgctgggtgaaccgccacagaggcacgttagtcacgtgttttagcaacattcttgtatttctgtgtcgtggaaccactgtcaagtcagcttcactgtctccttccatattgtcgggacaccatcttacaatttctcctccaggttcataaccataacacgtcaaattgggggcataaaatgcacctgaaatgctgattgggcagcgtagaaacttcttgtatcctgcatcacatactctgtctctattgttttcttgttagctccatgtacttcgtcacattcagggctcgtaatatcccgatttcttgttttagggtttgttgagtttagctgtgggttttaaaaagccgttgcagctgtttttttttttgcggaaattgtaccatacatggaagcagtagtttttgaagaagcggaatttggttctatctgtgtgtttttttttgaaaagggggaggggggcttggcgatttgtttgtttctcttttttgtagaagagacggtttctaaaagttaaactgtac

SEQ ID NO: 126800 - DNA, 1207 bp, Zea Mays
atggatggaggcagttggtggtacgggaacgtccgcacgccgaatccagtcatgtcacaggcggcgtccatatctgctagccccgggctaaccatctcagcaaatcatgctcttgaaagcgagtcagactccgacagcgaatcgttgtatgaggtagagggagttccttacgagcgaggtaacagatccattgagacgaagcgaataagaaggatggtgtccaacagggagtctacgcggcggtctaggaggaggaaacaggcacagttgtctgaccttgagtcacaagtaaagatggcagaggatatggtagcgagaagtgttgtatcgtgtgacctaggcgaccttggcctggcaccatatgtgaactcaaggaagatgtgccaagctttgaatgtgctcacagggttggatttactagggagtgatgcattcacgtatggtgccaggccacacgatacatattaagcactgcaagcctagagagtctggataaccgaaagtccaacgaggccgatcgcaagtgcaccagaatcatggtttgatgttgttgagcggacctcaatggaagtttgaagtgccagatgaagcaaggctttccgccaaaagtgtagttgttctccaaaatctttgccaaaagttttgcaaccagtattctgttccaaaggacaaactggagcatttcaaaaatattactgcacatgacatagtttgttcatagaaatcttctgaggtgctgctgaaggaagaggatgttgtagtatgcaatgttaagatatatcttactcgtggaaaatataaccccctcgaaagcatcaagttctttatgataattgaagactttgaggaggtgcaggtgcagagccgatggtttgagatccttagcgtgggctactgctcataggaggaggcttgggatgcttgtggcagcaacgtgttgcacaagaccacaaacaaagggaagagctgggtgcacaacaaggctgtcgccgccaacctctactccgtcaagcaacgacgatgtgttgcttcagggtcttggctgaacgatcaaacatcctatgtatatctgtgtacaacaaacgacatctgctgctactactaccataaaagactgcgggctgtgcttgcgttctctcttctgtaacacaaatgagtgtaaagagacatgtgctacttccttggaacttgaaaaccttgtaaactc

SEQ ID NO: 126801 - DNA, 1017 bp, Zea Mays
atgccgcggatggccaagctgctgctccagctgaaggcggcggcggacaggaggcacggccccggccccggccggcgccacccgctcgcgccccgccacgcggccgcgtccgccaccagattcgtgcccgcctgcctcgccctcgccgccgccgccaccacgctcgtcgcgctggcgctcacgctgcagaatcgcggcctcggccccgccgacccctctccctcctccgtctcgccacgcggcggcggcttcgcggtggttgtcaacacgtggaggcggcccgcgctgctgcggaggtccgtggcgcactacgcggcctgcgggggcgtggacgccgtccacgtggtgtggagcgagccgcggccgccgccggaacccctgcgccggggcgtcctcgggctcggcggcgcccggcggcgcgtgcggttcgagatcaacgcgggcgacagcctcaacaacaggttcaggcccatccgggcgctcgagtcggacgccgtcttctccgtcgacgacgacctcatcgtcccctgctccgcgctgcgcttcgccttctccgtctggcggaccgcgccctccgccatggtcggcttcgtgccgcggatgcactggcctaccgacccgagaagcactgaagatgcataccgatacggaagctggtggtcagtttggtggacagggacatacagcatggttctttccaaagcggggttcttccacaagaagtacctggaaatgtacaccaaccagatgccaccgtccattcgcagatatgtggatgagaacaggaactgtgaggacatcgccatggcttttcttgttgcaaatgctactggagccccgcctatatgggtgcaaggaaggatatttgagattggatcgagcggcatcagcagcctgaaaggccatggcttgcagagatcaaggtgcctcaacgcgttcgccgccatgtacggccacatgccgctcgtagccaccacagtcaaggccgtggacagccgcgggagctggttctggtga

SEQ ID NO: 126802 - DNA, 1168 bp, Zea Mays
acaggatagtgaggataaggggggcactctttcgttgggccagcgctgcatgcttccttgcttgcttttttgtcgcgcctgcttctcccccctctgcctcttggtgctgcttcctggtgggggaagggaaggagaaggctgtgtgcgtcctgcgccgataacgcgatggtgtccattgtcactgaggtatgggcgctcgctggatgcggcccggcgtccaaggcggcggcggtagcggtagcggcgcaggagttgccggcgcagcatccttctcctgccgcagcgggaggagggaaggccaagaagagagccgtgccagtgtcgttcagaggcgtcagcagcggcggtggtcaggaccaccagcgtgaggccgccgccgtcgtcgtcgggcggcggcgcggcctcgcgtcgtgcgcgctcgccgccgtcgccgcctcgttctccgcccgcgctgaccgccccgcgcgggcgcttgtcctcgaggaagacgacgacatcgagctgctggagcgcgtgaaggaggacaggaagaagcggctgcagaagcagggcatcatcagctcctccggcgccgagaccgggtatttgcaggacctcatctacaggctcagcaaagtcgggcaggccattgacaacgacgacctcccagccgcgagcagcgtgctgggaccaagctcagacgcccagtgggtgcagaacatcaatgcagctttctccaagctcagctcaagcccggagcagaggaacgtggtcgacagcttcaacagctcgctggccacactgtttacatcagtgagcaagctcgaccctgaatcctccaagtcggcgttcgtgtcgtccgcgacggcgttggagaaatggatcgcgttagctggactgggcggccagctcaagggctactgatgcgtgcgaggggaagagaagcactgggttgttctatgtttgggtccggcatttgtgaatctcctgaagagggtaccgtgaccgagaactgagttcagataggcatgctatgctcatcaagaaactgtgactgtttttgagactctgctgttacttacaagtggtaggaaacgaagttgtcttgtatcttgttgtccagtttaactttcgaaattccaaagcagctggcgtttattttttttaaatccaaaaattgttgcatgcc

SEQ ID NO: 126803 - DNA, 101 bp, Zea Mays
tcttttttttatgttagtgttgctatttgcataataaatatgcaaaagacgcagcaccagtgcaccaccatcatcgtatatttatcctgccagaccagacc

SEQ ID NO: 126804 - DNA, 2576 bp, Zea Mays
ggctcgccgccggccgccgcgccatgtctcagtgctactactgtccgtgtccgtggactgcgctccgcactgtggcggggcaccgaccgatcccacccgccgcgttgaacgaacccatcatcagcgcagcggggcgcgggcatctattctaccgttcgttcgccgatggatcggatgggtgggttggtacgctgggctggggccggcgcgtcggctgtaggctctgtagcgtagcttgcttgcttgccgtagtggttgccgtggcacgcaggccccatcggcctcgcatcctcccctccccgggaccgggacaccccgcgcccgcacccgcgaaccatcgggcgggcgtcaaccacccaccaaactcgtttctggttgcgctgcccgccgcggggtcgccatcggcggacgcgagcgagcccaatccctcccggcctcggcctgccttccattaataccctctccaccgtcgctactgcagctcgcgtcgcttccagatccagcgggcggaggagggggtgcggtgcggccgtgaccatgaagcagccgaggggccggcaggagccgcgccgggtgggcaacgccgccatggtcgtcaccatggtcgtctccctctgcgtcctcacgtacatcaaggcgcgatactgctccaaccctttccccaaggcggtggcggaggtggaggtggacgaggactacgacagcacgcggtacaagctgacgggccccgtgggcgaggaggacttcgacccgtcccgccccacctgctacaacaccagcaagcggtcggagcggtgcgccgccgtgggcgacatccgcgtggacggcaaccactcgcggatctacatcagcccgctgtcccgcgagtggcggaccaagccgtacgcgcggcggcacgacgccgtggccatggacgacgtgcgcgagttcacgctggtccccttcggcggccccaacgacacggccgtgccgccgctctgcacgcgcacccactccgtcccgggcttcctcttctccagcggcgggttcgcgggcaacctgtaccacgactacgccgacgtgctggtgccgctcttcgccagcaccaaccacctgggcggggaggtccagttcctgctggccgacatcaaggactggtgggccgacaagttccgcccgctcttccgccagctctcccgctacgacgtcatcgacgtgaacaacgaccgcgaggtgcactgcttcccgcggatcatcatcggctccaccttccaccgcgccatgggcatcgacccctcgcgctcgcccggcggcgtcacggtggccgacttcaagcgcctgctccgccgcgcgttccggctggagcgcgccgtcgcgtcgcggtcgggggcgccccggcgccgggaccggccccgcctcctcatcatctcgcgcaagagctcgcgccgcttcgtcaacgagcgcgccatggcgcgcgccgcggcggccgcccggttcgacgtgcggatcgccgagcccgacaaccacacggacatgcccaacttcgcgaggctggtgaactcggcggacgtgatgatgggcgtgcacggcgccgggctcaccaacatggtgttcctgcccagccgcgccgtgctggtgcaggtggtgccgttcggcgggctggagtggctcacccgcgtcaccttcaaggaccccgcaagggacatggacgtcacgtacatggagtacaacgtgtcgctggaggagagctcgctcagggacctctacccggaggaccacttctacctgaagcacccctacgacgtgcacaagaaggggtgggacgccatcaagacggtgtacctggacaagcagaacgtcaggctcaacctcaccaggttcaccaggacgctggagcaggcgcgagatctcttgccgacgccatgactgatgatgacctccccctctttcctctgctctgctgcaggtttcattcacttcagatcagctgctcacctcacttcacgccgtgtctctctctcttttttttttctgttgttgttctatacatatacttgtttcctcttctcctttcccctctctctctagtctctccctctccactcttgtggtggcaagattcatttctttcattgttttgttttttgttgttgttgttgaggaaggataggaacaaaaacaaggtattgtcgtgtccaaggttaatctacacaaacacacactgtaaatgattgattgattgctgtcagtagaggcgaacacaaggaataggtaaattcccaattatttgtccatagccccatcatcatcttccattcttgccaggtcgggtgactgccattgccattgccaggcaatatttttccttcctttgaaggttccctgtaccagcggcagcttggcttgccagttacataagccatgtcatgtcattgttggatgggtcctctacagccggtcaatagagagtggattagatttaacccaattatcgttcctttaatcggacccttgatcgggagggcccacgctaatctaggttggagcccccatacacacgacgctatatatataggactaaggggtcgcaggaaaga

SEQ ID NO: 126805 - DNA, 2152 bp, Zea Mays
catcggcggacgcgagcgagcccaatccctcccggcctcggcctgccttccattaataccctctccaccgtcgctactgcagctcgcgtcgcttccagatccagcgggcggaggagggggtgcggtgcggccgtgaccatgaagcagccgaggggccggcaggagccgcgccgggtgggcaacgccgccatggtcgtcaccatggtcgtctccctctgcgtcctcacgtacatcaagccaaggcggtggcggaggtggaggtggacgaggactacgacagcacgcggtacaagctgacgggccccgtgggcgaggaggacttcgacccgtcccgccccacctgctacaacaccagcaagcggtcggagcggtgcgccgccgtgggcgacatccgcgtggacggcaaccactcgcggatctacatcagcccgctgtcccgcgagtggcggaccaagccgtacgcgcggcggcacgacgccgtggccatggacgacgtgcgcgagttcacgctggtccccttcggcggccccaacgacacggccgtgccgccgctctgcacgcgcacccactccgtcccgggcttcctcttctccagcggcgggttcgcgggcaacctgtaccacgactacgccgacgtgctggtgccgctcttcgccagcaccaaccacctgggcggggaggtccagttcctgctggccgacatcaaggactggtgggccgacaagttccgcccgctcttccgccagctctcccgctacgacgtcatcgacgtgaacaacgaccgcgaggtgcactgcttcccgcggatcatcatcggctccaccttccaccgcgccatgggcatcgacccctcgcgctcgcccggcggcgtcacggtggccgacttcaagcgcctgctccgccgcgcgttccggctggagcgcgccgtcgcgtcgcggtcgggggcgccccggcgccgggaccggccccgcctcctcatcatctcgcgcaagagctcgcgccgcttcgtcaacgagcgcgccatggcgcgcgccgcggcggccgcccggttcgacgtgcggatcgccgagcccgacaaccacacggacatgcccaacttcgcgaggctggtgaactcggcggacgtgatgatgggcgtgcacggcgccgggctcaccaacatggtgttcctgcccagccgcgccgtgctggtgcaggtggtgccgttcggcgggctggagtggctcacccgcgtcaccttcaaggaccccgcaagggacatggacgtcacgtacatggagtacaacgtgtcgctggaggagagctcgctcagggacctctacccggaggaccacttctacctgaagcacccctacgacgtgcacaagaaggggtgggacgccatcaagacggtgtacctggacaagcagaacgtcaggctcaacctcaccaggttcaccaggacgctggagcaggcgcgagatctcttgccgacgccatgactgatgatgacctccccctctttcctctgctctgctgcaggtttcattcacttcagatcagctgctcacctcacttcacgccgtgtctctctctcttttttttttctgttgttgttctatacatatacttgtttcctcttctcctttcccctctctctctagtctctccctctccactcttgtggtggcaagattcatttctttcattgttttgttttttgttgttgttgttgaggaaggataggaacaaaaacaaggtattgtcgtgtccaaggttaatctacacaaacacacactgtaaatgattgattgattgctgtcagtagaggcgaacacaaggaataggtaaattcccaattatttgtccatagccccatcatcatcttccattcttgccaggtcgggtgactgccattgccattgccaggcaatatttttccttcctttgaaggttccctgtaccagcggcagcttggcttgccagttacataagccatgtcatgtcattgttggatgggtcctctacagccggtcaatagagagtggattagatttaacccaattatcgttcctttaatcggacccttgatcgggagggcccacgctaatctaggttggagcccccatacacacgacgctatatatataggactaaggggtcgcaggaaaga

SEQ ID NO: 126806 - DNA, 1577 bp, Zea Mays
cacgcccatcattttccgttcttcaatccgtcaatccagtccccatccccacggcgccgacgactcgggggcttccccccttggacttggcccgggtgggagtagcacgtcggggaagggaagcaagcgtccgcgagtaaggacagaaaaccgaagggaggagtggagaggaggagcttgcttggagcgggtggacgtgtggtgtgtatatagttaagcgggcgggcgggcgggcagccaatgccgtcgggcgcgcagggctaggagcatgggcggagggggcgcgatcgtgcacggcttccgccgctggttccaccgccggagcgaaggctccacctccaactccaaccagtcgtccctcgccggcgagggggaagcggacgacggctcatccgatctcgaggtcatcgaggacccggatctcctcggcctccgcgccatccgcgtgcccaagcgcaagatgccgctgcccgtcgagagccacaggaagagtacggagaggcaagccagtaccagatccaagaagtcattggtaaagggagctacggagtagttgctgcagctgtggacacccgcaccggtgagcgggttgctatcaagaagatcaatgatgtgtttgagcacgtctcggatgccacacgcatactgcgggagatcaagctcctccggttgcttcgtcacccagacatagtcgagattaagcacatcatgctccctccttctcggagggagttccaagacatctatgttgtttttgagctcatggagtcggatctccatcaagtgatcagggcgaatgatgacctcacccctgaacatcaccagtttttcctgtaccaacttcttcgagctctcaagtacatacatgccgctaatgtattccatcgtgatctaaagcccaagaatatactggctaactcggactgcaaactgaaaatatgtgactttggacttgcccgtgcatcattcaatgatgccccttcagctatattttggacagactatgtggcaacaaggtggtaccgggcacctgaactatgtggttcctttttctccaaatacactcctgcaattgatatttggagcattgggtgcatatttgctgaacttctcactggaaggccactatttcctgggaagaatgttgtacaccaattagatattataacagatcttcttgggactccatcatctgagaccttatcccggattcgaaatgagaaggccaggagatatttgagctgcatgcggaaaaaatatcccgtgccctttactcataaatttcgacatgctgatcctttggctcttcgtcttctagagcgtttgcttgcatttgatcctaaagaccggcctagtgcagaagaggctctagctgatccatactttgcatcccttgctaatgtggaacgtgagccatcaagacacccgatttctaaacttgagtttgaatttgaaagaaagaagctggccaaagatgatgttagagaactgatctatcgagagattttggagtatcatccacagatgctggaggagtacatgaaaggcggagaacagattagcttcctctatccaag

SEQ ID NO: 126807 - DNA, 1605 bp, Zea Mays
cacgcccatcattttccgttcttcaatccgtcaatccagtccccatccccacggcgccgacgactcgggggcttccccccttggacttggcccgggtgggagtagcacgtcggggaagggaagcaagcgtccgcgagtaaggacagaaaaccgaagggaggagtggagaggaggagcttgcttggagcgggtggacgtgtggtgtgtatatagttaagcgggcgggcgggcgggcagccaatgccgtcgggcgcgcagggctaggagcatgggcggagggggcgcgatcgtgcacggcttccgccgctggttccaccgccggagcgaaggctccacctccaactccaaccagtcgtccctcgccggcgagggggaagcggacgacggctcatccgatctcgaggtcatcgaggacccggatctcctcggcctccgcgccatccgcgtgcccaagcgcaagatgccgctgcccgtcgagagccacaggaagaactcagtagaaatggagttcttcacagagtacggagaggcaagccagtaccagatccaagaagtcattggtaaagggagctacggagtagttgctgcagctgtggacacccgcaccggtgagcgggttgctatcaagaagatcaatgatgtgtttgagcacgtctcggatgccacacgcatactgcgggagatcaagctcctccggttgcttcgtcacccagacatagtcgagattaagcacatcatgctccctccttctcggagggagttccaagacatctatgttgtttttgagctcatggagtcggatctccatcaagtgatcagggcgaatgatgacctcacccctgaacatcaccagtttttcctgtaccaacttcttcgagctctcaagtacatacatgccgctaatgtattccatcgtgatctaaagcccaagaatatactggctaactcggactgcaaactgaaaatatgtgactttggacttgcccgtgcatcattcaatgatgccccttcagctatattttggacagactatgtggcaacaaggtggtaccgggcacctgaactatgtggttcctttttctccaaatacactcctgcaattgatatttggagcattgggtgcatatttgctgaacttctcactggaaggccactatttcctgggaagaatgttgtacaccaattagatattataacagatcttcttgggactccatcatctgagaccttatcccggattcgaaatgagaaggccaggagatatttgagctgcatgcggaaaaaatatcccgtgccctttactcataaatttcgacatgctgatcctttggctcttcgtcttctagagcgtttgcttgcatttgatcctaaagaccggcctagtgcagaagaggctctagctgatccatactttgcatcccttgctaatgtggaacgtgagccatcaagacacccgatttctaaacttgagtttgaatttgaaagaaagaagctggccaaagatgatgttagagaactgatctatcgagagattttggagtatcatccacagatgctggaggagtacatgaaaggcggagaacagattagcttcctctatccaag

SEQ ID NO: 126808 - DNA, 688 bp, Zea Mays
agggaaagagtggttgtatccaaggatggcaatactgaacaacaaattaatgaccaggagagaagcgcagattctgttgcccgcactaccgtgagccctccaaggtcagaggatgctgacatggatgatgtgaaacccacaagcttaagctctcggagctacctgaagagtgcaagcataagcgcttccaagtgcgtcgttgtcagaaataaacacccagagccagaggatgatggaatacctgaggagatggaaggcaccgtcgatggattgtctgaaaaggtctccaggatgcactcctaaggcaggactgtccatggcgacagcaatctcgacacaagatttctgtctggtgcactgtaatgccgacgacacactgtttggatcttgtgtacacccacagctagttcaactaagatgtagcactagttcgtccatggaggaagcagaatggacgatgaagtgtggtcagcctgtcgaccatgaggtgttttcttccaatggagtctagggtatgtttgagttctacaacggcttgtgccgtacgaagtgtcagcagtgtacgaggaggaggatatcgttgtcagtacacattttgcctgtctagaaaattatgagtactttctccgatcacaagtacatgtacatccatgtttgtcttaagataaaaaaagaaaattcacaaata

SEQ ID NO: 126809 - DNA, 1461 bp, Zea Mays
cgaggttggcgcgcgccgatacggcggcggaattccggcgaccggctcaacgatccatagctttctttttgtaatctgctccgccagccgaagcaccgggcgttgtcgctcaacctaaccatggcgtcaacctcctctccccaccggaagttgctccactccctggtgtactgggcggtgcagcgctgccggatgtcggagttgccgtgccggctcacggtctccctcaagcgccccgccgaacccgccagctccccgccgctgcgcgtctccgtttcggacacgggggtggggagcaaactggaggagttcctggagctcgacgccctggcgcgtgagattcccgtagagagatgggatggcacactcttagtcacaactactggaatcaatgatgaagccatttatcgttatcaaattaatcttcaagaagagacatcaagtgcaagatttagcaagttggctaccgcatacaaaaatcatgcacgattcagtggaactgaagtctgcctttgtctctcaaatgatgctgatgttgatgattttgtattatggttggtttgtttcttcaaaaagatacaagtgctaagagcagcaaatttagcatgtgagctctttgttgagcaaacaggcaacactggttccagaaatgtctgtctaccacaagattctgatgatgtgcatcattctgttacggcatcaagtattgaccagctagtttctggtcttaaagactactcactctcccatgtaaattcttgcgacaagtgtggcatgtgcttatttgatagagatcttctaaagattggaactggagcagcaaaccatgtagaaagaagaaaagctaaccgactacatgttgaagtagtcatagtgattgcacatattgcatctgattcagattgttgtatggcaaattgctcgtccacgcaggttttgtactttgaagattttgtaccttgtcagatattgcagtcctcttttgatgtgttgatgagcacagactggcaaagctatggtttcaagttaaaaggagccactgctatgcaagaacggcagggatctccacaggatagataccttttgaggaaggcactcaaatctgctctaactcacttgaaagcagatcatgcaggagattttcttagttgccatggccagagggttcgtgaatacgttcctgaccttgcggaatcaatcgctgggctgatcttgtcatccaccgatgaagagttccaaggcgaatgctttgcgcttcttgggctaggctccgaacaagacgtctctggaggagctgttcagtcgtcgatctgcgagaagatgatccgcatcatagagataaatgacaccaaggataattcagaggacaacgtgccttatctgttcgaatgcgagaagctggatgaagatagcgagctggacgaaggaggtggagatgaagacatggcttccgatttctag

SEQ ID NO: 126810 - DNA, 1067 bp, Zea Mays
cagtcggcatgtgaaaatcctcttcgtctgcagtctgctcgctcgcgattgcgattcccactcagccctccaggctcgaaacctaacccacccgcccggggatcccaagcggcggcggcggcggccatggagccctcccccgtcggcgacggtggctcggcggagcggtggcgcgcggaggcgtcgcgggcgttccagcactacctggaccgcgcggcgccgcacacggcggggcggtgggcgggcacgctcgtggccgcggcggtgtacgcgcttcgggtctactacgtgcgcggcttctacgtcgtcacctacgggctgggcatctacctgctcaacctcctcatcggcttcctctcccccatggtcgacccggagctcgaggcgctcgaggccgggcccgggctccccacccgcggctccgaagagttcaagcccttcgtccgccgcctccccgagttcaagttctggtatgccataacaaaagccttttgcattgctttcgtcatgaccttcttctctgtattcgatgttcctgtcttctggccaatacttctctgttactggattgtgctctttgtcctgacaatgaagcgacaaattatgcatatggtcaagtacaagtatgtcccattcagctttggaaagcagaggtatggcggaaagaaacgccctggagccagtgcatcaaaagagtaaagaccggagggtcttgtacctcaaagagcaaatgcctgtgttatctgtgaggcattttgctggcatcatggtattttgagtaccagctactgatagtgaatgcacaccatattcactagtggagtctgcagagaagctaaccagacttttgcattggttaatgattcctgtttcacaagtcggtagtttatgtacaatgacatggaacatagctagtaaatcagattctcagttcctcttgtgctgtgcttttgtcgacaagttgtggacctgttgaactgttgcaaatccaaagcacgcgaagaccgagaaaacaaagttgaattgaggctgtgaaaaaagttttcttttattattattattattat

SEQ ID NO: 126811 - DNA, 718 bp, Zea Mays
ttcgtctgcagtctgctcgctcgcgattgcgattcccactcagccctccaggctcgaaacctaacccacccgcccggggatcccaagcggcggcggcggcggccatggagccctcccccgtcggcgacggtggctcggcggagcggtggcgcgcggaggcgtcgcgggcgttccagcactacctggaccgcgcggcgccgcacacggcggggcggtgggcgggcacgctcgtggccgcggcggtgtacgcgcttcgggtctactacgtgcgcggcttctacgtcgtcacctacgggctgggcatctacctgctcaacctcctcatcggcttcctctcccccatggtcgacccggagctcgaggcgctcgaggccgggcccgggctccccacccgcggctccgaagagttcaagcccttcgtccgccgcctccccgagttcaagttctggtatgccaactgcggtttctgtcctgacctcattagtccaaaggcgccgccgcactggatgtctggctgagctgattgctagtagctactttacctaattactagggatccaattctatacggcaaccatagcaatatgctgcttttgtgctagatttcaattgaatagctggctagctaatatttgccatccaggcattcaccaaccaaccaaataacccacgattctcacaggtccatgtgaaattatcaattgtccgatatgattgc

SEQ ID NO: 126812 - DNA, 1121 bp, Zea Mays
cgctgcagcctgcaggaaaaggagcgaagagagagagagacgcaggaccgccggcgacgatcgaggagggaggaaccagatacccggcggcggcgatcgatggctccgcgcagctcatcggcggcgacgtgcctgtgcctcgctctcgccgcggccacgctggcgctggcccacggggcgcaaggaggaggaccatcggcatcggcggcggacctggacaaggtcacggccgagaccttcttggacatcgagatcgacggcaagcctgcaggccggatcgtgctgggactgtttggggacaccgttcctaaaacagcagagaacttccgagcactttgcacaggggagaaaggaattgccaagtccggcaagcctctgtggtacaaggggtcgacgttccacaggatcatcccggggttcatgatccagggaggcgacttcaccaacggcaacggcacggggggcgagtccatctacggcagcaccatcttctccgacgagaacttcaagcacacccacgctaaagccggtacgctgtccatggctaactacgggcccgactccaatggctcccagttcttcatcaccaccgtagacgaaaaccggttgcccaagaagctggacgggcgccacgtggtgttcggcaaggtggtgaaagggatggacgtcgtgcgcaagatcgaagccgagggccagctcaccggcgtgcccaaggccaaggtcgtcatagccaacagcggccagctgccagcgcccgccgccgccggccatcgtgacctctgatcgatgacgaggagaacgactcactgcacgatccatcaatccgatcgatctgtcttgttcgttaagaaaccaaacgtgtgcatggttaattatataagacgtgctcttcttcagatcatggtgaattgaaagactgccaaattaaggccacttgtgttgctttgattgtacggagagatcatgctgacgtgtacgtacgtgtaccgagatccgtttcaaatgcatgctttgattgtacagagagtggctcgtttggcatatagctccgctacatgattctctaatagggtaattccgtgtgattctctaacaaaagtgaatctgctatttgatgaaaa

SEQ ID NO: 126813 - DNA, 839 bp, Zea Mays
cttgttattacttttcgtgggcgaggcgaagagccgaagacagaagactgcagcaaaaccatcagatctagcagaactctctcgacctcatcggcgttggcggagcgcgtgttgaccggagatggcgccgagcgggtggaggaggagcgcggcggcgcgggtcgcctggcgcccggccacggtttgcctgtggctcgcgctcgccgccgccgcactgacgctcgcccaggtgctcgtcaacctcgtccgtcccttgcccacaggcccatgatttgtccctccaacctcttttctttcaccgatctgattagagactgcgcagcgcgggattggtcgtcgatatgactgtttctgacgcttgcgctagcttctggatgtctggatccgttggatcggggtccgagcagctaacaacgccgttgtgtttggcttctggtttgtcaggctaagaaggacctgacggaggttacccacaaggtctacttcgacatcgagatcgacggcaagcccgcaggccggattgtcatggggctttttgggaagactgttcctaagacggcaggtattgcgaacttgctattaacaattcagaactatcttctcatgaggcaagagaaaactaatggaccctacttattgttttcctacagagaacttccgagctctttgcacaggtatatatgttatttgttaagaatgtttatgttaccctcgttatagtttcctaatgattagaggctcatggtaggctgggcagtttttaaactgaaattgttttgccatgcagcacagtatagtttggttacatcttaatgtagtatatatcaaataaaaaaacg

SEQ ID NO: 126814 - DNA, 1421 bp, Zea Mays
cttgttattacttttcgtgggcgaggcgaagagccgaagacagaagactgcagcaaaaccatcagatctagcagaactctctcgacctcatcggcgttggcggagcgcgtgttgaccggagatggcgccgagcgggtggaggaggagcgcggcggcgcgggtcgcctggcgcccggccacggtttgcctgtggctcgcgctcgccgccgccgcactgacgctcgcccaggctaagaaggacctgacggaggttacccacaaggtctacttcgacatcgagatcgacggcaagcccgcaggccggattgtcatggggctttttgggaagactgttcctaagacggcagagaacttccgagctctttgcacaggagagaaaggggttggcaagagtggcaaagccctccactacaagggaagtaagttccacagaatcatccccagcttcatgctccaaggaggtgacttcactctcggggacgggaggggtggtgaatctatctacggcttgaagtttgcggatgagaacttcaagatcaagcacactggtccaggccttctgtccatggccaatgccgggagagatacaaacggatcccagtttttcatcaccacagtgacaacaagttggttggacgggaagcatgtggtgtttggcaaggtgttgtctggaatggatgttgtgtacaaggtcgaagctgaaggccggcagagtggggagccgaagagcaaggttgtgatagcagatagcggcgagctgccgatgtgacggcgtgctgaattgatgttccatcccgaaacatgatgaatagaagtttctggtggccgtctgtcgttctagaactgttaggccctctttggaatcttactgtttttacagttttgaaggaatactatggtttaaaaagtcaaaatctgtttgcttgtataaggtaaaacgcagtttcgaataccatggtctatctaaagcgtagtatttttacagttttgaaaacttcacttggacttaagttttcaaaggcttagcagccataccgctgcctgtgatgcgtacgcatacggcacacggctaaacagttcttagtatttttgaaaactataaacagttcttagtatttttgaaaactatggttttagtgtggttttgaaaactttgttgccaaacacgtgcttaattagcggctgaaaattggctttacagtcttctgtttacagcagtgatcttttttttgttgtcagaccacgtcttttagcttgtgcactaccaaacacctaaaaacacgcaatttcctctattcttgttccagggccggaacttttttgtttgtttgaattcgttgaagaatatatccactcctgttttgtttggcatggattctatcgattttatccagaaacgtcactggcatgagagcgcagaa

SEQ ID NO: 126815 - DNA, 1433 bp, Zea Mays
gttattacttttcgtgggcgaggcgaagagccgaagacagaagactgcagcaaaaccatcagatctagcagaactctctcgacctcatcggcgttggcggagcgcgtgttgaccggagatggcgccgagcgggtggaggaggagcgcggcggcgcgggtcgcctggcgcccggccacggtttgcctgtggctcgcgctcgccgccgccgcactgacgctcgcccaggtgctcgtcaacctcgctaagaaggacctgacggaggttacccacaaggtctacttcgacatcgagatcgacggcaagcccgcaggccggattgtcatggggctttttgggaagactgttcctaagacggcagagaacttccgagctctttgcacaggagagaaaggggttggcaagagtggcaaagccctccactacaagggaagtaagttccacagaatcatccccagcttcatgctccaaggaggtgacttcactctcggggacgggaggggtggtgaatctatctacggcttgaagtttgcggatgagaacttcaagatcaagcacactggtccaggccttctgtccatggccaatgccgggagagatacaaacggatcccagtttttcatcaccacagtgacaacaagttggttggacgggaagcatgtggtgtttggcaaggtgttgtctggaatggatgttgtgtacaaggtcgaagctgaaggccggcagagtggggagccgaagagcaaggttgtgatagcagatagcggcgagctgccgatgtgacggcgtgctgaattgatgttccatcccgaaacatgatgaatagaagtttctggtggccgtctgtcgttctagaactgttaggccctctttggaatcttactgtttttacagttttgaaggaatactatggtttaaaaagtcaaaatctgtttgcttgtataaggtaaaacgcagtttcgaataccatggtctatctaaagcgtagtatttttacagttttgaaaacttcacttggacttaagttttcaaaggcttagcagccataccgctgcctgtgatgcgtacgcatacggcacacggctaaacagttcttagtatttttgaaaactataaacagttcttagtatttttgaaaactatggttttagtgtggttttgaaaactttgttgccaaacacgtgcttaattagcggctgaaaattggctttacagtcttctgtttacagcagtgatcttttttttgttgtcagaccacgtcttttagcttgtgcactaccaaacacctaaaaacacgcaatttcctctattcttgttccagggccggaacttttttgtttgtttgaattcgttgaagaatatatccactcctgttttgtttggcatggattctatcgattttatccagaaacgtcactggcatgagagcgcagaa

SEQ ID NO: 126816 - DNA, 842 bp, Zea Mays
ttcgtccccacccccatcacccaaaacacaagtagggttaggaaggcggcggccagcggcgagagcgcgagaggaagagcaggaggaggggtcggccatgacggggaaggcgaagccgaagaagcacacggcgaaggagatcgccgcgaagatcgacgcggcgacgacgaaccggggcggcggcaaggccgggcaggcggaccggctggggcaggacaagggcgggcatgcgaagctggcgtgcccgctctgccgcaccccggcgcccgacatcaagtccatgcagatccaccacgaggcgcgccaccccaagctccccttcgagccggagaagctcctcaacctgcactcctccgcccccgctgctgccgccgccgccgccgctgccgccgccgctgccgaggccaccacctccaagcccaagcccggcgtccgcggcagcctcaagaagtaagcttgctgggcttggttggctcgcccgcctgcatggggcgcaattcccttcggtttcaatcccatccgccgacccgatctataatcaatcaaaccgccgccctccggcctggcggctgccgcagtcggcctgcggtgtactgttagtctgctgctgatttccgttgttatactgctggtacatgtgtcgtgtgatagatgtgtcaactatatatcaatctcgtcgccggcagctctggcatgtttgagtatgtgttgcttctctgtggtgccggcgacgatggctgctagtactgttaatgtgatcgggtctccttgaacaatggcataaatatgttgcttgtttactttttcctctaatggcaagtaaagttcatgatttgcgaatt

SEQ ID NO: 126817 - DNA, 103 bp, Zea Mays
ttgaatccttgtttgtttttggcaaatggtagagttgcagtcaatgggcacctacaatactcgtttatctagagcaactgcatgttttgagtttgccgtctag

SEQ ID NO: 126818 - DNA, 1672 bp, Zea Mays
aatggcatgggcgcatggccacgcctccggccgccgtctgtgccctcaccgctgccgcatccaccgggcgccacctccggcagatccacgcccacctcgtcacctccggacacctctcttccctcggacccaccctcctgcaccggctcatttcgctgcacccgccgcatctccaacttgcttacgctcaccgccttctcctctccatcccatccccgccgctcgacctcttcaacctcctactgccgccgctcgcctcctcgcccgatcccgccgccgcggccggactctacatccacctccgccgccggggccttggcccggatgcccacacgctcccgcacgtcctcaaggcgctcgcgcgcctcggtccaggatgcctcccgctcgtcgcctgcacccacgcggaggccgtcaagaccggccttgcgcgcgccgtggtgtacgtgccgaacgccctcatgtctgcgtactctgcctgcggccacctccatcgcgccatgcaggtgttcgacgaaatgccgcgttggaccgttgtgtcatggaacaccgtgctcactgcctgcgcggacaacggccgccacgaccggtgcgccgggatgttcgtgaacatgttagaggctgggtctgtgcccgatcagacgacgttcgtggtcatgctcaccgctgcggctgagctggggaacttggcgcttggcaagtgggcgcatgggcaggtccttacccgacgtactgacatgacgcttcagcttggcacggctgttgtgaatatgtacaccaagtgcggcgaggtgagttatgcatcgcgcttgtttgagaatatggcagcacggaacgtctggacatggagcgcgatgatcatggggtattcacagaacgggatggtacgagaagcactggagcttttcgacaggatgaaggatgcatcagttgcgcccaactatgtcacatttcttggactcctctgcggatgcagccatgctggtctggtcaacgagggccgcaaattcttccatgaaatggagcatgtctatggcatcaagccaatgatgacccactacagtgccatggttgatgtcctgggacgcaacggccgcctccaggaagcttttgagtttgtcgtggacatgcctgtcgaggctgacacggtcgtttggaggacgttgctgagcgcctgccaactgcacagctccaaggactgcattggcatcgctgataaggcgcagaagaggttgctggagttggagccccgcagaagtgggaaccatgtgatggtcgcgaacatctactctgacattgggttgtgggacaaggcagccatggcgaggagggtgatgagggaaggagggatgaagaagatggcgggggagagctgcgtcgaggtaggagggcggattcaccgattcatctctggggatgaatcctgtcctgggttgggtggggtttacagggttcttcatgagttgaacatcaacatgagaaaatgggaacctgtggacaaaattttgcttgctgattctgacctgtgagtaccatgtacggtggccaaaactgtttatgctgttcatgtcagtcctcttgttctccatattagcctgcaaaagcttagtaattttactcttgtagacatgatagcacatttgatcatctatcatttttcatatatgcctcc

SEQ ID NO: 126819 - DNA, 1677 bp, Zea Mays
aaagcagtgtgtgcaaatgtcatctgggcaggccatagtggcccagcctgaaattgagctgtttgtgccacttggcaattcggcccgcccggatcggcccgttaagaactgtccctccgaaacctaaggaggggtcaccctcttcttttttccctcgagaaaaataataaggtcgccgccgtcctctcctcgccggcacttcactgagggcgaagaaaaaagtggcagtatattctgccactcacccaagagccaagatcatggcgtcatcttcctgcgtccgcctccatcacctgccgtccacctctcgccggtcgtccgccccaaccaacctccagttcctcgcggcgagctgccggtggcggcggcgggttctcgttcccggcgcggcacctcctcccctacgcctctgcgccacgggttccccgcagccgcctcttggcagtgacagcaacgctccgttgtcccgcggaacccgggaggagggcgaggaagtggaggagcagcggcagcctccgcccccgccgcggctcaagatcgccgtggtcgggttcggcaacttcgggcagttcctggcgcgcacgctggtggcgcaggggcacacggtcctggcgcactcccggtccgaccactccgccgcggcggcagccatgggcgcgcgcttcttcccggacgcgcacgacctgtgcgagtgccacccggacgtagtgatcctatccacctcgatcctgtcggccgagtccgtggtccggtcgctgccgctgcaccggctccgccgcgacacgctcttcgtcgacgtgttgtccgtgaaggagttcccgaagcggctcctcctaggcgcgctgccggaggagatggacatcatctgcacgcacccgatgttcgggccggagtcggcgcccagcggctggacgggcctcccgttcgtgttcgacagggtgcgcgtgggggactcgtgcccggcgcgccgcgcccgcgccgaggcgttcctcggcgtgttcgcgcgggaagggtgccggatggtggagatgtcctgcgccgagcacgacgcgcacgccgccgagacgcagttcctgacgcacaccgtcgggaggatgctggcggcgctggagctccgcgcgacgcccgtcgacaccagggggtacgagacgctgctccggctggtggacaacacgtgccgcgacagcttcgacctctacaacgccctcttcatgtacaacgacaactccaccgagctgctccaccgcctcgactgggccctgggcgccgtcaagaggaggctcttcgacggcctccacggcgtgctccggaggcagctgttcggcgtcgaggacggggagggcccggcggagcgcacggagctgctggcggtggtgccgggtggtggtccgccggacaccgacgaccagggcggtgacgggcgcgacggcgacggcgacggcgacgagtcgggagagcagaagaatgattgatggcacgggcggcactgcacgagacaccggtgtggcataaatgcacgtcgattcgatctgtcgcggcgcgcgccttgcatgcttgtttgatcttatcctgacggccacgcatggctttcgatcttgctgtcttccttcctaataataactgtgacatgacaagtatatcatcagtgatcgatggcgtcattcattttcgatgggc

SEQ ID NO: 126820 - DNA, 925 bp, Zea Mays
ctcatgatattccagccccgccgccgccatccccgcccccatccgtgacaccccaccatcaccgccgcgccacacgcgacaactccatcccccgtccgcacccctaccccgagcatcacagcgcctcccgcacgaggtcgttgcgcttgtcgatctgatggcggcccatggcaaaggagcaggtcagtcccgtcccctagcctttcccgactcctcccctctgcctcactccatcgtcgtcgttgggcccgggtccagaggcggaaggctaggtgggggcaaaccctaacccctcccttttcttccagccgccgcaacctctattctccctctgcccctcgatagcgctcccgtcgatgcccacctctctcttctgcaggcggtgatggcagccacagcagaaagccgacgctcggcgtgattcccacccgtcgcgagccaagaggttcgaggtcatttttgagccaagaggttcgcggccacgggagcaaccctacagaaccatcaccaccaccgctctctcttcctctgctcttcaatgcctgcctgagctcaccgcacctcgcctcctcaccgcggatcctccgttaatccggtagaaaatggccgatgccgaggatatccagcccctcgtctgcgacaacggaactggcatggtcaaggctgggttcgctggcgacgacgccccgagggtcgtcttccccagcatcgtggggcgcccgcgccacattggtgtcatggtcgggatggggcagaaggacgcctacgtcggtgacgaggtgcagtccaagaggggtatcctgaccctcaagtacctcagcttacacatcacattattccccacattacagcaatcagtgcaacaatcagagcatttatttaggtatcctgcaagtagtagtagtgttatgcgtgttctaatatt

SEQ ID NO: 126821 - DNA, 198 bp, Zea Mays
acaacaataaatagagacccgttggctacagatgtcgagaataacataaaacacattcgagaacaacaactctggtcaatgtcatcgtgcatcgatattgatcagggtagatctcttaggcgttccggtagttcagtaattacgaatccactgggaataagtaaaaaaaattaggttacagtccttcatgagttgtag

SEQ ID NO: 126822 - DNA, 1691 bp, Zea Mays
gcgccaagggccggcctagagattcggcccatcgccggtgttctggtggatcacgcgtccttctctccaaccgcaccgaccgatatcttcctctccgctagggcaagggcggtgccggtgaggcgatccgtcggtggtgtcggagcggtggaggaggatggccgacgtgcagggagacaacgaagcagttctggaggacgacgctttccccgacgacgggcccttagatacggaggagggaggtggaggagaacccatcagcggaggcgacgaggaagaggaggaggacgtcgacggcctcgccagcttccttgagtcggagatcctctccggatccagcgacgaggatcctattgaccaatcgaattggttgccgcggcaggagcagcggcagcagaaggaggaaggtgatgctgcgaagaataagcggaagcagggttcaggatcggacggggatggctgcagcggcagcgagggggagcagacgaagagggcgaggagggaggagaagaggaggcaggcgaaagggaaagccgtggcgcctcagatcgacacgggcttgttcagcaacgtcccccctgagctgttcctgcagatcttcaagttcctctcctcggaggacctcatctcctgcgctctagtctgccgcttcatgaatgctgccgcgtccgacgagaccctctggcgccgcctgtactgcatgaggtggggactggcctccaatgccaaattcagggagtgcgcttggaagaacctctacatacagagagatagagaggatatggttgaatttgtgaggaatactcctacagagttcaaggagtactatattcagatgcaggctgcaaaaaggagtcaagctccccgtccgtcagaagtcaacgacgacaaggttatgcttgataagacagtagctgaccaggtatctagttggaaaaacagccgggggcttactgatgaagctgtcaaggggcactcttgttctggaaatacatgctcgtacacccagattggtgatgcttacatttgtgagaagactggtcgtgtccacgtttgtgatgacgcttgtcgtgaatttgtcttggaccaatctagtgggctgcttctttgtacgatatctggccactgctttgagaggtggctgtgtcctgatgatgaatgggatgctgatgataccgatctgcaacaggctggtgtagtggatgaagcagagccattcatgggatctggacgttacgcacgggcgattatgttgggctacaactgcactgatgagaaggagcttgaggatgccttgcgtttctgttgacgtgtttctgtcgatatgcccttcactcttgatcaagtgaagacgaagccagcggggatatgccggatgtatagctctgtgctatgttttcactgtatttcaccctcgagcatgtacctaagaatagaaggatgtacctaagaatagaacttgtttttgaggtagatcgctgatatgttttgatcagcagagggagccgttatgttgtcgtatgatttcataaattatgcctgtaataaaatataatttacataatgagttttttgtttgtatgatatgatggtggtatatcgtagatgcatgtgagatgccgacgcgtctcgactctacgaatttcaggtccagctcaggctggagggctttaatccaagtatttcatgtc

SEQ ID NO: 126823 - DNA, 1661 bp, Zea Mays
gcgccaagggccggcctagagattcggcccatcgccggtgttctggtggatcacgcgtccttctctccaaccgcaccgaccgatatcttcctctccgctagggcaagggcggtgccggtgaggcgatccgtcggtggtgtcggagcggtggaggaggatggccgacgtgcagggagacaacgaagcagttctggaggacgacgctttccccgacgacgggcccttagatacggaggagggaggtggaggagaacccatcagcggaggcgacgaggaagaggaggaggacgtcgacggcctcgccagcttccttgagtcggagatcctctccggatccagcgacgaggatcctattgaccggcagcagaaggaggaaggtgatgctgcgaagaataagcggaagcagggttcaggatcggacggggatggctgcagcggcagcgagggggagcagacgaagagggcgaggagggaggagaagaggaggcaggcgaaagggaaagccgtggcgcctcagatcgacacgggcttgttcagcaacgtcccccctgagctgttcctgcagatcttcaagttcctctcctcggaggacctcatctcctgcgctctagtctgccgcttcatgaatgctgccgcgtccgacgagaccctctggcgccgcctgtactgcatgaggtggggactggcctccaatgccaaattcagggagtgcgcttggaagaacctctacatacagagagatagagaggatatggttgaatttgtgaggaatactcctacagagttcaaggagtactatattcagatgcaggctgcaaaaaggagtcaagctccccgtccgtcagaagtcaacgacgacaaggttatgcttgataagacagtagctgaccaggtatctagttggaaaaacagccgggggcttactgatgaagctgtcaaggggcactcttgttctggaaatacatgctcgtacacccagattggtgatgcttacatttgtgagaagactggtcgtgtccacgtttgtgatgacgcttgtcgtgaatttgtcttggaccaatctagtgggctgcttctttgtacgatatctggccactgctttgagaggtggctgtgtcctgatgatgaatgggatgctgatgataccgatctgcaacaggctggtgtagtggatgaagcagagccattcatgggatctggacgttacgcacgggcgattatgttgggctacaactgcactgatgagaaggagcttgaggatgccttgcgtttctgttgacgtgtttctgtcgatatgcccttcactcttgatcaagtgaagacgaagccagcggggatatgccggatgtatagctctgtgctatgttttcactgtatttcaccctcgagcatgtacctaagaatagaaggatgtacctaagaatagaacttgtttttgaggtagatcgctgatatgttttgatcagcagagggagccgttatgttgtcgtatgatttcataaattatgcctgtaataaaatataatttacataatgagttttttgtttgtatgatatgatggtggtatatcgtagatgcatgtgagatgccgacgcgtctcgactctacgaatttcaggtccagctcaggctggagggctttaatccaagtatttcatgtc

SEQ ID NO: 126824 - DNA, 1620 bp, Zea Mays
ggatcacgcgtccttctctccaaccgcaccgaccgatatcttcctctccgctagggcaagggcggtgccggtgaggcgatccgtcggtggtgtcggagcggtggaggaggatggccgacgtgcagggagacaacgaagcagttctggaggacgacgctttccccgacgacgggcccttagatacggaggagggaggtggaggagaacccatcagcggaggcgacgaggaagaggaggaggacgtcgacggcctcgccagcttccttgagtcggagatcctctccggatccagcgacgaggatcctattgacgagcagcggcagcagaaggaggaaggtgatgctgcgaagaataagcggaagcagggttcaggatcggacggggatggctgcagcggcagcgagggggagcagacgaagagggcgaggagggaggagaagaggaggcaggcgaaagggaaagccgtggcgcctcagatcgacacgggcttgttcagcaacgtcccccctgagctgttcctgcagatcttcaagttcctctcctcggaggacctcatctcctgcgctctagtctgccgcttcatgaatgctgccgcgtccgacgagaccctctggcgccgcctgtactgcatgaggtggggactggcctccaatgccaaattcagggagtgcgcttggaagaacctctacatacagagagatagagaggatatggttgaatttgtgaggaatactcctacagagttcaaggagtactatattcagatgcaggctgcaaaaaggagtcaagctccccgtccgtcagaagtcaacgacgacaaggttatgcttgataagacagtagctgaccaggtatctagttggaaaaacagccgggggcttactgatgaagctgtcaaggggcactcttgttctggaaatacatgctcgtacacccagattggtgatgcttacatttgtgagaagactggtcgtgtccacgtttgtgatgacgcttgtcgtgaatttgtcttggaccaatctagtgggctgcttctttgtacgatatctggccactgctttgagaggtggctgtgtcctgatgatgaatgggatgctgatgataccgatctgcaacaggctggtgtagtggatgaagcagagccattcatgggatctggacgttacgcacgggcgattatgttgggctacaactgcactgatgagaaggagcttgaggatgccttgcgtttctgttgacgtgtttctgtcgatatgcccttcactcttgatcaagtgaagacgaagccagcggggatatgccggatgtatagctctgtgctatgttttcactgtatttcaccctcgagcatgtacctaagaatagaaggatgtacctaagaatagaacttgtttttgaggtagatcgctgatatgttttgatcagcagagggagccgttatgttgtcgtatgatttcataaattatgcctgtaataaaatataatttacataatgagttttttgtttgtatgatatgatggtggtatatcgtagatgcatgtgagatgccgacgcgtctcgactctacgaatttcaggtccagctcaggctggagggctttaatccaagtatttcatgtc

SEQ ID NO: 126825 - DNA, 1180 bp, Zea Mays
gcacgaatttgagctgggatcagtttggcgttgactcatacgcagtggccatctaaatcaatccactggtaatcagtttttcaacgcagatctcaaatgacaagtggccactttagatgcatattttggtttcttcttcaaattaacaaacagtcccggtaatcggatgaataaagaaagaggtagatcgacgaagcacttcagagaatcagagttctggcttggctttctcgaacgagaaaatgtagcgctcagtatgttcagcgtcgatcatctggggaaagggtcatcatattctccgtggtgtgcaacgcagttgagagaaacaaacaagcacaaaaaaagaagcatcggttttggtaaggggcaacaacaaaaaaataagcactgcattacgttcgggggtacattttctgcgtaagtggaggatcagaattctggcttggttctctaatagagaacttgttgcgctcaatatgttcactgtcgatcatctggggaaagggtcatcatatcctcagcaggacacatttgaatcgtttgtgcacaaatataagatcgttctcgagaaaagaaatgcgacagattatacatgacacaagacggcagcgatgatcagatagagctaatacagtttgagccatcatggcggccaatcaaaccaatagggaaacaatttcatcgtcatttcatctccagaccaccacacacagcagcaccaatggcgtgactgaaccacacccttcttgaaagatgaatccagatcgaagaacacgaatccagacagaaaaagagaaaaggcagacatactgaaacggggaaaaggcaacgacggggaaaaaataaatcaaaacaactgtaggacgctacagagatggacttgaggcggagcattgggtgcatcagatctccaaggtgaaaaagggtgtgacatcacagagatgcctcagatgcaaattacccattacaacttgtggctcctcatctgcaccgacagatccaacagtcccacagcaccaagcagcgatgccaaggcagataaaacaacgacagatctcgaagaacacgagcaagcggcataggcgagaaaggcagagcccgcaacactgaaatctgcggacagcgaaagcttcaggacgaccgtgaagccggagatgagcgaattcggcggcggagggag

SEQ ID NO: 126826 - DNA, 1897 bp, Zea Mays
atggacgcctgctctctcgtccactgccatctgccacggccactgcagctcccgctccttgcgcctccaactcccagccggcaccggccccgcgtcgccagcgccttggtctgctgctgctgccccgccgccgcggcagaccaccaccaggaacggccctgggagtggtacgaccgcgccatccagtcccacgcggggtccgacctggcgcgctccctaggacttctcgccgacatgcaagcgtccggggggcgccctagcggcagcgcgtacgcgcgcctcatccgcgcgctgtcccgcgcagggcgcgcgctggaggccgaggcgctcctcctcgagatgcgccgcctcggcccgcgcccggaagccgcgcactacaacgcgctccttgagggcctgctcgccgccgcgcacctccgcctcgccgacctcctcctcctccagatggccgacgacggcgtcgcgaggaaccggcgcacctacacgctcttgctaggcgcgtacgcgcgcgccggccggctcgaggactcgtggtgggtgctcggtgagatgaggcgctggggcattcgcctcgacaccgccgggtatagcatgctcgtgcggctgtaccgggacaatggcatgtggaagaaggccaccgacctcgtcatggagatgcaggaggttggggtggaactggatgttaagatctacagcggcctgatcgatacgttcggcaagtatggacagctagcggacgcacgcaggatgtttgataaaatgcgcgccgaaggcgtcaggccagacatatcgacttggaatgctttgattcaatggcattgtcgggttgggaacatgaaacgcgctctgcggttcttcacatccatgcaggaggaagggatgtacccggacccaaagatatttgttatgatcatcagccggttgggggaacaagggaagtgggatgagattaagaagttgtttgatggcatgaacaatcgaggtttcaaggagagtggcgcagtgtacgcaatattggttgacatttacgggcagtatggccattttcgtgatgcacaggactgtatagctgctcttagagctgagaatacacagcttttgcctcgtgtattttgtgtcattgcaaacgcttatgctcaacagttgatggaggaagaaggatttgagccaaaccttgttatgctgaattcgttaatcaatgcttttggcactgctggaaggcatttggaggcactagctgtatttcagcatatcaaggatagtggtatgagcccagatgttgtgacatacactacacttatgaagacattcatgagagcaaagaaatttgaaaaggtatctattgaattcggaatcattgctgttgtaattggtccattgtcaatgcatatgatcatgtactggttttcttcaaggttgaaacactatgcatgcgaagatttggatggttatggcatcaagccaataactctttccaaggctcctgaatgtctatatgttgatcagaagagtgaaaaagtcatggttatggtcaaagcaagactatcaggcataaacataaggatgaatcagaaaatatacataggccatgaacagcgagaagcatatagacactccgaaaatgaagcacatcaacttggtggaatttccttacaggtttctttctttccaagtcatatattatgaattttgtgtgagtgtgacaaggaattgctgaaaacatttggtgttgatcattgattgttatgtaaatgtatccaagtagctacatggtagcttatgcaatcaattgccaagtggtagagtgtaaacaatacaactacattttcactatttataatgtcagttgtaaatacttcaaattcaaagtagcgcaacacaattatgattcagtcct

SEQ ID NO: 126827 - DNA, 916 bp, Zea Mays
ggtctgcctgccattcgtccgggttccggctgccacccactcgtggcgtcgcccgtcgcccgtcgcccgccgctcgctagcctactacgacttggaacttggaccccttccccttcctcctcctcgtgtcctcttccgttgccgtgccaaccaccaccctcaattgtcaaatcaggcctcctcctcccggttccggttccaccaacgaccaagcacccatctctactcgagtctctgcgaatccgttgccggtagcctctctgcggtgagagttctgctgccgcctgctggagatgatggacgacggaggaggaggcgtgcagtcgcagggcgtcaacccggactgccccaacgccgccaaccccttccaccgctgcgccgcgtactgccccgtccccgccccggcccccaccaaagccgccgccgccgccgtgcgcagcaagccgtctccgcctcgtccgagggcggcggcggtggcggcgcagaacgggacagccaagcacggagacggcgctgcgcgtgtcgctcccgcctccgacgcggaggacgacgacgacgacggaggcgagagggaggagtcgcgggctgtcaactcgggctacccggcgtctccgcctcgtccggggccgaggccgacccacgcggcgcagaacgggaccgcgcgccgcgacgaggttgaggaggagtgcgagatcaccgtcgtcgacgagtcggaggagcacggcgagagcgtcgaggaccacggagggcaggagcaggagcaggaggtcagcggcggcggcaggacgagggcgagcgcccggtcgccggccacggacgacgggggggaggccggcggagagacgccgcggcaacaggcggtcaacccggactgccccaacgccgccaaccccttccaccgctgcgccgagtactg

SEQ ID NO: 126828 - DNA, 1026 bp, Zea Mays
cgcgaaggctccgacggcgacggcaagaaggtggatccccgctgccccaacgcgcccaacccgttccacgtctgcaccgaccactgcctcgccaagatatccgaggccggccgctcgtcggagggagccaagtcgccgatctcgctcttctcccgccactcccgccgctcctcctcgtcctccgaagatggcagcgtgaagtccgcggggagcaagaaggtggatccaaggtgcccgaacgctggcaatctgttccatgaatgcggtgagcattgcgccgccaagatgcagcggtcggagcagcagcacaagggggtcaatctcaagtcaccgcgcaggaaagtggggaagaacgctacagcgatcccaaactggaaggttgatccgaggtgccctaacgcgtccaatccgttccacatgtgcgcccagtactgcttcgaccatctgagtgaaacagcgcagacaagtgcagcaaagtcaggaaaaaacaggagcaaggaggggacaaggaggaggaaggtgtggcagggcagggcggggcggctcatgatgcgcgatgaggtagatggccggccggccggcccttggacaggcgtggctggctgcctttctggttgggagttggagctggaacaaacccaggtggcagtcaggtacctgctgccttccagaagccgtggcgttgcgcagttgcagactttggcaggtcagcaaagcatagacgtcgtcggtcgagacgagaggggtaccagggcagggtgggactgggatgcaggctggcctggcctcaggatctggtggatcttggagtcaggaggacatgcagccggtgcgggtgatgtgatcatgcgtgcggtgcaaggtcagcaggttgggttgggaggggcggagccgaggaggtccacggccgcgcccacggagtgcgcacggcaccgacggccggcagggcagtcagacgtgcaccggcaccccgtgcgctgcgtctctgcaacggcaaccgaccccttcttccttccttttggttaa

SEQ ID NO: 126829 - DNA, 1528 bp, Zea Mays
gccgcctgggcgcgcaggcccgcgccactttcatcctctcccagtatccacggccacgggctcgcacgcagtcgccgccgccctgcccgtctccttcctgtcgtctccccttctccaatcgcttcccgatcccagccaatatctcagacggaatcgatccaaagctatcctagggttccgccgtcccgtccagatccgggctcgtcgatggggaaggagggcgtggcggcggggccggcggcggaggggagtaaatcgcggtcggagtgtatcaactcgtccaacccgtaccacgagtgctccgactactgcctccgcaagatcgccgaggccaggcagcgcctcgacgacgagctccctgactcgtggaagcgcccgcccgagcagcgcaccgtccacccggactgcatcaatgcctccaacccttaccacgagtgctccgactactgcttcaagcgcatcgccgacgctaaatcccctgcctgcggtgcgggtgattccttccccgttaattcgaatcggctggagcgtgaggagcgacagccaccagctgatgtgtttgccgccgccggcatgtctgatgccgtggagcagcatcggcctatagataacgattccgacgaacaggagggcgcaggtccggatgacggctacccgcagatgacggagaagcagaagaagttgttcgagctgcggcttaagatgaatgaagcacggaaagcgaaccagcaggcgatggttgccgagaagaaaaggatggagcctcgtggcgagagccgaggtgtttctaagcagaagtggttagacgacaggaagaagaagattgggaagctgctggactcgaatgggcttgatatgaaaatggcgtacatgctcgacacgcaggagactgcagaagccaagtacaagaagtgggagaaggaacctgctccatatgggtgggatgttttcaatcaaaagaccttgtatgacgcatacaagaagaggaccaagaacatagaagttgacatggagtcttacaataaagccaaagaagctgatcctgaattctaccgcgacgcctcaagtctccagtatgggaaggtgtccaatgtcccagaagaaaacatcgacaagatggtaaaggaactcagggagcgggaagagaagcggaaatcgttcagcaggaggcgcaagttcaacgaagacaaggacattgactccatcaatgaccggaacgagcacttcaacaagaaggttgagcgtgccttcggcaagtacacgctcgagatcaagaacaacctcgaaagaggtactgcgctgccggactaataaaaccttacacggcagctatcttcgaccgtttttcaagctaaccagtcgactagaggcgtgtgtccctgctgctgttttccttttcgcacggttacttgtatgcttgtaacttaacttgaggccacagttccattgtgacttgtaacaaaacctggactgggttgtgtaatgacgcgaggctgaagcaaacatttgtgtatgcatgtgagttgtc

SEQ ID NO: 126830 - DNA, 1495 bp, Zea Mays
gccgcctgggcgcgcaggcccgcgccactttcatcctctcccagtatccacggccacgggctcgcacgcagtcgccgccgccctgcccgtctccttcctgtcgtctccccttctccaatcgcttcccgatcccagccaatatctcagacggaatcgatccaaagctatcctagggttccgccgtcccgtccagatccgggctcgtcgatggggaaggagggcgtggcggcggggccggcggcggaggggagtaaatcgcggtcggagtgtatcaactcgtccaacccgtaccacgagtgctccgactactgcctccgcaagatcgccgaggccaggcagcgcctcgacgacgagctccctgactcgtggaagcgcccgcccgagcagcgcaccgtccacccggactgcatcaatgcctccaacccttaccacgagtgctccgactactgcttcaagcgcatcgccgacgctaaatcccctgcctgcgggctggagcgtgaggagcgacagccaccagctgatgtgtttgccgccgccggcatgtctgatgccgtggagcagcatcggcctatagataacgattccgacgaacaggagggcgcaggtccggatgacggctacccgcagatgacggagaagcagaagaagttgttcgagctgcggcttaagatgaatgaagcacggaaagcgaaccagcaggcgatggttgccgagaagaaaaggatggagcctcgtggcgagagccgaggtgtttctaagcagaagtggttagacgacaggaagaagaagattgggaagctgctggactcgaatgggcttgatatgaaaatggcgtacatgctcgacacgcaggagactgcagaagccaagtacaagaagtgggagaaggaacctgctccatatgggtgggatgttttcaatcaaaagaccttgtatgacgcatacaagaagaggaccaagaacatagaagttgacatggagtcttacaataaagccaaagaagctgatcctgaattctaccgcgacgcctcaagtctccagtatgggaaggtgtccaatgtcccagaagaaaacatcgacaagatggtaaaggaactcagggagcgggaagagaagcggaaatcgttcagcaggaggcgcaagttcaacgaagacaaggacattgactccatcaatgaccggaacgagcacttcaacaagaaggttgagcgtgccttcggcaagtacacgctcgagatcaagaacaacctcgaaagaggtactgcgctgccggactaataaaaccttacacggcagctatcttcgaccgtttttcaagctaaccagtcgactagaggcgtgtgtccctgctgctgttttccttttcgcacggttacttgtatgcttgtaacttaacttgaggccacagttccattgtgacttgtaacaaaacctggactgggttgtgtaatgacgcgaggctgaagcaaacatttgtgtatgcatgtgagttgtc

SEQ ID NO: 126831 - DNA, 1503 bp, Zea Mays
gccgcctgggcgcgcaggcccgcgccactttcatcctctcccagtatccacggccacgggctcgcacgcagtcgccgccgccctgcccgtctccttcctgtcgtctccccttctccaatcgcttcccgatcccagccaatatctcagacggaatcgatccaaagctatcctagggttccgccgtcccgtccagatccgggctcgtcgatggggaaggagggcgtggcggcggggccggcggcggaggggagtaaatcgcggtcggagtgtatcaactcgtccaacccgtaccacgagtgctccgactactgcctccgcaagatcgccgaggccaggcagcgcctcgacgacgagctccctgactcgtggaagcgcccgcccgagcagcgcaccgtccacccggactgcatcaatgcctccaacccttaccacgagtgctccgactactgcttcaagcgcatcgccgacgctaaatcccctgcctgcggtgcggggctggagcgtgaggagcgacagccaccagctgatgtgtttgccgccgccggcatgtctgatgccgtggagcagcatcggcctatagataacgattccgacgaacaggagggcgcaggtccggatgacggctacccgcagatgacggagaagcagaagaagttgttcgagctgcggcttaagatgaatgaagcacggaaagcgaaccagcaggcgatggttgccgagaagaaaaggatggagcctcgtggcgagagccgaggtgtttctaagcagaagtggttagacgacaggaagaagaagattgggaagctgctggactcgaatgggcttgatatgaaaatggcgtacatgctcgacacgcaggagactgcagaagccaagtacaagaagtgggagaaggaacctgctccatatgggtgggatgttttcaatcaaaagaccttgtatgacgcatacaagaagaggaccaagaacatagaagttgacatggagtcttacaataaagccaaagaagctgatcctgaattctaccgcgacgcctcaagtctccagtatgggaaggtgtccaatgtcccagaagaaaacatcgacaagatggtaaaggaactcagggagcgggaagagaagcggaaatcgttcagcaggaggcgcaagttcaacgaagacaaggacattgactccatcaatgaccggaacgagcacttcaacaagaaggttgagcgtgccttcggcaagtacacgctcgagatcaagaacaacctcgaaagaggtactgcgctgccggactaataaaaccttacacggcagctatcttcgaccgtttttcaagctaaccagtcgactagaggcgtgtgtccctgctgctgttttccttttcgcacggttacttgtatgcttgtaacttaacttgaggccacagttccattgtgacttgtaacaaaacctggactgggttgtgtaatgacgcgaggctgaagcaaacatttgtgtatgcatgtgagttgtcaa

SEQ ID NO: 126832 - DNA, 1550 bp, Zea Mays
acgccacatcgccgtcggccaccacatgatgcacgcgcacgccgccatataatactagtactactgaactacaaggggttcgccgtgcgagcgcaagcaacgacgcgccggcccgcctactactagtacggccgcatccaccatggctgcacccgccgcggccaagcgcccgtactggcaggcccccgccacggccgccggagcagctgagcccaacaagcggcaccgcacggccgcggcgccggcgcacatggacgcggagccggagcaggaggagcagcccctgctcccgggcctgccggaccacctcgcccagctctgcctcgccccgctcccgccgcgcctcctgcacgccgtctgccgcccctggcgccgcctcctctactcgccctcgttcccgccgttcctcgcgctctacgccgtgctcgacgacgccgccgccttcgccggcagcggcgtctcgttcgcggcctacgacgccgtggcggggcggtgggacgagcttcccgcgccgccgatgccgtcgccgccgcccaggctgtggcacccggccttcctgtcccgccggctcccgctccagtccgtggccgcggggggcaggctcgtgctcgtggccggctccacgcgggcgctcgccccggcgctgccccgccccgtggtcttcgacccggccgcccgctcgtggcggctcggcccgcgcctcccgttcgcgccgcgccggtggtgcgcggcgggcgcggcccgcggtcgcgtgttcgttgcgggcggagtcggcgcgggctacgacgccagcgacgcccggtccggcgccacgtgggacccggccgcggacgccgccgcggccgcggcgtgggagccgatcccgcccatgcgcgacgcgcggttcagccgcgacgccgcggaggccgtctgcgccgcggggaaggtgtgcatggtcagcctccgcggccgcggcgccaaggagggcgccgtcttcgacctgcgcgccgcgcggtgggaggacatgccgcccgggatgctcgctggctggaagggcccggccgcggccgcggccgctggcggcgacgaggacgagacgactatcttcgtggtggacgaggagcgcggggcgctgagcgcctacgattgggccggggaccggtggcgcacggtagtggagtcggagcggctcaagggcgccgccgagatggcggctggcgggggccgggtgtgcgtggcggcccagggtggcgacaaggtgctcgtggtcgacgtggcgccctcacggccacggcggtggggtgcccccgccgccgcggagctccggccccgcgtctgggaggtggcggcgccgccggggaagcgggtggtggcgctgcacgtgctgccccggatggcgcgcgcggactagcaggttcccgccacgtcgtctgggaatggcggattgcatgctcgttggattcgctacacgtgctgtacaagagacggcgcacacactgccacctgctgctcatgatccgactccacctccagacgttcgcatctccttccttgcagagagtttgattcta

SEQ ID NO: 126833 - DNA, 1082 bp, Zea Mays
tatctcccacattaattaatgttaatgatggcatgatcggacagagaagaacgtactgtaagtctgtactcctcggccgccactcataatagtacaagcttattgcccttaactaatgtatatcttacacaaacacaagcaaagcaaaccgagctattaacgaacgagaaacacccaacgccgtggaggtgtggaggcgcctagtattatactagtagcgggtgtggtatctggcctgggcctgggcctggatcttgggtcccctcaccgtgttagtacccaggcccgaccttattgacgagcgcgagcgcgttgctggtgacctgcgcgacctcgacgaccttgccccggatggcggcgcgcgtgccggcgtcgacggcgcgggacgagaggccgtcgaggcaggtgtcctcgtcggtgagcgcggcgctgcaccaggtctgcacgttgctgaggtgccacctgaacgccggcgtccccgcgcggcccatcccggcgccgcccatctcctgcgccgcgtcgcggaggtggcccacgctgtccgccagattgtccaggcagtctcgcacgggacctgccgacgccgaccccgaccccgaccccgaccccttcttcgcgcctttgccgttgctggcgccgcacaggcggcccacgtacgccgacgcggcgcgcgcgcggtccgcgctcaccgacagcgcggcgcgcgccagctcccgcgggctccgcggcggcggcgacccgccgtacgacgccaggctctgctcgcacaccgacgggtactgcgtcgtgcggcacgacttgcggacgaagtcgctggctgccggcgacgcggcggacacgagccccgctgcggcggcggcgagcagcagcaggaggggggcagcggcagcggcagcaacactgcgcgggcgagccatgattgattgtcttggtgagctgagctgagctggtgcggtgtgcggggtgtgtgtgctgtgctgtgcagcagggcaggcaggtcacggagtcacagtggagagggtggtggctgcttcgcttgaatgattgaatgcctatttttttaaattaaaatggattggtaa

SEQ ID NO: 126834 - DNA, 838 bp, Zea Mays
cccagcgtcccgcgctcgcccggaagcacatcaacaccagacagcactacagtctacagcagcagggcaccaccaccacagcaatgcagcagaacgccgcccgcctgctggccgccgccgtggcctgcctggcgctggcgctggcgccatcctcggacgcgcaggggacggcggtgccgtcgtgcgcggcgaagctggtgccgtgcacggggtacctcaactccacgtccacggcggcgcccgcggcggcctgctgcgggccgctcagggaggcggccgccaacgagacggcgtgcctctgcgccatgctgctcaacagggccgcgctgcgggcgttcggcgtggcgcccgagcagggcctggtcctcgcccggcggtgcaacgtcaccaccgacgcctccgcctgtgccgccgccggaggctcagccactgacggcagtactgctgcatcttcagcttccaccggcagcgcttcctccacctcctcctcctcttcttcagtggccaaaccaacagccaacggaggcggcgtggcgcgtcgcctgagcatgactggcgcgtcctcattgctaggcttcagtttcatctggtggtgggcggtcatggcgtaggagtatctgccgtggcaccggcgattttcctggctggatccagaattccagacttatatgtactactgttgtgttgagtagcaggtttcattgcttctttttatatatagtatgccctgttgtaccactaccattgctgccgtgagcagaacaagagaaaaaaatgtcaagaacgatgcaaacaaccagacggaaagaacgtactctcattttaaataattaataga

SEQ ID NO: 126835 - DNA, 440 bp, Zea Mays
tttttttttcttgctccaaacttctgtttctgataaaaaagaaagaatacaaggatactagcccagtcttacctgaactttctgctgccgttcacttggtcagtggccaaaccaacagccaacggaggcggcgtggcgcgtcgcctgagcatgactggcgcgtcctcattgctaggcttcagtttcatctggtggtgggcggtcatggcgtaggagtatctgccgtggcaccggcgattttcctggctggatccagaattccagacttatatgtactactgttgtgttgagtagcaggtttcattgcttctttttatatatagtatgccctgttgtaccactaccattgctgccgtgagcagaacaagagaaaaaaatgtcaagaacgatgcaaacaaccagacggaaagaacgtactctcattttaaataattaataga

SEQ ID NO: 126836 - DNA, 2199 bp, Zea Mays
aaaaacgaaacggcgaccacatacaaaacagcgactcccttgttgccggctatagcttttgcctccgtttcgctttgataaataaaagccataactcccggccgtccatcgctcgcctcccctccctccctccccgccgctgtctccggcgacagccagcctcatcgtccatggcctctacatgcctagcccccgcctccctctccacgcccctgctctccgactccatcgcgcgcgcgcccgccgccaacgggcacgccaccaaccaccgacaccaccaccacgacgacagcgacggtgctgcggcggtctccgtttgcgacgacggcggcggggacccgttcgcgttcctctcggaggaccggccgccgagggaccgagggccgtccccggccgacccgttccgcaacggcacgccggcgtggggcggcggcgtgtacgcgtggtcgaggacgctgctgctcctgccggtcgcgttggtgcggctggcactgttcgggctctccatcgcgatcggctacgcggccacgtgggtggctctccgcgggtgggcggacacgcacgggaggccgcgggtgggcggcgggcctatgccggcgtggcgccgccggctcatgtggatcacgcggatctcagctcgctgcatcctcttctctttcgggtaccattggatcagaaagaaaggaaggcccgctcgtagggagctcgcacctattgttgtttccaatcatatctcgtacatagaacccatattcttcttctatgaattgttcccaaccattgtttcgtcagagtctcatgatgccctaccatttgttggaacaattattcgagcgatgcaggttatatatgttgacagattctcaccagcttctcggaaggctgctgtaaatgaaataaaggatgtcctttcagagaaaggcagcttgcaatagcttcccgcgggtcctgttattccctgaaggtaccacaacaaatgggagattcctgatttcgttccaacatggtgcattcatacctggctaccctgttcaacctgttgttgtccgttatccacatgtgcactttgatcaatcatgggggaatatatcgttattaaagctcatgtttaagatgttcacccaatttcataatttcatggaggtagagtaccttcctgttgtctaccctcctgagatcaagcaagagaatgcccttcattttgcggaggataccagctatgctatggcacgtgccctcaatgtcttgccaacttcctattcatatggtgattctatgattatggcacgggcaatagaagctggaaaggtgaatggctcaaattacatggtagaaatggcttgggtaaaagatatttatggtgtgagcacagcagaagcaatggacctattggaacatttcctggcaatgaatccagataacgatggacgtgtgaaagcacaagatttttgggctcattttggtctggattgcagtcctctgtgtaagaagatatttcactactttgatttaggcattaaggaatcgattacgttccgtcagttcttggttgggtgcgcgcacctgaggaagcaaccgttgttccagggtgcctgtgagaccgcctttgagaagtgccgggatcctgaaacatctgagatctccagggcacagctagccgatgtcctgcggttaagcatgctgctgccgtctggtgatagaatgctggacctgttcaagacgtttgacatagatggcgacgaaaagatcagcaaggacgacttcatgacgtgtcttgggaggttcccgttcctgattgcgttctttgcagccccgatcaatggggaagtgtacatcgagatagtctgaaggcaaggcgatgccgtgtaagagtaaccaggcgcaggtagggccggggatccctccgtttatgcaatgggatacccacctgtatttgggttgcatcgagtggctgaccaatatagtgcgtcaattttgtttcgttgcttctttcaaatgctcacttcgttcttttttatttgttgcgttttagttcaaagatgaactagcaggcgacaaatatttgagaagggagttagtattatattgtcattacggaatctgctgtgagatacgcgctggactgatagattgtcgatggaactgagaatgcacatagaaagcatttctaatgtactcctgtaagaaaacttttttgga

SEQ ID NO: 126837 - DNA, 2221 bp, Zea Mays
aaaaacgaaacggcgaccacatacaaaacagcgactcccttgttgccggctatagcttttgcctccgtttcgctttgataaataaaagccataactcccggccgtccatcgctcgcctcccctccctccctccccgccgctgtctccggcgacagccagcctcatcgtccatggcctctacatgcctagcccccgcctccctctccacgcccctgctctccgactccatcgcgcgcgcgcccgccgccaacgggcacgccaccaaccaccgacaccaccaccacgacgacagcgacggtgctgcggcggtctccgtttgcgacgacggcggcggggacccgttcgcgttcctctcggaggaccggccgccgagggaccgagggccgtccccggccgacccgttccgcaacggcacgccggcgtggggcggcggcgtgtacgcgtggtcgaggacgctgctgctcctgccggtcgcgttggtgcggctggcactgttcgggctctccatcgcgatcggctacgcggccacgtgggtggctctccgcgggtgggcggacacgcacgggaggccgcgggtgggcggcgggcctatgccggcgtggcgccgccggctcatgtggatcacgcggatctcagctcgctgcatcctcttctctttcgggtaccattggatcagaaagaaaggaaggcccgctcgtagggagctcgcacctattgttgtttccaatcatatctcgtacatagaacccatattcttcttctatgaattgttcccaaccattgtttcgtcagagtctcatgatgccctaccatttgttggaacaattattcgagcgatgcaggttatatatgttgacagattctcaccagcttctcggaaggctgctgtaaatgaaataaagagaaaggcagcttgcaatagcttcccgcgggtcctgttattccctgaaggtaccacaacaaatgggagattcctgatttcgttccaacatggtgcattcatacctggctaccctgttcaacctgttgttgtccgttatccacatgtgcactttgatcaatcatgggggaatatatcgttattaaagctcatgtttaagatgttcacccaatttcataatttcatggaggtagagtaccttcctgttgtctaccctcctgagatcaagcaagagaatgcccttcattttgcggaggataccagctatgctatggcacgtgccctcaatgtcttgccaacttcctattcatatggtgattctatgattatggcacgggcaatagaagctggaaaggtgaatggctcaaattacatggtagaaatggcttgggtaaaagatatttatggtgtgagcacagcagaagcaatggacctattggaacatttcctggcaatgaatccagataacgatggacgtgtgaaagcacaagatttttgggctcattttggtctggattgcagtcctctgtgtaagaagatatttcactactttgatttaggcattaaggaatcgattacgttccgtcagttcttggttgggtgcgcgcacctgaggaagcaaccgttgttccagggtgcctgtgagaccgcctttgagaagtgccgggatcctgaaacatctgagatctccagggcacagctagccgatgtcctgcggttaagcatgctgctgccgtctggtgatagaatgctggacctgttcaagacgtttgacatagatggcgacgaaaagatcagcaaggacgacttcatgacgtgtcttgggaggttcccgttcctgattgcgttctttgcagccccgatcaatggggaagtgtacatcgagatagtctgaaggcaaggcgatgccgtgtaagagtaaccaggcgcaggtagggccggggatccctccgtttatgcaatgggatacccacctgtatttgggttgcatcgagtggctgaccaatatagtgcgtcaattttgtttcgttgcttctttcaaatgctcacttcgttcttttttatttgttgcgttttagttcaaagatgaactagcaggcgacaaatatttgagaagggagttagtattatattgtcattacggaatctgctgtgagatacgcgctggactgatagattgtcgatggaactgagaatgcacatagaaagcatttctaatgtactcctgtaagaaaacttttttggacaaacaatgaccctgtaacctcaagttgtgtttat

SEQ ID NO: 126838 - DNA, 2234 bp, Zea Mays
aaaaacgaaacggcgaccacatacaaaacagcgactcccttgttgccggctatagcttttgcctccgtttcgctttgataaataaaagccataactcccggccgtccatcgctcgcctcccctccctccctccccgccgctgtctccggcgacagccagcctcatcgtccatggcctctacatgcctagcccccgcctccctctccacgcccctgctctccgactccatcgcgcgcgcgcccgccgccaacgggcacgccaccaaccaccgacaccaccaccacgacgacagcgacggtgctgcggcggtctccgtttgcgacgacggcggcggggacccgttcgcgttcctctcggaggaccggccgccgagggaccgagggccgtccccggccgacccgttccgcaacggcacgccggcgtggggcggcggcgtgtacgcgtggtcgaggacgctgctgctcctgccggtcgcgttggtgcggctggcactgttcgggctctccatcgcgatcggctacgcggccacgtgggtggctctccgcgggtgggcggacacgcacgggaggccgcgggtgggcggcgggcctatgccggcgtggcgccgccggctcatgtggatcacgcggatctcagctcgctgcatcctcttctctttcgggtaccattggatcagaaagaaaggaaggcccgctcgtagggagctcgcacctattgttgtttccaatcatatctcgtacatagaacccatattcttcttctatgaattgttcccaaccattgtttcgtcagagtctcatgatgccctaccatttgttggaacaattattcgagcgatgcaggttatatatgttgacagattctcaccagcttctcggaaggctgctgtaaatgaaataaagagaaaggcagcttgcaatagcttcccgcgggtcctgttattccctgaaggtaccacaacaaatgggagattcctgatttcgttccaacatggtgcattcatacctggctaccctgttcaacctgttgttgtccgttatccacatgtgcactttgatcaatcatgggggaatatatcgttattaaagctcatgtttaagatgttcacccaatttcataatttcatggaggtagagtaccttcctgttgtctaccctcctgagatcaagcaagagaatgcccttcattttgcggaggataccagctatgctatggcacgtgccctcaatgtcttgccaacttcctattcatatggtgattctatgattatggcacgggcaatagaagctggaaaggtgaatggctcaaattacatggtagaaatggcttgggtaaaagatatttatggtgtgagcacagcagaagcaatggacctattggaacatttcctggcaatgaatccagataacgatggacgtgtgaaagcacaagatttttgggctcattttggtctggattgcagtcctctgtgtaagaagatatttcactactttgatttaggcattaaggaatcgattacgttccgtcagttcttggttgggtgcgcgcacctgaggaagcaaccgttgttccagggtgcctgtgagaccgcctttgagaagtgccgggatcctgaaacatctgagatctccagggcacagctagccgatgtcctgcggttaagcatgctgctgccgtctggtgatagaatgctggacctgttcaagacgtttgacatagatggcgacgaaaagatcagcaaggacgacttcatgacgtgtcttgggaggttcccgttcctgattgcgttctttgcagccccgatcaatggggaagtgtacatcgagatagtctgaaggcaaggcgatgccgtgtaagagtaaccaggcgcagttcaaagatgaactagcaggcgacaaatatttgagaagggagttagtattatattgtcattacggaatctgctgtgagatacgcgctggactgatagattgtcgatggaactgagaatgcacatagaaagcatttctaatgtactcctgtaagaaaacttttttggacaaacaatgaccctgtaacctcaagttgtgtttattcttgctagatggattacataacaaagcccaacgtaggtatatccagatacataaccttttgaacattgtaacctcatgttcggcgagttgaacatttgtttagaccatttagatgtaatgtatatttagatacataacaaagcgcagcaaatattcaga

SEQ ID NO: 126839 - DNA, 1467 bp, Zea Mays
tcgtttgcagctgacatcataattgattctaaaatcgactccagccaacttgtcctagaataacatgattgtcttttagttatttgttcatatggtacatactctctaggatgtcctttcagagaaaggcagcttgcaatagcttcccgcgggtcctgttattccctgaaggtaccacaacaaatgggagattcctgatttcgttccaacatggtgcattcatacctggctaccctgttcaacctgttgttgtccgttatccacatgtgcactttgatcaatcatgggggaatatatcgttattaaagctcatgtttaagatgttcacccaatttcataatttcatggaggtagagtaccttcctgttgtctaccctcctgagatcaagcaagagaatgcccttcattttgcggaggataccagctatgctatggcacgtgccctcaatgtcttgccaacttcctattcatatggtgattctatgattatggcacgggcaatagaagctggaaaggtgaatggctcaaattacatggtagaaatggcttgggtaaaagatatttatggtgtgagcacagcagaagcaatggacctattggaacatttcctggcaatgaatccagataacgatggacgtgtgaaagcacaagatttttgggctcattttggtctggattgcagtcctctgtgtaagaagatatttcactactttgatttaggcattaaggaatcgattacgttccgtcagttcttggttgggtgcgcgcacctgaggaagcaaccgttgttccagggtgcctgtgagaccgcctttgagaagtgccgggatcctgaaacatctgagatctccagggcacagctagccgatgtcctgcggttaagcatgctgctgccgtctggtgatagaatgctggacctgttcaagacgtttgacatagatggcgacgaaaagatcagcaaggacgacttcatgacgtgtcttgggaggttcccgttcctgattgcgttctttgcagccccgatcaatggggaagtgtacatcgagatagtctgaaggcaaggcgatgccgtgtaagagtaaccaggcgcaggtagggccggggatccctccgtttatgcaatgggatacccacctgtatttgggttgcatcgagtggctgaccaatatagtgcgtcaattttgtttcgttgcttctttcaaatgctcacttcgttcttttttatttgttgcgttttagttcaaagatgaactagcaggcgacaaatatttgagaagggagttagtattatattgtcattacggaatctgctgtgagatacgcgctggactgatagattgtcgatggaactgagaatgcacatagaaagcatttctaatgtactcctgtaagaaaacttttttggacaaacaatgaccctgtaacctcaagttgtgtttattcttgctagatggattacataacaaa

SEQ ID NO: 126840 - DNA, 205 bp, Zea Mays
cgttttcactctactcttctcccgctcctctccttcctccctttcttggcctgccaaaaaaaagcttcccggcgggtggtacggtgaacattcttcccaacagtttttgggagtgcgtacgtgcaacacttcctgtctgatgcgtgtggtagggggggagtactgctctatacgctgtagcatgcaatgtagaaggtttttgtac

SEQ ID NO: 126841 - DNA, 2421 bp, Zea Mays
ggagtggagataagctagagaggtgagctctgtgggatcggagcgagagcaataaatagaaattaaggtcggggccgcctccatggcggcgtttgcaggcgccctcgaattcctcccctgaacccattcgatccgccccctagctctctctcttcctcctccgccctctttatatagcggtagcctcccacctctcatctcctcatcaccccccaaaaagcagcttgcttgcttgcttgcgttctctaccacgacttatgctcgatcgtaaactaacctcagcaccgtcctccagcagatactacttgtgtagcgggcgagggtgaggtgaggtgaggaagaaagagagccctcgccgcgtgcttaggccccccccaagacgccgagagaggaaagggattaggcagcaagaggaggcgctccgctctcggattagaggcgagcttcctatttccagcaaaggcaaggtgagtagcactggtagcagtactgatgagtgagtgatggtgcggtggagcactgcagcggcaggtttatctttctcctctcttgctcactcgcacatgcatatcccactcacaccagcagcagcgagctgaggctaggctagccatcctcatcctcaactcctacgcgcttagcttgcttgcacaaacctctctctatgtctaagagcttctcgctgcagatctaccgccgatccatccgctaccgagctatgccaatctatatatgcagctcatgcatctaacctactgcatgtcacacagccccagccccatgcccgctgtaccgtgccgccgtgttgttgcttttgcttctctgcctgcgcgcaccttctgcttctgcgccagcttttttcttactcccaagatctctatttgtttttttttccgttgttgctgtaggagaggatcagctagctagctgctaggaggccggagggagagaaagatcggaggaggagctgcaaaggctagcttttctttggtgcggctggtgctggtggtgaactggtctcggtgctcggtggtgcgtggtgtggtgcacactgcacactctccctctcgcgttcgtcttgatggtgggtggtggtggcagctgcctcgcatggctgggttctctctgaggggcggcggaggcgggaggggcggtgaccggggcggcgatcacccgatcggcgccgacagcctgttcctgtacgcgcgaggggcggccgccgcggctgccgacacggcggccagcggcggcggtgggggcggcgggatagggttccagctctggcacccgcaccagcaggcgacggcggcggcggtgccgcacacgtcgcagttcttctcctccggcgccgtcgccacgggcgtcgtgctcggcttctcctcgcatgacggggccggcgggatcggcggtgcgggtggcgccggcgctggcggcggcagggccgggaccagctgccaggactgcggcaacaacgccaagaaggactgcacccacatgcgctgccgcacctgctgccggagccgcggcttcagctgccccacgcacgtcaagagcacctgggtccccgccgccaagcgccgggagcgccagcagcagctcgccgcgctcttccgcggcgccgccaacagcaacagcgccgccgccgccgctgctgcggccgcgagcaagcgcccgcgggagctcgtccggtcacttggccgcttgccgtccgccaactccgccatggtcaccacgaccacctcctcaggcgacggcggcggcgggaggttcccgccggagctgagcgtggaggcggtgttccggtgcgtgcggatcgggccggtggacgagccagacgcggagctcgcgtaccagacggcggtgagcatcggcgggcacactttcaaggggatcctgcgtgaccacgggccggcggacgacgcggcggtgggccagctgccgccgtcctctgcggagtaccaccaccagctgacggcggggcaagcgagggaagggtcgtcgcccgcggggagcagcgaggcggcggccacggtggccacgtcggcggcggtgctgatggacccgtacccgacgccgatcggcgccttcgccgcaggcacccagttcttccctcataaccctagaacctagcttaagttagctagctttgctgcttccattattcgtatcggtgctagtagcttaattcctttgatggttccatttacttcttccaacaaattaaagatgatgatgaacatgagctaagtagtcatcgtcatcgtcgcaatcaaattcgagacaagaagagaagagattttaattgttactgcatactactactacaacgtgcattcgagccgttgatcgatgaacactagtgcatgatcagcaatgtgtggatcatatataatgttattagctagtagagctagtgtactg

SEQ ID NO: 126842 - DNA, 632 bp, Zea Mays
ttctatgaaccaaacacaccgttagattattatttgactttttacccgctaataatttgtataaacaaacatctctaacaagattatataaattagattatataacctgaattatataatctatataaaataagctggattatataatgatgtgtgcaaccctgggagaagaagatctgggtgatgaacgttgtgaacgtggacgcgcccgacacactttcggtcatcttcgagcgcgggctgctgggcatctaccatgactggtgcgagtccttcagcgcctacccgagatcaaagaggtcagtggccagcaccaccagtctgtctgttttcttcacatctttctagcttgatgacgcacatggccgtcttcttcagatgcgcggttctgccatggtggtggaggtggacaggcacaggatcgtcaggccaggggtcagcatcgtcgtgcgcgacaaggccagcgccgtcggcgaggtggacaagctcctgagatcgctccacttggacgcgcggctgaaggacgacgaaggcgtgatgtacgcagagaagcccgattggcggccggagctcgaagaagagccgttgtaatggccaccatttcagagtggcgagcagtagggttcttttct

SEQ ID NO: 126843 - DNA, 1369 bp, Zea Mays
cgcctctccctgtcatggcggataatttaatctcgccacccccacatgctctgtttttatattgcttcctcctcactgtacccatcccgccatgtcctctcctctgtctctctctctttgagcctcctttttcaacctaacctttgacgctgtagctcgagagcaagcatagtgcctagtgcctaccagattctctccctgagcggctgagctctgccgatccgcgataggctcgcgccatgcagatgctctgcgacgtctgcgccgccgcgccggccgccgtgatctgctgcgccgacgaggccgcgctctgctccgcctgcgaccgccgcgtccaccgcgccaacaagctcgcccacaagcaccgccgcatccccctcgcccagccctctggcgacgaatccgacgccgacgccaagccgctctgcgacgtgtgtaaggagcggaggggcctcgtgttctgcgtggaggaccgcgccatcctgtgccccgactgcgacgaccccatccacagcgccaacgacctcaccgccaagcacacccgcttcctcctcgtcggggccaagctctccgccgcgctcgtcgacgcccaggcgccccactcccctgacgacgacgacaacgactgcggccgcggcaacggcgccgccgccgagcccgacgctgtccccgccgtctgcgcgcagggctcctgcgcggccaaggcctcgtctcttgagtccggtggcggcggcggcggcggcagcggcagcggcagcagcatctccgagtacctcaccaacatctgcccaggctggcgcgtcgacgacctcctctttgacgactcggcgttctcagcggcatcgaaggccgacagctgcgacgacgggcacgagcaggtgccgtccctggacgccgacctcttcgacgtggtggctggcgccggctggccggggaagcgcggcagcgcgtggtcaggagtcggagctctgggcttcgacaaggtgccggcctccgttgttgtcgtcccgacggcggccaagcaacagcaggggtgcgtgagggagaggacctgggactcggacagcgacagcgacgtgttcgcggtgccggagctcccgcaaccaccgcaggccaagaaggcgcggccggcgccggctccggcgccgactttctggtgcttctgagctgcactgtcccagtccggtccggccggcctgtgtgcactgtgtacttgccgtgacttctgtaaccagtgtgtgtgagcgagcttgctcgtgctttttacccatgtactgttgttactgcatacacacacacacttaccactactattagtagctagcagtgctcaaacccaagttaattaagtttggcgcagtttatatta

SEQ ID NO: 126844 - DNA, 2618 bp, Zea Mays
taatatagaaaatgatattttatagttgtagtggggtatagagggagtatttagggggaaccactgcgggagatgaaaaaatagggggtgaaatgttgatgatgtgacccaaaaaagtgatataggggaaaaatttaggggtaacgcttgcggatagcctaagaggctctatattcttcctaatctatataaataaagtttttaaaaaaaaaccctccaacagactagcaaaacgactatccaaatatagtcatattctattccggatttctcgctagccaaatatagaaatgtgattatgtgaatgactatctagagtgtatataagatatagaaagacttggaaattgaaaaaaatatagaaagtgattttacgcaaataactctacaaataataatttagcgaactcttgaagttgttctaaagctatctccacatctttttattttaaacttaaatatataaataaaacaatctacattataacacagtgcacaacaatagttggcttggctatagcctaactcaaactccaaacgacaagcaaccacagaagaagcaaacctaccgctcgcagcaaacagcagtgctctccactccgaatccgccacgtctcctccggccgcacgaatccggcgcaaaaggcccgaggtgacgacgccggtgcacacgcgattctatcgccgacatccgggtctcgcctgtagggccacagccagtagcggctccgggcccgcctgtcatacgaagccgagtcccgcgctggtttctcgttaactaataagccctcaccgcgcgcgagggtggagtagacgcaatcccacgcgaatcccatcggatcgagtccatcagcacgccgaagaataaaccgtcgtcgaggaggaagtagggggccgcgaggtggacttcaggatgcaggcgcagaggtccccggcgatggcgggaggtggcggcgccgccacggcggtggcggctggggcggcggttgggatgccgtcccaggccacgctgccggtgcggcggcggtgcgagggcacggccatgggagccatcacgcttgacctccgccccgggctcggcgtcggccccttcaccctcggcatgccgatatcggatgcgtttacacagatagagcggcagccgaatatctacgacgttgtccacgtgaaatacttcgacgaggagcctctcaagctggactttgtcattagctttccggaccatggatttcacctacgctttgatccttggtcccagaggctccgtctcgtagagatttatgatgttaagagattgcaattgcgatatgcgacatctttaattggtggcccgtcaacattagccacttttgcggctgtgtatgcactctttggaccaactttccctggcatatatgacaaagagaggggaatttatacgctgttctacccaggtttatccttcgcattccctattcccagccagtatacaaatctattcactaatggagaagtggcagatttgccactggaattcccagatggtacaacccctgttacttgtcgggtttgtatatatgatagctcgacagatagcaaggttggggttggatctttgatggacaaagcaatggtacctgcactgcctgcaggcagcctgtatatggaggaggtgcacgcgaagcttggtgaagaactttggttcacaataggggggcaacatattccttttggtgcatcaccacaggatgtctggactgacttgggtcgtccttgtggtatccatcagaagcaggtggaccaaatggtcatacactccgcatcagaagccaggcctcggacgaccctttgtggagattacttttacaactacttctcacgtggaattgatatcttatttaatggacagacacataggataaagaagtttgttttgcatacaaacttccctggccactcagatttcaattcatataagaaatgcaactttgttatatacgacgctgaagctgaaggtacatgtcagcctaataatgcctcaaaaaattgcataacacctagtacaaaatgggaacaagtcaaggagatcctcggtgactgtggccgagctgcaatccagacacaaggctccatgaacaatccatttggatcaacttttgtatatggttatcagaatatcgctttcgaggtgatgaaaaacggatatattgcaactgtcaccctcttccaatcatgagtgtgccactacatgtgctgctgctctgagctctggctgcaacaatgatggttaacctgcagaaaggaagtatgccgtacttttgtgcttcagcagcagcaatttcgagtcgaagccaactctatggggcctggtgacggtgcttggtttatggaatgggatgcagctgcgcagtcgatatggatcagcaccgtgacttgtatttgtgctgtacatcccggccgttgtacatgaactaactgtaccctgtgacctcaccttgtgtacataaatggtctttatttattggaaaagaaaatgtacatactgccatgtggtcgcctaatggaactgtgctagctaaacatctcatgtgggtactgatatgatttgtccagtagtttgatattggttccagtctttc

SEQ ID NO: 126845 - DNA, 2392 bp, Zea Mays
cgaagccgagtcccgcgctggtttctcgttaactaataagccctcaccgcgcgcgagggtggagtagacgcaatcccacgcgaatcccatcggatcgagtccatcagcacgccgaagaataaaccgtcgtcgaggaggaagtagggggccgcgaggtggacttcaggatgcaggcgcagaggtccccggcgatggcgggaggtggcggcgccgccacggcggtggcggctggggcggcggttgggatgccgtcccaggccacgctgccggtgcggcggcggtgcgagggcacggccatgggagccatcacgcttgacctccgccccgggctcggcgtcggccccttcaccctcggcatgccgatatcggatgcgtttacacagatagagcggcagccgaatatctacgacgttgtccacgtgaaatacttcgacgaggagcctctcaagctggactttgtcattagctttccggaccatggatttcacctacgctttgatccttggtcccagaggctccgtctcgtagagatttatgatgttaagagattgcaattgcgatatgcgacatctttaattggtggcccgtcaacattagccacttttgcggctgtgtatgcactctttggaccaactttccctggcatatatgacaaagagaggggaatttatacgctgttctacccaggtttatccttcgcattccctattcccagccagtatacaaatctattcactaatggagaagtggcagatttgccactggaattcccagatggtacaacccctgttacttgtcgggtttgtatatatgatagctcgacagatagcaaggttggggttggatctttgatggacaaagcaatggtacctgcactgcctgcaggcagcctgtatatggaggaggtgcacgcgaagcttggtgaagaactttggttcacaataggggggcaacatattccttttggtgcatcaccacaggatgtctggactgacttgggtcgtccttgtggtatccatcagaagcaggtggaccaaatggtcatacactccgcatcagaagccaggcctcggacgaccctttgtggagattacttttacaactacttctcacgtggaattgatatcttatttaatggacagacacataggataaagaagtttgttttgcatacaaacttccctggccactcagatttcaattcatataagaaatgcaactttgttatatacgacgctgaaggtctgaactacttgtaataaaaaaatagtttgctgtgatggaataatccaatccaatcatccatctgctcttttctcagctgaaggtacatgtcagcctaataatgcctcaaaaaattgcataacacctagtacaaaatgggaacaagtcaaggtatggcattctacatgacttattaacactgttgatggtaccactggtagtccttgatgtgttatttgccttcagaatgccgtttgttttttgccatgtagttctaaaattatcatctttgctttgaaatgccttatgctacaatttttgcacccctttttcatcttatttcgttggcttcatggattactttcatgaatcctttatatccttcttaaatagtgaatgttaaacttatgacataataatgatatactaggttttattttgcatagttgggctgttagcataatcacactaatgttcttgcactaagaatgtcagctttgcctttgctttttctagagcacttaccttttaagtagatatttgtctaatctgtattatcaacctagcaacgcttcaagtgccggtatgctatcttattgcgtgccatctgttatatttttctgttcttttaacaaccctttggtattactatattaggagatcctcggtgactgtggccgagctgcaatccagacacaaggctccatgaacaatccatttggatcaacttttgtatatggttatcagaatatcgctttcgaggtgatgaaaaacggatatattgcaactgtcaccctcttccaatcatgagtgtgccactacatgtgctgctgctctgagctctggctgcaacaatgatggttaacctgcagaaaggaagtatgccgtacttttgtgcttcagcagcagcaatttcgagtcgaagccaactctatggggcctggtgacggtgcttggtttatggaatgggatgcagctgcgcagtcgatatggatcagcaccgtgacttgtatttgtgctgtacatcccggccgttgtacatgaactaactgtaccctgtgacctcaccttgtgtacataaatggtctttatttattggaaaagaaaatgtacatactgccatgtggtcgcctaatggaactgtgctagctaaacatctcatgtgggt

SEQ ID NO: 126846 - DNA, 2504 bp, Zea Mays
cctcctcctcctgtctcgcgcccccctggcccctgcttcttctccttcccctttcattcccaacgaggcaacgacccgccctgccccgcctcgcgatccccacccgcggcggcgcggagggccggaacccaaaccctaaccctagcggcccgggcgccgcctccggtctcgcccgcccgccgcgccgggccgcgatggggcagtgctacgggaaggcgcgcggcgcgtcctcgcgggcggaccacgacgccgacccctcgggggcggggtcggtcgcgccgccatccccgctgccggccaacggcgcgccgctgcccgccacgcccaggcgccacaagtccggatccaccacgccggtgcaccaccaccaggcggcgacgcccggcgccgccgcctggcctagtccgtacccggccggcggcgccagcccgctccccgcgggcgtgtcgccgtcgccggcccggtccacgccccggaggttcttcaagcggcccttcccgccgccctcgcccgccaagcacatcaaggccacgctcgccaagcgcctcggcgggggcaagcccaaggagggcaccataccggaggagggcggcgcgggggccggggccggggccggcgccggcgcggccgttggtgccgccgattccgccgaggccgaccgcccgttggacaaaacgttcggcttcgccaagaactttggggccaagtacgatctcgggaaggaggtcgggaggggccactttggccacacctgctccgccgtcgtcaagaagggcgagcacaagggccatactgtcgctgtcaagatcatctccaaagctaagatgacaacggccatttccattgaagatgttcgtagggaggtcaagattttgaaagccctatcagggcacgataatctcgtcagattctatgatgcatgtgaggacgccctcaatgtctacattgtcatggaattatgtgaaggtggagagttgctagacagaattttagcaagaggtgggagatatacagaagaagatgccaaagcgatcattgtacagattttgagcgtagtggccttctgtcatcttcagggagtagtgcatcgtgatttgaagccagagaattttctcttcacaacaagagatgaaagcgctcctatgaagttgattgactttggtctgtcagattttattagaccagatgaaaggctcaatgatattgttggaagtgcttattatgttgctccagaggttctacacagatcatacagtatggaagcagacatttggagtataggtgttataacatacattctgctctgtggcagtcggccattctgggcaaggacagaatctgggatcttccggtccgtattgagggctgatcccaattttgacgattcaccatggccttcagtatcggctgaggctaaggattttgtgaagagatttctgaacaaagattaccgcaaaagaatgactgctgtccaagcactgactcacccttggttacgagatgaacaaaggcaaattccattggacatactcattttcagattagttaagcagtatctccgtgctactcctcttaaacgtttggcattaaaggcactatctaaggctttaagcgaggatgaacttttgtatcttaggttgcagtttaagctgcttgaacccagagatgggttcgtgtcactcgacaactttcgggcggctctgacaagatactcaactgacgccatgagagaatcaagggttcttgagtttcagcatgcgttggaaccacttgcgtacagaaagatggactttgaagaattctgtgctgcagcaatcagcccgtaccagctggaagctttggaaaggtgggaagaaattgctggaacagcttttcagcactttgaacaagagggcaaccgagttatatcagttgaggagttagcacaggaactaaatctcgcgccgacacattactccattgtgcaagactggatcagaaaatcggatggcaagcttaactttcttgggttcaccaaatttttgcacggtgtcacgatacggggttcaaatacaagacgacactaaacagatgcaaactgtattcgcttctaatttgaagcctctcatcgattatatggccctgattgctgttacctcctgcctgccctgcccgagtctggtcaatgaccatccttgtttgtgatgcccctcccgctgttgccgtcgtagcttttgtagagtacatgtaaagatccttgtaatggcgaaatcatatggtttgctcaagaaatatatagtgtcatttgttcttttttttttggctcgctaattttggatctttatccgtgggcagtcttttgttgacgttggcgctgaagttgataccgtcgcaggaacctgtaaggatgtaactttgtatgcacatacttgtatattattggcgtaaatttagttgtacactatcaacttataactgggttacaaagaaatgccagatatgtttgggatgaggatctcgcttta

SEQ ID NO: 126847 - DNA, 2728 bp, Zea Mays
gtcacggagaaaagaaaaagtaaccaacctccggtccaacccgatagcccaaaccccctgcgagcacaagcacaaagctaaagctgtgtaagcagcagaatccaatccaatccccagctcgcgccgccccctctaatccctcctccgcaaggcagacaggggccggcgttcactcgggcatccgcgggacggacggggagcaaagcctcagcggcgagtgcgggcgatgaggtcttcggaggcgtcgtcgcggctcgtgcaggagctcgtgctgtacgccgccagcgccgcgctcagctgcctcgtcctcttcgctggcctccgccacctcgaccccaaccgcgccgcttcccagaaggcgcagcaacagaagaaggagatcgccaagcgcctcggccggcccctcgtctccaccacgccctatgaggacgtgattgcgtgcgacgtcatcaaccccgacagcatcgacgtcgaattcgactccatcggcggcctggaccagatcaagcaggcgctctacgagctcgtcatcctgcccctgcgccgccccgagctcttcaccttcggcaagctcctcagcccccagaagggcgtcctcctctatggcccgcccggcacaggcaagaccatgctcgccaaggccatcgccagggagtccggcgccgtcttcatcaatgtcaggatctccaatctcatgagcaagtggttcggggacgcacagaagcttgtggctgctgtctttagtctcgctcacaagctccagcctgctattatcttcattgacgaggtcgacagtttcttggggcagcgacggacaactgaccatgaagccatgactaatatgaagacagagttcatgtccctctgggatggcttcaccaccgaccagaacgctcgtgtaatggtcctggctgctacaaacaggccttctgagctagatgaggccatccttaggcgctttactcagatatttgaaattggaattcctgttgagagtgaaaggagcaagatacttcaggttgtgttgaagggagaaaatgtggagcataatattgattacgatcgcattgcaagtttgtgcgagggctttactggatcagacatcctagaactgtgcaagcaggccgcattctatcctatcagggagctgttggacgatgagaaaaaagggaggaaattagataaacctaggcccttgagacaatcagacttggagagagccttgtcagtgtctagaaagggcaagaaggctgcaagttcagcactgcagtcacctttgtgggtacggccgacagattcagaagacgatcaggtacagaacgccatctttgagatatctaagctgatgtctcgaatagttcagaacagtgagtcggaaccgcaagagccttcttcaccttaacctaatccttttgctagatctcgtgaaaatctgcagcggagtaaatgcaggcattacgtcgataccgttaggtttccttatgcagtttgcagaggttaaacatatttatatatgtattaattcgttttgcgtttggaacctccaccggttttttttgaagcaaactgcagctggtgaagtggcaagcgtgccctcgtgtttaagttgatcatttcaaaatacgtgccccctgagggccgtaaaactgagaactctatagttgtctggtcaacagtcggtcttggttgcctctgtattttatcttcggtttgactactctagggtggcgaattacaacatacagtataatgcagaaaggttcccaaacgtgcttcggttttttttgttgtctggttattatttacatacatgcactgcatatccttttttatatattttatctccgttatgaaaatttctctcggagcacagcacactgtttgaacatatatttccggattagaattccatgagctgtatatgcatgtataatcgtatatgcatgcaccaccatcacgtgcacgagcagctgccgccgcttgctgttctcaaggcgctcgtctccatgatggatatctcatcagcaagcgacagcttggtgcccttgagagccaggacgtcggtggtgccgccggtttccgccgccgcatccagcgtcttcctggacacgatggcgtggatctcccggagcagcgtgaggaaggcacgctcgacgttgtcgccgctgagggcagacgcctccgagaagaagagcccctgctcctccgcgaaggcggcggcctcgtccgcgtccaccgcgcggcggccggcgtcgcgcgccaggtcggccttgttgccgacgagcatgacgacgatggacttgtcggcgtgggcgcgcagctcggcgacccagcgcgtggcgtggtcgaaggtgcggcggctggtgacgtcgtagacgagcatggcgccgagcgcgccgcggtagtaggcgctggtgaccgcgcggtagcgctcctggccggcggtgtcccagatctgggccttgacgcggtggcgcgcgatgtcgacggtgcgcgtctggaactcgatgccgatggtcgacttggagtccaggaagaactcgtcgcgggtgaagcgccccagcagctgcgtcttacccaccgccgagtcgccgaccaccacgatcttgaacacgtagtcctcctccatctccgttgcacgctactcctgactatcctgcttgcagctgcagcgaatggcttccttctccggccggccggccggccgtctctctcgcccctgttagct

SEQ ID NO: 126848 - DNA, 858 bp, Zea Mays
tagctagtaggcgtggcgcgcgcgcgggcgcgtcgacagcaggtggtcgcagatggcggcgaactcggccagggcctcggcgagcaccccggccctgcccttagcgacgagcatcctgacgagcgcggccacccgcgcgtccagctgctgccccgcgaccgtcacggcagcctcgaccgcggcggcgccctcttccaggggccgctctagccggaggagaaggtggaggagcgcgcgcgcgtggcgcgcggcgcggcgcagcgtgcccgcgcggacgcacgcgtcggccagcgctgccgcgtatcccgtggcggcgcggctggaggagcgcgcggcggccggggacgagcggggtggcgatggcgcggcgagggcggggctcaggcgcgccgctggaggagcctgaacgtcaggcttgggcggcggcgcggttacggcggacgcggaggtggcgtggtgcctgagcgggacagcgcagtggaggtggtggggcgccgggtgcgggagcgggagcgggccgtgggcgtggtggtgcaggggcagggagagggagacggcggcgtccattgtgctgtgctggagttgggggagacgagggacagccacacgttttattctgcttgcgggtggctccccacgccacgccacgggatgtgggtcccgacggcggcacggccgcacgcgcacgggaggaggagaggaggaactggaggatggggacgacgtggtggaggaggcggacacgccgccgccggtgcagcaggcggactggactgggctggaccgaaccggggacgtggacgcctctgatgggccgtgggcgccgcctcctccttctcagctgtgggccgttgcagg

SEQ ID NO: 126849 - DNA, 1069 bp, Zea Mays
aatctattggcgggctggcggctcctgtctgtggtcgcagactcgcagagtcgcagactcgcagtagccagtagatgccggagccgtcgcagccactcaaaccccatcaataaaacggcgccaactcaacagacttccagctagcagtgaccacggcgaccatcgccggctcgccgccatgaagcacctccacctctcatcttctcttcctctcctcctccaccgcccctccaagccccatctcctccaccctagccgccgccgcgcctccatccgcaacgccgcatccggcggcggctccggcgaacccacccccgccgcggaaacggcctcaggtacctctccgccagccgctgccaagcccgccggcgtcaaggaccgcctcaaggcgaggaaccaggcccgccgggtccggctggactccccgccgccggaggtggtggtggtgccgaagaagaagcccgcccccgccgcgtcgtcgtctcctgtgccgaagaagaaggtcgggcggaaggggtgggaggagatgagcctgggcgagaaggccgtggacctctacgtcggcgagaagggcctgctcttctggctcaacaagttcgcctacgcctccatcttcatcatggtcggcgcctgggtcctgttccgcttcgtcggcccctcgctcggcctctaccagctcgacgccccgccgctgccgcccaccgccgtgttcagcggcggctcgccgtgacggcgtcgagtcgttcccgagtgggcgtacactgtcactaggtcgaggcgtagagctagcgtagccgcggattaataatggtgacatgatatggaaagattgaggaagaggatgctgattctggagccaaagtttggaccttttactgccaatatgtgaattgtagacgcgcggttcttggagcttgaattcctggtttgtctgtgcaaaacctgtttggttttgtacaggcaagcaattcatttcggtatggtctggttttgagaagaagctgagatcaagaagacatccattctgctatcgttcttctaatggagaagaaattctcagaacagacct

SEQ ID NO: 126850 - DNA, 84 bp, Zea Mays
tatataaagagacgagtaggtgtgaagttaccacagcattcattgctatttgcactgttttgctgccaaaatttttaactgtcg

SEQ ID NO: 126851 - DNA, 1838 bp, Zea Mays
gccagctcctaaatcggagagaaccaatgaaagcaaactgaattttcctccacacagagaagaagaaaagaaaagagaaggaacaatgaagcataccaaaacccaatcagaatcagggtgggtaggcggaggaaggaaggggaaaggcgacgagctggtgacgacgaggagcaactagcgtcgcgaagccgccgtgccccaggcgaagtcacaggccgccgcagcggcgccggcgcccacccgatccgccgccgccgccgacctcgtgctcacgcctccggtcggaaggagggtgtgtcaaacccatggagcagcctgccgctcccgatcggagcgattttcccgccggggagtgcgaatggcgggaggagctgcggcagcagcagtctcaggtggacgcgctgcgggagcggctcgtggaggcgaaggtcgggttgcggtgctccgagggcgattcccggaaggagctagaacacctgtgccgcagggtgaagaccatcgccacgctgctggcgtacctcaagtccaaggcgaggatcatggcgataccgcacctcgcgcacacctcctgcgggatcaggcagcaggatggcgtcgggtacgtcgaccggcacggggtgccgctggcggactggcctaagggcgccgaccctgcgccctgcgggggagcttccgttgacgggacggtggcggagggtggtgctcgtcctgagcatggcgatgccgttggaggggatgtggatgtggacgacattctcaaatccatccgcgtcgtgacggatgtgatggagtcgcttgtgaagagggtgattgtggccgagtccgaagctgctaacgagaaagaaaaggtgaggatggggttggaagagatcaggaggaagacgttgcaggttgagactatgtccgccaaagtcgaggagatggagaagtttgccgttggcacgaacgggatgttgaatgagatgaggcaaagggttgaggatatggtgctggagaccactcggcagagacagcgcgctgctgaaaatgaggtggagcttagtcgggtaaagcatgatttcgagtcgctgagaacttatgttagcactctggttagtgttagagaaactcttctctcatcagaaaagcaatttgagacaatggagaaactctttgacagactagtagccaagactaaccagcttgagagtgagaaagctcagaaagaagctgaagtccacaaagtgatggaggagaatgtgaggctacgcgcaatgcttgacaagaaggaggcgcagctccaggcgatgagtgagcagtgcaagtttatggcgctgaatcacgacaactagcaggcgatgggcctgagggcggggcctccgttctcgaatatttgccgccccctagttcatttttgaactaaatgcgacaaataaaaaagaacggaggtagtaccttacaaattccagttgtattgctgattgttggtgatagagaaagaagaaagaaagaaagaagagatgccgtgggatacatctcatgccgaggcctgagttccaggggctgtaattcttggtgcaaacaatcgtttctttaggtgtgctgctacgctgaactgtaactctgacaaaaaaattcatgatgaacaaggtgtgtagaataccgattcttgggcttctgaaggcgcttgctctgggtttcttgggactcttcttgggctgggtcttgcttcatcctccatttctcctgccctgctctgggtctggtctgcttgctacaacttatggattgtttactatctgtatgcccgtacgttgttacggcggcaacatattataataaaatccattaatatgcag

SEQ ID NO: 126852 - DNA, 1012 bp, Zea Mays
tgttccaagcagttccggacaaaaacgaggggaaggaaaacccaaagccagcagctgtctgcgtcgccgtcggcttcctatcctactgcgtgcgtggacctcgctgtgctcacgcggcgaccggtggctcctcctattgctacaactacttgtactcgcgcccgtcccttgcgcacgcaacgcaagcgcagacacgagcgatccgatccgatccggaactgtgccggccagccatggcgactagggttttgctcaccgccctcctcctcgccttcctcctcgtcgccacccctttcaccgcccgaggtaacagcagcgctccctcccctctcctccctcgcttcccgccactcagatccgccacggggatggggcctctcgccattcgtgaattccgcgctagatctctgcgcgcacttctccggcgcgcggaaatggagctgatggggctccgtggagtttgttgggctgattgggactcggggcgtgctcggttcggtagatcggcggttttgaaggggtttggacgcgctagctggattacagacagtggggtcctagatgtgacaggctggggtcctggggagcgcgaattgacaagtttttggcgaagttcatctgatgcgatttcctcaatttgcgtgcatctgcgtttcaatgctgctagctaatcgtctgaggattgaattttccggaatttctcgataaggtttcattgtcgacatgcatactgtaattttccaccagtaggtaaaatttcgacgtctgagtattggctgttactggaatttccgggatttctcgataaggttctttgctggcgtgcatactgtagtttttcactaggtaaaattttgaaatacaacaacagtgccttttagtaataccatgcgtctccagcaattgctcatgatagtacaagctgcagtcaccattgacattaggcaattaaagtgagtagcacgggtttaaatttgaagtactcatcacgatgaactgcttgcatcgcatg

SEQ ID NO: 126853 - DNA, 1990 bp, Zea Mays
tgttccaagcagttccggacaaaaacgaggggaaggaaaacccaaagccagcagctgtctgcgtcgccgtcggcttcctatcctactgcgtgcgtggacctcgctgtgctcacgcggcgaccggtggctcctcctattgctacaactacttgtactcgcgcccgtcccttgcgcacgcaacgcaagcgcagacacgagcgatccgatccgatccggaactgtgccggccagccatggcgactagggttttgctcaccgccctcctcctcgccttcctcctcgtcgccacccctttcaccgcccgagttgctagagctgattcggaggaagatgctgctgcagctgaggttgttgaaggggctgatctaggtattgtgggtgatgatacacaggtttccagtgatggacctttaagccctgctcctggtgtagagacagtagttgtattccccaaaaatgctggcaaaattgtactagcaggtgaagaaactgaattactagttggtctgcaaaatgagggtaaccataatttttcctcccatttcttttctctctgttgtactggcattaatttccttttatatactatacaactttttgctggtggctcatgttgagtcccatctctagtctaccccaacttgattgggaccaaaaggctttgttgctgcttccattggagtaaatcagtgtttaaggtagaattagcagtgagcttggattacatctgtctattcacgcaaaatatgttaagtgcatgcttgtgtgttctatgtattgttttgttcatatgtagtagcacagtgcaagttcatgttcatttttatttggggcagcatgcagttctaaaatttattcggttattcaatgttggccagatagtttgtatattactagttgtgtgtaatcatcatgttcgttgtaactattgaaagaaacttggttgtagttgaactaaatggagaacatagattgcaaggcatggttggcccttgacagcaccagtttgatttttgttcgatggatgtttgtatactgttcaccaaatttaattggatactctcactttggatagttggtcttattaggtttactacatattcatttgcggctagaagtaacaccatgattcatgtaatcaaaatttaggcatggttatgcaggtgttcatagttaacgccacggttttattgtcttcactatttcattgtcatgctaattcctgtgtatgctactatgcttacattgtatttacaggtgaatcgactttgaatgttgttgctgttcattcaactctccatcttccttttgaccataatatgtatggccagaaccttactgttcagaatttcttcaacgcatcagttcctgtttctgtgcaagcaaccttcccttataaattcgttgtgagcaagttcttgcagcctggagcttatgatctggttggttacatagtgtatgagatcgaccagcacccttaccagaatgtattctacaatggcactattgaggtcgttgaggctggaggcttactcagtgttgagtctgtgttcctcatcacccttggaaccgctcttcttggtctctttggattatgggcatatggccaggttcagcagctctcgaagaaaacgaagaaggcccccaaggtggagctcggaactggaacaactgatgccaacatcgatgagtggctggagggcacttcgtttgtgcagagaagcaaatccaagaaagcagacctgaagctagctctccagagtagttaatccttggaggatctagaatgaggcatttgagggtagcccttcacaagtgacttctgcagaaagatagatgcctaaggaggtgctgaaaaatgtagtttcgtggtcgaacatctttgttgacaccattttcgaccttgtgtacttcacatggaacttttcttcaaacaaagttttgttaaaaaaaggtatatgctgttgtctctgtgatttctgatctttta

SEQ ID NO: 126854 - DNA, 1493 bp, Zea Mays
tgttccaagcagttccggacaaaaacgaggggaaggaaaacccaaagccagcagctgtctgcgtcgccgtcggcttcctatcctactgcgtgcgtggacctcgctgtgctcacgcggcgaccggtggctcctcctattgctacaactacttgtactcgcgcccgtcccttgcgcacgcaacgcaagcgcagacacgagcgatccgatccgatccggaactgtgccggccagccatggcgactagggttttgctcaccgccctcctcctcgccttcctcctcgtcgccacccctttcaccgcccgagttgctagagctgattcggaggaagatgctgctgcagctgaggttgttgaaggggctgatctaggtattgtgggtgatgatacacaggtttccagtgatggacctttaagccctgctcctggtgtagagacagtagttgtattccccaaaaatgctggcaaaattgtactagcaggtgaagaaactgaattactagttggtctgcaaaatgagggtgaatcgactttgaatgttgttgctgttcattcaactctccatcttccttttgaccataatatgtatggccagaaccttactgttcagaatttcttcaacgcatcagttcctgtttctgtgcaagcaaccttcccttataaattcgttgtgagcaagttcttgcagcctggagcttatgatctggttggttacatagtgtatgagatcgaccagcacccttaccagaatgtattctacaatggcactattgaggtcgttgaggctggaggcttactcagtgttgagtctgtgttcctcatcacccttggaaccgctcttcttggtctctttggattatgggcatatggccaggttcagcagctctcgaagaaaacgaagaaggcccccaaggtggagctcggaactggaacaactgatgccaacatcgatgagtggctggagggcacttcgtttgtgcagagaagcaaatccaagaaagcagacctgaagctagctctccagagtagttaatccttggaggatctagaatgaggcatttgagggtagcccttcacaagtgacttctgcagaaagatagatgcctaaggaggtgctgaaaaatgtagtttcgtggtcgaacatctttgttgacaccattttcgaccttgtgtacttcacatggaacttttcttcaaacaaagttttgttaaaaaaaggtatatgctgttgtctctgtgatttctgatcttttattcgctgtcatggccactccaggatttttctttgtgggttgtgtagcagaagtcggcaggcaagctgttgatttctgacttcgtttgtgcattatccttatgcttgttctccatcgcttggcattgtgcgtcacgcatgccagcaagtcgattatatatatctgaaacgttattgcaaagtcaacaaatgtagtgtaccaaacggtttttccttttcaggctcgagtgcttccttcactgc

SEQ ID NO: 126855 - DNA, 1381 bp, Zea Mays
ttaagaaagcattgtgcataccctgtatcaccggagtctacatttccaaacggctcgtgttgatgtgatgctttcattgattggagaggatggcattctcaaagtatcatttttgccatgcaggtttcccggcccctctctcttcctcctagtgcaagggacaatctgtaccatggtctcccaataacagtgaagtcagctctgcgatcacgattgcaaacatataaccccgaagaagaggtttgtcttcttgcacaacacaacctcgcagagctcaaatgtttcatttcctccatgcgttttggcatgcattcaatgacttgtttatttaaattttcaaagtggcatacaaggacctgatttgactgctaatttggtgcatcctttcttgcacgctaacaagtggtgttccattgctgcagcgcacggtagctcaaataaaagccgaaatgcagaaaactcttcgctggcttctgccgatagcagagaatacaataaggtgggctgagctttttttttttttaaaaaaaagttgtactctgacgatctgacttagactatagtgctaatgcgctaacagttgtttccttctgattcattcaccagggcacaccaaggttttggatgggtcggcgagtgggcaaatcttgggagcgacatgagcaagaaatcaggctcccagcacagcgtcacccgcatccagacgctccatcacgccgacaaggcgaaaaccgagcactacatgctggagctggtggcgctcctccaccacctggtgatccaggtgaagaacagaggctacgggaccagcaaatcgtcgaggcacgacgcgtcgtcccggtcccgcaaggcggcggcaacggacctccgaccggagacggagactcggcacaacacgtcgccggtgaacagccgcacggcctcgagcccgctgtcggactgcgagcgcgcggcgctggaccacctgagcttcaggaggacggcctacggcaggagccagagctgcgagcctccgcctggccaccgacggagcaaggcccacaggagctgggacccgtgccggagccacggcagctccccggcgacggagttcggcaggacccccgccgtgcagcagcgcggccggggcagggatcttgacgtaattgatggcctagatagactgccttcctactcgcacccgccctcccctacgttttgctagatgttaatggttaggtattcttttgctgtaactgtaacacgcgtgatatgtccatatgtacatataccatagtcttgttatagcgtgtggtgattgaatcaaagtatatagagcgagatcacaagtggtgttccgatcatctggcctttggagagaaaaaaaatatcgatttgtctg

SEQ ID NO: 126856 - DNA, 492 bp, Zea Mays
atggcgattggcgacagagtgacgaggccggacgtgggacgaaaaaacggacggaacgagtcaaaggttgcccacggcgacgacgacccgtcgaccatggatgccggatggaaatggacaggcgagagagagaggagacgggacgggggtgcgggatacaccacacgccacgccaggcggccaggccacggaacaaaaagcgacccatccctcccgcccccgacggccagaccccgacccaaagcccccgacgtcgtttcgtttcgtctcggctcgggcgctcgaccgctcgtcaatctcatcgccctcgcccctccctcgccctcgcctccgcctccgttccgttccactccactccagtccacccgcgacttcaaagttcattcaaacccgcgacccccgggcaccaccaactccaactccgccgctgggaagaggaggagcgacgacgagctgcccggctccaccacgagcagcaagttgcaggcctaa

SEQ ID NO: 126857 - DNA, 962 bp, Zea Mays
cgaagacacactccaagaaaccaagaacaccggccacacgcacgcgcacgcacggcaggcgaggccgaggacgaacagacgataaaggaagcaatggctccgtcgctcgcgtcgacggcggggctcccgagctgcggggcgcggcgcggcggccggtgcgtggcccgccgcgcgtccgcggttgcgactccggcgacggcgacggcgaggacgcactacgaggtgctcggggtcggggccggcgcgagccggtgcgagatcaaggcggcgtaccggcgcctggcgagggaggtgcacccggactgcggcggccgcggcgacgaggggttcatccgcctgcacgccgcgtacgccacgctcgcggaccccgacgagcgcgcgcgctacgaccgcgccgcggcggtccggagccggatcagggcggcgccgtcggggtccggggcggggttccggccgcgaaggtgggagacggaccagtgctggtagcaccgtagcagcagccacgtagacgtagctgcgccggcggtggagtggagtcgccggagcgcgctcggtggtctggtccgttcccagggccagttgcgaccatggggcccatattgaagacagcccacatgaaaaacggaccgcgatcctggcagcccacatgagttgggatcgtggactttatgggctgcaggcttcgtaggcctttcgcgccagacctggcgctggatattgttgtaggccatcttgtcttgggatcatagagctgcacgaagagacatttttaacatctcttttgcactgctgctactccttccactctaaattgtaaaatatttttatctttttattaacatattatgtttactagtatatgtttatatatcgtgtatataattaaaacattgtatctagcgtcttataatttacaatgaagagtataaatatatgtgattatattgatatttatacatata

SEQ ID NO: 126858 - DNA, 975 bp, Zea Mays
atgggagcacctctccttctcctccctcttctctgctgctgctgcttcgcattactcctccaagtccaaggagcagacgccgcgacattgactatcaccaacagctgcggctacacggtgtggccgggcctcctctccaacgccggcgcgccggcgccgtcgaccacgggcttcgcgctggccccggggcggtcggccgcggtgaccgtagcggcggcgtggtcgggccgcgtctgggcgcgcacgctctgcgccacgtcgcctgccgcctcgggcgccaccttcgcgtgcgccaccgccgactgcggctcgggcgccgtcgagtgcgccggccgcggggccacgccgccggccacgctggccgagctcacgctagccggcgccggcgacgacgacgacgacttctacgacgtcagcctcgtggacggcttcaacgtgccgatgctcgtcgcgccgcgggcgggcgccgccaacgggagcgggtgccgccccgcggcgtgcgccgccgacctcaacgcggcgtgccccgcggagctgcgcgtcgccgcgggggcgggggcgggggccggggcgccgggcgtggtggcgtgcaggagcgcgtgcgaggcgttcgcggcggcccagtactgctgcagcggcgcgtacgggtccccggcgacgtgcgcgcccacgccatactcccgcttcttcaaggccgcgtgcccgtccgcctacagctacgcgtacgacgacgccacgtccaccttcacctgcgccgccgcaggccgcggcggctacgacgtcgtcttctgccccagggcgtccagcctaaaatcaggagggaatcccgaggcggcgggccttcctccctcggcctcgacgatggagtgctctgggggcgcagcaggcagcttgacggcgaggagggacgcggtggcggcgctcctgcagacgctcgccgtcttctcggcgatgtcgtggcgacggtggtggtga

SEQ ID NO: 126859 - DNA, 3471 bp, Zea Mays
cagccgtccactgatccaccaccaccacccctcccgtctcccgccatgccacctgcctttgacctgcctatcatctcgcccgcgccgtccccgtccccgtccccgccgccgccgattccattccatatgcccattccctcctccaccaccaccaccgctaagcccctcactccgctcgcttcccttttattccatccgccacccccacgcccccctcgccaccacaccacaacgccacaatcacaatgcctcctcccaccttcctcctcggcctcctcctcctcctcctcctcgccgccgccgcccccgcccccgcctccgccacgccggagcgggacgcgtacgcgctgtcgaggctcaaggcgtcgctcgtcccgtccgccacaaactccacctcggcaccgctgtccgactgggacccggccgcgaccccgccggcgcactgcgcgttcacgggcgtgacctgcgacgccgccacgtcgcgcgtcgtcgcgatcaacctcacggccgtgccgctccacgggggcgcgctcccgcccgaggtcgcgctgctggacgcgctcgccagcctcaccgtcgccaactgctatctccgcggccgcctcccgcccgcgctcgcgtccatgcccgcgctccgccacctcaacctctccaacaacaacctcagcgggcccttcccgccgccgccccccgccgcctacttcccggcgctcgagatcgtcgacgtctacaacaacaacctgtccggcccgctcccgccgctgggcgcgccgcacgcgcgctccctccgctacctccacctcggcgggaactacttcaacggctccatcccggacaccttcggcgacctcgccgcgctcgagtacctgggcctcaacggcaacgcgctgtcgggccgggtcccgccctcgctctcccgcctctcccgcctccgggagatgtacgtcggatactacaaccagtacagcggcggggtcccgcgcgagttcggcgcgctccagtcgctcgtccgcctcgacatgagcagctgcacgctcacggggcccatcccgccggagctcgcgcggctgtcccgcctcgacacgctcttcctcgccttgaaccagctcacgggggagataccgccggagctcggcgctctcaccagccttcggtcgctcgacctctccatcaatgacctcgccggcgagatacccgccagcttcgccgctctcaccaacctcaagctgctcaacctcttccggaaccacctccgcggcgagataccggccttcctcggcgacttccctttcctcgaggtgctgcaggtgtgggacaacaacctcacaggccccctcccgcccgcgctcggcaggaacggccgcctcaagacgctggacgtcaccagtaaccacctcaccggcaccataccgccggacctctgcgccggacggaacctgcagctgctcgtgctcatggacaacggcttcttcggcagcatccccgagtcgctcggcgactgcaagacgctcacgcgcgtccgcctcggcaagaacttcctgaccggccccgtcccggccgggctcttcgaccttccccaggcgaacatgctcgagctcaccgacaacatgctcaccggcgagctcccggacgtgatcgctggagacaagatcggcatgctcatgctggggaacaatcgcatcggagggcgcatccccgccgctatcggcaacctccccgcgctgcagacgctgtccctggagtcgaacaacttctctggcccgctgcctccggagatcggcaggctcaggaacctcaccaggctcaacgccagcggcaacgcgctcacgggaggcatcccgagggagctcatgggctgcgcctccctgggcgccgtcgacctcagccggaacggcctcaccggcgagataccggacaccgtgacgtcgctcaagatcctgtgcacgctcaacgtgtcgaggaacaggctgtcgggcgagctgccggcggcgatggccaacatgacgagcctgacgacgctggacgtgtcctacaaccagctgtcgggccccgtgccgatgcagggccagttcctggtgttcaacgagagctcgttcgtgggcaacccggggctgtgcagcgcgtgccccccatcgtccggcggcgcgcggtcgcccttctcgctgcgccggtgggactcgaagaagctgctggtgtggctggtcgttctcctcaccctgctggtcctggcggtcctgggcgcgcggaaggcgcacgaggcgtggcgcgaggcggcgcggcggcggtcgggggcctggaagatgacggcgttccagaagctggacttctcggcggacgacgtggtggagtgtctcaaggaggacaacatcatcggcaagggcggcgccgggatcgtgtaccacggcgtgacccgcggcggcgcggagctggcgatcaagcggctggtggggagagggtgcggcgaccacgaccgcgggttcaccgcagaggtcaccacgctgggccgcatccggcaccgcaacatcgtgcgcctgctcggcttcgtctccaaccgggaggccaacctgctgctgtacgagtacatgcccaacgggtcgctaggcgagatgctgcacggcggcaaggggggccacctcgggtgggaggcccgggcgcgcgttgcggcggaggcggcgcgcgggctctgctacctgcaccacgactgcgcgccccggatcatccaccgcgacgtcaagtccaacaacatcctcctcgactccgccttcgaggcgcacgtcgcggactttggcctcgccaagttcctcggcggcggcggcgccacgtccgagtgcatgtctgccatcgccggctcctacggctacatcgccccagagtacgcgtacacccttcgcgtggacgagaagagtgacgtgtacagcttcggcgtggtgctgctggagctcatcacggggcggcgccccgtgggcagcttcggcgacggcgtggacatcgtgcactgggtgcgcaaggtgaccgcggacgccgccgccgcggaggagcccgtcctgctggtggcggaccgtcggctggcgccggagccggtgccgctgctggcggacctctacagggtggccatggcgtgcgtggaggaggccagcacggcccggcccaccatgcgcgaggtcgtgcacatgctctccacctccgccgcggcccagcccgacgtcccccacgccttgtgcaaggtcgtcgattaatttgccttatatatgacgattatgtatatgatccgggcagggttagcgcctgtgatctatttagcggctgcctttttggcgtcactcgtctcgtgtgtgatgatggctggatggatgtgtaaaacaaataaccagcaggtggctactcgtgaatgaaagttgccggttcttattctcatgcatatatattagcaacacacaaagtgagatggcatatattccctttccctggcgt

SEQ ID NO: 126860 - DNA, 1792 bp, Zea Mays
caacaacagcacagaaaaccccacaggtcatagacagcggagctccctccagtctccatccaataacacgagctaaccaccgcccaaccgaaaccgggccccaccggtctccccgtcgccacgtacgcggccggagcgccctatacaagcgccacgtcgatcgccgactcgccgtcgccgcgtcccccacggctcttccttcatcctccggcgagctataaatccctcccgccgacgccacccccatggcatcccgcggttccccttcctcctactcctccccgaggaccccgacgtcgtcgaaggctaacccttggcccgcgccctccgccccgccgctgtacccgacgctctccatggccgacctcgcgcccgtcgagatagggcccgcctcgtcgccgacggcctcggatgactacaacgcgcctccgccgtctgaggacgtcctcctccgggtccccggcgcgcggctccacctcgtcgaccgcagccgcagccacccgctggccgccggcgacctctccctcctccgcatccgctccggcgacacctccctggccgccatcgcgctgctgggcccggtccagtggccgctcgcgcgcgacgtggccgccgtcaagctggatccctgccactacgccttctccctcaccgtgccggcctccgccgacgaccccagccccgacccgctccactacggcctcacgctctcccgccccgatgtgcgcctcgacggcgtcctcgctgcctacaccagcttctccgtgcacgccgtggtcggcgccgggcagctggaggccagggtgcgcgacgaggccgaggccgccgcgtactggacggccgtcgcgcccaacgtggaggcgtacggaggcgcggtggccaggaccatcgccacgggcgccgagcacctcgccaaggggatactgtggtgcggggaggtcacggtggagaggctccgttggggcaatgaggtcctcaagaggaggatgcagcctggcgacgccaacgccgaggtcagccccgagatgctcaggcgaatcaaaagggctaagagggtgagccaaatatctgagaaagtggcgactgggattttgtccggagtggtgaaggtcactggttacttcacaagctctctggccaactcgaaagctggcaagaagttcttcaacatgttgcctggagagatcgttcttgcttcgcttgacggatttgggaagatctgcgacgccgtggaggtggccggaaagaacgttttgtccacgtcgtcaactgtgacgaccgggctagtatctcacaggtacggagacaaagccgccgccgcaacgaacgaagggctggacgccgccgggcacgccatcgggacggcatgggccgtgttcaagatccggcaggccttgaaccccaagagcgtcctcaaacccacggcgctggccacgtccaccatcagggccaacgttgccgagcttcgcgcgatgcacggcagcagcaagtagctcgcgcctgccgtccctgtttcgtaaaaactctattatctcgctctgtcacgaccaacgatgcactcgctgcttccagcagcagcgttggctgttgcctgttggcctgtaaattcgtgtggctgaaactgggaaagccgggaactgaaaggcttaccgcttccgctttgttagtgatgctggtgatgttctaagagcttttaccactgctgtgctgctgcgttggcttgaactgtcacgagttgttcggttttggcctctgaagtctgaaccaagtaaaaaaaaaaactaactaataa

SEQ ID NO: 126861 - DNA, 1351 bp, Zea Mays
ccccgtccagattcatccaccctccccctttcccttcgtctccgtccgctcccggcatcgtcccctcttccccgtctcgcgttcgtcgcccacgggcttcgattgatcttcttccggtgctggtggcaggtggacggatcgtgtccttgcttggccgcccacagcagcaatggacgacggggacctggacttctccaacccggacacgtacctgtgcccggcgctcggcactgacccgcccagcagctgctccatggacagctacttcgacgagatcctcaaggacacggagcaccacgcctgcacgcacacccacacctgcaacccgccggtgcacgacctatcgcacacccacacctgcgtccacgtccacaccaagatcgtcgcggcctcgcccggcgacgacactgccgactcgccgtccgagaacaacaccaacggcagcggcggcaacggcagcaacgccgcctccaagaagcgcccctcggggaaccgcgccgccgtcaggaagtaccgggagaagaagaaggcccacaccgcgtcgctggaggaggaggtggtccatctcagggcgctcaaccagcagctcgtgaagaagctccagagccacgccgcgctcgaggcggaggtggccaggctccgatgcctgctcgtcgacatcaggggcaggatcgagggggagattggcgcgtttccgtaccagaggccgccgccagcggccaagaacgtcgacctcgtgtccggtgttgaccagggagggttccttgccggggctgctgcccaggttaccagttcctgtgatttcagatgcaacgatcagatgtactgcagccctggaatgcagggcgctgttagcggccaggtgttgggacaaggtgcctgcgatgtctcgagtatccaatgcgttggaagcaccaggtctgcgtccactaagctacctgtctgcggggggatggatgcagtacctgctgcctgcttgccaaatgttcaaaacaagtgacggattatataactgaagaagaatataactcggctctcttgtcgccgagccattgttttgtggttccattggtttccttctgtctggctgaatgcaattttgagtgaattgccatctaattgtcaacgatgaagatcagatttgcttctgtcccatcctgtcaatccagagctagacttgctcttgtctattttcagccggatgtcttgtgccccttttaaaggcattgctagtcttgttgacacaccagaaactaagatgctctgtatgaatcaactggctgtttattctctgagatttgagaaaaattcttattagccttcttaagtctatttatcatgattattgtgt

SEQ ID NO: 126862 - DNA, 2190 bp, Zea Mays
ccccgtccagattcatccaccctccccctttcccttcgtctccgtccgctcccggcatcgtcccctcttccccgtctcgcgttcgtcgcccacgggcttcgattgatcttcttccggtgctggtggcaggtggacggatcgtgtccttgcttggccgcccacagcagcaatggacgacggggacctggacttctccaacccggacacgtacctgtgcccggcgctcggcactgacccgcccagcagctgctccatggacagctacttcgacgagatcctcaaggacacggagcaccacgcctgcacgcacacccacacctgcaacccgccggtgcacgacctatcgcacacccacacctgcgtccacgtccacaccaagatcgtcgcggcctcgcccggcgacgacactgccgactcgccgtccgagaacaacaccaacggcagcggcggcaacggcagcaacgccgcctccaagaagcgcccctcggggaaccgcgccgccgtcaggaagtaccgggagaagaagaaggcccacaccgcgtcgctggaggaggaggtggtccatctcagggcgctcaaccagcagctcgtgaagaagctccagagccacgccgcgctcgaggcggaggtggccaggctccgatgcctgctcgtcgacatcaggggcaggatcgagggggagattggcgcgtttccgtaccagaggccgccgccagcggccaagaacgtcgacctcgtgtccggtgttgaccagggagggttccttgccggggctgctgcccaggttaccagttcctgtgatttcagatgcaacgatcagatgtactgcagccctggaatgcagggcgctgttagcggccaggtgttgggacaaggtgcctgcgatgtctcgagtatccaatgcgttggaagcaccaggtctgcgtccactaagctacctgtctgcggggggatggatgcagtacctgctgcctgcttgccaaatgttcaaaacaagtgacggtacataactttcgtttccctgctatgcttttaagaacttctgtctagtggctagatgtattagtttcagtcattgttttgttagcaatccgtaaatgcatttaagctcgtgattgtatatatcgctcagtagccttctgttatgtgtaggattatataactgaagaagaatataactcggctctcttgtcgccgagccattgttttgtggttccattggtttccttctgtctggctgaatgcaattttgagtgaattgccatctaattgtcaacgatgaagatcagatttgcttctgtcccatcctgtcaatccagagctagacttgctcttgtctattttcagccggatgtcttgtgccccttttaaaggcattgctagtcttgttgacacaccagaaactaagatgctctgtatgaatcaactggctgtttattctctgagatttgagaaaaattcttattagccttcttaagtctatttatcatgattattgtgtaatcatggtgtatgttgttgtttattcattttgctgtggcctattcaatttgttgtggcctgattgaatgtatttttagtgaatcggcatcttatcatggaagggcaggcctgatgcacgggatttgtcttactgagtcaccaggtcgcgggttctaagcagggaggcttgcctcggtttatcccttccctagacctcactcatgtgggagcctccgacactgggactcccggcagtgtttatggtcccttccttttcagagactgctgggacttcccgttctgcctcgaaggaacgctgtataaaccgctagcttttctatgtagggccgaatctggttcaaactgctacgtgtgtgagttcgtcgtcgccgatgatgcttctatagtgcctgaggcgattcaagtttgttagctctagagctgataggatatcctcgtttactttgcttagttctcagatgctctccgtctccgatgaagtgcagcaactgaaccggatccgaaggagttggacatgaacaggttaaaatttggcatatgtggtctaagaagacgctgagatgtttgtagcgaatctcaagttcaatgcgaaccctgttgcctatgtatattcacatcctttgtgtaggtgtcatgtctctcttctgttacgtgcgtggatctgagggaacccccaaaagtttaatt

SEQ ID NO: 126863 - DNA, 1612 bp, Zea Mays
ccccgtccagattcatccaccctccccctttcccttcgtctccgtccgctcccggcatcgtcccctcttccccgtctcgcgttcgtcgcccacgggcttcgattgatcttcttccggtgctggtggcaggtggacggatcgtgtccttgcttggccgcccacagcagcaatggacgacggggacctggacttctccaacccggacacgtacctgtgcccggcgctcggcactgacccgcccagcagctgctccatggacagctacttcgacgagatcctcaaggacacggagcaccacgcctgcacgcacacccacacctgcaacccgccggtgcacgacctatcgcacacccacacctgcgtccacgtccacaccaagatcgtcgcggcctcgcccggcgacgacactgccgactcgccgtccgagaacaacaccaacggcagcggcggcaacggcagcaacgccgcctccaagaagcgcccctcggggaaccgcgccgccgtcaggaagtaccgggagaagaagaaggcccacaccgcgtcgctggaggaggaggtggtccatctcagggcgctcaaccagcagctcgtgaagaagctccagagccacgccgcgctcgaggcggaggtggccaggctccgatgcctgctcgtcgacatcaggggcaggatcgagggggagattggcgcgtttccgtaccagaggccgccgccagcggccaagaacgtcgacctcgtgtccggtgttgaccagggagggttccttgccggggctgctgcccaggttaccagttcctgtgatttcagatgcaacgatcagatgtactgcagccctggaatgcagggcgctgttagcggccaggtgttgggacaaggtgcctgcgatgtctcgagtatccaatgcgttggaagcaccaggtctgcgtccactaagctacctgtctgcggggggatggatgcagtacctgctgcctgcttgccaaatgttcaaaacaagtgacgtgaatcggcatcttatcatggaagggcaggcctgatgcacgggatttgtcttactgagtcaccaggtcgcgggttctaagcagggaggcttgcctcggtttatcccttccctagacctcactcatgtgggagcctccgacactgggactcccggcagtgtttatggtcccttccttttcagagactgctgggacttcccgttctgcctcgaaggaacgctgtataaaccgctagcttttctatgtagggccgaatctggttcaaactgctacgtgtgtgagttcgtcgtcgccgatgatgcttctatagtgcctgaggcgattcaagtttgttagctctagagctgataggatatcctcgtttactttgcttagttctcagatgctctccgtctccgatgaagtgcagcaactgaaccggatccgaaggagttggacatgaacaggttaaaatttggcatatgtggtctaagaagacgctgagatgtttgtagcgaatctcaagttcaatgcgaaccctgttgcctatgtatattcacatcctttgtgtaggtgtcatgtctctcttctgttacgtgcgtggatctgagggaacccccaaaagtttaatt

SEQ ID NO: 126864 - DNA, 1467 bp, Zea Mays
ccccgtccagattcatccaccctccccctttcccttcgtctccgtccgctcccggcatcgtcccctcttccccgtctcgcgttcgtcgcccacgggcttcgattgatcttcttccggtgctggtggcaggtggacggatcgtgtccttgcttggccgcccacagcagcaatggacgacggggacctggacttctccaacccggacacgtacctgtgcccggcgctcggcactgacccgcccagcagctgctccatggacagctacttcgacgagatcctcaaggacacggagcaccacgcctgcacgcacacccacacctgcaacccgccggtgcacgacctatcgcacacccacacctgcgtccacgtccacaccaagatcgtcgcggcctcgcccggcgacgacactgccgactcgccgtccgagaacaacaccaacggcagcggcggcaacggcagcaacgccgcctccaagaagcgcccctcggggaaccgcgccgccgtcaggaagtaccgggagaagaagaaggcccacaccgcgtcgctggaggaggaggtggtccatctcagggcgctcaaccagcagctcgtgaagaagctccagagccacgccgcgctcgaggcggaggtggccaggctccgatgcctgctcgtcgacatcaggggcaggatcgagggggagattggcgcgtttccgtaccagaggccgccgccagcggccaagaacgtcgacctcgtgtccggtgttgaccagggagggttccttgccggggctgctgcccaggttaccagttcctgtgatttcagatgcaacgatcagatgtactgcagccctggaatgcagggcgctgttagcggccaggtgttgggacaaggtgcctgcgatgtctcgagtatccaatgcgttggaagcaccaggtctgcgtccactaagctacctgtctgcggggggatggatgcagtacctgctgcctgcttgccaaatgttcaaaacaagtgacggactcccggcagtgtttatggtcccttccttttcagagactgctgggacttcccgttctgcctcgaaggaacgctgtataaaccgctagcttttctatgtagggccgaatctggttcaaactgctacgtgtgtgagttcgtcgtcgccgatgatgcttctatagtgcctgaggcgattcaagtttgttagctctagagctgataggatatcctcgtttactttgcttagttctcagatgctctccgtctccgatgaagtgcagcaactgaaccggatccgaaggagttggacatgaacaggttaaaatttggcatatgtggtctaagaagacgctgagatgtttgtagcgaatctcaagttcaatgcgaaccctgttgcctatgtatattcacatcctttgtgtaggtgtcatgtctctcttctgttacgtgcgtggatctgagggaacccccaaaagtttaatt

SEQ ID NO: 126865 - DNA, 1389 bp, Zea Mays
ccccgtccagattcatccaccctccccctttcccttcgtctccgtccgctcccggcatcgtcccctcttccccgtctcgcgttcgtcgcccacgggcttcgattgatcttcttccggtgctggtggcaggtggacggatcgtgtccttgcttggccgcccacagcagcaatggacgacggggacctggacttctccaacccggacacgtacctgtgcccggcgctcggcactgacccgcccagcagctgctccatggacagctacttcgacgagatcctcaaggacacggagcaccacgcctgcacgcacacccacacctgcaacccgccggtgcacgacctatcgcacacccacacctgcgtccacgtccacaccaagatcgtcgcggcctcgcccggcgacgacactgccgactcgccgtccgagaacaacaccaacggcagcggcggcaacggcagcaacgccgcctccaagaagcgcccctcggggaaccgcgccgccgtcaggaagtaccgggagaagaagaaggcccacaccgcgtcgctggaggaggaggtggtccatctcagggcgctcaaccagcagctcgtgaagaagctccagagccacgccgcgctcgaggcggaggtggccaggctccgatgcctgctcgtcgacatcaggggcaggatcgagggggagattggcgcgtttccgtaccagaggccgccgccagcggccaagaacgtcgacctcgtgtccggtgttgaccagggagggttccttgccggggctgctgcccaggttaccagttcctgtgatttcagatgcaacgatcagatgtactgcagccctggaatgcagggcgctgttagcggccaggtgttgggacaaggtgcctgcgatgtctcgagtatccaatgcgttggaagcaccaggtctgcgtccactaagctacctgtctgcggggggatggatgcagtacctgctgcctgcttgccaaatgttcaaaacaagactcccggcagtgtttatggtcccttccttttcagagactgctgggacttcccgttctgcctcgaaggaacgctgtataaaccgctagcttttctatgtagggccgaatctggttcaaactgctacgtgtttctcagatgctctccgtctccgatgaagtgcagcaactgaaccggatccgaaggagttggacatgaacaggttaaaatttggcatatgtggtctaagaagacgctgagatgtttgtagcgaatctcaagttcaatgcgaaccctgttgcctatgtatattcacatcctttgtgtaggtgtcatgtctctcttctgttacgtgcgtggatctgagggaacccccaaaagtttaattgccggctggttcaattgtgtctgtct

SEQ ID NO: 126866 - DNA, 1559 bp, Zea Mays
caccaccgctcgacctaccagccctccttcctcatccgcctgccctgcccgtcccgtccgtccacccccttcccttctttcccctttgcttgctgctgcctgcttctcgccgtcgccgcctcaattccctcctcgttgtccgtcgcctcgtccacgcgcacctcgtcctcctctccgttccctccacctcctcgaccgcaccgtcgtcgtctagctagcggagcgagctgcgaccagatcggagagccaagcacccaggaagagggggccggggaacaagaagaagccgccggaagccgggcgtggacgtgtggtggttttctgccggcggctgacaagtggtgtaggctacccgctctggccatggatccgtcgggcggcgcgttcctgccgccgctgcagcaagggagctcctccttcccgcggtcctccagcaacgcgtcgctcgccaggagcggcagcggcggcggcggcgttggcgccgggcgcgggaccaggggcaggaagatgatgcgcagggtctgccgcggcgtcatcaccttcatcttcgccatcgctgggctgttcctgggagcggtgaccggcggtctgatcgggctggcgacggagagcgggctgttccgcggcaccgggatcggcgccatcaccggcgcgctcgtctccatcgaggtcgtcgactcctccatccgcctctggcaggcgcgccgatccgggatctggagcatcctctacgtgctgaacgtgatctacagcctcctgacgggcaggctggtgcgcgagaaggtcgacccggcggtgcagcgggtggtccgcagccagatgaacgcggtggactcgtcgccgttcagggagtcgccggacctgttcgaggtggaggccaccaacggcatgccgcgggcgtccatcgacaagctccccgagtcgtggatcaccgaggagtacaggcgcgacgccgtcggcgacctctccggctgctccgtctgcctccaggatttccaggtcggggagaaggtgcggagcctgccggactgctggcacgtgttccacgtgccgtgcatcgacggctggctcatcaagcacggctcctgcccgctctgcaggaggaagctgtaggcggatcgaccggacgacgccatggacgatgttcttctctgcgatcgagccgatgatgtgtgtgtgtgtgcccccgccgccgccaccaccgatagctgctgctaggatcggaggagggaggagggagaagagactgacatctatagaacccttaatttatagagagggcttttgctttgctgctacttgtacgtgctctactacgtacctattgcatctttctttctttttttgatccaccatgatcgacctccctcctcagatccatccatgcatgtaatataccctggaccggcttgtgcttcgttcgatccattccatgcatctccggactgtgatctcgatctggtgtaatatatataaaaaaaaactactagtatgtaccatcgcactttggacatctatacatgcatgctggttttggtcatatttttttagaaaatatt

SEQ ID NO: 126867 - DNA, 1327 bp, Zea Mays
ccccatctggcagcctgatgacaggattggggcagctcatgattctggctgggcctccaaagttttcacttcatcctgcttgctttcaatcccaacaaattttcttcatggcttgactctgtttcagcttctacattcaaaaaaaaaactctgtttcagcttttgaagtgtttgcactttgtacatcactgggttcatcggtttgcaatttgttcagacaacctcatctatgcaaccatacatcaaacaagaaatacagaatcagccttgtgtgtgtgtcgtcttcagccaccagatctttgcgctgcgacataggatcaaatttgacttttttttctgagctgggctgttcctgggagcggtgaccggcggtctgatcgggctggcgacggagagcgggctgttccgcggcaccgggatcggcgccatcaccggcgcgctcgtctccatcgaggtcgtcgactcctccatccgcctctggcaggcgcgccgatccgggatctggagcatcctctacgtgctgaacgtgatctacagcctcctgacgggcaggctggtgcgcgagaaggtcgacccggcggtgcagcgggtggtccgcagccagatgaacgcggtggactcgtcgccgttcagggagtcgccggacctgttcgaggtggaggccaccaacggcatgccgcgggcgtccatcgacaagctccccgagtcgtggatcaccgaggagtacaggcgcgacgccgtcggcgacctctccggctgctccgtctgcctccaggatttccaggtcggggagaaggtgcggagcctgccggactgctggcacgtgttccacgtgccgtgcatcgacggctggctcatcaagcacggctcctgcccgctctgcaggaggaagctgtaggcggatcgaccggacgacgccatggacgatgttcttctctgcgatcgagccgatgatgtgtgtgtgtgtgcccccgccgccgccaccaccgatagctgctgctaggatcggaggagggaggagggagaagagactgacatctatagaacccttaatttatagagagggcttttgctttgctgctacttgtacgtgctctactacgtacctattgcatctttctttctttttttgatccaccatgatcgacctccctcctcagatccatccatgcatgtaatataccctggaccggcttgtgcttcgttcgatccattccatgcatctccggactgtgatctcgatctggtgtaatatatataaaaaaaaactactagtatgtaccatcgcactttggacatctatacatgcatgctggttttggtcata

SEQ ID NO: 126868 - DNA, 102 bp, Zea Mays
taggctttgttgttgctgttgttcgtgtacaggggggaagagttcaggatgcttggacaatgcgggagcagctggaacactttatgaagcagtacctaagag

SEQ ID NO: 126869 - DNA, 780 bp, Zea Mays
atggaggaataccgctggctcagccttggtaggatgattggtgtcaacaatttcacaacaaataagcttcaagatcaactggcctttgctaaaatccccctgacagtaaatcagggtggcattcaaagagttcatattataaaaggatgtgtagatggatcacttctattagaattgtttacaggagatggagaaggaacaatgatcgctaggtttaggaaaagatacaatttcttatttgatgaagacgttcctactgaaaaagaaagactccaaaaaatgattaagaaatctgaggaccaagatgccattggagaaatgaagagttgtgtcacgtggattttggcttctcatcctccaaagaacgttgaatcagaaatcttgcgtgagcatatcaagaaagagagggaggcagcaaaggctagaaaacgatcatactatctgaagaaatctgaacttcgcgaaaggaagctgatgaacaagtacaatgagctcaagatgatcgcttctgcaagcggtaccagagcgtctggtagtgagattggtgccttgattgaggaaaggagacttgatatgctagaaaagaaggctctagagtgcagtgagcccactgttccatccagcaagcagaactggcagagattctattccagtccgcaccatagatggtgccatgtccatagctctaggaataagcacaagtgtgcaccctccaaacatgcactcgtcctcctcaccacgggtgagtgggagcatgaaaatgagataatccggatgtaa

SEQ ID NO: 126870 - DNA, 1978 bp, Zea Mays
gtcacgtccgctccaaacccaccaacctcgccaccaccacctcggcccgccccacctttcttgccgcccctgcactgcacgcctccccgtgctcgatctcggtgctccacgccaccacgtcatggctcacgctcgctccagccaccgccgcacgggcctcctcctggccatggccgtcgtcgtcgtggcgtcgcttatcgccgccgcggacgcgtccagcttcgggttcgacctccaccaccggttctccccggtggtccggcggtgggcggaggcccggggcggccctctcgccgcggaccagtggccggctcgaggcacgccggagtactactccgcgctgtcccgccacgaccgcgcccgccgcgccctcgctggcggcgccgacgacgggctcctcaccttcgccgccggcaacgacacctaccaatccggaacgctgtactacgcggaggtggagctgggcacgccgaacgcgacgttcctggtggcgctggacaccggcagcgacctcttctgggtgccgtgcgactgcaggcagtgcgcgaccatccccagcgccaacgggacggggcaggacgcgccgtcgctgcgcccctacagcccgcggcggtcgtcgacgagcaagcaggtggcgtgcgacaacccgctgtgcgggcagcggaacggatgctccgccgcgaccaacggcagctgcccgtacgaggtccagtacgtgtccgccaacacgtcctcctccggggtgctggtgcaggacgtgctccacctcacacgggagcgcccgggccccggcgccgccggggaggccctgcaggcgcccgtcgtgttcgggtgcgggcaggtgcagacgggcgcgttcctggacggcggcggcggcgccgtcgacggcctcatggggctcggcatgggcaaggtgtccgtgcccagcgcgctcgccgccagcggcctcgtcgcgtccgacagcttctccatgtgcttcggcgacgacggcgtcggccgcgtcaacttcggcgacgccggcagccgcggccaggccgagacgccgttcaccgtccggagcttgaacccgacgtacaacgttagcttcacgtccatcggcgtcggcagcgagtcggtggcagcggagttcgccgccgtcatggactccggcacgtccttcacgtacctcagcgacccggagtacacgcagctcgccaccaaattcaactcccaggtcagcgagaggagagtgaatttcagcagtggctctgcagatccttttcccttcgagtactgctacagactcagccctaaccagacagaggtggcgatgccggacgtgagcctgacggccaaagggggagccctgttcccggtcacccagccgttcatccccgtcggcgacacgaccggccgtgccgtcggctactgcctggcgatcatgaggaacgacatggccatcggcatcgacatcatcggccagaacttcatgaccgggctcaaggtcgtcttcgacagggagaggtccgtcctgggctgggagaagttcgactgctacaggaacgcgagggtggcggacgcgccggacgggagcccgggcccgagctcggccccggcggcggggccgaccaagatcacgccgcggcagaacgacggcagcggcagcgggtaccccggcgcggcgcccctgccgaggtctgccggctcgcgcaacgccgccgccgcgctgggactgggatgcctctacctgctgctggccgcagcgcttgtctgacaccgccggtgactggatcgttttcgtgtacagacatagatactgctcccgtttcggttcagagttcagatgcatagaaaatcattcgttgtaggctaatgggataggataaaaattttgctgatcgatgtgggtgatacgatgttactcagtggctgatggaagccatttctgaattctggaattctacgaacgaggaatataccaataaaagctattttttta

SEQ ID NO: 126871 - DNA, 293 bp, Zea Mays
atcgccagcaaaagcaactccaattcgcagacactgcgatcaaggagataaacatgcatgcatgcttcttcacgtttcaaacaacacaagaaaaaggaaaaaaaaaacatgcttcaagaaaaaggaaaaacatgcatgaaaaatgctgcctctatatagcttgcttgaccaatgaccatgtgtggagtgtacatgcacgcatgcatgtaccaaattctcacacactactcaacaagctagtagagaaacacggctactactatcgtgactcagttggatctatctatctatct

SEQ ID NO: 126872 - DNA, 744 bp, Zea Mays
atgcttgctatgctagaggttcaagcattaatgtctcttgcaagacagaaggtgatggaatctttctccactgaaaacaaggctttgatcactcgcatcttaaacatcaaggatgggaattggaataatcaaatgtcaagccctttgtatggtgcagctcacttcttgaaccctggaaagttctatgccctcctcaacaagactgatgaagttgaaaatgaagacatttgcacaaatgagatactgaaggattacattgatggtaaaatcccacactttgagctccctcctggcgtgacaggccctgaggtggactttgaacaaatcgctggatcagaaagtccaactacttcagcagctaatgaatcagttattgatgatctcgatgaagaggatgatgatgcagttgatcctgctgaatcagacatgagagatgtcctagatgaccttgaatcttttgacttgggtaatggagggaagatggtcgctagatttcaaaagaggcatgaggaggggatcaaaggttatgatccattagtgttggatgagtttgattggaataatgaatgggttaatgcatcatccaaacaaaccaatgaaattgcaggccatgatggccttacttgggatcatgttgacgatgttattggtgcatcaagccatcttcaagattgtagcctccccaggagagctcatggtcaaaccattgtactacacaagaagggtgcggcaagtggaggatga

SEQ ID NO: 126873 - DNA, 1503 bp, Zea Mays
aagagccataccaagtcaggtgctggcgggtggaatctacagtgggcgatgttgggccgatggtggacggatgacgtgtgggattgggtgcgtggcggatggaccgcgcgggcgattaggcgcgtggtggtctgacggatggacggcacagcgaatagcactggaggacggatgacggccatgctggcgagcagcggctgagcccccgcgtggccgaggcagcggttgggcagccatggcgaggaggtaagtgcacgggcgaggcggcacgttgaggcgagtccggcagagtcaaatgaactaggctgctcgatctaggtgcttatgcaggttggtctggatggaattcggatgcttgatcccaacactggtaggacactaagaatatatccccttgaaactgtaactagatgcgatgtattagattcctctatttttgccttttggtccaagagttcggtggatgttgaaggaaaaagaataaggctgaaatcaaacagctatacatccagcaccattcttgacactgtcacagctgcgactgtgcagttcaaggagatgggtgaaagcagcatttcaagaagtagagcaattgctgatgcatccaagcccgctgagcagcaaaatgagaggaagaaaaatttccttgattggaggaatttaatgaagcctattaatgaggagaaagatcactgggtcccagatgaagctgtcagcaagtgcacagcatgcgcagcagatttcagtgctttcaaccgcaggcatcactgtcgaaactgtggtgatattttctgcgataagtgcacccagggaagaactcctctgactacagatgcagatgctcaaccagttcgagtttgtgacagatgcatggctgaagtaacgcaaagacttaacaatgcaagggaagtggctaatcgacctattgttcacagccacgaggatcttgccaaaaaacttcaggaagccatggatataaataaaaggtcgtcttcaggaacaaggtcttcagatgtttctggcaagcggatgcgggaggtcgcatgcccaacctgcacggtccatcttcaggtcgaggttccagcttctggttcggagacgatagagtgcggcgtatgtcagaaccctttcctcgtcagcgcccgttgaaccgagttcagcggcttcaggcgccgtgcggcggagtcttctcggattcgcaagcgaagagtcggtcctgttcaatcgagcctggcgcttgaattccggctatccctgtctgtctgtaccctaattctgcacggaagtctgtcactgcaagttgttagtaagttatatggatgagtaatgagttgagtcgtttgcaagttgttagtacagttgtgagttgctttgagaagcaagcagggtcatgtgtttgtactgccaacaactaactttgctgttgttacatgagaaaaaaaatggtgtaaactatgctgttgctacatgagaaaattgcatggatccagtgtaattcctcgg

SEQ ID NO: 126874 - DNA, 596 bp, Zea Mays
gagtggatccatctctgtaacccatgccaaagatgctctcctcccttgtgcttttttaacaacaaacgtgttgttttaccccctcgacaggaacaaggtcttcagatgtttctggcaagcggatgcgggaggtcgcatgcccaacctgcacggtccatcttcaggtcgaggttccagcttctggttcggagacgatagagtgcggcgtatgtcagaaccctttcctcgtcagcgcccgttgaaccgagttcagcggcttcaggcgccgtgcggcggagtcttctcggattcgcaagcgaagagtcggtcctgttcaatcgagcctggcgcttgaattccggctatccctgtctgtctgtaccctaattctgcacggaagtctgtcactgcaagttgttagtaagttatatggatgagtaatgagttgagtcgtttgcaagttgttagtacagttgtgagttgctttgagaagcaagcagggtcatgtgtttgtactgccaacaactaactttgctgttgttacatgagaaaaaaaatggtgtaaactatgctgttgctacatgagaaaattgcatggatccagtgtaattcctcgg

SEQ ID NO: 126875 - DNA, 893 bp, Zea Mays
aacaatttgttgcggagagcccagtgctgtgctgtgcacgccaaccacaactgaaagggagagccgaagagggaagggggagaagcgaccgcgccgccaaaccctagccccgcgcaagcgaccgtgggggagctccactccgccgcgccgccccccgtccccgtttcgcgacatggccgattccccgcgcaggaggtaactacgcctgcctctctattcgtatatatatgggcgtcgtaaccctcggtagtggtgatgttaacttgtgagatctcagcttagttctgtggatgccgtttgatttcgttgtagggtagtatgggaaaacggagcatccatagagaagataataggatatgcgggagggaatgtgtggttgtgatttctgttgttctatttgtcatgttttgaggtaaacgatgaatagtgaggctcaccgtaccttgcttcttgtgcttatgagggcaacgatagctatgtgtttagacttcttgtgtgcatcttaagatctctagtatgagctcctgggttatcaatatggatgcaccaacttgcctgtttgggtttttctttatttactaaccctctttctcccaaacgtttctggtgtagcctcctatcggtcatgtttcttgcgatagcgtgtttgaatctggcacaacttacttactatctagaatgctcatgtttgtaatttgtgtcttggaatgaggttagttttatgtttgaatctgccgctgccatgtgcatgtttagtgcagcctcacacacctttgaccagaaacaatggtgtttgtcttgattctgctggcacaatttgcttgctatccaaagtgtgtggtctaataccttctgaccaaattcttaatacacttaatggcttaacttgttag

SEQ ID NO: 126876 - DNA, 939 bp, Zea Mays
aacaatttgttgcggagagcccagtgctgtgctgtgcacgccaaccacaactgaaagggagagccgaagagggaagggggagaagcgaccgcgccgccaaaccctagccccgcgcaagcgaccgtgggggagctccactccgccgcgccgccccccgtccccgtttcgcgacatggccgattccccgcgcaggaggtactcaaggtccccttcatacagcagggggcacccaaaagggaggtcaagatcacaatctccagctcggtctcagtctaggtcacctgtccctgatcctagatctcaggcgaggtcaagatctagaagccaagagagggaggaggatgctgttaaccgtgggaatactctgtatgtgactgggctctcttcgagggttactgaaagggatgttaaggattatttttctaagcatggaagggtggttggttgccatgttgttcttgaaccccatacacgtgtttcccgtggatttgcctttgtcagcatggacactgttgaagaagcggagcgttgcataaagtatcttaatggttctgtaatggaaggtcgaaacatcacagttgaaaaggtaattgtgtttacctctaccagggttgttgatgctaaataaagtgcagccacatatgtgcagagtgttgacctggaagtttttttggttattattcagaagatattgtgcaagctatgtccagcagtcaagatgctgagttcaccaattccagctttagctcatacggctcgatcagtggacagcccaaagggttaccatgcaccacaagattcacaacaacttaacatagcaaattttcaactaaacctgagcattcaccttcaacttccacatcaactaatcaacgagcattgccgacttgttagtcaagcatgtgtggtgccatgtgcggtagcaactttggatgcctg

SEQ ID NO: 126877 - DNA, 1836 bp, Zea Mays
aacaatttgttgcggagagcccagtgctgtgctgtgcacgccaaccacaactgaaagggagagccgaagagggaagggggagaagcgaccgcgccgccaaaccctagccccgcgcaagcgaccgtgggggagctccactccgccgcgccgccccccgtccccgtttcgcgacatggccgattccccgcgcaggaggtactcaaggtccccttcatacagcagggggcacccaaaagggaggtcaagatcacaatctccagctcggtctcagtctaggtcacctgtccctgatcctagatctcaggcgaggtcaagatctagaagccaagagagggaggaggatgctgttaaccgtgggaatactctgtatgtgactgggctctcttcgagggttactgaaagggatgttaaggattatttttctaagcatggaagggtggttggttgccatgttgttcttgaaccccatacacgtgtttcccgtggatttgcctttgtcagcatggacactgttgaagaagcggagcgttgcataaagtatcttaatggttctgtaatggaaggtcgaaacatcacagttgaaaagaagatattgtgcaagctatgtccagcagtcaagatgctgagttcaccaattccagctttagctcatacggctcgatcagtggacagcccaaagggttaccatgcaccacaagattcacaacaacttaacatagcaaattttcaactaaacctgagcattcaccttcaacttccacatcaactaatcaacgagcattgccgacttgttagtcaagcatgtgtggtgccatgtgcggtagcaactttggatgcctgctagttgaagtttgggctcttcgttacttatttccttcattggtgtccgttattgcagggcgtgtattcattgattgtaagaggaacttgtaattacttacatgatcctgaacgatactacttttaactttattaccgttccttggtagtctgactgaagtttttctcttttcattgcttcagtcacgccgtggtcgcccaaggacaccaactcctggaagctatcttggccatcggtacgagcgtagggagcgtgggaggttccatagaggctatggtggtgggcgtgatgagtattacggcaatggcggcggcgggtatggctaccgcaggtctccgcctcccatgtactcttcctacagggagagtcgggattattatccctcctacaaggacagccgggactaccctccctacagggacggcagggactactctcctccccacagggaccctcgggactactacgaaagcaggggtggccggggctactcgccgcctccttatggtggtggtaggtcaaggagggaccgatcggtttcaccgtatcggatgccagaaaggggctacggtggaggccgccgggtgggtggcggcggatatgacaggtaatgtagaggttttctctccgccggtggctgctgctgcgatggctgcgtatggctctcgcagctctggtgatatggttagactgctgcctgtagctgtgtacttggtgtactgtcttcccgcgtatgtggatttggtgaaaacttctgtatgagcaccttttatttgtagcctgcaatgattccttcttaagacagactggggactttggctccattgtgtgggatcatcatggccgtacagtgtctacgctgctatcatttgaggctgccataattcgaatccttgaaaggcgagaaggcccggcccgggaatattcacaacaatgaattcaccttgacaggttggtagcaagtactactcctatataaaaaggaaaaaagaaaa

SEQ ID NO: 126878 - DNA, 1729 bp, Zea Mays
aacaatttgttgcggagagcccagtgctgtgctgtgcacgccaaccacaactgaaagggagagccgaagagggaagggggagaagcgaccgcgccgccaaaccctagccccgcgcaagcgaccgtgggggagctccactccgccgcgccgccccccgtccccgtttcgcgacatggccgattccccgcgcaggaggtactcaaggtccccttcatacagcagggggcacccaaaagggaggtcaagatcacaatctccagctcggtctcagtctaggtcacctgtccctgatcctagatctcaggcgaggtcaagatctagaagccaagagagggaggaggatgctgttaaccgtgggaatactctgtatgtgactgggctctcttcgagggttactgaaagggatgttaaggattatttttctaagcatggaagggtggttggttgccatgttgttcttgaaccccatacacgtgtttcccgtggatttgcctttgtcagcatggacactgttgaagaagcggagcgttgcataaagtatcttaatggttctgtaatggaaggtcgaaacatcacagttgaaaagaagatattgtgcaagctatgtccagcagtcaagatgctgagttcaccaattccagctttagctcatacggctcgatcagtggacagcccaaagggttaccatgcaccacaagattcacaacaacttaacatagcaaattttcaactaaacctgagcattcaccttcaacttccacatcaactaatcaacgagcattgccgacttgttagtcaagcatgtgtggtgccatgtgcggtagcaactttggatgcctgctagttgaagtttgggctcttcgttacttatttccttcattggtgtccgttattgcagggcgtgtattcattgatttcacgccgtggtcgcccaaggacaccaactcctggaagctatcttggccatcggtacgagcgtagggagcgtgggaggttccatagaggctatggtggtgggcgtgatgagtattacggcaatggcggcggcgggtatggctaccgcaggtctccgcctcccatgtactcttcctacagggagagtcgggattattatccctcctacaaggacagccgggactaccctccctacagggacggcagggactactctcctccccacagggaccctcgggactactacgaaagcaggggtggccggggctactcgccgcctccttatggtggtggtaggtcaaggagggaccgatcggtttcaccgtatcggatgccagaaaggggctacggtggaggccgccgggtgggtggcggcggatatgacaggtaatgtagaggttttctctccgccggtggctgctgctgcgatggctgcgtatggctctcgcagctctggtgatatggttagactgctgcctgtagctgtgtacttggtgtactgtcttcccgcgtatgtggatttggtgaaaacttctgtatgagcaccttttatttgtagcctgcaatgattccttcttaagacagactggggactttggctccattgtgtgggatcatcatggccgtacagtgtctacgctgctatcatttgaggctgccataattcgaatccttgaaaggcgagaaggcccggcccgggaatattcacaacaatgaattcaccttgacaggttggtagcaagtactactcctatataaaaaggaaaaaagaaaa

SEQ ID NO: 126879 - DNA, 1399 bp, Zea Mays
aacaatttgttgcggagagcccagtgctgtgctgtgcacgccaaccacaactgaaagggagagccgaagagggaagggggagaagcgaccgcgccgccaaaccctagccccgcgcaagcgaccgtgggggagctccactccgccgcgccgccccccgtccccgtttcgcgacatggccgattccccgcgcaggaggtactcaaggtccccttcatacagcagggggcacccaaaagggaggtcaagatcacaatctccagctcggtctcagtctaggtcacctgtccctgatcctagatctcaggcgaggtcaagatctagaagccaagagagggaggaggatgctgttaaccgtgggaatactctgtatgtgactgggctctcttcgagggttactgaaagggatgttaaggattatttttctaagcatggaagggtggttggttgccatgttgttcttgaaccccatacacgtgtttcccgtggatttgcctttgtcagcatggacactgttgaagaagcggagcgttgcataaagtatcttaatggttctgtaatggaaggtcgaaacatcacagttgaaaagtcacgccgtggtcgcccaaggacaccaactcctggaagctatcttggccatcggtacgagcgtagggagcgtgggaggttccatagaggctatggtggtgggcgtgatgagtattacggcaatggcggcggcgggtatggctaccgcaggtctccgcctcccatgtactcttcctacagggagagtcgggattattatccctcctacaaggacagccgggactaccctccctacagggacggcagggactactctcctccccacagggaccctcgggactactacgaaagcaggggtggccggggctactcgccgcctccttatggtggtggtaggtcaaggagggaccgatcggtttcaccgtatcggatgccagaaaggggctacggtggaggccgccgggtgggtggcggcggatatgacaggtaatgtagaggttttctctccgccggtggctgctgctgcgatggctgcgtatggctctcgcagctctggtgatatggttagactgctgcctgtagctgtgtacttggtgtactgtcttcccgcgtatgtggatttggtgaaaacttctgtatgagcaccttttatttgtagcctgcaatgattccttcttaagacagactggggactttggctccattgtgtgggatcatcatggccgtacagtgtctacgctgctatcatttgaggctgccataattcgaatccttgaaaggcgagaaggcccggcccgggaatattcacaacaatgaattcaccttgacaggttggtagcaagtactactcctatataaaaaggaaaaaagaaaa

SEQ ID NO: 126880 - DNA, 1287 bp, Zea Mays
ctcgtccgttgattccgttgatccccgcactgacgcttcgacgctcgctctatgtcttcgcaggccgattccccgcgcaggaggtactcaaggtccccttcatacagcagggggcacccaaaagggaggtcaagatcacaatctccagctcggtctcagtctaggtcacctgtccctgatcctagatctcaggcgaggtcaagatctagaagccaagagagggaggaggatgctgttaaccgtgggaatactctgtatgtgactgggctctcttcgagggttactgaaagggatgttaaggattatttttctaagcatggaagggtggttggttgccatgttgttcttgaaccccatacacgtgtttcccgtggatttgcctttgtcagcatggacactgttgaagaagcggagcgttgcataaagtatcttaatggttctgtaatggaaggtcgaaacatcacagttgaaaagtcacgccgtggtcgcccaaggacaccaactcctggaagctatcttggccatcggtacgagcgtagggagcgtgggaggttccatagaggctatggtggtgggcgtgatgagtattacggcaatggcggcggcgggtatggctaccgcaggtctccgcctcccatgtactcttcctacagggagagtcgggattattatccctcctacaaggacagccgggactaccctccctacagggacggcagggactactctcctccccacagggaccctcgggactactacgaaagcaggggtggccggggctactcgccgcctccttatggtggtggtaggtcaaggagggaccgatcggtttcaccgtatcggatgccagaaaggggctacggtggaggccgccgggtgggtggcggcggatatgacaggtaatgtagaggttttctctccgccggtggctgctgctgcgatggctgcgtatggctctcgcagctctggtgatatggttagactgctgcctgtagctgtgtacttggtgtactgtcttcccgcgtatgtggatttggtgaaaacttctgtatgagcaccttttatttgtagcctgcaatgattccttcttaagacagactggggactttggctccattgtgtgggatcatcatggccgtacagtgtctacgctgctatcatttgaggctgccataattcgaatccttgaaaggcgagaaggcccggcccgggaatattcacaacaatgaattcaccttgacaggttggtagcaagtactactcctatataaaaaggaaaaaagaaaa

SEQ ID NO: 126881 - DNA, 1547 bp, Zea Mays
ggggaataattgtcccccttccattccccatatattaacccccctcccctcaccctctcgcccacccatggcactggcatccccctctctccctctccccaccacaccacctccctcctcacaagccatagccgccgcctctttctgtgcttgccctctcgccatcttcgagtacgacgagaaggcggtgatggagctggacgagcaggccttcctggaggagatcctctccctgcggagggacgcctgggactgcaatgccatgggggacttcttcgccccggccgccatggactgcaccttccaggaccgccaccaccaggcgcccaccgtcagcgtcctccccaccttcaccgcctcctacgcccagccgcagccgcagccggcggcggcgcccggcttcgactgcctcagcgaggtctacggcgccgccgcgttcggcgggcccaatgctggtgactacggcggcgagatggggttccttgacgtcgtcgagcccaaggcggcgtcggcggcactggtggacggcgccgcgggcctcggggcctgcaaggtggagcccggcctggcggagagcggcggcgcgttcggcgctggcgctggcgctgcgccgccgccggccctggcgtccaagaagaagagggtcgaggggatgccgtccaagaacctgatggccgagcgccgccgccgcaagcgcctcaacgaccgcctctccatgctacgctccgtcgtgcccaagatcagcaagatggaccggacgtcgatcctgggcgacacgatcgactacatgaaggagctgctggagaggatcaagctgctgcaggaagagatcgggcagcagcaggaggaggcgccaggcatgctcagcgtcttccgggagctcaaccccaacgagatggtggccaggaacacccccaagttcgacgtggagcggaaggagggcggcgacacccgggtggagatctactgcgccgccaagccggggctgctgctgtccacggtgagcacgctggacacgctagggctcgacatccagcagtgcgtcgtcagctgcttcaacgacttcggcatgcacgcctcctgctccgaggtagtgaccaccgcctgtccattggttcgctgccatacacacactccttttgtcctcggattggatgcaaggcaatgcgacgcaacaagtttgctccttcaatgttatcgcagatgcagagggaaatgatcagcgccgacgcgataaagcaggagctgttcaagaacgctggctatggcggaggctgcttgtagaggggcatgtcatcatggcatgggaggaagaagaagaagaggcagcaataaattaatcttaagcagctgtgggagcagcagtagtagtatcagttcaggtccagtagcggaaaaggcaggcagggcaaagatttgggaggcctttttgcaatccatctcccccatcataacccacttcgatctatccatgttagcagtacgtgtccgtccgtcctatagcatcatgcaggatgcaaaggttgccctgtgctgctgaatctttc

SEQ ID NO: 126882 - DNA, 1727 bp, Zea Mays
ggggaataattgtcccccttccattccccatatattaacccccctcccctcaccctctcgcccacccatggcactggcatccccctctctccctctccccaccacaccacctccctcctcacaagccatagccgccgcctctttctgtgcttgccctctcgccatcttcgagtacgacgagaaggcggtgatggagctggacgagcaggccttcctggaggagatcctctccctgcggagggacgcctgggactgcaatgccatgggggacttcttcgccccggccgccatggactgcaccttccaggaccgccaccaccaggcgcccaccgtcagcgtcctccccaccttcaccgcctcctacgcccagccgcagccgcagccggcggcggcgcccggcttcgactgcctcagcgaggtctacggcgccgccgcgttcggcgggcccaatgctggtgactacggcggcgagatggggttccttgacgtcgtcgagcccaaggcggcgtcggcggcactggtggacggcgccgcgggcctcggggcctgcaaggtggagcccggcctggcggagagcggcggcgcgttcggcgctggcgctggcgctgcgccgccgccggccctggcgtccaagaagaagagggtcgaggggatgccgtccaagaacctgatggccgagcgccgccgccgcaagcgcctcaacgaccgcctctccatgctacgctccgtcgtgcccaagatcagcaagatggaccggacgtcgatcctgggcgacacgatcgactacatgaaggagctgctggagaggatcaagctgctgcaggaagagatcgggcagcagcaggaggaggcgccaggcatgctcagcgtcttccgggagctcaaccccaacgagatggtggccaggaacacccccaaggtacgtgaagaagctgctgatgctgctgatgcgattgggggaaatgtgagggctgagatgctgctgatggctcctgcagttcgacgtggagcggaaggagggcggcgacacccgggtggagatctactgcgccgccaagccggggctgctgctgtccacggtgagcacgctggacacgctagggctcgacatccagcagtgcgtcgtcagctgcttcaacgacttcggcatgcacgcctcctgctccgaggtagtgaccaccgcctgtccattggttcgctgccatacacacactccttttgtcctcggattggatgcaaggcaatgcgacgcaacaagtttgctccttcaatgttatcgcagatgcagagggaaatgatcagcgccgacgcgataaagcaggagctgttcaagaacgctggctatggcggaggctgcttgtagaggggcatgtcatcatggcatgggaggaagaagaagaagaggcagcaataaattaatcttaagcagctgtgggagcagcagtagtagtatcagttcaggtccagtagcggaaaaggcaggcagggcaaagatttgggaggcctttttgcaatccatctcccccatcataacccacttcgatctatccatgttagcagtacgtgtccgtccgtcctatagcatcatgcaggatgcaaaggttgccctgtgctgctgaatctttctcctatatactattctatttaattaacaagagcaaagctcgctgcctttcttctgatgattgaattgatcaggggtgcatctggcgactacctctcttctt

SEQ ID NO: 126883 - DNA, 1596 bp, Zea Mays
ggggaataattgtcccccttccattccccatatattaacccccctcccctcaccctctcgcccacccatggcactggcatccccctctctccctctccccaccacaccacctccctcctcacaagccatagccgccgcctctttctgtgcttgccctctcgccatcttcgagtacgacgagaaggcggtgatggagctggacgagcaggccttcctggaggagatcctctccctgcggagggacgcctgggactgcaatgccatgggggacttcttcgccccggccgccatggactgcaccttccaggaccgccaccaccaggcgcccaccgtcagcgtcctccccaccttcaccgcctcctacgcccagccgcagccgcagccggcggcggcgcccggcttcgactgcctcagcgaggtctacggcgccgccgcgttcggcgggcccaatgctggtgactacggcggcgagatggggttccttgacgtcgtcgagcccaaggcggcgtcggcggcactggtggacggcgccgcgggcctcggggcctgcaaggtggagcccggcctggcggagagcggcggcgcgttcggcgctggcgctggcgctgcgccgccgccggccctggcgtccaagaagaagagggtcgaggggatgccgtccaagaacctgatggccgagcgccgccgccgcaagcgcctcaacgaccgcctctccatgctacgctccgtcgtgcccaagatcagcaagatggaccggacgtcgatcctgggcgacacgatcgactacatgaaggagctgctggagaggatcaagctgctgcaggaagagatcgggcagcagcaggaggaggcgccaggcatgctcagcgtcttccgggagctcaaccccaacgagatggtggccaggaacacccccaagttcgacgtggagcggaaggagggcggcgacacccgggtggagatctactgcgccgccaagccggggctgctgctgtccacggtgagcacgctggacacgctagggctcgacatccagcagtgcgtcgtcagctgcttcaacgacttcggcatgcacgcctcctgctccgagatgcagagggaaatgatcagcgccgacgcgataaagcaggagctgttcaagaacgctggctatggcggaggctgcttgtagaggggcatgtcatcatggcatgggaggaagaagaagaagaggcagcaataaattaatcttaagcagctgtgggagcagcagtagtagtatcagttcaggtccagtagcggaaaaggcaggcagggcaaagatttgggaggcctttttgcaatccatctcccccatcataacccacttcgatctatccatgttagcagtacgtgtccgtccgtcctatagcatcatgcaggatgcaaaggttgccctgtgctgctgaatctttctcctatatactattctatttaattaacaagagcaaagctcgctgcctttcttctgatgattgaattgatcaggggtgcatctggcgactacctctcttcttatatgtcattctaaagtttttagatcctaattttatcaaggagctaaattatcccaggttt

SEQ ID NO: 126884 - DNA, 1204 bp, Zea Mays
ggcatccccctctctccctctccccaccacaccacctccctcctcacaagccatagccgccgcctctttctgtgcttgccctctcgccatcttcgagtacgacgagaaggcggtgatggagctggacgagcaggccttcctggaggagatcctctccctgcggagggacgcctgggactgcaatgccatgggggacttcttcgccccggccgccatggactgcaccttccaggaccgccaccaccaggcgcccaccgtcagcgtcctccccaccttcaccgcctcctacgcccagccgcaagcgcctcaacgaccgcctctccatgctacgctccgtcgtgcccaagatcagcaagatggaccggacgtcgatcctgggcgacacgatcgactacatgaaggagctgctggagaggatcaagctgctgcaggaagagatcgggcagcagcaggaggaggcgccaggcatgctcagcgtcttccgggagctcaaccccaacgagatggtggccaggaacacccccaagttcgacgtggagcggaaggagggcggcgacacccgggtggagatctactgcgccgccaagccggggctgctgctgtccacggtgagcacgctggacacgctagggctcgacatccagcagtgcgtcgtcagctgcttcaacgacttcggcatgcacgcctcctgctccgagatgcagagggaaatgatcagcgccgacgcgataaagcaggagctgttcaagaacgctggctatggcggaggctgcttgtagaggggcatgtcatcatggcatgggaggaagaagaagaagaggcagcaataaattaatcttaagcagctgtgggagcagcagtagtagtatcagttcaggtccagtagcggaaaaggcaggcagggcaaagatttgggaggcctttttgcaatccatctcccccatcataacccacttcgatctatccatgttagcagtacgtgtccgtccgtcctatagcatcatgcaggatgcaaaggttgccctgtgctgctgaatctttctcctatatactattctatttaattaacaagagcaaagctcgctgcctttcttctgatgattgaattgatcaggggtgcatctggcgactacctctcttcttatatgtcattctaaagtttttagatcctaattttatcaaggagctaaattatcccaggttt

SEQ ID NO: 126885 - DNA, 1204 bp, Zea Mays
ggcatccccctctctccctctccccaccacaccacctccctcctcacaagccatagccgccgcctctttctgtgcttgccctctcgccatcttcgagtacgacgagaaggcggtgatggagctggacgagcaggccttcctggaggagatcctctccctgcggagggacgcctgggactgcaatgccatgggggacttcttcgccccggccgccatggactgcaccttccaggaccgccaccaccaggcgcccaccgtcagcgtcctccccaccttcaccgcctcctacgcccagccgcaggcgcctcaacgaccgcctctccatgctacgctccgtcgtgcccaagatcagcaagatggaccggacgtcgatcctgggcgacacgatcgactacatgaaggagctgctggagaggatcaagctgctgcaggaagagatcgggcagcagcaggaggaggcgccaggcatgctcagcgtcttccgggagctcaaccccaacgagatggtggccaggaacacccccaagttcgacgtggagcggaaggagggcggcgacacccgggtggagatctactgcgccgccaagccggggctgctgctgtccacggtgagcacgctggacacgctagggctcgacatccagcagtgcgtcgtcagctgcttcaacgacttcggcatgcacgcctcctgctccgagatgcagagggaaatgatcagcgccgacgcgataaagcaggagctgttcaagaacgctggctatggcggaggctgcttgtagaggggcatgtcatcatggcatgggaggaagaagaagaagaggcagcaataaattaatcttaagcagctgtgggagcagcagtagtagtatcagttcaggtccagtagcggaaaaggcaggcagggcaaagatttgggaggcctttttgcaatccatctcccccatcataacccacttcgatctatccatgttagcagtacgtgtccgtccgtcctatagcatcatgcaggatgcaaaggttgccctgtgctgctgaatctttctcctatatactattctatttaattaacaagagcaaagctcgctgcctttcttctgatgattgaattgatcaggggtgcatctggcgactacctctcttcttatatgtcattctaaagtttttagatcctaattttatcaaggagctaaattatcccaggttt

SEQ ID NO: 126886 - DNA, 1164 bp, Zea Mays
agccaagtcgactccaagcgcgggctaatccgcaggataatgctgatggacgaacctgcctgatcaagtgctaggacaaggatgatcgccaagtggtcgccacctaacaacactaacctagtgttacccagacaagccccggtgcatgcaaccccttccttgtgtttttaaattatttttacacactttaagtctagtgaatgtgcattaggtttataggagttgcttggaaacccttggatgcattgccttccttgaaatccatacctttatagatacttttggtgaagtatcaaaatatgatttataaaaatgcttagccctgctcagatcttgtggatagaggttgtctttgcgttaaggccttgcttaggggttatcctgaggaaagatggcttctacctgcaagaatattttcattgagagcgtggtgggatcttactgcaaagttccataaaatgctctttttgtcctaaggaaaacaaagaatcctaaggatgaaagtacttaaatcggaacttgggctaggaacaggtgatgttctacccaggttgattaaggattggatgcgtatgtaggcttgatgatcgaggaccctttaactggtcacatgcctcgtcatgggtaagccttgcctcgggcagactaaggccggaataagacaacacgagatgggcgtggagcggtggcgagagtagcgtgtaccctccgtggcaagaggctggacggtggtgtatctgtgctctcggtctgcgtgaacctgatccggtcttaagaaccccggtggcaggttgacatatgcaagggttaagtgctacatatgtcgtgtgattggagatcctcagctgagtataatcgattcggatcgccgtaccttcgcggttatgaagacttggtcactgccctacacgtagcattccactaaagacgatgggctcttgttaagaaattggctagtgcaggaccagtgattgaactagggtagaaagaactctagagcaagtaattttacttaacttgacaaaataaaaactggatttttaaggatccactttagtaagcatttctgcaaaacagagtctttgaatattgaaaagccttaccttgactcccttatttccagcatactcttgagagtcttttctttagtcgggtaagacttgc

SEQ ID NO: 126887 - DNA, 279 bp, Zea Mays
atgtacaggcttggacagaaaacgctgggcaagctccaaccacacttacgacgccggcgaggcaggctgaaatcaccgtcactggacggtaggcagctcgttctccctccaggtcgagaatccgccggcgatgtcggtgacagcggtgaagccagcggagcagagctcggtcgccgccatgagagacctcttgccgctttggcagcccacgatgatctcgtcgtccttcccgaaagccctcgacacttgctcgagaaagtgagcgtttttcgtcattcc

SEQ ID NO: 126888 - DNA, 116 bp, Zea Mays
aataatatatgtaattgtgtagttgacaccttttcttttaaagttattttggtgcggaaatatttgacccacacggttacattagagccaaaacaaggattctacatgctctatag

SEQ ID NO: 126889 - DNA, 324 bp, Zea Mays
atgtgtgtgtgttcttgccaaaattcacaggttcttatgccatggaaattcaacggatgttacactcttttcgtaatagatcatgttaaaaagcacgtgacttttatcgactttacaccaacccaagattggtataagcacatgccatacaagaggctgaatatcagctacctcgttctacaagatatgaccatgtgggggaatgacagacaaatggaatttattagggatgcaaagattcttcgaaggaactttatgattgatccgttaagttatgaggacaattcgtgccgatatgtcatccctgcaaacatacaacaatga

SEQ ID NO: 126890 - DNA, 1441 bp, Zea Mays
cactccgattccttagtcatcaaacccgcccttacagtcttatccatcgcggcctcgccgtccagcagctagctacgacctagctctgggcctctggctctgtgcctcgcccgagctgcagctccactctccggtgcaccatggccgtcctgacgaaggtgcttctccgtctcttcttcaccactggtggcctcatcgtcttcctgttgtttcccgcgtcctgccttgctcgtcctcctcattccagcagcaactacaactacaactactactgcgactggtgccctcgccgttccaccgcctcccccgacctcgacgcgtcgttgctgcgttcttgtggaactagtagagacggcgacgacggtggcttcgactgcgggtacggggctgcggagcagctggacggaggtggagctccccacgtcgccgccgcgggcgccgactccttccgcgccggtgccggctgcggcgcctgctaccagttgaggtgcagagaccggagggtgtgcggcgccggcgccgtcaaggtcgtcgtggtagccggcttggccaaccggacggggttcgtgctcacccgagaggctttcgctgcgatgatggccaggccgcgcgtttcgtccgatgaccaactgctgcccggcttgggtggcaatatggttgaggtcgacttcaggagaataccttgcgagtacaagaacaggaacctgtctgtacgcatcgacgaggaagggagccggcacccggcgcacctggccatcaccttcctgtaccagggcgggcagacggacatcgcggccgtcgagctctcgcacgcgcacgcgcagccgccgtcgtggcggcccatggcgcccttgcgcaggcgcggcatcgtgacgtggcgcacctcaagcgcgccggccgggccgctgcagctccgcctcgtcgtcacggccggcgtcggcggcaagtggctgcgggccggcggggacgtgctgccggctgactggcgacctgggcaggtgcacgacacggggctccgggtccgcgacgtcgccctgagctcctgcgcccgctcctgccgcggcgccgctacagccggcgccagcgaggagctcaggtagagtagattagatgtaggcatggcatggcatggcatacaatggcattgggctggaggcgagcgagattagcttgctgcttgagtgcccatgaaggatgatcgtgtttgtccattgaggaaaattaaaagcaaaccagcagagagctgatctctgatgatctgacgcagtccatgggaatggaagcaaagttggttttttgctgactaatggacggtaaaatgagcgaccgatggatctgtcatctgattcacacatgcatggacgcattgcataaattttttatgctaattaagtttaaccgaattgtcttattcaaaagttttacacaaaaaaatgaaaaa

SEQ ID NO: 126891 - DNA, 1719 bp, Zea Mays
atggctgacggcagagaagaagaaactggcgaggatatttctgcgtcattgcacagagctgaatcagcagcgcccacaccaagacttgtatctccaaactgtgctgcgagtccacatataaatatagtaacaccacctgcagaattaagagcgccaggggtcaatgatggcaatacaacagtaattgaaacaatggtagcagcaaatcaaatgatgcctatgaggaccattagtgatcatgaacaagatacacctaatatcctccgaagtcatcctgaaagtattgatccaaccatggtgcctaggatcggtatgacatttggaaatgtcgatgaggcatacaatttttacagtcgttacgcatatgaggttggttttccacttaaaagtataggaagagaaagaactttagacagcgaaggaaaaatattgagtattttttggtctcatgctagtcagcaaggaaagtatgttgattttggggatgcagttacctttgatacatctcataagactaatttgtatggaaaacccctaggaatgtttgttggtgcaaaccaacacctacaatgcacagtgtttgggttctcattgttgggagatgaaactgttgaaacattcgagtgggtgtttaatgcattcaagacatgcatggggactaaaggaccaagagtaatgttgacaggaccgtacccctttctgttgaccgcattcactttcccatctcccgcccaagatgaccaaaatttccctcctaccttatcctctcggctgctcacctccgcgtccgcccccaccaccacgcgcccgcccccaaaacccccacaaaccctagccgtcgccagcaaggaatggccgccctcctgcggctcgccgcaactcaacataaagaccctgacgcaggcgctggcgaaggcgtcggcggtgatagagaagacggtgtccacgacgatgcaagaggtgacgggcccgcgcccgttgcaggactacgagctgctggatcaggccgggtccggcgggccggggctcgcatggcggatctacacggcgcgaccacgggatggcgccccctcggcgccctaccccgtcgtctccgtctgggtgctggacaagcgcgccctcgttgaggcgcgggcgcgggcggggatgtcgaaggcggccgaggatgcgtccctcgacctcgtccgcgccgacgcggcgcggctcgtgcgcttgcgccacccggccgcccaacccagcggccgcttccccatcgccctcgtcatcgctgaggctgtggaggagcaatacagtggcatgcttctgtcggcctacaaggagatgaggctgctactcttggaatttctctcgattgctttaaaggaaggtgtagaactcgagacatcattaaattggggtgatgaactatatgatggtgaatcaaatgaacttcagagtattggccttcagtcaggagatgcctactcaccgcctgaaaattggtgtgcagaacgtttagggagtcagcgacctggcaatctccctctgcacgaagctgaaagagagaaagctgctaggaagcaggaagagttgcaagcacaactacaagctcaacaggccacacttgaagaaaaccaaagtttgctgcgccaggcccaagaggaagtgaaggggatgcataccaagtttgaagagaccaatgcactgctacgagctgtcctaaaacttcagaaagattga

SEQ ID NO: 126892 - DNA, 896 bp, Zea Mays
atggcgacggacatggatggatttgatcaaacagtgaatgtgaaggttgtaatggcaactaatagggcagatactctagatcctactttgttgcggctaggtagacttgacaggaaagttgagttccctcttcctgattggtggcataagaggcttgtgttccaaatgatgaaatttccatggattgcttcagatgttttcctgccactgtcattatcatttggcaaaaggatagcaaataccatgttgctaactttccccacagtcccagtaatatataactccaaaggtagctcacatttggatattatcgccattgcagactggatttcaggccggggtgttaggtctgttgctgtgtttagccataggttccaaacacttgctcagataagactacaaaaacaatcgaagcagttagcagagtggaacactgttgccttctcatctaaacttgcagctactaaacacaaagaggacaatgtcgagtgccctatcactcgactggttggcacaccccgctggaagttttttacttccaaaatcatgaagattatatgtgatcttgacaagacccctggacctggccgtcaggtgaagtacgacaatttggagtttaggaatgctgctgaaactacgtatgctgatgggcggttgcttggcaccccaaatgaacaggtgtggccaggtgttggcaagttgctcaattagtatgtcggtggaagccgacaaagccactcttgtgcccagtcttgacactgatggtcactactctttcaatagtgaatcttgcagcgtctgaagtactcttaattttgtgcaatgtatgcaactactaacctttcagagaaacgctaagatattgatgtcaatgataacataagttgttcgtgtaa

SEQ ID NO: 126893 - DNA, 1096 bp, Zea Mays
agagaaagagagacgaacgcgcacgagctagctagctagctcgctcgatcggcagagtcatggcgcccagcttcgcccgctccatctccttcccactcagcccgtccaggtcatcaacgtcgtcgtcgggcaccaagccccgcgcgggggcggcggcggcgggctccaccgccgcggcgtaccacgcgcgctccgtcagcctgccgtgccgctcgcacccgatcctcgcgcacctccacgcgcacatcggcgccgtgcgcgcctgggcacaagacccgccggccacctccgcccccggcgccgccgcgggcctggcgcgcgtggacgcgctccacggcgcgctcgccgacctgctcggcctccccgaggcgcgggccgcgctgtcgctctccgccaccggcgaccgcctcctggacgccttcctccgcctggccgacgcgcacggcagcttccaggaggccgtggtggagctgaagcgggacgtggccgaggcgctggccgccgcgcgccgccgcgacggcgcgcgcctcgcgtccgcgctcaggtcgcagcggaaggccgccaaggacctcgcccggctcgccgcctgcgcggcatccggcggcggcaggccctcgcgcctcggcctcagcctcggcctcggcggcgcggcggaggtcgaggtggccgggctgctggccgaggccgccgctgccacggccgccgcgtcggccgcgctgttcggcgccgtcgccgccatgtccgcgtcggcctccgcgtgctcctgcaagaggactgcggcgctcgtgtgcctcaccaagaaggtgccggaggaggagaaggagacggcggcgctcgtggagaggctggaggagctggaggagtgcatcgacggcctggaggccggcagcgacaaagtgttcaggagcctcgtgcagaccagggttgcgctgctcaacatacacacccacatcgtctagctccagagtccagactccaatctactaattagtagttaagcatatgcatgctgtttacttgttgattagcagtcgtcgaaaaatgaagatgcatgagtgtaactgtaattctgtaaatacgtgagcttttttgtaca

SEQ ID NO: 126894 - DNA, 198 bp, Zea Mays
atggctccgacgacgacgacgaccgtcccgccgccggcgagctcgaggccggcgccactagcggcggccgggcacgtgcggtcggcgagcgtgccatgccacacgcacccgctgctggcgcacgtggacgaccagctgctggcgctgcggtcgtggacgtccaggccggggcccaagtacccgctgtcgctggcgcac

SEQ ID NO: 126895 - DNA, 146 bp, Zea Mays
catcctgcacactagggtcgcactcctcaacatccgcacccagacatgctgatcgttttggacatccatcaaaaccacactccataatgtcaccaaaatgcaagtgtacatacatattattggatgaaaaaaaggctctcttgttt

SEQ ID NO: 126896 - DNA, 1510 bp, Zea Mays
tccagtgcggtctgctcctatttgggctgggccattaggaataggaggaggcaggtagaggcagcccagaattttattaggtaggtggctatgtgaacgggccggtttataggcccggcttataacgggccgtgctcgggccagcccaacgggctcaagttgctgtcgatcccggcacgctgtacgggccgggctaagcccgggcccacttcaacccgtgccgtgtcgggctcgtgccgtgctaataaaccgtgcttcgtgtcgggctaacgggccacacgtgctttctgtacatctatacctccagtcctatataaggactcgatgcagaacacagtctcagcactcagaccaccaccagcagttctgagctagctatggcgatgatgatgagagcattggcagcagcggccatcctggccacggcgtttgccgtgtcggcacgagccgagcccccgcagtgcggcgccaactccaccacggcgctctgcccctactgcctgtgctgcagcaaatggggcttctgcggcagcaccgaagcctactgcggcaacggctgccagagccagtgcgaccgctgcaacgccaccgtcgcgtccatcgtcacgcgggagctcttcgacgagctgctgctgcaccgcaacgacctcaggtgccccgcccagggcttctacacctacgactcgttcatcgccgcggcgggcgccgacgcgtccgacggcttcggcaccacgggcgccgtcgacatccggaagcgcgaggtcgccgcgttcctggcggagccggcgcaccggacctcgggcggctgggacggcgcgcccaacggcacctacgcctggggcttctgctacaagccggccggcgcccagaacgtcacggaccccgtcgccttcttcgagacggccatcgcgagctggatgacggcgtcggcgcgcccgcccaagccgtcgtgccacgacgtcgtcaccgagcagtggaccccctcggacgccgacaaggccgcggggaggctgcggggcttcggcgtcatcgccaacatcatcaacggcgacgccgagtgcggccgcggccccgacgccggtggccaggaccggatcggcttctacaagcgcttctgcgacatccttggcgtcagctacggcgacaacttggactgcttcgaccagaagcccttcggcgctgccaccgccgccgccttagctgaaactaccagcggcccgcgtcacgctgacgcgtaaaagaataatgcatgcatgggcaccgcacagggcacaaatcaataacagctctcttttaaataatctgcatgcttattcgcttgcataagcatgcacacgtagtagatcgtgcatgtgtagggcgagcatgtttactttcatcccgggcggccggggttgtgtcgtcgtgcgagttgccgtgaagatgtactatgcctcatgcatgttttctatgccatatattatataaataaatgcataaaaaaactgagctgcaacgatggcagcgccaa

SEQ ID NO: 126897 - DNA, 2151 bp, Zea Mays
cctcctccccctcccacccccacccccacccctggccccccgagcggcggtggcgtggcgtccattatcacagaagatctcttcgagaggatgctgaagcaccgcaacgaacctgactgcaaagctcggggcttctacacgtacgacgccttcatcacggcggcggacgcgttccgggcttcggcaccacgggcagcacggaggtccagaagcgcgagctcgccgcgttcttggggcagacggggcatgagaccacgggcggctggccgaacgcgcccgacggcgccttcacctggggctactgctacaaggaggagaacggcgccaccgccgactactgcgacatgacgggcgagtacgcccagtggccgtgcgtcgccggcaagaagtacttcggccgcgggcccatccagctctcctacaactacaactacgggccggccggggaggacgcgaccatcgcccaggacctgctgagcaacccggagctggtggcgtcggacgccgtcatctccttcaagacggccatctggttctggatgacggcgcagccgcccaagccgtcgtgccacgacgtggccaccgagcagtggaccccctcggccgccgacaaggccgcggggaggcttccgggctacggcgtcatcaccaacatcatcaacggcatcgagtgcggcaaaggctacaacgagaaggtggccaaccggaccttcttctacaccagctactgcgacatccttggcatcagctacggcgacaacttggactgctacaaccagaggcccttcaacagcgcatcccttgctggaaccgctgctcacgctgaagcgtaaataattaaactaaattaagcgatgggggcgataataatatgttgtgatgggactatgggagtcgatcagatgagctgtgcagaatccgtgctatatcggatttgcattgctcatggaataaatcaaatcaaatcaaaataaacggtgttcaacgatcggcacattataagttagtatatcgttaatatgattggagtcatccacgagaagctgctgatccatggcgccctctctctagctcgctcccatggaagaacgaagaagataggtaaaggtcccgagtcccgagcagggagataaggtggagagatccttgggctgccgcggtgcgtgcccgcgcttggtagctcttgggccgtgcggcccagcgcgcggcgcacgggcatcagttgggccgacgactgtgagcgtgggccttcgctttacatataaagctgttggattgtgtggattttggttagaagttgaggacgctggcgtagtaggcagaccaccagctctccatccgtgggctccgcagctgcgtcaggaaggggtcctgctgctgctgattcttcgccgcctcctctctcttcatgctcatcgcagctgacggtgagagcgagacgccgcccacgggcaccatcacgatctccgacgacgacatggagtcggcgggggagccggtgctgtgggacgcggacggcgtggcggtggcgcgcgcgagctcctccatggccacccgctgctccagctccttgagcgacacggccttgcggtagaccttgcacagcaccacgtccacctgcggcacgcgcgcgtcgctgctagcgtcggcagcgtcggggaggcggtactcgttcatgacccagtccgtcttggtgccccgcggcgcgcggccctcgtagtagacgagcgtcttcttgagcccgatgaggcgcttggggtcggcggcgcaccgcacggcgcggtccgaccccgtggccttccagaacccgcgctccgtggtgcggctaggccggccgccggagccgggctgctgcttggccgcccgcccgccgccgtcgcggggcacgaagaagtaccactcgcgctcgccaacgacgcgcgccaggctcggcagctcccaggggtcgtgccggtacaggtgcaccgtggggatgatgtcgaacttgagcttcctcccgcgcgccgcctgcttcaggtagaactccagcagctcctcctccgtcgggtggaaccggaaccccggcagatccagctgatgctgctgctccgccgccatgatggatggatggatcgatgttgatggatatagatgagggtgctggtcgataat

SEQ ID NO: 126898 - DNA, 495 bp, Zea Mays
atggctggcgagcagcggccactctccccttccaccttccctcccctgtcctcctgggcgcgggccgcctcccctggcggacgcgccgccgccgggggtgctgttacaggggcttgggggtttccagttcccgcctcccctgcgctcgggtcggcgtggggggcggggccccgcgacgccagtgggaccctcctcaccgctgcgaggaccgccatggcccttgctgctgtggcggatgtggttcccatgggggttgctagtcaggcggaccctcccccgccagttcccccgtcgctggttggcaatccacctccggtcgttgatcagccgcctcctccaccggtcgcccaccagggatatactatcgccgccctcactgctgcccgtgcggagcacgcggcgcggcagacccgtttgcgggaagcggccctcgtgtgggagcgtgagcgcgaggccgccgacgctatcgctgctcagattgccgcggcggaatag

SEQ ID NO: 126899 - DNA, 2403 bp, Zea Mays
cttcctccaccgctactcctcccgtttgtttgccattcccttccctggaggattcagcgcacaccatctatcacatcgaccgatccatgctgccgtggtccatctttccgcgacaggctcccgggggcgactcggagcctgagccagaggcgtacccgtccgaacagctgtcggacgaggccctggtggaggacctcctcgccgccctcgccgccgcgcggtcattccaggagttccgccgctcgcagcgcaaggagtcattcggtctccagcgctggctccagctcgtgctcccgctcatccaggagatccgcgagatcgcgccgtccctcagtgatgacgcctaccgccgcctcgccctcctcggtcgtgcattccacgctgctcgccggctcctccgctgctgccacgacggcagcaagatcttcctgtctttggagagcgaggctgtgctcgggcggttcagggccgtgtatgagaagatgaatcttgcattggatgggatgccttactctgagattggcatctccgatgaagtcaaggaacaggttgagctcatcaatgcgcaactgaagaggtgcaagaagagaagtgatacccaggacatggaactctccatggattttatgatgatactccagaacaaggacgggaatgcagatagagctatattggaaaggctagccaagaagctcgagctgcaaagcctggcggatttgagagcggagactatggccattaaaaagctcatcaacgagaggaatggccagcaaccagaaagcaccaagcacataatagaactcctcaacaagttcaaggagattgcaggcatcgacgagaagaacatccttggggatgtctccataccaaaatatctggagaaatgcccgtctttgatgatcccaaatgaattcctatgtccaatatcgctggagatcatgactgaccctgtcatcatcgcgagcgggaggacttatgagagaagaagtatcaagaagtggctcgatgctggccagcggacctgcccaaagacgcagcaaccattagctcatctttcactggcaccaaactttgcggtgaaaaacttgatcttgcagtggtgtgaaaagaataaagttgagatccagaagggagaatccgagcctgtagctgaacaggaagatcgcaaagaagacattccaaagctggtgaaggatctgtcgtctgttcatctcgatgtgcagcggaaggctgccgagaagattcgggcactttccaaagaaaacccagagaatagagcactggtcattgagaatggtgggctccctgctcttattagcttggtgtcctatccagataagaagattcaggagaacactgtgactgcactgctaaacttatcgattgatgaggccagcaaagttctgatagctaaaggaggagccttacctttgatcattgaagtccttaaaaatggcagcattgaaggtcaggagaactcagcagcgacattgttcagtttgtctatgatagacgagaacaaggcggctataggggttttgggtggtatagctcctcttgtggacctcttaagggatgggacaatcagaggcaagaaagatgctgctacagcacttttcaatctgatactgaaccatccaaacaaatttagggctattgaagcaggaatcatggctgctttgctgaaaatacttggcgacaagaaactagacatgatagacgaagcactgtccatttttctcctcctggcatcacatcctggttgtcgaagtgaagtggggacaacgtcttttgttgagattcttgttcagatcacaaaggaagggactcccaagaacaaggagtgtgcactatctgttctgctcgagctaggtcttcataacaactcccttatggcgcacgcacttggattgggtctgcaagaacatctgtctgatattgcaaagtcgggtacaagtagagcgcagaggaaagccaactctttgattcagctttctcgcaagggtccataagggagtaaatgaaaacaaaacaccctgatgattttgcacaaatatacatgtaaaccaaattactgaaaaaaggagggggagatgaggtttcaaaagaacatctgtgttgtgatgtctgtcattaagatgagaggatgatggcattaaggaagaaaccattctttttttttcgaatttacaggagagatctaggctttattaggcgctcaggctctttgctcccgccatgaaaccacagtatattgtaacattgaattagtagacaggtctgttcgtcctcaagagaaatgaaagaaacatgaggtaattcatttcttcacgcagaattttgttgtaattcttatatggtaaaaatatagaagcatgttgatagagtgtcaaaaaaagagaa

SEQ ID NO: 126900 - DNA, 2178 bp, Zea Mays
gccatcctccctccattgtttcccggctctccgtcccttgggagttgggccttggcatttccttaagataaaaaaggggggaaatcggcttcctactccccgtccttatcgccagccgaaccgacattgttttctccccccttctcgccttctccttctcccccctagtctagaggcgtttgctccccaatcccttcggcccgcccgctcgacgtgatcccaccggcagccatggatccatacaagcaccgcccgtctagtgggagcaactccagcttctggaccaccaactccggcgcccccgtctggaacaacaactctgccctcaccgtcggacagcgaggtccaatcctccttgaggattatcatctaatcgaaaagcttgctcagttcgacagagaacgtatccctgaacgtgttgtgcatgcacggggagccagtgccaagggtttctttgaggtcactcatgatgtctctcaccttacatgtgctgattttctccgtgctcctggggtccagacacctgttattgtccgtttctctacagttgtgcatgagcgtggaagccctgagaccttgagggatccacgtggttttgctgtcaagttctacaccagagagggtaactttgacctcgtgggtaacaacatgcctgtgtttttcatacgagatgggatgaaattccctgacatggtccacgctttcaagccgaatccaaagaccaatttgcaggagaactggagaatagtagatttcttctctcaccacccagagagcctacacatgttcaccttcctctttgacgatgttggcatcccactcaactacaggcacatggagggctttggtgtcaatacctacaccttgatcaacagggatggaaagcctcaccttgtgaaattccattggaagcctacttgtggtgtgaaatgcttgctcgacaatgaagctgtgactgttggaggcacctgccacagccatgcgacgaaggatctatatgattccatcgcagctgggaattaccctgaatggaagctctacatccagactattgatcttgaccatgaggataagtttgactttgacccgctcgatgtcaccaagacctggcctgaggatatcatcccgctgcagcccgttggacggatggtcctgaacaagaacgtcgacaacttctttgcagagaatgaacagattgctttctgcccagcgattattgttcctggaattcactattctgatgataagctgctccagacgagaatcttctcctatgctgatacccagaggcaccgccttggtccaaactatctgatgcttcctgtgaatgcaccaaaatgtgcccaccacaataaccaccatgatgggttcatgaacttcatgcacagggacgaagaggtgaactacttcccttcgaggtttgatcccgcccgtcacgcggagaaggtccccattcctccccgtgttctaacaggctgtcgtgagaagtgcatcattcagaaggagaacaacttcaagcaggctggcgagagatatcgttccttcgaccctgcaaggcaagaccggttcatccagcgatgggttgacgcactgacagaccctcgcgtgacccatgaacaccgtaccatttggatctcctactggtcccagtgcgacgccgctcttggccagaagctggcttctaggctgaacctgaagccgagcatgtaagatcgacgaggaagaaagcaggcaccggtggccaaggatgcaacgcaacatggagcgtgtgatgtttacaccaatataattgaataaacaggggatgtgcgcgttgtcgtacttatgctgatgctgatggtcggtggtcgattatatatactggaacttctggtgtatgctcttctcttctggggagacgtaatgtaacgaagaagaatgtgtcattgtggcctgtggtacaaaccctgctgtgtatgggcctgtctataagaaacagcgatgagttgtgacgttatgtttctgacagtttatttactaatgagcacatctttgatttactagaacgaagagaagttgaggaactgtcggacagatgcagcaaggatcctcattaaataatagaatcactcttgtttgcattcatgaaaactgtactaagggagtgtttgtttgatgaatcactctaagataaggtgg

SEQ ID NO: 126901 - DNA, 2041 bp, Zea Mays
gtgctagatcctcaaatcaattccgcatcttgtttccgcccttgattgatgcattcgctcgtctgacttgattgatgcgctcgatctgggggactcttcgttcttgcagcaccgcccgtctagtgggagcaactccagcttctggaccaccaactccggcgcccccgtctggaacaacaactctgccctcaccgtcggacagcgaggtccaatcctccttgaggattatcatctaatcgaaaagcttgctcagttcgacagagaacgtatccctgaacgtgttgtgcatgcacggggagccagtgccaagggtttctttgaggtcactcatgatgtctctcaccttacatgtgctgattttctccgtgctcctggggtccagacacctgttattgtccgtttctctacagttgtgcatgagcgtggaagccctgagaccttgagggatccacgtggttttgctgtcaagttctacaccagagagggtaactttgacctcgtgggtaacaacatgcctgtgtttttcatacgagatgggatgaaattccctgacatggtccacgctttcaagccgaatccaaagaccaatttgcaggagaactggagaatagtagatttcttctctcaccacccagagagcctacacatgttcaccttcctctttgacgatgttggcatcccactcaactacaggcacatggagggctttggtgtcaatacctacaccttgatcaacagggatggaaagcctcaccttgtgaaattccattggaagcctacttgtggtgtgaaatgcttgctcgacaatgaagctgtgactgttggaggcacctgccacagccatgcgacgaaggatctatatgattccatcgcagctgggaattaccctgaatggaagctctacatccagactattgatcttgaccatgaggataagtttgactttgacccgctcgatgtcaccaagacctggcctgaggatatcatcccgctgcagcccgttggacggatggtcctgaacaagaacgtcgacaacttctttgcagagaatgaacagattgctttctgcccagcgattattgttcctggaattcactattctgatgataagctgctccagacgagaatcttctcctatgctgatacccagaggcaccgccttggtccaaactatctgatgcttcctgtgaatgcaccaaaatgtgcccaccacaataaccaccatgatgggttcatgaacttcatgcacagggacgaagaggtgaactacttcccttcgaggtttgatcccgcccgtcacgcggagaaggtccccattcctccccgtgttctaacaggctgtcgtgagaagtgcatcattcagaaggagaacaacttcaagcaggctggcgagagatatcgttccttcgaccctgcaaggcaagaccggttcatccagcgatgggttgacgcactgacagaccctcgcgtgacccatgaacaccgtaccatttggatctcctactggtcccagtgcgacgccgctcttggccagaagctggcttctaggctgaacctgaagccgagcatgtaagatcgacgaggaagaaagcaggcaccggtggccaaggatgcaacgcaacatggagcgtgtgatgtttacaccaatataattgaataaacaggggatgtgcgcgttgtcgtacttatgctgatgctgatggtcggtggtcgattatatatactggaacttctggtgtatgctcttctcttctggggagacgtaatgtaacgaagaagaatgtgtcattgtggcctgtggtacaaaccctgctgtgtatgggcctgtctataagaaacagcgatgagttgtgacgttatgtttctgacagtttatttactaatgagcacatctttgatttactagaacgaagagaagttgaggaactgtcggacagatgcagcaaggatcctcattaaataatagaatcactcttgtttgcattcatgaaaactgtactaagggagtgtttgtttgatgaatcactctaagataaggtgg

SEQ ID NO: 126902 - DNA, 2385 bp, Zea Mays
ccccgtcaatggcgttctccgccgcctcgtcggcggcggccgcggcagcgtaccccagaactacgcttccactgcggcggcggccgggcctcttggccctcctcctccttctcctttgcttcctctccttccaggtcgtgatccatgtgccctccgccagatcagcggtgtcgctgtggctcttctcgggtcaccgagccgaacgcgggactcgcgagaactgccctggctgcagcaagttacaggatgtggataaagctgaaaagactatcgcgtacactgaccagcatggtcggatcaagctattcaaagttaccgccagagaattcggttcgtcctctatctgggagaacccgtggttgcccagagatagccagccggtagccagaacacaagaggttgccggggatcatctactcgccagtggatcagaaaccaccaatctttcaagtgctgaaactctggcaactacaattgtcgatccgattaaattacggcgacaggtatttcgccgtagaagaaaggagcggagggttcaggagctgcttcagatggataagaagattgaacttcagatgcggaatgcagcaataaatagctcaaggaactttaacaataaagttagaggaagctacaacatatggaggcaggagttccgccttgttaatacagactcaacactaaggctcatgaaagatcagataataatggccaagttgtatgccactattgcactctcccagaaagaaccagacatgtacgcgttgctcatgaagcgcataaaagaaagccaaacatctatcggagatgcacttatcgacagtgaactcgattctagtgccttagagagagcaaaagcaatggggcatgtgttatcttcggctagagatgttctgtacagctcgggtgaggtgtcaagaaaattgcgtgttatgttgcagtcgacagaactaaatatcgacgcagtgaagaaacaaaactcatttctggttcagcatgctgcaaagacagtacccatgcccttgcactgcctacatatgcagctgacaactgattattattttcgtgattatgtgaccaaggaacattttgacgatgatgctttgaaggcgggacaatataaagaaaagcttgaggatttgtcactctaccactatgctatattttctgataatgtgcttgcggcctcggtagttgtcaaatcaactgtggcaaatgccaatgaaccagagaagcacgtgttccacattgtcactgatagacttaattttgcagccatgaagatgtggttcattactcatcctcctcaactggcaactgttcatgtggagaacatagacaatttcaaatggcttaattcctcatactgttctgttcttcggcaactggagtcagctcgcctcaaagaatattacttcaaagcacacgatccgtcgtcactctctgatggaaatgagaatctgaaatacaggaaccccaaatatttgtccatgctcaaccatttgaggttctacatgccagagattcacccaaagcttgagaagatactgtttcttgatgatgatgttgttgtacagaaggatttaacacccctttgggatgttgatcttaaagggatggtaaatggcgctgtggaaacctgtaaagagagtttccatcgctttgacacttatctcaacttctcacacccaaagatctcagagaacttcgatccacacgcttgtgggtgggctttcgggatgaacatgtttgacctgaaggagtggaagaagcgaaatatcactggaatataccattattggcaagatttgaatgaggaccgtaagctgtggaagctgggtacgctgcctccaggtttaattactttctacaacctgacatacccgttgaatcgtacttggcatgtcttgggcctgggctatgatccagctgttgacattgctgagatcgacaacgctgcggtagttcattacaacgggaattataagccctggcttgaccttgccatttccaagtacaagccattctggtccaagtatgtagatgttgacaactcgcacgttcggcgttgctatgagggcaaacaatgacatgtaaatcttcatcaagttttcttttttcatttcagagcataagttattccctatgaggatgttaggcagagtagtggtgtgtttagcatagtttaagtcttcttgatcttgtcattattgctccgtagttatctagctattcttaaatgaactggtgcataaggtggtttatacctgacaacaaagtagatattcttttgtttactttagaatttgctgtaccttgaatgaattggcaaaaagatagagaagttcatctgcttacgacctgtggtatgaacactgtgtagtt

SEQ ID NO: 126903 - DNA, 1253 bp, Zea Mays
aactctggcagaagaatgacagactgcagagcacctggttgcagccaataatgcaaacactctgtgggctccttgtgcttttgctctcctccctcccaaccttctccttataaatacaaaggcgtgtgcaaggcagaaccatcagctaagatagctgcaaaacaagcgagttacttacaaccaaacagaagggtagaaaccacctgaagccatgtgcattgctgcatggatttggcaggctcaccctgtgcaccaactcctcctgcttctcaacagagatgagttccacagcaggcctacaaaagcagtaggatggtggggtgaaggctcaaagaagatccttggtggcagggatgtgcttggtggaggaacatggatggggtgcaccaaggatggaaggcttgccttcctgaccaatgtgcttgaaccagatgccatgcccggtgcacggactaggggagatctgcctctcaaattcctgcagagcaacaagagcccactcgaagttgcaactgaagtggcagaagaagctgatgaatacaatggcttcaacctcatactagctgatctaacaacaaatatcatggtttatgtgtcaaaccggcctaagggtcagcctgcaacaattcaactcgtgtcaccaggactccatgtgctgtccaatgcaaggctagatagcccttggcagaaggcaattctcctcggtaaaaacttcagggagcttcttagggagcatggtgctgatgaggttgaagtgaaggatatagttgagaggctaatgactgacaccacaaaggctgacaaagatagactgccaaacactggttgtgatcccaactgggagcatggtctgagctccatcttcattgaggtgcaaactgaccaagggccctatgggacacggagcacagccgttttatcagtgaactatgatggcgaagctagcttgtacgagaagtatcttgagagtggtatatggaaggatcacacagtgagttaccagatagagtagtaggcattgcacaggaaaagttggcgacctcaaataaatagaaatatgaagcagacacaattgtgaatttcattatttccctgatctctagtcatcttcgtgattatctaagatcctaccataatgccaattacattattcactgtaagcagatttttcacttgacgataaaatgtcaaccaaaactttggttttcttcgtcatctttactcgagaaatcttagcaaggtattgtatgttg

SEQ ID NO: 126904 - DNA, 1103 bp, Zea Mays
ctccttataaatacaaaggcgtgtgcaaggcagaaccatcagctaagatagctgcaaaacaagcgagttacttacaaccaaacagaagggtagaaaccacctgaagccatgtgcattgctgcatggatttggcaggctcaccctgtgcaccaactcctcctgcttctcaacagagatgagttccacagcaggcctacaaaagcagtaggatggtggggtgaaggctcaaagaagatccttggtggcagggatgtgcttggtggaggaacatggatggggtgcaccaaggatggaaggcttgccttcctgaccaatgtgcttgaaccagatgccatgcccggtgcacggactaggggagatctgcctctcaaattcctgcagagcaacaagagcccactcgaagttgcaactgaagtggcagaagaagctgatgaatacaatggcttcaacctcatactagctgatctaacaacaaatatcatggtttatgtgtcaaaccggcctaagggtcagcctgcaacaattcaactcgtgtcaccaggactccatgtgctgtccaatgcaaggctagatagcccttggcagaaggcaattctcctcggtaaaaacttcagggagcttcttagggagcatggtgctgatgaggttgaagtgaaggatatagttgagaggctaatgactgacaccacaaaggctgacaaagatagactgccaaacactggttgtgatcccaactgggagcatggtctgagctccatcttcattgaggggccctatgggacacggagcacagccgttttatcagtgaactatgatggcgaagctagcttgtacgagaagtatcttgagagtggtatatggaaggatcacacagtgagttaccagatagagtagtaggcattgcacaggaaaagttggcgacctcaaataaatagaaatatgaagcagacacaattgtgaatttcattatttccctgatctctagtcatcttcgtgattatctaagatcctaccataatgccaattacattattcactgtaagcagatttttcacttgacgataaaatgtcaaccaaaactttggttttcttcgtcatcttta

SEQ ID NO: 126905 - DNA, 1617 bp, Zea Mays
ccctaatccctaatcctccagactacataatagccaaccaaaaacagtcttgaaaagtgataataaacaaaagaaaaaaggattaccaagaaacagtgatacaaatgttatcgtgcagtctgcagtccagtggggtctgtgatgatgttatcaaagatatgtagaaacttcaatgagaatcacaacaaattcgtaccatagaattgcattattcacgctaatcaacatgagcatacagaaataggaagctcttcagttaagatttcagcttgtagacaagtacactgaaaagaattgtatagcttagcactacgggccaatagctaaacactacacccccacttgtatgctcttgttcttcgttgcttgatacttctatgcaagatttttgtctttgtccatccctgttggtttcttctctacatggtttgtcttgttgctcactgcactgctgtggtatccatctcgtgatcgtcctctcatgaacaatcatctgctccaaacaatccaaggatcccagctcgcagctcttggtgctgatggtaagaacaagtaacgtcttggccacacttccagaggcccgaagcgcacagagtacttcagaccagacctccatgcgggcacacctggtgccgaatgctttcccttctggagccacaaccaccgtgaactccgagtgcacaagtgccggatgatgacggtaagcaacaaagtctgccccgtactgcagtcccgaccttacaacccagttcttcagcctgaggtattgatacgccctgtacatctccgggaattgctctgagccggaggccaagagaccccacagctcgggcgcaccaatccgcgtcttgttattcgactcaaccctgaggcacttcagggcatggcaaaggaagaacacttcctcggggcccagctggaaccactggctctctgcacctgcaccctccacggccctgccgaaggcagcgccgttcagaagcgcggcttggcgtgggccgacctcgaggatcgcgtccctggcgtgcgcggctagaatcgccacggcttccgagtcccgcagtgaagcctggagctccgcaactatgctggacatgggattggctgctgccagtgctgcaaagcccttgcagtccttgcccttcttccatctgggacctggcaaatccataagctgatggcacacgacatatgagaccttgatgggaatccgtactccgcagatctaaggggcatggcatataacgacatcgatgaaaagggcaaacaaaacacgaaagaaaactagagcagagacaggctcaccttccgctgcatggtgtccgccccgcaatcttccgtcggcgtctcctctcctaagctcctgcctgctgcattggatttgccccccttcatggcggattcgagcggcgacacggagcgcagcgttcagatccgcgcttggcggagggaatcccggtcgcgggcggacgaatcggggtcgaatcgagggagaaattgcctctggcggctcgcggggagagggagggaaggggaaagggaggcgacgggcgctgcaggagggcagggcaggcgcacgggatacgaaggaaggcgtggcccaagggcgtatcagcg

SEQ ID NO: 126906 - DNA, 1906 bp, Zea Mays
gttccttccgtcgcaaatgtgctgtgtccctcttcatcctcctcctttctcagtcacatacacgggagctgtccacgccggccttcccccctaccaccacataaatccgcgcctactccgcaccatcttctctgctcaccacgcgcctccaaggtagggtttctctccccctcactcctgctccgtctccggctccgcgcggaattcagagtcatgtttccatgttccggatgctaaaggacccgtttttatccgcgtgcccgtgctagggcctcgcctcgcccgcccgccggtccaggatgggcgcacggatttagctgatcccgtcgctgctcgcgcccgatctcgcggcgccccgccccatcagctccgcgagatgatctgagccccgcgatctggtggagaaatggagccgccgccggatctgaacacccacctgccgccgcggaagcgcctgctcgccgggctcaggacggcagccaccgccgccgagccgctaccgccgccgcccgcccacgccgacctcgccgcccgcctccgcgagatggcgctcgccgccaacgcgtcggcgtcctcgcccgaggagacgatcgaggcggcgagggcggccgcgcaggccgccgcggacgccgccgttgctgcgcgcgccgtggccgccgagaaggccgccgtcgccgcgaaggctagggcggccgcgcgcgccgccatggagttcatcgactccttctctaccagggccggcgcgtccaggaacgggagcggcctccagttcaagatcaggtctaggaagaagcatgtccaggtcaagatgctgtacaggcccaatggaaccctagggccagcggaggctcccaagcctaggagacgcaagcagtcggatgaagaggtcccgcacaatttgcaccgcctcatgaatagctcgccgaggatctctcacgctggactgcccaagaggcctcgcacgaccgctgctggggatgccaaaaatggagctgtagcacccggtggaggtaacggcgctggtgtttgtaacggttcttcagttcaggtgccgacggaggctggcggttggttgggtaatggatgctctgaggcgaaatctcatgagagaaccgttccattgctcaaccacgaggtctctggtgaagactcatccaggcacgccgcgaagagtagcggcggcattgctgacaacggagtcggggttgggaactcgagtgctggtcagaaagtgaaggtcaagaggaaggagctgctcctgaatcaaaataccggtaaagaaagagaagaaccagaagaggccacacaaacagagccctttgtacgttctatcacgctcgatgaatcgaaaccaaactcaaaaggaaaaggaaggtcaaacccaaatgggaatggaacagaaaggcttgcaggccctgcagatacgaagggccgtggcgaaggcgtgacgccaccgaagataacttccgtatggaagatcaagaagctgaagacatctcactgctcttccgacagcaaggtgctgcacaaggtctgcgtgccgcctcctacggcggctgagacctctgcttcggtgaaagctgattagcgaggcaccatagcgtatagttcggcggatgcatgtcttagctacgcttgttgtgaggtttttgtatgttcaagttgctactcggacgaggagggaaagcggaggtaaatctctcttggtagatctcacgtttgctttgatttttcatacgaatgtgcttgttttatggtatatagattattgggtatttctactgtactgtttctgcccctgcttccatttgatgtcactagtggtagggagtgtggcataatcatgtagatgtacctgctatgcatacatcgttttaataaatggcaccattgctctcagatacta

SEQ ID NO: 126907 - DNA, 1729 bp, Zea Mays
acgggagctgtccacgccggccttcccccctaccaccacataaatccgcgcctactccgcaccatcttctctgctcaccacgcgcctccaagggcctcgcctcgcccgcccgccggtccaggatgggcgcacggatttagctgatcccgtcgctgctcgcgcccgatctcgcggcgccccgccccatcagctccgcgagatgatctgagccccgcgatctggtggagaaatggagccgccgccggatctgaacacccacctgccgccgcggaagcgcctgctcgccgggctcaggacggcagccaccgccgccgagccgctaccgccgccgcccgcccacgccgacctcgccgcccgcctccgcgagatggcgctcgccgccaacgcgtcggcgtcctcgcccgaggagacgatcgaggcggcgagggcggccgcgcaggccgccgcggacgccgccgttgctgcgcgcgccgtggccgccgagaaggccgccgtcgccgcgaaggctagggcggccgcgcgcgccgccatggagttcatcgactccttctctaccagggccggcgcgtccaggaacgggagcggcctccagttcaagatcaggtctaggaagaagcatgtccaggtcaagatgctgtacaggcccaatggaaccctagggccagcggaggctcccaagcctaggagacgcaagcagtcggatgaagaggtcccgcacaatttgcaccgcctcatgaatagctcgccgaggatctctcacgctggactgcccaagaggcctcgcacgaccgctgctggggatgccaaaaatggagctgtagcacccggtggaggtaacggcgctggtgtttgtaacggttcttcagttcaggtgccgacggaggctggcggttggttgggtaatggatgctctgaggcgaaatctcatgagagaaccgttccattgctcaaccacgaggtctctggtgaagactcatccaggcacgccgcgaagagtagcggcggcattgctgacaacggagtcggggttgggaactcgagtgctggtcagaaagtgaaggtcaagaggaaggagctgctcctgaatcaaaataccggtaaagaaagagaagaaccagaagaggccacacaaacagagccctttgtacgttctatcacgctcgatgaatcgaaaccaaactcaaaaggaaaaggaaggtcaaacccaaatgggaatggaacagaaaggcttgcaggccctgcagatacgaagggccgtggcgaaggcgtgacgccaccgaagataacttccgtatggaagatcaagaagctgaagacatctcactgctcttccgacagcaaggtgctgcacaaggtctgcgtgccgcctcctacggcggctgagacctctgcttcggtgaaagctgattagcgaggcaccatagcgtatagttcggcggatgcatgtcttagctacgcttgttgtgaggtttttgtatgttcaagttgctactcggacgaggagggaaagcggaggtaaatctctcttggtagatctcacgtttgctttgatttttcatacgaatgtgcttgttttatggtatatagattattgggtatttctactgtactgtttctgcccctgcttccatttgatgtcactagtggtagggagtgtggcataatcatgtagatgtacctgctatgcatacatcgttttaataaatggcaccattgctctcagatacta

SEQ ID NO: 126908 - DNA, 4169 bp, Zea Mays
gcgcacactcccccgcggccgcgcccccgatctcgccgggccggtggccctcgccgccggcgacacccaccgcccaatcgcccacgcccggggggcgatggaggcggccttcgacgcctacttccgcgccgcagatctggaccgcgacggccggatcagcggccaggaggccgtcgccttcttcaagggctccggcctgccccagcccgtcctcgcgcagatttggacgtatgctgataaaaaccggtctggttttcttgggcgtgaagacttcttcaatgcactcaaacttgtcacagtagctcagagcggccgagaattgacacctgatattgttagatcagcattattcggcccagctgctgcgaaaatccctgctcctcggataaatgtttctacagctgctcctcaggcaagtagcgtagctaacctcccgaatgccactcaagcaccaggtcctgttcagcagactcctgtcgtaagagggacacaagggcttcctggtatatcgtcaaatccacaagtcaggccaccacaacctccaaatgcaaacactgcgccccctgctcatggtcagggagttgcctcaaggccacccgtaggaagtggtcccactgggataaaccatactagctcaaccacaccaagtctagcaactgattggttcagtggtaagagaagtgcaagtccgttgggtgcaacttcacaaactccaacaagaggtatttctccacaggccaaccttagcagtgcgggaatctcagtgcagaattcagctcctgtaccaggctacaattctcatacaccaggtgtcaatgcaatttcaacaaatttgaacgtgatgtcttcccaaccatcagtcaatgactccaaggcgttggtgccattgggtaatggattgtcgtcaaactcaacttttggtgctgaccctttctctgcaactccacgaccagaacagggttcaccttttccccccaacgttccaaacaatctgctcagctctacccctcctgcctcagctgctggacatcatcaccctcctaagccaatgcaggctggtcctgtgcagagtatatcctcgctttctcctcatactagccagttgccacacaatcagccacctccgaggcaacaacaatttaatgctacaccaagtgctccaggaccagtgagttcaaatattcccactggacaaattccttcaagcccaagccagcctcaggcaccatggccgaaaatcactcaagtagatgtcagaaaatacatgattgtatttatcaaggtagacagggatcgtgatgggaaaatcactggtgaagaggcaaggaatctatttttaagttggaggcttccaagagatgtcttaaggaaggtgtgggatttgtccgaccaggataaggatgggatgctatctttcaaggaattttgtattgctgtgtacttaatggagagacatcgagagcaccgtcctcttcctgacacagtaacagatgctatttgggctgagggcaccgcactaccctctactggacagtttgcagaaaatcctagtgcccccgctcctcaagcaagtgccggatatacaagtagaacaatgcaaggaccacatcatgggatgcttccctcatccatgaagccaccatctcggaggcctcttcctttagatgctgacgatactattaagccagagcaacaaaagccaaaggtccctgtcttggaggaacatctagttggccaactaagcaaggaggaacaagatacactggatgcaaagtttaatgaagcttcagtcgctgataagaaagtccaagagttggagaaggagatccttgattctagagagaagaccgagttttatcgcacgaagatgcaggagcttattctttacaaaagtaggtgcgacaataggtttaatgaagtctcagaaagtatgtctgctgataaacgtgaggtccaatctctttctgcaaaatatgatgagagatgcaagaaggttggagatgtggcatcaaagctaacaatggatgaggctactttccgtgagatccaggagaagaagttggaaatttataacgccatagttaagctgcaaaaaggggatgatagcgatgagaagtttcaggagcgggctaataagatacagtcagatcttgaggagcttgtgaaatcattgaatgagcaatgcaagagatatgggttgagagctaagccaactactttagtggagcttccttttggttggcaacctggaattcaagagacagcttatgcatgggatgaagaatgggataattttggagatgaaggattctctataataaaggaactaacagttgaagtggagcctcccgttgtagcaaagagtcagcctactgaggatgttaaagcatcttcaaatggggcatcaacagaaaaagaagacaacaagggtgataaatctgctgctgctgtggagcaggttgtcaaacctgaaacagcaccttcgaatatcaaaccagagtcagcaaaaagtcctccagttagtcctgtcaagaacaaagaggatggtcccgatgaacatgataaaaagcaatctggaacaaatgatgtctcaccacgtgagagtatcagcaaccgtggagcaatggattcccctactcatggagataaaacccatgatggacactcatggggcatggataatgactccctatggaactttgatcataaggagggtgagaatggtgattcagatctcttctttgggccacaaggccttcccccgataagaactggaggttcctcatctggtaattcagttgtcaaggaacagaagccgttctttgattctgttcctggtaccccagtggagaaatccgtctttgattccatcccaggcacgccatttcagaaatccgtctttgattctatcccaggcacgccagttcagaaatccgtgtttgattactctgtccctagcacaccgatgcagaactcagtctttgattattctgtcccaagcacgccgatgcagaagtcactctttgattctgtccctggtacaccggtgcagagatcagttttcgattctgttccgagcacaccaatgcagagatcagtttttgactctgttccgagcacgccgacgcagaaaccattcttcgactcctttccaagcacaccaatgcagagatcactgttcgattctgggccaagcagagcagaatctcctaccgccagcagcatgtatggcaaagagcagaagggattcttcgattcttcagtcccgagtactccaatgtacaactcaagcttcacgccaaggtatagcgaagcaggagacgattcattcgacaccatgtcccaatacagctcatttggcatgcacgagagcaattcctttggacagcgcgacagcttatcgagattcgattctttcagcagcaatgctgacaacggtgggaatgacacttttgcgaggtttgattctttccgcagcacttcagatcagggtgggggcaacagcttcatgaggtacgattccatgaacagcagcagcgaccatgacgggatcggcacgtttgcgaggtttgattcgatgaagagcagtaactacaacagccggggctactcgttcgacgacgaggacccctttgggacagggccgtttaaatcgacagagaccacgagccacagcccgacaaaacatgggacggacacatggagcgcgttttgacaggcaggggctgtatcatatattcaatagaggtcatgcgcttgtgcaccttactgcagatatatacacacgtacaggggcaagacaattttttgttgtgtgcatgggcctctgctccaacacacctggggaaggggaagggatgggacggggatttgcttgtgtgcttgctttgtgtttaattttgtacgtaggctgggaacatgtgtttggtgggatgatgatgatgatgctgctgctgctgcttataaactcaacattctttataccttgtattgtacaagtgcatgtacaagatgtgagtcgacccgtttgggttgagtaactctcgagtgttttttcttccatggtgtagcgttttcctgtttctccagaattttctgagcaatgtacagacagacaaacttttgtgtgaaacacctgttgtccaatactgagacccttccattcgttg

SEQ ID NO: 126909 - DNA, 2878 bp, Zea Mays
atgccgcccccttccgcttccgccatcgccacccgcttcgcaacccactggatagctgacgccctcgccgacgacgagtccttcgacttctccgtgctccagggtgaggctccaaaccctaaactcctccgccgttcgcctgaacgctttcggtctctcacctggcccctcgcgggcgccccggaggccacgcgcgagcgggtcgcgctccggtgcctccaggaggcgtcatccgtgatagccgctgggggtgatgccgcggccacggcgggcgtgcttagggttgatggcgcccggtcatgcgaggatgtgctgttgcggcttatcagagaggttgggagttccagagaattggagaaggatttgcttccacctttcagtcaagacatccaggaaactatatgtaccaagaaatctacactaccagaaacttctttccagttgctaaaaggacttgagccatggatcacatctatgaccccacaatcccaaatggagcacaatgacactgaacaatgtgacattgatcagtccctgcgcagcagccatggatgtgtaaatatagagaagcctatgttccctacagacaatgctgaggttcagcaagagactatggcagatgtagtcaatggaagtgaaacgggaaatgtccaaaaggatccacctgcaccaacttctgtttttcaccaaccgtgtatgcacgaaagcaggtcttacatccctccgcaagaagatactatagatgttgttggtctaggcgataggtccttagaaaggagtcctattgtggaggggaacatgtccattggatctgtgcttgcttcagctggctgtgatgcacctttgcagggaagaattactgagcccttttcccagcaggataaacatgatcatactgctacagttgaaccaaaatcttgtaggcaaaaatctccaaatctatctcactgtgccgatggagagggggcagatgatggtggctccagcaatcagtcatctaaggtttccattcatgaaggaccgagtgctcatgccccagtaacttcaggttttgacagaatcagcggtgtcttatcaacagatgcatctgaacctgagcatttgtctgagtgcataccagcacaggatacatccatgatttcacagcttgacagcaggaaagctcatctgagtgctctgcaacaggaaagggttgagaaagtaaaccaaggtccggaagatatctctgcaaatattgggccagtggaaaaggaacatgttcatggggatctgactttgcaatctgctagtgttttactttctattagctgcaatggttctaatcaaggaactaaatctgaaaccaatcttcaaccagggactgctacagaggataggatggcttttgaagagcagaatgcggagaagtctcacttagaactcagtggtaccaacaaggctaatcaagctctgttcgatgatggcagcgtcatgaaaaataatacggttcatggtgggctgactgcgcatactgctccagtgtctcaaagctgcagtgtaaccttacatgataaaacttcagaagccaattgtttttctgagtggaaaaatgaaaagaacggtcaaaaagataattgccatacttctattccaggctcttctcaggatgggggtggagaaagtgcaaagaagacatcaaatgaggtaaactctggggacacttcttcaaaaatatgtgtccattctaaggataaagacattaatgatactcttgagggcttgtctcaacaagatttgtgtataaaatgtggtaaagttggtcagttgcttgaatgcagcagttgttctttagctgctcataatagctgttttggttcatcggtgacatttgaagagaccaacttattctactgcccagtatgcttctataagagagccaccgaagcatataaaaaggcaaagaaaacatatggggaagctaggaagaacgttgctgctttccttggcacaatacaggtcaccaagcaacataatgaacaactaaatggagttcaaccaggaggtgccaacagagaggatcattctgacacatcaaaaaggactcatgaaaatgaagtatataatcttgctcatcaggatgaagagcctcatcagcagatgaagaagcagaaaataaatgctataggtattgattatcgtaaggaggtactcactgagaaggttcctttccagaactctggtcctgcatccattaataaacattcagtgctccagaataacggtaaaacacgagttaaggatccagagaaaaagcagcaagcgggagacgaagaagctcgcaaagaagctggtaatgaaaaatctcatgaaacaggagcttcatctcagagaagatgtgatcctccttcgaatcatgacgttgaggctgaccaggaaggtagtcttacaacttctatccaatctagtggttctgatgaattagaagctaaaggattgcaagagaagaaggcagctgtatcaagtaaatctagaaaaggtatttcaaagcgggatcaacatatgcctacttcaccaagaaaaagaaattctgtacacctgcaaaagcgctattccaatcctcttgcaccacctggaagacgcaaaaaactcttttggacagaagaagaagaagctgttttgagggaagggatggcaaaattcactccacagaataatgcgcaaattccatggattctgatactagaacatggccgtggtgtgtttcacaggacgcgcctgccatctgatttgagggtcaagtggaggagcatgcagaggaagaagtgggcaggctactgatcttacacgcccccgcgcacgtagctgttgtgtctcatgctaaattactaaccataccttc

SEQ ID NO: 126910 - DNA, 3536 bp, Zea Mays
atgccgcccccttccgcttccgccatcgccacccgcttcgcaacccactggatagctgacgccctcgccgacgacgagtccttcgacttctccgtgctccagggtgaggctccaaaccctaaactcctccgccgttcgcctgaacgctttcggtctctcacctggcccctcgcgggcgccccggaggccacgcgcgagcgggtcgcgctccggtgcctccaggaggcgtcatccgtgatagccgctgggggtgatgccgcggccacggcgggcgtgcttagggttgatggcgcccggtcatgcgaggatgtgctgttgcggcttatcagagaggttgggagttccagagaattggagaaggatttgcttccacctttcagtcaagacatccaggaaactatatgtaccaagaaatctacactaccagaaacttctttccagttgctaaaaggacttgagccatggatcacatctatgaccccacaatcccaaatggagcacaatgacactgaacaatgtgacattgatcagtccctgcgcagcagccatggatgtgtaaatatagagaagcctatgttccctacagacaatgctgaggttcagcaagagactatggcagatgtagtcaatggaagtgaaacgggaaatgtccaaaaggatccacctgcaccaacttctgtttttcaccaaccgtgtatgcacgaaagcaggtcttacatccctccgcaagaagatactatagatgttgttggtctaggcgataggtccttagaaaggagtcctattgtggaggggaacatgtccattggatctgtgcttgcttcagctggctgtgatgcacctttgcagggaagaattactgagcccttttcccagcaggataaacatgatcatactgctacagttgaaccaaaatcttgtaggcaaaaatctccaaatctatctcactgtgccgatggagagggggcagatgatggtggctccagcaatcagtcatctaaggtttccattcatgaaggaccgagtgctcatgccccagtaacttcaggttttgacagaatcagcggtgtcttatcaacagatgcatctgaacctgagcatttgtctgagtgcataccagcacaggatacatccatgatttcacagcttgacagcaggaaagctcatctgagtgctctgcaacaggaaagggttgagaaagtaaaccaaggtccggaagatatctctgcaaatattgggccagtggaaaaggaacatgttcatggggatctgactttgcaatctgctagtgttttactttctattagctgcaatggttctaatcaaggaactaaatctgaaaccaatcttcaaccagggactgctacagaggataggatggcttttgaagagcagaatgcggagaagtctcacttagaactcagtggtaccaacaaggctaatcaagctctgttcgatgatggcagcgtcatgaaaaataatacggttcatggtgggctgactgcgcatactgctccagtgtctcaaagctgcagtgtaaccttacatgataaaacttcagaagccaattgtttttctgagtggaaaaatgaaaagaacggtcaaaaagataattgccatacttctattccaggctcttctcaggatgggggtggagaaagtgcaaagaagacatcaaatgaggtaaactctggggacacttcttcaaaaatatgtgtccattctaaggataaagacattaatgatactcttgagggcttgtctcaacaagatttgtgtataaaatgtggtaaagttggtcagttgcttgaatgcagcagttgttctttagctgctcataatagctgttttggttcatcggtgacatttgaagagaccaacttattctactgcccagtatgcttctataagagagccaccgaagcatataaaaaggcaaagaaaacatatggggaagctaggaagaacgttgctgctttccttggcacaatacaggtcaccaagcaacataatgaacaactaaatggagttcaaccaggaggtgccaacagagaggatcattctgacacatcaaaaaggactcatgaaaatgaagtatataatcttgctcatcaggatgaagagcctcatcagcagatgaagaagcagaaaataaatgctataggtattgattatcgtaaggaggtactcactgagaaggttcctttccagaactctggtcctgcatccattaataaacattcagtgctccagaataacggtaaaacacgagttaaggatccagagaaaaagcagcaagcgggagacgaagaagctcgcaaagaagctggtaatgaaaaatctcatgaaacaggagcttcatctcagagaagatgtgatcctccttcgaatcatgacgttgaggctgaccaggaaggtagtcttacaacttctatccaatctagtggttctgatgaattagaagctaaaggattgcaagagaagaaggcagctgtatcaagtaaatctagaaaaggtatttcaaagcgggatcaacatatgcctacttcaccaagaaaaagaaattctgtacacctgcaaaagcgctattccaatcctcttgcaccacctggaagacgcaaaaaactcttttggacagaagaagaagaagctgttttgagggaagggatggcaaaattcactccacagaataatgcgcaaattccatggattctgatactagaacatggccgtggtgtgtttcacaggacgcgcctgccatctgatttgagggtcaagtggaggagcatgcagaggaagaaatctgatgccgttgacatggaacactgacgtggtacttgtacatagcgaatgtgcaagtaggaatggaggagggtttcttctaattacttttgcagcccttaatcctgtagcactgacgtggattggttgtgggattcggtgaacctaggcctcctctaatatgcacgtagatgatggtagagagattggtagattcaaacctacgcgaagaattgccaatagatgactttggctgcttcgttcgttcaaatcgcacatatatgttgctgccgtgactccataccgtgaagaagcttgcccaaagtctgcagttttctaaacccctggtcaaaaaaggcaccgataaaatcatatctccaagttgtcagttgactgcaaaacaaattagattttgtttggatactctagtattgacctcaatccatatatgttgagatccatgtatgttgaggtggattgggttgtaaattagtttaagttgtactccaatttacctcaacatatgtggatttgggtcaatactagagtatctaaactaagttaaggtgcatgtagagataaatacggatggaaaacctccttctgtttacgtttcttgactcggtgtaggtacatcctagtgactttaatagtagcctaaggctctatttgtttgagcttctcgtcatctttttagtgtaaaaagccagaagctaaaacaaagagtttatatagatgatgttatatagaaagct

SEQ ID NO: 126911 - DNA, 83 bp, Zea Mays
caagaaaacaatacgtgattaagtgtctagattgccatgttttatataccaggataattaaaaagcctagaaatcacaaatgc

SEQ ID NO: 126912 - DNA, 1104 bp, Zea Mays
ggtaactgtcttgtgtcttgggaaaatgtgcataggcctctggaatatggtggcctaggtattttgaatcttgagaagctgggatgggctctaaaaatcagatggctctgggctcaaaaaactgaccggcctcagccttgggctggtttccctattgagatcccccgaaatgttaaggctcgtttcaactcagtagacagtagttacctcaattgttggcaacggtgagaaaattctattctggaagaacaggtggctgaatgaaactgcattgctcattttgctccccatctgattcagattatccctaaaagagtggctaacaggagaacagtagcagcagctttactcctctgttccatgagtaatatcggatccttttactcctctgtaacctttttgtttttccttttcttttgtttctttttctgttttgaatatggatgtaagtcctgtttttctctctctaatataaagatgtgcagctctcctgcgcgtactagaaaaaaaactttaaataatcgtcaatgggtggctgacattcgtggggtactaacagtacaggtgctagaagaatatgtccaggtttgggaccaagtgaaaggaacaatcctacatcatgatttgactgatacatataagtggaggttatctcagactggcgattacagtagcaagtcagcctacgctgctttcttcaatggatccatcaagtttgcaccttggaagcggatatggaagagttgggctcccctccgttgcaaactcttcatttggttggtgttcaaaaatcgctgctggatagcggataggctagctaaaagagagctatctcatcctgaggcctgccctctttgtgatcagggcgaggaaaccatccaccaccttctggttagctgtgttttcactagacagttctggtcgcatattttccaggctctgaaactaccagatttggctcctacattgattgagtctagcttccccaattggtggagaaaaatgtctagacttgtgccaaaagaaagacaaaagggtctgaattcgttaatcatcttgacagcctgggagacatggaaacacaggaattcatgcgtctttgaa

SEQ ID NO: 126913 - DNA, 1550 bp, Zea Mays
cctctcggctgcccaccaccgcagacaagtccagtcctctccctccccttaatctagcgccgccactcacgcccaccacgccgctggtgaacggatccgtccatcccgtacaccgcccaaccgctgttccagtacccgcctcgtcgagttgagctgagtttagggcctgcgggagctgagccggtggtcgcgctgcccgcgtcgaatgggacgccacccggcgcttggagccgggcgtgaccgcgcgctgccagaggttccctgagctcggcggcggcgggagcgtggctggtccggagcgcgccgcgcgtgcaatgggaggttcgaggggggttcctgcgagccgccgcggcggtcttggttctgcaagcgcgtggcccatgcttcgcgaagggtagggttgtctgtctagctagctgctgcttggtctgatgagctcagttccggcgtcccgcctcggcttccccgcacgcttgctccgtcggctgcccagaacccagcttgcccgctccggcgcttctcttcgcttcttcgggaaagggtggagctttgaggtggtgcgggtgctcagccgaggactccgggcgatgacgcccgcagtggcgcgcgtttgtcgcgacagtcctgggttcggatagcgagttcctcgagcggatttggctgctgctgcatcctgcgtgggaaggggaggcggcggcagcaacagaggaaggggaggggttgctctgaagcggagggggagcgggctgacattgctgctgggagcatggcgagcttctaaggacgctcagctcccgtagcccagccattctcatcgcagaggagcaaagatatatggtcttttgtgctttctcttcgagtccgtgtgctatttgacaatgcaaaatgggcatatccttgtggattctcggaagaaaagcagaggactaagtacaacaacatggagccggatgctgttgatttctttggggaatgtatgaatagtccccgaaatggtcgtactccgcttgcaaatgagatatatgagcaaatggttgcagagaaggaaagagagctagaagaaggagaagcacaaaagtcaccctccaagctcaacaggccacacttgaagaaaaccaaagtttgctgcgccagacccaagaggaagtgaaggggttgcataccaagtttgaagagaccaatgcactgctacgagctgtcctgaaacttcagaaagattgaggtagggatgcataccaagtctgaggatgatgcctttgcttaaggtttttctaccttgctagaacatattttgtggttagaactttgtcagaactacgtgcaatctgtttgaatgcttcgaacctttgtggtggaacctttgtatgtttgaacctctgttgtggaagaactagtgtgctggaattgtgtatgacttgtgatgagaatgttgtgtatgatggcttttctgtgtattatgattctgtgagctatcatgagagcttagtgtgtcgtcactgtatggtcattgtatgtgggtgccatattaaactaaacaaaacaaagctgtc

SEQ ID NO: 126914 - DNA, 1120 bp, Zea Mays
gcagaaagttcgaaggcagaaaactacttcatggctaagagagcaagtattacagcttggcccaacgtttattaagctcgggcagtgatcctccactagatctgatttatttcctagagaatttgtggacgagcttgctactgaaatgtaaagttaccatgtgctcctgaaatgtaaagttaccatgtgctccaattacttctgtgctaaatgaggtataatcaataggtgcttatgctccaattcttttatggtgaccatctaaaatagaaaacagcatgacaattgctatgtcatcaaacatgatcatcatcaatactagggtttctttaggccatgttattagtcttgacctgtctaggcagcattgatgcatgttcatgtgttctttttcttaaactataagtcattatttgactatgttgtattgttgttggcatgtaccaatatttcatggcaaatcttatatcccaagttttgtatatgccgcagaggactaagtacaacaacatggagccggatgctgttgatttctttggggaatgtatgaatagtccccgaaatggtcgtactccgcttgcaaatgagatatatgagcaaatggttgcagagaaggaaagagagctagaagaaggagaagcacaaaagtcaccctccaagctcaacaggccacacttgaagaaaaccaaagtttgctgcgccagacccaagaggaagtgaaggggttgcataccaagtttgaagagaccaatgcactgctacgagctgtcctgaaacttcagaaagattgaggtagggatgcataccaagtctgaggatgatgcctttgcttaaggtttttctaccttgctagaacatattttgtggttagaactttgtcagaactacgtgcaatctgtttgaatgcttcgaacctttgtggtggaacctttgtatgtttgaacctctgttgtggaagaactagtgtgctggaattgtgtatgacttgtgatgagaatgttgtgtatgatggcttttctgtgtattatgattctgtgagctatcatgagagcttagtgtgtcgtcactgtatggtcattgtatgtgggtgccatattaaactaaacaaaacaaagctgtc

SEQ ID NO: 126915 - DNA, 843 bp, Zea Mays
gcagaaagttcgaaggcagaaaactacttcatggctaagagagcaagtattacagcttggcccaacgtttattaagctcgggcagtgatcctccactagatctgatttatttcctagagaatttgtggacgagcttgctactgaaatgtaaagttaccatgtgctcctgaaatgtaaagttaccatgtgctccaattacttctgtgctaaatgagaggactaagtacaacaacatggagccggatgctgttgatttctttggggaatgtatgaatagtccccgaaatggtcgtactccgcttgcaaatgagatatatgagcaaatggttgcagagaaggaaagagagctagaagaaggagaagcacaaaagtcaccctccaagctcaacaggccacacttgaagaaaaccaaagtttgctgcgccagacccaagaggaagtgaaggggttgcataccaagtttgaagagaccaatgcactgctacgagctgtcctgaaacttcagaaagattgaggtagggatgcataccaagtctgaggatgatgcctttgcttaaggtttttctaccttgctagaacatattttgtggttagaactttgtcagaactacgtgcaatctgtttgaatgcttcgaacctttgtggtggaacctttgtatgtttgaacctctgttgtggaagaactagtgtgctggaattgtgtatgacttgtgatgagaatgttgtgtatgatggcttttctgtgtattatgattctgtgagctatcatgagagcttagtgtgtcgtcactgtatggtcattgtatgtgggtgccatattaaactaaacaaaacaaagctgtc

SEQ ID NO: 126916 - DNA, 210 bp, Zea Mays
atgggcaagctggagaggccgctggccatccatgggagcagggagccgagctgggacatgacggccatgggaggagcttgctgctgccgtgagggagagggaggacggcgtggggaggaagggagcaggacaggtgggctgccatttaaagaggcgctcgctgcagccattggtggacatgagtggtatgctgcagagctctgcacatga

SEQ ID NO: 126917 - DNA, 3336 bp, Zea Mays
atgtatattactcaaccaaaaaaaaagcgcattgagtttgtcagtttcactgcccacggcatgggatcttggagacaaaaactgcctgggttaggcgagggctcaggctcaggctcacaggctgctgaggccggcggtggtgggagaggtttccgtggccgtggtggcttctaccatcaacagcagtccccacaaggtggtcgtggtcgtggaactggctactacagtggtggtggtggtggtagaggtggacgtggggcagtcccgtccgccatagctcccgagctgcgccaagcaatgcaaacttcaaatgaacctgataacatcccagcgccagaggcaggctcccagtcccaggatgcgccgtcaccaagcgaagaggctgtggatcagctgaaaggcttgtctgtacaggacattgtgcaggcgtttccagtgtcgagcaagttccctcaccgcccaggaaatggaagcgttggcaccaggtgtttggtgaaggcaaatcacttctttgctgaattattacctgccaagaaggatcttcatcagtatgatgtttcagttaccccggaagtgacatcgcgaattgtgaaccgttctgtcatggaggagctggtgaggctgcacaagctgtcatatttgggaggtcggcttccagcctatgatggtagaaagagcctgtacacggctggacccctgccattcacttcgaaagaatttcacatcactctactcgaggaagacgatggttctggagtagagaggcgtaagaagacatacaaggtagtgattaaatttgccgcaagggctgacctccggcgtctggagcagtttttagctggaaggcaggcagaggctcctcaagaagccttgcaagttcttgatattgttctgcgggagctgccgacaacaagatatgcaccgtttgggcgatcgtttttctctcctgacctggggaggaggcgttcccttggtgagggaatagaaagctggcgtgggttttaccagagcattcgccctactcaaatgggcttgtcattgaatattgatatgtctgcaactgctttctttgagccattacctgtcatagattttgttgcacagcttttaaacaccgacgacatctactcgaggcccctcttagacgctgaacgtgtcaagataaagaaggccttaagaggcgtgaaggtggaagttacgcaccgtggtaacatgcgacgcaagtatcgaatagctggtttaacatctcaggaaactcgggagctaacttttcctgttgatcaaggtggcacagtgaagtcagttgtacagtattttcaagagacctatggctttgccatccagcacacctacctgccctgtctgcaggttggcaaccagcagcacccaaattaccttccaatggaggtctgcaagatagtggagggacagaggtactctaagagattaaaccagagtcagataagagctcttttagaggagacatgccaacgcccacatgatcgtgagcgcgacattattcagatgatgaatcataactcttaccatgaggatccttatgctaaagagtttggcattaagatcagcgagcgtttggcttcgattgaggcacggattttacctgctcctcggctcaaatataatgaaaccggcagagagaaggactgtttgcctagagttgggcagtggaatatgatgaacaagaaaatggtaaacggtggcagagtgaggagctggacctgtgtgaattttgctcggaatgtgcaagagaatgttgctattggattctgccgtgaacttgctcggatgtgccaggcctcgggaatggacttcgcgctggagcctatccttccgcctatatacgcgcatcctgataaagtggagagagctctgaaagccaggttccatgacgcgatgaacttgctcggaccacagcgcagagaacaactcgacttgctgctcattggaatactccctgataacaacggttctctttatggtgatctgaagcgtatctgtgaaatcgaccttggattagtttcccagtgctgctgcgcaaagcaagtctttaagatgaacaagcagatactggcaaaccttgcgctgaagataaatgtcaaggtcggaggaaggaacacggtgctggctgatgcggtgtcaagacgcattcccttggtgactgacaggcctaccatcatattcggtgccgatgtgacccatcctcatcctggagaagatagcagcccttccattgctgctgttgtggcttcccaagactggcctgaggtgacaaagtatgctggtctagtttctgctcagtctcataggcaagagctgatagaggatctctacaacgtcacacacgatcctcagaaaggaaccgtttgtggtggcatggtcagggagcttcttatatccttcaaaaaatcaactggtcaaaagcctcagaggatactattctacagggatggtgtgagtgaagggcagttctaccaagttctactgcatgaactggatgctatccgaaaggcgtgtgcatcgctggaagcaaactaccaaccgcaggtgactttcatcgtcgtccagaaacgccaccataccaggctgttcgcgcacaaccacaacgaccagaattcggtcgacaggagcggcaacatacttcctggaactgtcgtggactcgaagatctgccaccctacagagttcgacttcttcctgtgcagccatgctggcatcaagggcaccagccgtcctgctcactaccatgtcttgtgggacgagaacaacttcacagccgacgcactgcagaccctcaccaacaacctttgctacacctacgcgaggtgcacgcgctctgtgtccattgtcccgccggcgtactacgctcacctggccgcattccgcgcccggttctacatggagcctgacagctcagacagcgggtcgctggcgagtggcgcccgtggaggcggagcgccctccagctcgtcaacgtcccgcagcacccgcgccaccgccggcggagccgttagacccctccccgcgctcaaggacagcgtcaagaaggtcatgttctactgctgatgaaccggagcatgaagatagtaggcagccctgcctgaaatctgatccgcttggtgctgttgtttggtcagtaataatctgcttgctattgacaaagccgtgctcagaagacatttgcttggtgtttgtttgatgaagggtggctagagtggtggattcgcttcctgcttgtactgagggacgaccgtacgtgaaagaatctaggtctttatttgtgtttggacgattaatagtaaaacacaagagtatttt

SEQ ID NO: 126918 - DNA, 774 bp, Zea Mays
atgtcgcagccgttgatctcaattctcatccacgtccttgatgcagccgttgaccaggataccagcccacccgttgttctacgcatgctggacggggttgtcgccaagaatggcgcagcgcatgctgccgccaccgtcaaccacgaggaccctaccgtggcctttctcctcgaggaactcgcggaccaggacgttgtcctcctagaccttgagcgtgacaatggggccggcgaagacctggcaccgtccgtagatctggaagatgggctggagcgcgcggagctcgccgttcatgatcagatctccggcggcggcgaggggaggggagcggcgccaatggagtgcgggtggaggggacgggatttgggaacggacaggaggggaagtggccagtgggtggggtcaagacaggcggcagacctaggcagctgggactgggactgggaggactggccgcctgggaggctgggactgccggactggccggctcacggctgctgccgcctgccgcctggagtgaggacgccacccgatgctgggaagattggccgtctgggactctgggagtacgccgccggccgcctgggaagacttgaagcgcgtgggagtgggaggctgggagctagggttgcgagttgcgacatcaggccatcagggatatcaactgggcgtggcccgtgggctgtgccgctgttggactggcggttcgtgcagaagcgtaggatcactgcctctggcgaccaagaacgcaccagaacggaaacacatctctaa

SEQ ID NO: 126919 - DNA, 1874 bp, Zea Mays
gaaaccaagcatttaggtcttacgacgcgcccaaagctcacgccggacctgctcctctccgacggcggcatcggcttcgtgctccgctactttcccaaggcgttcaagccccgcccccgcccaggccacgaggtggacgacctcgccaacctcatcaagctctacgcggactggcactcccgcctgatcccctactactccttcgaacagttcgtgcgcaaactcgagaaattgggtgccggcaaccgcgtcaggagatgtgtttccgttctggtgcgttcttggtcgccagaggcagtgatcctacgcttctgcacgaaccgccagtccaacagcggcacagcccacgggccacgcccagttgatatccctgatggcctgatgtcgcaactcgcaaccctagctcccagcctcccactcccacgcgcttcaagtcttcccaggcggccggcggcgtactcccagagtcccagacggccaatcttcccagcatcgggtggcgtcctcactccaggcggcaggcggctgcaccgccgcagtcacgaactcacgcgcaccgcgggcccgcggcagcgcgcacacgcgcacacgcgcacggcgcaccagcagccgtgagccggccagtccggcagtcccagcctcccaggcggccagtcctcccagtcccagtcccagctgcctaggtctgccgcctgtcttgaccccacccactggccacttcccctcctgtccgttcccaaatcccgtcccctccacccgcactccattggcgccgctcccctcccctcgccgccgccggagatctgatccgatccgtttgtgcttgtgctggtgagtcatccttcctatcgatatccttgtcctttggtcttatactgtattattattgtctaatcagatccaaggtagcaatttctatccccttccctatacactccagtcatattcatagatagacaacaacgaaatcacgacccagagcgcgaaaggaaaggaaaggtaggtaggtagatgcataagtaagtgctagcccgtattgcgccggtgactgcaccacaatcacatgttcctctgggccaagaatcgaatgcacaccgctgactgagtgacggggaatcaatctcctggtgtccagtctctgatttccctgtcttctcatgacagcagcaggagtgagaagtaaaaaaataataaaaaaagaagatatggctgccctgccactggccaccgccgaagtatgcgacgctaaccctcacctgatcatgaacggcgagctccgcgcgctccagcccatcttccagatctacggacggtgccaggtcttcgccggccccatcgtcacgctcaaggtctaggaggacaacgtcctggtccgcgagttcctcgaggagaaaggccacggtagggtcctcgtggttgacggtggcggcagcatgcgctgcgccatccttggcggcaaccccgtccagcatgcgcagaacaacgggtgggctggtatcctggtcaacggctgcatcaaggacgtggatgagaattgagatcaacggctgcgacatcggtgtccgggctctcagctcgcaccctatgaaggccaacaagaaggggatgggcgagaagcacgtccccgtcaacattctggaaccaggatttgcgacggcgagtggctctacgccgaccctgatggcattcttgtctccaggacggaactcaccgtgtagacagacacctggttgtatgtgtgtgtgtgtgtataaggaatcgggcgctcttgctgttaagcccgagcttgcaataatggattcttgctggatcacacatttatacttagaataatcgaatgcttgcttccatggttacaagatgttcttggataa

SEQ ID NO: 126920 - DNA, 1140 bp, Zea Mays
aagcatttaggtcttacgacgcgcccaaagctcacgccggacctgctcctctccgacggcggcatcggcttcgtgctccgctactttcccaaggcgttcaagccccgcccccgcccaggccacgaggtggacgacctcgccaacctcatcaagctctacgcggactggcactcccgcctgatcccctactactccttcgaacagttcgtgcgcaaactcgagaaattgggtgccggcaaccgcgtcaggcagcaggagtgagaagtaaaaaaataataaaaaaagaagatatggctgccctgccactggccaccgccgaagtatgcgacgctaaccctcacctgatcatgaacggcgagctccgcgcgctccagcccatcttccagatctacggacggtgccaggtcttcgccggccccatcgtcacgctcaaggtctaggaggacaacgtcctggtccgcgagttcctcgaggagaaaggccacggtagggtcctcgtggttgacggtggcggcagcatgcgctgcgccatccttggcggcaaccccgtccagcatgcgcagaacaacgggtgggctggtatcctggtcaacggctgcatcaaggacgtggatgagaattgagatcaacggctgcgacatcggtgtccgggctctcagctcgcaccctatgaaggccaacaagaaggggatgggcgagaagcacgtccccgtcaacattctggaaccaggatttgcgacggcgagtggctctacgccgaccctgatggcattcttgtctccaggacggaactcaccgtgtagacagacacctggttgtatgtgtgtgtgtgtgtataaggaatcgggcgctcttgctgttaagcccgagcttgcaataatggattcttgctggatcacacatttatacttagaataatcgaatgcttgcttccatggttacaagatgttcttggataattctttttttttgttacttgtcaattttctattccggcgacgaagttgattaaactatagatccccttgttggtgtagttctgaagctgagtgttctgtgtcttggccctgtgcctttgttcaagtatgtatttcatcttttgaaaagaagctgtgacacatactattaattaatttgatt

SEQ ID NO: 126921 - DNA, 1435 bp, Zea Mays
aagcatttaggtcttacgacgcgcccaaagctcacgccggacctgctcctctccgacggcggcatcggcttcgtgctccgctactttcccaaggcgttcaagccccgcccccgcccaggccacgaggtggacgacctcgccaacctcatcaagctctacgcggactggcactcccgcctgatcccctactactccttcgaacagttcgtgcgcaaactcgagaaattgggtgccggcaaccgcgtcagggacgatggtgggcctctctgaaggggagaaacacttcatccgcggcggcattgcacaagaccttcgcactgatggacgtaggcggctgcagttccggtccctctccgtccaaaccggagtcattccacaggcgaatggctcagcgcgtgttaggttgggggccactgatataatcgctagtgtcaaggctgaactaggaaaaccaagcattcttcaccctgacaaaggaaaagttgccatttttgtcgactgtagtccaaccgctgagcctctgtttgagggtagaggctctgaagaattgtctgctgagctctctgtttccctgcaaagatgcttgttgggtggtaaaagtggtgctggtgctgcaattgatctgtcatccctaattgttgttgatggaaaggtctgctgggatctgtacattgatgggcttgtggtcagttctgatggtaatttgctagatgcgctagctgttgcgataaaggttgctttgagtgatacaggtataccaaaagttaatgtttctgttagtgctgcatctgatgaggaacctgaagttgatgtaagtgatgaggaatttctgcagtttgacacatccggtgtgcctgttattattacattaaccaaggtgggtcggcactacatcgttgatgccacctcagaggaagaatcccagatgagttctgcagtgtcggtgtcagtcaacaggcatggccagatatgcgggcttaccaagaggggaggggcagggctggatccaagcgtcatcttcgacatgatatctgtcgccaagcatgtgagccagcagttcatctccctcttggattcagagattgccgccgccgaagctgaagaagaggctcagtgattgatgaaaaggaaaaaggactggttgcgtaaatgctcgtgtgttccaacttcaaccaaatgctgtagaaatcttcaggaatttggttccatttttatgttattattagtagtagtaaacaccgaggatttggatcctgggaacgaacgacgtcgtgttggctttggctgggctcagaggaacgaatactgaatcttgggtctgatgatctgatcctcttgtgcccccaatccgatgataaatttggcccctctcataccaaaccaaacactatggatttcctccgtccgttttcaaacaatttcgcacgcaattttg

SEQ ID NO: 126922 - DNA, 1157 bp, Zea Mays
ggcagactataaaatttcccaacactgcgttcacccctgccgctctcttctcccactctctcgcctcctgtagcccggccaggtctcagtgctcattctcactcctttcaaattaccggcgacgagtatccactacgacgatggtgggcctctctgaaggggagaaacacttcatccgcggcggcattgcacaagaccttcgcactgatggacgtaggcggctgcagttccggtccctctccgtccaaaccggagtcattccacaggcgaatggctcagcgcgtgttaggttgggggccactgatataatcgctagtgtcaaggctgaactaggaaaaccaagcattcttcaccctgacaaaggaaaagttgccatttttgtcgactgtagtccaaccgctgagcctctgtttgagggtagaggctctgaagaattgtctgctgagctctctgtttccctgcaaagatgcttgttgggtggtaaaagtggtgctggtgctgcaattgatctgtcatccctaattgttgttgatggaaaggtctgctgggatctgtacattgatgggcttgtggtcagttctgatggtaatttgctagatgcgctagctgttgcgataaaggttgctttgagtgatacaggtataccaaaagttaatgtttctgttagtgctgcatctgatgaggaacctgaagttgatgtaagtgatgaggaatttctgcagtttgacacatccggtgtgcctgttattattacattaaccaaggtgggtcggcactacatcgttgatgccacctcagaggaagaatcccagatgagttctgcagtgtcggtgtcagtcaacaggcatggccagatatgcgggcttaccaagaggggaggggcagggctggatccaagcgtcatcttcgacatgatatctgtcgccaagcatgtgagccagcagttcatctccctcttggattcagagattgccgccgccgaagctgaagaagaggctcagtgattgatgaaaaggaaaaaggactggttgcgtaaatgctcgtgtgttccaacttcaaccaaatgctgtagaaatcttcaggaataattatgatttacaaagtcattttgctctctatatttacaaagcatgaatgaagaaacccaaggacactcc

SEQ ID NO: 126923 - DNA, 556 bp, Zea Mays
ttcccaacactgcgttcacccctgccgctctcctcccactctctcgcctcctgtagcccggccaggtctcagtgctcattctcactcctttcaaattaccggcgccgagtatccactacgacgatggtgggcctctctgaaggggagaaacacttcatccgcggcggcattgcacaagacgttcgcactgatggacgtaggcggctgcagttccggtccctctccgtccaaaccggagtcattccacaggcgaatggctcagcgcgtgttaggttgggggccactgaaataatcgctagtgtcaaggctgaactaggaaaaccaagcattcttcaccctgacaaaggaaaagttgctatttttgtcgactgtagtccaaccgctgagcctctgtttgagggtagaggctctgaagaattgtctgctgagctctctgtttccctgcaaagatgcttgttgggtggtaaaagcggtgctggtaagatataacttcattgcctccctaaaatccttgtatttgacgtggtctgcgtacggtgatctcctttagtttgat

SEQ ID NO: 126924 - DNA, 846 bp, Zea Mays
atgtgtgatccagcaagaatccattattgcaagctcgggcttaacagcaagagcgcccgattccttatacacacacacatacaaccaggtgtctgtctacacggtgagttccgtcctggagacaagaatgccatcgggatcggcgtagagccactcgccgtcgcaaatcctggttccagcgatgttgacggggacgtgcttctcgcccatccccttcttgttggccttcatagggtgcgagctgagagcccggacaccgatgtcgcagccgttgatctcatccacgtccctgatgcagccgttgaccaggataccagcccacccgttgttctgcgcctgctggacggggttgccgccaaggatggcgcagcgcatgctgccgccgccgtcgaccacgaggaccctaccgtggcctttctcctcgaggaactcgcggaccaggacgttgtcctcgtagaccttgagcgtgacgatggggccggcgaagacctggcgccgtccgtagatctggaagattggctggagcgcgcggagctcgccgttcatgatcaggtgagggttagcgtcgcatacttcggcggtggccagtggcagggcagccatatttttttacttctcactcctgctgctgtcatgagaagacagggaaatcaaacactgaacacaaggagattgattccccgtcactcagtcagggttgtgcattcgattcttggcccagaggaacatgtgattgtggtgcagtcaccggcgcaatacgggctagcacttacttatgcatctactacctgcctttcctttcctttcgcgctcggggtcgtgatttcgttattgtctactctatga

SEQ ID NO: 126925 - DNA, 215 bp, Zea Mays
atcagaattcacaaaatcataccatagcatttgtatttattatacagtggtttccaagcaacaaattgaattattgaatgaaccagtaaaagagagtaattctgcgcaaataaaaatccatggatgctgctacaaagggggaacaaaaatctctacacagtaacttcatcctcatttgatcttgctctatttcagtgcatcttgggaacacaatc

SEQ ID NO: 126926 - DNA, 1490 bp, Zea Mays
gctttttaaaacccccaccgatgtcctgagattggaaagagggaagccgcaggcagcatctgcatctctcgcccacctccgctccgcctactgctgctggtggtagggaggcggagaaggaggcccttgcgcccgcccgccggccggatcagagccgtagcaaccaccacccatggcggacgtgcacgaacctttggtgcgccgtaagaggaagaaggttttggtggactacttggtgaagttccgatggatcctcgtgatcttcgtggtccttcctatttcaactctgatctacttcaacatcttcctgggcgacatgtggtccgccatgaagtcggagaagaagcgccagaagcagcacgacgagaacgtgcagaaggtcgtgaagcggctcaagcagaggaacccgaagaaggacggtcttgtttgcacggccaggaagccctggatcgctgttggcatgcgcaacgtggactacaagcgtgcgaggcatttcgaggtcgacctttcttccttcaggaacatccttgagatcgacaaagagaggatggttgccaaggtcgagccccttgtcaacatgggtcagataaccagagctacctgcccaatgaaccttgcccttgcggtcgtcgccgagctcgacgacctcactgttggtgggctgatcaacggttacggcatcgaggggagctctcacctctatggccttttctccgacacggttgtcgcgatggaggttgttctcgcagatggccgggtcgtcagagccaccaaggacaacgagtactctgaccttttctatggcattccctggtcccagggaacactggggttccttgtctctgcggagatcaagctgatccccatcaaggagtacatgaagctcacctacactccagtcaaggggggtctaaaggagatcgcgcaggcctacgcggattctttcgcgccgagggacggtgacccggcaaaggtccctgactttgttgaagggatggtgtacacagagagcgagggtgtcatgatgacgggcgtgtacgcttccaaagaagaggcgaagaagaagggcaacaagatcaactgcgtggggtggtggtttaagccctggttctaccagcacgctcagacggcgctgaagaggggcgagtttgtggagtacatcccgacgagggagtactaccaccggcacacccggtgcctgtactgggaggggaagctgatcctgcccttcggcgaccagttctggttcaggttcctgctgggctggctgatgccaccgaaggtgtccctgctgaaggcgacccagggcgaggctatcaggaactactaccacgacaaccatgtgatccaggacatgctggtgccgctgtacaaggttggggatgcgctggagttcgtgcaccgcgagatggaggtacaatggctggctggtgctggtgctggtgctgcttgctttatgagtagttgactggatatactaataataattg

SEQ ID NO: 126927 - DNA, 3179 bp, Zea Mays
gctttttaaaacccccaccgatgtcctgagattggaaagagggaagccgcaggcagcatctgcatctctcgcccacctccgctccgcctactgctgctggtggtagggaggcggagaaggaggcccttgcgcccgcccgccggccggatcagagccgtagcaaccaccacccatggcggacgtgcacgaacctttggtgcgccgtaagaggaagaaggttttggtggactacttggtgaagttccgatggatcctcgtgatcttcgtggtccttcctatttcaactctgatctacttcaacatcttcctgggcgacatgtggtccgccatgaagtcggagaagaagcgccagaagcagcacgacgagaacgtgcagaaggtcgtgaagcggctcaagcagaggaacccgaagaaggacggtcttgtttgcacggccaggaagccctggatcgctgttggcatgcgcaacgtggactacaagcgtgcgaggcatttcgaggtcgacctttcttccttcaggaacatccttgagatcgacaaagagaggatggttgccaaggtcgagccccttgtcaacatgggtcagataaccagagctacctgcccaatgaaccttgcccttgcggtcgtcgccgagctcgacgacctcactgttggtgggctgatcaacggttacggcatcgaggggagctctcacctctatggccttttctccgacacggttgtcgcgatggaggttgttctcgcagatggccgggtcgtcagagccaccaaggacaacgagtactctgaccttttctatggcattccctggtcccagggaacactggggttccttgtctctgcggagatcaagctgatccccatcaaggagtacatgaagctcacctacactccagtcaaggggggtctaaaggagatcgcgcaggcctacgcggattctttcgcgccgagggacggtgacccggcaaaggtccctgactttgttgaagggatggtgtacacagagagcgagggtgtcatgatgacgggcgtgtacgcttccaaagaagaggcgaagaagaagggcaacaagatcaactgcgtggggtggtggtttaagccctggttctaccagcacgctcagacggcgctgaagaggggcgagtttgtggagtacatcccgacgagggagtactaccaccggcacacccggtgcctgtactgggaggggaagctgatcctgcccttcggcgaccagttctggttcaggttcctgctgggctggctgatgccaccgaaggtgtccctgctgaaggcgacccagggcgaggctatcaggaactactaccacgacaaccatgtgatccaggacatgctggtgccgctgtacaaggttggggatgcgctggagttcgtgcaccgcgagatggaggtgtatcctctgtggctgtgccctcaccggctgtacaagctgccggtgaagacgatggtgtacccggagcctgggttcgagcaccagcacaggcagggcgacacgagctacgcacagatgttcacggacgtgggcgtgtactacgcccccggggcggtgctgaggggggaggagttcaacggcgcggaggctgtgcacaggctggagcagtggctgatcgagaaccacagctaccagccgcagtacgcggtgtcggagctgaacgagaaggacttctggcgcatgttcgacgcgtcgcactacgagcactgccgccaaaagtacggggcggtgggcacgttcatgagcgtgtactacaagtccaagaaggggcgcaagacggagaaggaggtgcaggaggcggaggcggccatactggagccggcctacgcggacgaggaggcctaaaagctcgtggtcgttttgcttagcccattttaattagaacttgatggatgtagtgtgtgtctgtctcaagtcattttaattagaactcttaaagctcgtggtcggtcggtcagtcagtcagtcattgtcgttgatgtccagcgttgtgttttttttatattctctaatggaatctctcagattgattcgggacttgctatggctctgctctttgttatgttttttttttaaagttctccaggcgctgctgctgcgtcttgcaaggagcccggagctgatgactagcagcagcagcagcttggaacggtgggaggcagcaccaccatggcaccatgtggctgagctgggctggcaggcacagtgagaaaaagaaagacaccagccatctactccccagtccccccacaagagcaaaagcaaagaaagatgcatgtgcatgtgcagtgcagcaactctgccatgctgtcatgtgggacggcacgggcaccagctgcactgcactgcaccgccccacagttatattgtttactgctgctgtgcccactccttgtatatttgcatcactgcctgcttctggaatcaggaaaggagatcaccacttcactcaagaaggcaccctcccttgccactccttttccttgagatgacgatgacgacgatgaagaagcagcagcagctcctcctcctcctttctctcatgtttctcgttgctgtgacagcagccgctgttgctgccgatccacatccacagcaggtgcaggtgcagcagcagcagcaagcacagatgaggattaacagggccaccagatcccttcttcctcagccgccgccgaaactagactgcccgtccacctgctccgtgcgctgcggcaacaactggaagaaccagatgtgcaacaagatgtgcaacgtctgctgcaacaagtgcagctgcgtgccgccggggaccggccaggacacccgccacctctgcccctgctacgacaccatgctcaatccacacaccggcaagcttaagtgcccctaggccttcgccactcatgttatgtacaatgtactatcatcacttcaataaataaataaaaaaacttctggttctggatgcctgtttctactcattctgcccattctccttcagaacgtgagatgctacactgcactgcggctctcctgaactcagaatcggatttgcacatctcaaaccaccactctgcctgcattacgagaggagagttaaggtacaagagtttccagaacgcgttgcattgattgatctagagaaccaactactacgtgtttaacaatgaacaataaaaca

SEQ ID NO: 126928 - DNA, 1446 bp, Zea Mays
agaaacaaactgtaggaggttgctgcggtggtccctgtggggttctactgctttaggattattttctgggatctgttttttttccagcccgagtatgcatgccgtcgagtagcaaccaccacccatggcggacgtgcacgaacctttggtgcgccgtaagaggaagaaggttttggtggactacttggtgaagttccgatggatcctcgtgatcttcgtggtccttcctatttcaactctgatctacttcaacatcttcctgggcgacatgtggtccgccatgaagtcggagaagaagcgccagaagcagcacgacgagaacgtgcagaaggtcgtgaagcggctcaagcagaggaacccgaagaaggacggtcttgtttgcacggccaggaagccctggatcgctgttggcatgcgcaacgtggactacaagcgtgcgaggcatttcgaggtcgacctttcttccttcaggaacatccttgagatcgacaaagagaggatggttgccaaggtcgagccccttgtcaacatgggtcagataaccagagctacctgcccaatgaaccttgcccttgcggtcgtcgccgagctcgacgacctcactgttggtgggctgatcaacggttacggcatcgaggggagctctcacctctatggccttttctccgacacggttgtcgcgatggaggttgttctcgcagatggccgggtcgtcagagccaccaaggacaacgagtactctgaccttttctatggcattccctggtcccagggaacactggggttccttgtctctgcggagatcaagctgatccccatcaaggagtacatgaagctcacctacactccagtcaaggggggtctaaaggagatcgcgcaggcctacgcggattctttcgcgccgagggacggtgacccggcaaaggtccctgactttgttgaagggatggtgtacacagagagcgagggtgtcatgatgacgggcgtgtacgcttccaaagaagaggcgaagaagaagggcaacaagatcaactgcgtggggtggtggtttaagccctggttctaccagcacgctcagacggcgctgaagaggggcgagtttgtggagtacatcccgacgagggagtactaccaccggcacacccggtgcctgtactgggaggggaagctgatcctgcccttcggcgaccagttctggttcaggttcctgctgggctggctgatgccaccgaaggtgtccctgctgaaggcgacccagggcgaggctatcaggaactactaccacgacaaccatgtgatccaggacatgctggtgccgctgtacaaggttggggatgcgctggagttcgtgcaccgcgagatggaggtacaatggctggctggtgctggtgctggtgctgcttgctttatgagtagttgactggatatactaataataattgaaat

SEQ ID NO: 126929 - DNA, 2011 bp, Zea Mays
agaaacaaactgtaggaggttgctgcggtggtccctgtggggttctactgctttaggattattttctgggatctgttttttttccagcccgagtatgcatgccgtcgagtagcaaccaccacccatggcggacgtgcacgaacctttggtgcgccgtaagaggaagaaggttttggtggactacttggtgaagttccgatggatcctcgtgatcttcgtggtccttcctatttcaactctgatctacttcaacatcttcctgggcgacatgtggtccgccatgaagtcggagaagaagcgccagaagcagcacgacgagaacgtgcagaaggtcgtgaagcggctcaagcagaggaacccgaagaaggacggtcttgtttgcacggccaggaagccctggatcgctgttggcatgcgcaacgtggactacaagcgtgcgaggcatttcgaggtcgacctttcttccttcaggaacatccttgagatcgacaaagagaggatggttgccaaggtcgagccccttgtcaacatgggtcagataaccagagctacctgcccaatgaaccttgcccttgcggtcgtcgccgagctcgacgacctcactgttggtgggctgatcaacggttacggcatcgaggggagctctcacctctatggccttttctccgacacggttgtcgcgatggaggttgttctcgcagatggccgggtcgtcagagccaccaaggacaacgagtactctgaccttttctatggcattccctggtcccagggaacactggggttccttgtctctgcggagatcaagctgatccccatcaaggagtacatgaagctcacctacactccagtcaaggggggtctaaaggagatcgcgcaggcctacgcggattctttcgcgccgagggacggtgacccggcaaaggtccctgactttgttgaagggatggtgtacacagagagcgagggtgtcatgatgacgggcgtgtacgcttccaaagaagaggcgaagaagaagggcaacaagatcaactgcgtggggtggtggtttaagccctggttctaccagcacgctcagacggcgctgaagaggggcgagtttgtggagtacatcccgacgagggagtactaccaccggcacacccggtgcctgtactgggaggggaagctgatcctgcccttcggcgaccagttctggttcaggttcctgctgggctggctgatgccaccgaaggtgtccctgctgaaggcgacccagggcgaggctatcaggaactactaccacgacaaccatgtgatccaggacatgctggtgccgctgtacaaggttggggatgcgctggagttcgtgcaccgcgagatggaggtgtatcctctgtggctgtgccctcaccggctgtacaagctgccggtgaagacgatggtgtacccggagcctgggttcgagcaccagcacaggcagggcgacacgagctacgcacagatgttcacggacgtgggcgtgtactacgcccccggggcggtgctgaggggggaggagttcaacggcgcggaggctgtgcacaggctggagcagtggctgatcgagaaccacagctaccagccgcagtacgcggtgtcggagctgaacgagaaggacttctggcgcatgttcgacgcgtcgcactacgagcactgccgccaaaagtacggggcggtgggcacgttcatgagcgtgtactacaagtccaagaaggggcgcaagacggagaaggaggtgcaggaggcggaggcggccatactggagccggcctacgcggacgaggaggcctaaaagctcgtggtcgttttgcttagcccattttaattagaacttgatggatgtagtgtgtgtctgtctcaagtcattttaattagaactcttaaagctcgtggtcggtcggtcagtcagtcagtcattgtcgttgatgtccagcgttgtgttttttttatattctctaatggaatctctcagattgattcgggacttgct

SEQ ID NO: 126930 - DNA, 3040 bp, Zea Mays
ggccccagccgcctcccctctcgttttctctgaccctttccttcccttcccttgttttgatggcgccaccgcgagccgccgccggcgtgtcaattcctgctgatcctgccgccgacagtccagaggcagagtcggagagcaagctgcggcaaggtgcagcagacgcgcggtggctcgaaaccctctccgagccggagctcgatgtgctggtgagcctgagggaagtggccgtcacgcgggcttccgatgccggccatcctggcctcgccgacaccgtcttccatctccgcgcgctgcgggctctcggggttgtgttgctggaagagttgaaagagcggctcaggcaaagctcagctgatgcaaacgtgttggacaggagtgcgttgctagatgatcctgaggccagccaagatcatcagatgccagcgccgaatggtatccacaagaaaaggaagaatcagacgcaggatgggtgggatggagacggtgcccaaagtccaaagagacgaaaaacgacctgaaaactctgaggacgactttacgaggccggtggttgatattgcagctgatccatcactggagaagccagcctcctcttctttgccatccagtcgtctcatcatgtactgtagcgtcagcccgccgtagcatgacaccggtttgatgaataggtttagcttcatcgattgatgatacggcatgccaaccttgatcctgttctgatgtgcagttggttcaaattggaatttttacactttacgatactacgcctcactaaaacatgcgtacggaggagtatatatggttcactcttttttttacacatgttgccaatcacagccacacactttcttctttttttatagttaatttcagacaggtacagtttgtatccaaataaagcatctggttccgacatgctaacagtcgactctctaaacctgcaatctgcatgcaacatgattcgctagttaaactaaaccacgacaaataaaaaagaacaaagtacaaaacctggatgcgcagcttcaaacaatgacatatatacaatatagttgatcacagtacaacttgcaccaacactggaaaaataaagatagataaaaagggatgcatttcatctatgagttatacgatgatgatttacataatttagctccctagagagcaatttggctatattatgtcaactaaaacaaagctaatacattcacaaagaaccagatctacacgaggtggtttccagcagctaacaatgtccttgccatgtcaacatctgtcaaatctacctgtagctgatctcttattcagttctccgtgtatgtcttcagacctagtagaactgggcccgtgccaaagaaataccctaaaatacaatgtccaaggtgccgccataaacggagcattgaacatatcctttttaagagagtgggacaaaatcgattgcgactgcaacaaaccttcaggctcacgctcaacgacgtgggtacaaatcccaacctgactctggctcttttcgcttcagcaccaacccagaagtaccatcctgtgatacattcctcatgcgttcatccacaaacattgtctgaccctggtaggacatgggccagtagctccctgcttccctacgtgcgccttcagatgacactccataactgaaatccacgctaggatggaagtaactcagttcattagatgagggctgtgttgctctggtgttgaaagatggatgagaaatgccgaggcttagacctgacagcggtggtatgactggtgcaccttttgcatccaccaagtatggactgccccctggggcaaagaacgctggggtaaaaggcatggcaggttgagatggataactgagaacactataatcaggagtatgtgcaaaagattgagtgggtcttgcaaaaactcttgattcagcacttggtcccagaaagttatgctggtattgctgtccatcatctctctgtcctacaactatcctcttacccataattgtgacggcagaatggtccgacatatcccttggccttgaaggagtcttgacagaagacccgtccattcctcgcacagaaacatcagcgatcgacatgttgtcattcaagtcaaagtttctggctgcaggttgctttgaagatgagaaagaaggctgactccagttgccattaaattgttggtgattccacaatgacggcacattgcttgcagtgatagcatcttcctcatcaccacatgagaaattaaggtcaagtttcagtcctccgctcacatcaactgctttggaagcaacctcggaaggtagttcagaagaagctggcaggattgctgtcgaaagtggttcaccagaagtagcactgccgttgtcagctacatttaaatcaaataatatgttgcttgttttatgtgaagaagctgaaagtgacttctctgcatcaggagtcctccgaggtggagctggtcgaaaggcgctggttgcagcagagcctttccacccaagtccaccttcaaagtggagccgagctggaaacacagatgagcctcttgatgcagccacagctataggcattgacaaattgacagaattactaaggatcgacttcggattaaagtcagtttcctcggcacactgattttcattaaggtctaagttccccagatcgacactgtgtgtatgttttctactcaacggaccgctgccatctgtgatgcctgatccatcctccttatgagatgaggagcttcctgacttagcctctgtactggaagatttattatcattcagttcactggcaatggctacaggctgccgtggtccttccaggtcaggactgtcagcattcctggaattagtatcaggagaactacaaaagggttctctgtagtcaatgacttcccgctccacctcaatagctaccagacgtgcaacttctagtgcatctgtatcatcaaagtctgccattcgtgttgatttctccccttccaatgcagtggattttgtgtctgctgccttggaggagcccccaaagctcgacat

SEQ ID NO: 126931 - DNA, 522 bp, Zea Mays
atgacatgtgatgctaagcatcacccctctaggagatgtccaaatctcagaattgcttcgtctgaaataccagaagaaatacaaaaacatatcacccacttcctacaattcggcctgaacctttgggtaggctccgcaggatcaacaaccatagttgcacggagtacggtagaattccccggtacggtcattcgggaagtccccctcgaggacgactcccatacaattcttgcgagagctggagaagcgtctacgggagtaatgatcctctctccaggcagtgagggggttggctgcctcggcgacttcgatgacgacggtggtggtgccaggcagctcgagcggccacgcgtcaagcgtgatcttgacagcgtcgaagatgtcgagatcgtgcagccgcacagtagagacactggcggcgcggagcagctaggcgacctctgcctcgatgagatcgtcctacgtcctggtgtttcccttgatgatcacgtcatggacgcggatgcccacggggtccgatga

SEQ ID NO: 126932 - DNA, 1823 bp, Zea Mays
aataagcccaaaggcccatcaaccgagagccttcgtcttccttctctcatcctttgctcctcttcaaacgctcgagaaagagagagagactaaatcctccctcgaaaccctagcatagccactgccttcccgcacgctaggaaggggaagatatgggcgccgaggaggacgccgctgcacgccgcgagcgtctccgcgccctccgtgccgccaaggacctcctctccacccccgacggcgccccaaccccttccaccgacggagaacaccaaaatggcaaccatgagatggcagaagagccagaattaccaggtcatcaggatgcacctggtgaggctgctaaagaggatggtagccccactgaggaggccgaagaggttgaagatgatggtgagcttccagccatgaagttcagaaactaccttccccatgatgaacaacttcgaggaggcaagctggctccagtgtctcttcccaagtttgaagacccaattagtgccgaaactgcagagccaaaggaagtggagaacctttttggaaacatagcaccaaagaatccaaattgggatctgaaacgtgatgtgcagaagagaattgataaactggaaaggcgcacgcagaaagcgttggctgagattgcattggaacagcagagggagaaggaagccttggaggaatctcaagattgaccgacctgtataagtgaccagtgactcatgctggttggtccctcgagcagacgtcattatcttatttagataatgtaatgtactttgggatgctctgtgtatctaccatcttgggatgtactgaattgagtttgggacgtgtatctacctaccatcttgtattgtcagctcaaggatgtagcaaactagtagcaacttcaaaaaatgagatgtagcagtcctgttctgttagacggacctggtcaaactaccgtactaaatacaaacaaagcacaccttcatgctgtgttggactcggtattctcaggcaatggacgaataatgacttcttttgttgtgttaattcagtgggtgagatgagagatgcatacatccatctgtgtggtacaatcatatctcataagctttttctttctttcttttacataatacaagtgctcctaattaggagctgttgctaggcgctgcaactgattaattttcattttgtcgagtaacatccttaaaatgcctaactaggagcaggagcaggaggggtggtggcctgctccaagtccggcaatagcaagcggttgttcctcgcgttctcccgcatcttcccgacgaaacgcttgcccttctcttccagcttgtcgcccatcctccttcctagatccatcacccgtgcacgcctcttcctcttcttcgcatctccctcctcctcagcagcagaaggtgatgcttgctgctcctccacagggcctgctctctcgtctccgctgctgctcagcagtggcatcctcagctgttcccttgttgcatcaccatttgctgaaaccagccaagactgcgagctcgttgatgcttctgcctgctcttgctcttgcccatcaacacgtatctttgtcttgttccaggaaccgttggtgattctttttgtagacggcagcggactcgacttgttctttgcaatggccttggatgtggaagcttcccctggcatcatctctctagttgtgtctgcagcacgcctatcagcgggctcacggttcagccatataaaaggtgcaattctgcggggcacccagtcatccgtatctgctatcatccaggaaataggaaagctttcacagttgggcatcaccaagatctgac

SEQ ID NO: 126933 - DNA, 321 bp, Zea Mays
atgacctacatcgcccgcctgcccttaaaacttgaattccttcttcttcgacttgccttccttctcttgcttcctcttcctcttgtgagcattctgtgccaccatgtcactgaagtcctccttttggttccgaagcttctcttcctctcgagcttcttcatacctgttgcattatcggaagagaacaggtctgacttcggaagaacaaaaaaaaacacttatatctcaactgaacaaagacatcagtcgttacttggctgccagaacatcatccatggcttccagttcctcgggttggatggtgacgtccaccttgtctga

SEQ ID NO: 126934 - DNA, 1357 bp, Zea Mays
atgcgcctcgcggccgcttcgacagtccctcgcgttccatttgcttcggctcatctcagatcaagctagcgcacctgacacccaccacctccctcccagatccaccaccccagccatggccaccgcctttgactccccgacctcctcccccgccgccgcgcccttccacgacgaccctttcctccatttcgacggctcggcccccgccgccgccgacggcttcccggcctccccggacgcctacgcgccctcccccttcggcatgccccactccaacggcgacctccacgacgaccctttcgccgcacctgctgactccaacggtgggcccatccttccgccgcccaccgagatgggccgcgaggagggattcctgctccgcgagtggtgccgacaaaatgctattcaccttgaggaaaaagagaagaaggagaaggagctgaggagccaaatcatcgttgatgctgaagagtttaagaaagcttttgttgagaagagaaagctcaatgctgagacaagcaagggccaaaaccgtgacagggagaagcttttcctagcaaaccaggaaaagttccatgctggtgcagataagcaatactggaaggcgatatctgaacttatcccacatgagattgctaacatcgagaagagaggggcaaggaaagacaaggagaagaagcctgggatcgtggtgatccagggaccgaagcctgggaagccaacggacatggcacggatgcggcagatattgctgaagctgaagcacactcccccaccacacatgaagccacctccgccacctgccgcagctaccggaaaggatggagcaccagctgccgccgggaaggatggagctaagccagcaaccgttgccaacggcagtgtccctgagatggaaaaggctgctgcggaggcatcagtgccagcggcagcaccaccagcagcaactgagccgatcgcagctgcttaatctaatcatctgtggtaggaggatgtgaaaaatctcttattggagttgttgcagaggcggtggtggtgagtgaaactgaaaacgtgtgaatttccggcatggtggaggcatgcactgtgtatttgttacctcgattcatttacattactgctactatatattgttattgcattttgtagagaaggggcgggcgtatcctggttcatggtaataataaggttgtattaggaggatgtttggctgtattatgtttcttcttccaagtgtttgtaaatttcccttttgttattaaaactgattgtattgttaaatttttctttgttattaaaactgattgtattgttaagctactatctgctgcatatacggagtatattttatgatcta

SEQ ID NO: 126935 - DNA, 2246 bp, Zea Mays
cctctccagtcctatcctcctgtccgatggctgcaagttcctccccttctagccggagcctcctcgccacacggcccctcttcttgccgttgaggacgaggaggtcgcttccacccacgtccatcccgcctcgcctcagctgtctccgatctccttctgcgtcctcctccccgtcggcgtcggcatcggcgtacaacggctgggccgacctcgccgcggcgcccgacaccccttttcccttccccctatccttcccgctgcagcccaccacgcatggcctcctcgtcctcctccccgccgccgccatcgccctctccctctccctcgcccgcctacctcccctccccctcctcgcggccgcctttaccgctggattcgcagccaggcacctgtcctcctcagcgcaggcacagtcccccggccgcctctccgccctcctcgccgatctcgacgcccatgcccgcgccttgagggagcagctggtctccgacgcccacccgggtctcctcgtccaggccgtcgatcgcctgcgggatgctgtcgccgacgccgccacagtggccgccgaacagggcgacaccggccgcaccatgtcagacgcgctcggaccgctcggggaggtcgccgactatctcggtgcctgggctcgccacgccgtgcgggacctcagcctcagcccgccaaggaagaagcctgcaaaaggcaacaacagttcagatgttcaagccgcggccaatcccaacaaccgggctgctcaacagcaacaggaaattgggagcaataagcccgtggactctactctgcaacagcagccttttgcatttgatccatctgcagtcgatgatgcaaatggaaggccgcttggcatgttgcagtttgacgaggatgacaatggatccaaggatgcagggaccggtgctcaggccacgctggagagactggtgtccaagcacaggcatcggcgtgaccctgatggccccccgtttgaaggcaggttttccgacgagtcatcatctttgctggagaggacgcttgaaatccgggacaggtcctacaggctcaagatcggtgtgatgagcgaagcgcatcctcctgtatatggtgacgatgaaagcgccgccagtgctgctgattcagatggcgaggagtttagccgaaacgtcaaggaagctgcggagatcctgaggaaggccagggcatccatggctgacgaagagaccgcagacgcactgctgtacaaatcagctaggctcctttccacagctgtggctttgaggccaacaagcctggtagcagtgggtcagctagggaacacgtacctcctccacggagagctcaagctcaaggttagtcgcgagctgaggacactcttggccagcagcggcgcctttctgaacggaagagagcgtgctccacggtccaggaaggtagacaggaggatggtaagcagagagagcatctcatccgctcttgtggatgtatgcgaggaatgcgagagcctccttgtcgaggccggcagaagctacaggatggccctctccatcgattcaggtgacgccaaggcattgtacaactgggggctggcacttattttccgggcacaattgctcgctgacatcggaccggtatgatgaaatctttgctctaggaactcaagctgcttatataatcgatacatcatcatgctgcaggaagcagcagccgacgctgaccgggtgtatctagctgcaatcgacaagttcgacgccatgttgtcgaggagcaacacttatgctccagaaggtttggtttgacaagaatgctctgtcgttaaccatgtgtttttagtattattagtgacgacgaactgttgcagctctctacagatggggcactgcgttgcagcagcgctcccatctgcggcctcggagcaacggtgagaagataaggcttctggagcaggcgaagagcttgttcgaagatgtgctgtatgtggaagcagacaacaagatggtgagggaggcgctgtcatcgtgcatatcagagctcaactaccatggccgctggttataaccgtgaggagctttgtagcaactagcaagcgaggggaggagggctaatgataacttttgagttttgaatgatgtattagcttctagctttttatgctgacaagaagctcaaacaatatcttgcaatacaatgcaatatgacctttttttttcttgtatggaacgtgtggttgaatcgattaatacaagtgaatg

SEQ ID NO: 126936 - DNA, 2130 bp, Zea Mays
cctctccagtcctatcctcctgtccgatggctgcaagttcctccccttctagccggagcctcctcgccacacggcccctcttcttgccgttgaggacgaggaggtcgcttccacccacgtccatcccgcctcgcctcagctgtctccgatctccttctgcgtcctcctccccgtcggcgtcggcatcggcgtacaacggctgggccgacctcgccgcggcgcccgacaccccttttcccttccccctatccttcccgctgcagcccaccacgcatggcctcctcgtcctcctccccgccgccgccatcgccctctccctctccctcgcccgcctacctcccctccccctcctcgcggccgcctttaccgctggattcgcagccaggcacctgtcctcctcagcgcaggcacagtcccccggccgcctctccgccctcctcgccgatctcgacgcccatgcccgcgccttgagggagcagctggtctccgacgcccacccgggtctcctcgtccaggccgtcgatcgcctgcgggatgctgtcgccgacgccgccacagtggccgccgaacagggcgacaccggccgcaccatgtcagacgcgctcggaccgctcggggaggtcgccgactatctcggtgcctgggctcgccacgccgtgcgggacctcagcctcagcccgccaaggaagaagcctgcaaaaggcaacaacagttcagatgttcaagccgcggccaatcccaacaaccgggctgctcaacagcaacaggaaattgggagcaataagcccgtggactctactctgcaacagcagccttttgcatttgatccatctgcagtcgatgatgcaaatggaaggccgcttggcatgttgcagtttgacgaggatgacaatggatccaaggatgcagggaccggtgctcaggccacgctggagagactggtgtccaagcacaggcatcggcgtgaccctgatggccccccgtttgaaggcaggttttccgacgagtcatcatctttgctggagaggacgcttgaaatccgggacaggtcctacaggctcaagatcggtgtgatgagcgaagcgcatcctcctgtatatggtgacgatgaaagcgccgccagtgctgctgattcagatggcgaggagtttagccgaaacgtcaaggaagctgcggagatcctgaggaaggccagggcatccatggctgacgaagagaccgcagacgcactgctgtacaaatcagctaggctcctttccacagctgtggctttgaggccaacaagcctggtagcagtgggtcagctagggaacacgtacctcctccacggagagctcaagctcaaggttagtcgcgagctgaggacactcttggccagcagcggcgcctttctgaacggaagagagcgtgctccacggtccaggaaggtagacaggaggatggtaagcagagagagcatctcatccgctcttgtggatgtatgcgaggaatgcgagagcctccttgtcgaggccggcagaagctacaggatggccctctccatcgattcaggtgacgccaaggcattgtacaactgggggctggcacttattttccgggcacaattgctcgctgacatcggaccggaagcagcagccgacgctgaccgggtgtatctagctgcaatcgacaagttcgacgccatgttgtcgaggagcaacacttatgctccagaagctctctacagatggggcactgcgttgcagcagcgctcccatctgcggcctcggagcaacggtgagaagataaggcttctggagcaggcgaagagcttgttcgaagatgtgctgtatgtggaagcagacaacaagatggtgagggaggcgctgtcatcgtgcatatcagagctcaactaccatggccgctggttataaccgtgaggagctttgtagcaactagcaagcgaggggaggagggctaatgataacttttgagttttgaatgatgtattagcttctagctttttatgctgacaagaagctcaaacaatatcttgcaatacaatgcaatatgacctttttttttcttgtatggaacgtgtggttgaatcgattaatacaagtgaatgaaaaagagcaagcatctttcttg

SEQ ID NO: 126937 - DNA, 4095 bp, Zea Mays
atgaccttcgcactagggcttggctatgctaaagtggctcccaaccttggaggacgactgccaagcaagcgccgcgaggcttgccccgatcttggctcagaccagactccaaccctggccaattccaggaatattccccaggctcgggtgtctggttggcatgtggagccacaagctatatcaaggaatggtgtggatgctgagtcacttacccatttgaagggagaaataaaaaggctttttataaatgagagaagacgtcgagtagagctttggattaatgggactgtcaaatctagcctaatgttgccaaggattaatccaaactttatcggaagtgaagaggatcctacatgcattatttgtcgacagtatctgtatctttcagcagtctcctgtaactgtaggctgtcttcttatgtttgccttgagcactggaagcacctttgtgaatgcagtccgaagaagcattgcttactttatcgacacacccttgcagagttgggggatttagtgtgcgaggtctctttggttagcccccaaagggacaatgttatgcagaatccacacttgctcaatgatgtttatgtgccgtctaaaaaggtcaaagatcactatatattatatagacagcttgcagaagattgggtttcaaactctgaacatattctccagatgccatttgtggaaaggtcttatgccactgctttggaagaagctgaacaatttctttggggtgatcatgccatggattctgtccggaacataacagtaagactaacaaaggctatgaagtgggccttgggtgttagaaaatgtctctccaaaattcaggactttctgaaagatggctgctctgaaaaagtaaattatgtggaaatagaagaactagttgctacgaaatgtgccccgtgctgtgagcctagtcttacaaaattgcaggcgtatgcagaggaagcgaaattgctgattaatgaagtaaacaatgcactatcatctttcttaacagtagacaaattggaaacattatactcaagggtttcagaattcccagttaagctaacagaatcatcgactttgttttgggagttatcttctgcaaagtcctggttgaagaaagcaagtgattgccttgaacagaataaactgggcattatcgacatagatgtcctcaataaactaaaatcagagataatacaacttcgagttctacttccagagattgatcttatctcaaagctgtggaaagatgtggaatcatggcaaacccgttgtcaattatatctccaagacttccctgatctaaaggagctggagggttttctccttgctgcggatggtgccaactttagcattccagagctgaacattcttaagcaacattactcaaattgttgctcttgggtgagtcgtgctaagaacatactcagaaaactttatgctacgagtgactatcacaatgctgttgaggagttgacagttgatgaattgcctattgtggagaaagaactaaagaggtccttatgtaggaagcaagcatctgaggcacttgcaacagtaatgccaatggaggtggttgaagaaattttaaaagaagcttcgatactacatattgaagaggagcaaccatttgatgatctgtctcggatgctcaaagaggccacttcctgggaagagaaggctagacttattcttgaacgatcagcttctctctctgagtttgaagaccatatgaggtgttcagagggaataagagttatccttccgtctaaactgcatatgaaagcagaggttgatattgctaaattgtggatagacaaatgtcaggcctatttgagaccaggctgcaataaacttgcatttggagactttcttaaagttgatgatatcaaggatttaatcaatcagcctgcaaatttgaaagtcattcttgacacttcagaacttaattctgttctcaacaatattgaaaaatgggaacacagttcactaagtctactcaataattttagagccttacttcatttgaatagtattggctctacagttgacacacttcaaagaaaattggaggagctgcaaggtaaaatgaacacagaaatagaagttggattatctcttggttttgagttcaaggttctttgggaactgaaggattcttcgttgatgctaagatggatattgaatgcactgtctctgtgctgtatgattcctttattgcaggatgttgatagattaattgaagaagcagtccaccttcctgcttccttagcagattgttctttggttacattgttgatgagggcattgtcttgtctaagaaaatcacttattttgcttcctggttctggaacatctgcaaaatccaaattggaagatgttgaaaatattctagcagaattcaaggaggttgatgttccttatcctatcatgactgccaagctggaggatgctgtaaacaatcataattcatggatagagcaatgcaataccttcttcatgctgtctgatggccagtcgtgggctatgctgcaaaatctcagggacaatgggcagtctgttgcatttgattgccctgagatggataaagttgttgatgaggttaaaaacgttgaagagtggctcaatcagtgccactgtactctacttctagatggaaataatagttctttgctctccatacttgtaaagataagaggattattggatgatgtttgcacgttatatgctgaggattgtatgaagttaagattatgtgctgtatgctcatgtgacatcggagataggctggcatctagatgtgtgacttgtcaagactggtaccatggctcctgcgtggaaaacctgtctgctactacacaaacgacaattgaatggatgtgttcattttgttcacttttacagagtgaggaccaattgaagaaccaactatctgtaaagatgtctaaaggaaactgccctgcacttgccgcacttgatgaactcatctcttctgcaaagggtttatacactgggattgaggaaattaatttgctaaaagaaattgttgataaggctcgtaacttgaatgcctacttgatgcaaattctggatgattcagactgttatcatggagaagatcttactgtcatattcaaatctcttttagttgctctcaaggcgacatcagcttctggcttgtatgatgacaatgtcagttgcagaattgagtctgttttgagcagatatttgtggaagaaacaaatacataaactattgtatggtggtaaaaagtcatcgattcaagaagtactgtgccttgatgaagagggttcacatttagagatatgtgatcaagatttcttcaagttggagattagtaaaataaaggaaaccagcctgcagtggctggctaaagcagaggaggttgcatgtgattctggtgagcttgcactggatcttgtgtatggacttatagctgaaggggaaaatctctctgtagactttgagaaggaactaaagttactgagggatcgcagtgtcctctactgcatctgctgtaagcccgacgataacagggccatgattgcatgcgaccagtgtgatgagtggtaccattttgattgcatcaacctgcttggaccccctccagaaagcttcttctgccctgcttgccatccaaacaatggtgaagaatctgtatcacttgcacgctcagaggatgatgaggatagatcaagcactggagccggagctcacacgccgccggacagagtggtggagcgagacttaataaagcttcttagctgccatagcggtagctcatggagcgagagcagaagggctcctcatcgaacagctagaaggcgtagtagtttcgtcggattgttatgatgtgcaggaaccttcttagcaccgtgaattgattctttttagttaggttagaagcaggaacgatccatcatctgctgttgtaatttgtagctgttgacaggaggtagatgtagcaaggcagagctgtaagaacccattattattgatcttgtagcagtctgaggttttggaaattgtatcatatactaccgccgttcttgaatatttgtcgcctattgtttc

SEQ ID NO: 126938 - DNA, 1064 bp, Zea Mays
atcaaacttctcattctgaaaagcccttgttctttgtctgtttaaaaaggcgaggcctaggtgctgggcagtgctttgtctaacttttttccgtttagagatgttttggacttgatgtatgtaaaaacgggacaaattatagacgaggaaagataaacttcgatcatattatttatggatgcatgttgatatcttccttttttctgttctgacatgatactctaacagtccacagaaagtacaaacactctgcaacgcctaggcacaaggtggaggcccaaccacctgtatagcacctatagagctttttttaacattgatgctacatggttccaattgtgaattgatttccgtgtgaaagtaactaataaatgtgctattgctgtttaggatgagtaactacatcttttggctattttgcttggtaggcgacatcagcttctggcttgtatgatgacaatgtcagttgcagaattgagtctgttttgagcagatatttgtggaagaaacaaatacataaactattgtatggtggtaaaaagtcatcgattcaagaagtactgtgccttgatgaagagggttcacatttagagatatgtgatcaagatttcttcaagttggagattagtaaaataaaggaaaccagcctgcagtggctggctaaagcagaggaggttgcatgtgattctggtgagcttgcactggatcttgtgtatggacttatagctgaaggggaaaatctctctgtagactttgagaaggaactaaagttactgagggatcgcagtgtcctctactgcatctgctgtaagcccgacgataacagggccatgattgcatgcgaccagtgtgatgagtggtaccattttgattgcatcaacctgcttggaccccctccagaaagcttcttctgccctgcttgccatccaaacaatggtgaagaatctgtatcacttgcacgctcagaggatgatgaggatagatcaagcactggagccggagctcacacgccgccggacagagtggtggagcgagacttaataaagcttcttagctgccatagc

SEQ ID NO: 126939 - DNA, 862 bp, Zea Mays
cctcataccactgtggggggctaaattcagagaaaacaaacagagaaaattccttatttgacactcaaaaaacttgctcttcccaatttagcactttaaaactgctactcccctgcatctcttcaatcatccatcttgctcaaaaactgctacaatgtccgcggccgtttcgaggagacgtgccaagaacccatgccaagattttccctacgttgaaacagaagagtggctggcgtgggcccatgttcgcatggacctattatcaatgattctcagaggcgtatcatcaagaacctgggttactccactgatgcagcaaggattgaccaaagagcacaagacatacagtgagctgttcaagacgactatcaatgatgttcatctttctgctctagcggcgatttttggctggaggacagataaaatggatgatccttgtgcctctggtgcattgggttcacatttagagatatgtgatcaagatttcttcaagttggagattagtaaaataaaggaaaccagcctgcagtggctggctaaagcagaggaggttgcatgtgattctggtgagcttgcactggatcttgtgtatggacttatagctgaaggggaaaatctctctgtagactttgagaaggaactaaagttactgagggatcgcagtgtcctctactgcatctgctgtaagcccgacgataacagggccatgattgcatgcgaccagtgtgatgagtggtaccattttgattgcatcaacctgcttggaccccctccagaaagcttcttctgccctgcttgccatccaaacaatggtgaagaatctgtatcacttgcacgctcagaggatgatgaggataggtag

SEQ ID NO: 126940 - DNA, 378 bp, Zea Mays
atggcgaccacggcatgccgcgacccggtgatgaaccccggactcaagaggatgttcaccaaggtttcggtgttctgcttgctggcgccattgtcgagtgactactcatccaccgtgaccgccccggtgtgcgtgcaacagcagggctcctcgtggctacagtttttttttgcgccgatgaaagcaggagcacatgctcgtcttctacatcggatgctagtcgacgtcgctgccggtcgcgtcctcggcaccgctggtggaggcggggtggctagagtttcgtcgatggacacgaccagtgaagccttcatcttcttacgtttctctctgtcgagttctggtaacggcggcggtcatagtggatgcagcggtcaatga

SEQ ID NO: 126941 - DNA, 2279 bp, Zea Mays
gcacagcgcagcacatgaggagaagaagagggaggagtaattatttattaattaacaaagagaagacttcttccttcctcgtcgtctccagcccattccaattcttgattccatcgccccaccatccacaactcccctaatccttccaacctcctcgtcgtccagtccaccacctccacgcgcaatggccagcggctaggcggcaccaaccagatcacaaggattcgtttcatccggcagcgcagctctagagcctccatgggcagctacgcgtacaagtactgtatgtgcttcacgcgcaagttccgatccccggacgcccagccgccgccggacgtccgcgccgcccacctctccttcgcctctgacgcccatgccctccgccgcttcgtcgccggcgtccagggcgagtcccccgccgacgtcgaccgcatcctcgccatgctctccgggggccacagccatggaatcgcccgcctcgtcacaaggtcgccggcggcatccacgcccacgctcgaagacttcttcgccttcctcttctcccccgacctcaacccacccatcgcgcaccaggttcaccaggacatgtcagcgccgttctctcactatttcgtgttcaccgggcataattcctacctcactgggaaccagctcaatagtgactccagtgacgtcccaattgtaaaggcgttgcagagaggtgttagagtcattgaactcgatatgtggcccaatccttcaaaggacaatgtcgatattcttcatggagggacattgactgccccagtggaaatgatcaaatgtttgaagtccatcaaagaatacgccttctgtgcctcaaattatcctcttgttattactcttgaggatcacctcacatcagatctccaagctaaagttgctacgatgctcactgaaacatttggagatcttcttttcgtccctaatccagacccgatgaaagagtttccttctccagcatctctaatgaagagaataatcatatcaaccaaacctccacaagaatataaggagtttctcaaagccgagaataatcgcagtggcagcggaaacatagctgagttgccagaccaaggaagcctgagaagaatagattcaaatgccgatgaatctgatgggaaggatgaactggatgagcaagacgaggaagactccgacgaggacgatcccaaatttcagcaggatacagcctgtgagtataggaaactcatcaccatccaagctggcaaaccaaaaggccatttgcgggatgcgctaaaagtggatccagacaaagtcaggcggctttctttgagcgagacacagttagctaaagcgacaatctctcatggtgctgaagtcataaggttcacacagaagaatatactccgtgtgtatccaaagggcacgagggttaattcttcaaactacgatccaatgaacgcctggacccatggtgcgcagatggttgcgttcaacatgcagggccatgataaagcgctccggttgatgcaagggtttttcagagccaatgggggctgtggttatgttaaaaagcctgacttcttgctaagaacaggtccaaatggggaagtatttgaccccaaggctagtttgccagtgaagaaaaccctcaaggtgaaagtttatatgggagacgggtggcgcatggacttcagtaaaactcatttcgatgccttttcgcctccagatttctatactagggtagggatcgcaggtgtgaaggcagacagtgtgatgaagaagacaagggtgattgaggaccagtgggtgccgatgtgggatgaggagttcacgttccttctgacggttccggagctggccctcctgagggtagaggtccaggagtacgacatgtcggagaagcacgacttcggggggcagacagtcttgccggtatgggagctgaagcagggcatccgtgctgtgcccctgcacgatcgcaagggtgtcaggtacaagtccgtcaggctcctcatgcgatttgattttgtgtagccgagccgagccgccattcagattcagcttctgtttttttccttcttgtgtgaattgaatgtattactcccttccttccatcttcaacgtatatgtgtatgtatgtacttatttttgtcggaataaaagttgtatggaatggaatggaaggaaggagtagaactgtcttcaaactccagcttctagatctgtacgggtgattcagttttacttgctggcacattgtttgtttgtttactttactggagatagatttgtac

SEQ ID NO: 126942 - DNA, 1473 bp, Zea Mays
gacttcttccttcctcgtcgtctccagcccattccaattcttgattccatcgccccaccatccacaactcccctaatccttccaacctcctcgtcgtccagtccaccacctccacgcgcaatggccagcggctaggcggcaccaaccagatcacaaggattcgtttcatccggcagcgcagctctagagcctccatgggcagctacgcgtacaagtactgtatgtgcttcacgcgcaagttccgatccccggacgcccagccgccgccggacgtccgcgccgcccacctctccttcgcctctgacgcccatgccctccgccgcttcgtcgccggcgtccagggcgagtcccccgccgacgtcgaccgcatcctcgccatgctctccgggggccacagccatggaatcgcccgcctcgtcacaaggtcgccggcggcatccacgcccacgctcgaagacttcttcgccttcctcttctcccccgacctcaacccacccatcgcgcaccaggttcaccaggacatgtcagcgccgttctctcactatttcgtgttcaccgggcataattcctacctcactgggaaccagctcaatagtgactccagtgacgtcccaattgtaaaggcgttgcagagaggtgttagagtcattgaactcgatatgtggcccaatccttcaaaggacaatgtcgatattcttcatggagggacattgactgccccagtggaaatgatcaaatgtttgaagtccatcaaagaatacgccttctgtgcctcaaattatcctcttgttattactcttgaggatcacctcacatcagatctccaagctaaagttgctacgatgctcactgaaacatttggagatcttcttttcgtccctaatccagacccgatgaaagagtttccttctccagcatctctaatgaagagaataatcatatcaaccaaacctccacaagaatataaggagtttctcaaagccgagaataatcgcagtggcagcggaaacatagctgagttgccagaccaaggaagcctgagaagaatagattcaaatgccgatgaatctgatgggaaggatgaactggatgagcaagacgaggaagactccgacgaggacgatcccaaatttcagcaggatacagcctgtgagtataggaaactcatcaccatccaagctggcaaaccaaaaggccatttgcgggatgcgctaaaagtggatccagacaaagtcaggcggctttctttgagcgagacacagttagctaaagcgacaatctctcatggtgctgaagtcataaggtaatttgtgtgcgcaagaacactagaagattttatactgaactggtatacagttctgtggacttcctgaactcaatattttgcttatgctcttaaatcatactcctctgtttagaccataggagttcaacagttttagattgtagactttacattatgtaattgattcg

SEQ ID NO: 126943 - DNA, 2239 bp, Zea Mays
ttccaattcttgattccatcgccccaccatccacaactcccctaatccttccaacctcctcgtcgtccagtccaccacctccacgcgcaatggccagcggctaggcggcaccaaccagatcacaaggattcgtttcatccggcagcgcagctctagagcctccatgggcagctacgcgtacaagtactgtatgtgcttcacgcgcaagttccgatccccggacgcccagccgccgccggacgtccgcgccgcccacctctccttcgcctctgacgcccatgccctccgccgcttcgtcgccggcgtccagggcgagtcccccgccgacgtcgaccgcatcctcgccatgctctccgggggccacagccatggaatcgcccgcctcgtcacaaggtcgccggcggcatccacgcccacgctcgaagacttcttcgccttcctcttctcccccgacctcaacccacccatcgcgcaccaggttcaccaggacatgtcagcgccgttctctcactatttcgtgttcaccgggcataattcctacctcactgggaaccagctcaatagtgactccagtgacgtcccaattgtaaaggcgttgcagagaggtgttagagtcattgaactcgatatgtggcccaatccttcaaaggacaatgtcgatattcttcatggagggacattgactgccccagtggaaatgatcaaatgtttgaagtccatcaaagaatacgccttctgtgcctcaaattatcctcttgttattactcttgaggatcacctcacatcagatctccaagctaaagttgctacgatgctcactgaaacatttggagatcttcttttcgtccctaatccagacccgatgaaagagtttccttctccagcatctctaatgaagagaataatcatatcaaccaaacctccacaagaatataaggagtttctcaaagccgagaataatcgcagtggcagcggaaacatagctgagttgccagaccaaggaagcctgagaagaatagattcaaatgccgatgaatctgatgggaaggatgaactggatgagcaagacgaggaagactccgacgaggacgatcccaaatttcagcaggatacagcctgtgagtataggaaactcatcaccatccaagctggcaaaccaaaaggccatttgcgggatgcgctaaaagtggatccagacaaagtcaggcggctttctttgagcgagacacagttagctaaagcgacaatctctcatggtgctgaagtcataaggttcacacagaagaatatactccgtgtgtatccaaagggcacgagggttaattcttcaaactacgatccaatgaacgcctggacccatggtgcgcagatggttgcgttcaacatgcagggccatgataaagcgctccggttgatgcaagggtttttcagagccaatgggggctgtggttatgttaaaaagcctgacttcttgctaagaacaggtccaaatggggaagtatttgaccccaaggctagtttgccagtgaagaaaaccctcaaggtgaaagtttatatgggagacgggtggcgcatggacttcagtaaaactcatttcgatgccttttcgcctccagatttctatactaggggatcgcaggtgtgaaggcagacagtgtgatgaagaagacaagggtgattgaggaccagtgggtgccgatgtgggatgaggagttcacgttccttctgacggttccggagctggccctcctgagggtagaggtccaggagtacgacatgtcggagaagcacgacttcggggggcagacagtcttgccggtatgggagctgaagcagggcatccgtgctgtgcccctgcacgatcgcaagggtgtcaggtacaagtccgtcaggctcctcatgcgatttgattttgtgtagccgagccgagccgccattcagattcagcttctgtttttttccttcttgtgtgaattgaatgtattactcccttccttccatcttcaacgtatatgtgtatgtatgtacttatttttgtcggaataaaagttgtatggaatggaatggaaggaaggagtagaactgtcttcaaactccagcttctagatctgtacgggtgattcagttttacttgctggcacattgtttgtttgtttactttactggagatagatttgtacattagcttgattattcttcatttagctactggctaagagatagattagccaatgtgttt

SEQ ID NO: 126944 - DNA, 1668 bp, Zea Mays
atggatccattcaaaaataacgatgttcgtcctccattaagagaactatctaacaacacccttgaagatgaatgtccagatgtgtctataagcgacgcaagcatcattgattgtactataccgtgtgataccactccaggaggacgtgatgatgcaagacaacgtaggagggaaagagaaagagtacgatatgttacaatgagtgttgaaaagaaaaatgaattgaagaagcgtcgtgagtcacgaaaaaagggaaatgttatgcaccatgagtattcagaagtttgcaacatccctgcaaacaaggacaacaataatcatcaaaacaatgaaattgaggatgttgatgatgattcttatcggttgcataagaataactcatttgaggacttaatcggcattgaggacccgaagtttaccccggagcttgtgtggagttcaacagatgctgaagcgcctcatgggtctctatgtagctccgagggcatggctatccctgagttaagcccaacacctttcgttcctaatccatcacagaccgaggatgtcgagaaagacagtaagacagagtctcctagacgacaaagacataaacgtcatgtgtcgtccggccaaagacagaccttggtgtctcgtcaaaatcagaaatttcatttagccattggaacaaacttcgctactgcaactagggattgtgtaatggagaatgatggggataatgaaattgatcatcagactgtttcagagatcaacaacaatgaaagtaccggtctgtgtccattccctcacacggagagtaacaatatgactgaaggagcagacattgggatgcaacaccaggcagccccgaatgtcaccactaatgatgatgttgaagatgtgctctttacagaggatgatgatgaagctgtactttttgaagatgacgaagacaaaggatacttattcgctgggcaagcaatctcgtggccactggtgggatatgtggttgtctcaattgcagacaattttgttgaacctgtaatatcaatgaggttgaagatatcagaagtaaaggcaatttttaatcagatacactatatcctccagactgtggaaaagaaatatgagcaaatagaaccagttcaacaggtcagtgaaggcgatagtttggatgatggaaatgatgacatggatgagcaagctagatcttcacaacacctgtcctcatcaacagctgagatttccttgcccccatctgaggatagtgatcgaatgagtgggcaagtagagaatgatgatgggttgggcttagttcagagtgacactccagttggagcagcagatggtgacagtacccagatcacctcgactttgactgctttttcggcttatggtcataaagatcctaatattcatacaaccaatgaggcccagctatatggactggtggagcctaatgtacatccacaagcattagcttcctcttctcagagtggtgttgacccacatgcttttggaaatgttatgatgccagtgatgtaccagcagatgttccaggtgcctccgaagccaaatgagaccgtgcaggatacttcagccaatggaaaaagtaagcgacctcgcggtcagaagctcacagagacatcccaacaggcaaatggaaccccagcatctgcatctggctag

SEQ ID NO: 126945 - DNA, 1823 bp, Zea Mays
ttggttctgtcgatgcagctcatcaattccattcccagctccggaaaatcgagaaatttcgattggttatttgatttgatttgattctggccgtgccgaaccctagcttccatctcggtccaatctcagttccacatattgttactcctcggcagcagaggaggccgtcgtggaatgagttgaggatgacggcatactactcgtgctcctaggaaaggtcagggaaaggaagaattcgagccatggaggacgaggcggacggcggcggcgaatccttcgtgctgcgctccggcgtccgcgcgggcctcaagcgcgaattcgccttcgccatcgcctcgcaggccgtcctttcgtcctcatacgcacccctgggccgcacccgccgctcatcccgcatcctcaacccatcggccgcttcgaccccctccgtcgccggcgccgccgtctcgacatcctcctcctcaacccccgacacaaagccaaaagccaagcgcccgcgcccaccagatcctccccctccccctcccttcccccctccaccagactatgcccctgcccccggagaagaccatgacggggccgctgtcggccccgtgctcgccttgatggctgctgctgggcccagccctccgccgacgcctttgactccgcaaccccatgccgacgcggatgcggatcccgcacacctcgccaacatcatcattccgccggagtcgtcgcccaggcgcatcacgcgctccatgctccagcccaagtctcgccttcctaccgccgctcgttctcctgacaatgcggcaccgctcaaaccaaaactggaaccgccggaagaggaggatggcaagccggttccagcgttgaggcgcttcaccagatcactactggtcaaggacaaggacagcaacgacgacgacctctcaggcaccaccaccgccagcaatgcctcctccccttcgcccaaaaccaacaccacaagtaccagcaggagcagcaacaaggggaataagaatacaaacaagattcccaccaacctcagggagctgctcgccaccggcatgctcgaaggtcagcccgtcaagtacatcatgaggaaaggcaagcgagcggtactccggggagttatcaaacgcattggcatattgtgttcatgctcttcatgcaaaggccgaaaagttgtttcaccttactactttgaggtgcatgctgggagtaccaaaaagcatccatcagactacattttcctggaaaatggaaataatctgcatgatgtgttgagggcatgtacaaatgctacattagacatgttggagcctgcaatacgaaaggcaataggcccagcacctcaggagagaatattcagatgcaaatcatgcaaaagttcattcagtacactccgcagtgggaaatttgctttgttttgtgattcgtgtcttgagtccaagggagctaagaataatatcagttcatccaaagttgggcgaagtcaaacttcatctgccaaggtatataagagtgcatcaccaggagcaaagtcttcaagtgtaggaaggcttacaagaaaggataagggtatgcataaggtcgttttcatgagtggcattttaccagagggcactgatgttggttactatgttggtggaaagaggttactggatggatatataaaggaacttgggatctactgtcattgctgcagcacagtggttagtccttcacagtttgaaggtcatgctggtcgagctgctcgacgcaaaccttaccacaacatatatatgtcaaacggcgtttcactacatgagctgtcaatttcactcttgaaaggtcaa

SEQ ID NO: 126946 - DNA, 549 bp, Zea Mays
ggcgagggtggccttctcctcccatgcaagctcagcagtacgctcatgggcacgaaatgtgttggcttatcttctgccacaaagggaacttggtgttgccgatattgtgagaatagacaacagagggaaagttgtttggcatataacaacaatgcaatagctgctgggagagttgaaggagttgatgccttggaacaaatattcacgcggtcgatacgtattgctacaacacttgagactggatttggtggttgcgcactgtgcaagtaagtgttcttccatggcatgttgcttgtatatccaccctggccttcttttcttttgcactgataataaattacatgtactttcaatcttacctaaaacatttcgtatgctggcagagaaaatttggcaaacttctcatcaagtaatgatatttgttgaataagctggttaatgaatcggaagctcaatgttcgagcgctaaatctctttacccatttcgaactctctgattacttttgcataaatgttagtttcattaatcttactttaagctttatttgc

SEQ ID NO: 126947 - DNA, 1521 bp, Zea Mays
ggcgagggtggccttctcctcccatgcaagctcagcagtacgctcatgggcacgaaatgtgttggcttatcttctgccacaaagggaacttggtgttgccgatattgtgagaatagacaacagagggaaagttgtttggcatataacaacaatgcaatagctgctgggagagttgaaggagttgatgccttggaacaaatattcacgcggtcgatacgtattgctacaacacttgagactggatttggtggttgcgcactgtgcaagctccatgatttcagcaaaaagaaattcagtacccgaaccgtgctgctttgtgaccaatgtggtagagaatatcatgttggttgcctcaaggaacataatatggctgatctgacggcattgcccgagggagcctggtattgttctacggactgtgtgaggattaaccagacactgcaagatttacttaacagtggtggagaacctgttcttgccatggatttagatgtcattaagaagaaacgagaagtgaaaggttttaatgatgatgatgctgaccttgatgttagatggagagttttaaaggacaagagctcagacgacagcaaactagtgctctccaaagcagttgccattttccatgaaacttttgatcccattatccaggtttcaactggacgggacctcattccagccatggtttatgggaggagtgcaagggaccaagattacacaggaatgtattgtactgtgttaactgtgaacaatattgtagtttctgcgggtcttttccgcatcatgggtagtgaaattgctgagctgccgttggttgctacaagtagggatagacaaggcttggggtatttccaagcacttttttcctgcatagaacgtctgttgtcatctttggaggtgaaacattttgtgctaccagctgcagaggaagcggagtctatctggactgagcgttttgggttcgcaaagataagccaggatgagctgcgcgaatacctcaagggtgggcgaacaactgtgtttcaggggacgtcaaacctgcacaagctggttgcgaaacttgaatgctagttatgtgagaattgtatggcaagagcaaggacatgaagctaagaagcagctcattgtttgtgtgcctctgggattgatgcagacaggaaagaggcaccctgatccctttcttgtaaatgttggtgagcatgttggcattggcatcttgatctgtttccataggtaaggtgaagaggattgtgtaagataaaagggacaagctgtatgtaaagacaagccaaagctgagtgaatttcaggcaccttattgtgtggagggtcctgtgtttgttgagtaggcaacgctcgggctggtgtgagatgatgactgcatttgtgttgtgttggtggtattttcactgctgacatgactgttgtatcggatgacatcttttctgttttatgacagtggcagtgtgatactaggctgttaggaggggacgggggaggtcaaacccaacgtacatcatga

SEQ ID NO: 126948 - DNA, 2839 bp, Zea Mays
atatttaaaaattcaatatttgtttgtttatgagtgtttgatgagtatattgtacctcttgtaaactgaagcacacgattaattctttgttaaagaatgccatgataatagtttgctataaatgaaattaatgttaaatcaatttgttaaaaattatggtttcttctgaatttagttattgccgatagagaaaaaacattgaaaaaatatttagatcatatacggctgaatttagttattgatgatcttatttgttatattttatttgtttgaggaatacacgcttattttacttcaccctgtttgttactttagtcactagattaaactttagtttaatcgctaaagtacctcgttggtttcagtgactaaaccagactaaagagcattaattgatgtaaataatgactatgttgtccatattaattagtggatatttgctgcaaaaagaaagtgaagagggcaaataaggtaaaaatcctactttaatcccttttagccatcccttggtgactaaagaattaaagtttagtcacaacactttagtcaccatatttaattctttagggactaaaagtgactaaactttagtcaccccaaactaaacggtaccttagatctatttatttgaggaatgcaagtgtttgaataactattctatttaaataagatctacctaacgacgtacggacatctaactagtatagaattaacgtacacatgtattgatttgagtgacccatggctgattccagtgatcaacaataatcctgccaagcatcaagctaatcccaaggtgccacggaatggtctcgcccgccgccgctggccacatataccagcaggtgaccgtcggattgggtggcgcttggcacggaaaaaaatttggtgcagcactgctgcaaaccagagtggtttgcagcccctcacaaaaaggaggatagaccccacctgcaggtccagcagataacgttttagttgtattattgttgctgcgggtggggtctatcctcttttttgtgaggggctgcaaacactctggtttgcagcagtgctgcaccaaatttttttcccttggcacgtgttcgggtggtagctggctcctccatgcaatgcctatgcctgtcgtcgcgatcgcaaccaccagtcaagacgaatggcaggcagctaagtagctaacaacaacaggcttgtattgtatgtacagcaatatatatacatctcgagaagctcctagcagagatgcatccatctcgacgacgatccatccatcttaaagcaagcagagacatggagtcgtcgccgctgctgcagctgccggcggcacgcgtggaggctctgagcctcagcggcctctccgccatcccgcccgagtacgtccgccccgccgacgagcgagccggcctcggggatgccttcgacctggcgcgcacccatgccaacgaccacaccgcgccgaggatccccgtcgtcgacatctccccgttcctcgacagcagcagccagcagcagcagcgggacgaatgcgtggaggccgtgcgtgccgccgccgccgactggggcgtcatgcacatcgccggccacggcatccccgccgagctcatggaccgcctgcgcgccgcaggaaccgccttcttcgccctccccgtccaggacaaggaggcctacgccaacgaccccgccgccggccgcctgcagggctacggcagccgcctcgccaccaacacctgcgggcagcgcgagtgggaggactacctcttccaccttgtgcaccccgacgggctcgccgaccacgcgctctggcctgcgtacccgcccgactacatcgccgccacccgcgacttcggccgccgaacgcgggacctggcctccacgctgctcgccatcctctccatgggcctccttggcacagaccgtggcgacgcgctagagaaggcgctcaccaccaccaccaccaggacagcagctgacgacgacctcctcctgcagctcaagatcaactactacccgaggtgcccgcagccggagctggccgtcggcgtggaggcccacacggacgtcagcgccctctccttcatcctccacaacggcgtgccgggcctgcaggtgctccacggcgcccgctgggtgacggcgcgccacgagccgggcaccatcatcgtccacgtgggggacgccctggagatcctcagcaacggccgctacaccagcgtcctccaccgcggcctcgtcaaccgggaggccgtgcgcatctcctgggtcgtcttctgcgagccgccaccagactccgtgctgctgcacccgctgccggagcttgtcacggaaggccaccccgcaaggttcacgccgcgcacattcaagcagcacctggatcgcaagcttttcaagaagaaacagcagcacaaagcaaaagcagaggaagaggatggcggcaatggtgaccaccaccgccacgagccgccgccgcagaccaactgatgggctgcacatgtctttccatccgcccacgcatatcttctctcgcgaaattaataaggatccatcagcattttccatatatttatattagtttcatgctcctacgttactacgagaaaaaaaatagtatctatgatatataaaatccatgtgttaaaatattactgtaacactaatattatatatgttgttacgaaatcaatataataaaataatttgatataccaaaacactaattattattctataattttgttagcgtaactaaaagttaagatttatatactttaaaagatatataagattgtaccatcactagtaaaaaaataaacaataccaatattttataaaatatgagtat

SEQ ID NO: 126949 - DNA, 513 bp, Zea Mays
gacagtgcaatccggtcgagccggaccaggtccagacgtctataaaagaaaatccgtagtgctagggatcagtttttcacgccccatctcgattcattagcgacgacggttgcccgatagtgcgcgcggcggtggccgcggctccccgacctcgacatgcggtggcgacccccgatcgcagagggcgagcggcggcagcgcccttgtgcggtggcggcggttcctaggccggcggtggcggcccccgatccagagggcgagcggcggcagcgcacttgtgcggtggcggcggttcccaggccggtggccgcaactccattacctcaacgcacggtggcgaaggttcctcgatccgcagcggggcccttgtgcgggcaagcggcggcgtccccgaagctccgaggaggcggcacttccaaggccggcgagcaagcgacgcccgtcgacgtgcgagtagcgacggcgacgcatgagctggtaacagaattttacacagtatacccaattgcataa

SEQ ID NO: 126950 - DNA, 1661 bp, Zea Mays
ctctccgctattcgtcttgttgctctggctgagccgtgtagctggctggccgttccccacttcacactccacccaccagatcgctggtcaaaaccctagtcaaacctcgccgtttgatccccggcatccaatccagcctccaattgacctcctttctagcccaaggatccaatccaagcacctaattccatcccatccggatgggcgatggcgatgctgcatcggggacggggaggaggtgccccaagcacccgtcggagccgcccttcaccggcttctgctccgcctgcctcctcgacaggctccacgctaccaacctaattggtgtggttgtggcctccccttcccggccgcctcgtccgccttcgcttcccttccaccaggacctggaggaggaggaggagttcctgcctccctgttcccgttccaaagggacaacaggagaaccgccagcggttggggggaggaccacgctccttcgtctcttccagctagaggaccaaggagacgagcgtgagcaggacaccggcaccggcaccggcaccggcaccgacgccgccacctccaccagtggcggcgacgcccaagatccgccgtttcatctccagcgcaagcgctcccttcgccactcctgcagcgaatggatcgcctgctgcgacgccgccgccgccaaccattcctcctgcctaccctcccgtcagtctctcgatgcctcttcttccaccacctccgccgccgcagctgctggtgtgacgctggcgcctgctaatccacactcaaacaacgccgctgcttctgcgggaagcaattgcgctgccatggtcgagaggaggacggggagcctgaggtggaaccaactctggctaatcaagggcgtcctcgccaagcccggagggcatctgcttaacagatctttctccgagtcctctaggtcaaaatacgccctccaccccgggggcgccgccattgcaagatcctcttcgtcccagtcgcaaggtgtccgcctcaacggcagccactccgtgtcttcagctgggaatggtatggactcttctgagatatcactccccggtgattctgttggacatgcgcatgtccaccattgccggcctcgcctcatggactggctccgccgcagccgcagcgttcactacccttcttctaccagcactgtggatgctggtcttactcctttcagaagcagaagcagcagcaccaggagcaccgcacacccaaggtttcctgctggcttctttgctgcacaaagatatcaacgctgataattcttggctacacaatttgttgtagaatcaaattgtagactagcatggtaagttatggctaataattaagcaaactctgtgctgtcagtggttggccaattaataccaagggactgactgtcaatgaaattttcaagttgagctcttttggtaaacttgctatatgtacatgtagtgtacagggaaaccatgaatcattcttctcaatggctatttgtcggctgctgctttagttttgagtttgtaaattactcttttctattgcttgcttctgaatatattggctgatggattaacatgttattatgtgctggttttggccagcaatacactgtgcttcagttttatgggatgaatcaaattgcagtgttcaggaaa

SEQ ID NO: 126951 - DNA, 1426 bp, Zea Mays
atggaggggtgggcaataatgcaacaagcagtccggcggcggcacgggcgctggccgctgggcgtggtcctccctccatggctggctccatctagtagctccatgcgtagtgagccgagtccagcaacaagcccagaggcagtggcaacaacgcacatgccacatgccactgccactgctatatatggggcagcaccgcagcagcatcagctctgctctgctcagccagctagccatatatacggcggcattcttcttctcttcttcttccccaataacatatcgagctgcaagctgctctgcttcttttctagcatgggcatgagggtcttgttggtggtcgtgctcatctcgttcgccccccttattaccactaatgcagcagcaggtgtcaacgccacgagatctgctggtaggcagcagaagcagaagcagaagccgctggcgcctgccctcatcgtgttcggcgactccatcgtggaccccggcaacaacaacgacatccacaccatcatcaaggccgacttcccgccctacggcaccgacttccagaaccacagagccacgggaaggttctgcaacggcaggataccaaccgacttcatcgcctcccgcctcggcatcaaggagcttctgccgccctacctcacctccgagccgctcgacaagcacgacctcgtcaccggcgtcagcttcgcgtccggcggcacgggcttcgacccgctcacgccgcagctcgcctccgtgatctcgctcccggaccagctcaccatgttccacgactacctgggcaaggtgcgcgacgccgccgggggacgccagggtgtcggatatcctgtcccggggcgtcttcgccatctgcgccggcagcgacgacgtggccaacacctacttcaccctgcgagcgcgcagcagctacgaccacgcctcctacgcgcgcctcctggtgcagcacgccaccgccttcgtcgaggacctcatccgcgccggcgcgcgccgcgtcgccttcatcggcatcccgcccatcggctgcgtcccgtcgcagcgcaccatgtccggcggtctcgaccggggctgctcgcagggccacaacgagatcgccgtcgcatacaacgccgggatggtgcagcagctggcggcgctgcgggccaagtaccccgacacgctgctcgtcttcatggacatctacggcttcctctacgacatgatgatgcacccgcgcagctacggcttcacgcagtccaccagaggatgctgcggcacgggcctcctcgaggtctccgtcctctgcaacggcgtcacctccgccgtctgccaagacgtcggcgactacctcttctgggacagctaccacccaacggagaaggcgtacaagatcctcgccgacttcgtcttcgacaactacgtcaagctcatcctcgtctag

SEQ ID NO: 126952 - DNA, 1664 bp, Zea Mays
atggaggggtgggcaataatgcaacaagcagtccggcggcggcacgggcgctggccgctgggcgtggtcctccctccatggctggctccatctagtagctccatgcgtagtgagccgagtccagcaacaagcccagaggcagtggcaacaacgcacatgccacatgccactgccactgctatatatggggcagcaccgcagcagcatcagctctgctctgctcagccagctagccatatatacggcggcattcttcttctcttcttcttccccaataacatatcgagctgcaagctgctctgcttcttttctagcatgggcatgagggtcttgttggtggtcgtgctcatctcgttcgccccccttattaccactaatgcagcagcaggtgtcaacgccacgagatctgctggtaggcagcagaagcagaagcagaagccgctggcgcctgccctcatcgtgttcggcgactccatcgtggaccccggcaacaacaacgacatccacaccatcatcaaggccgacttcccgccctacggcaccgacttccagaaccacagagccacgggaaggttctgcaacggcaggataccaaccgacttcatcgcctcccgcctcggcatcaaggagcttctgccgccctacctcacctccgagccgctcgacaagcacgacctcgtcaccggcgtcagcttcgcgtccggcggcacgggcttcgacccgctcacgccgcagctcgcctccgtgatctcgctcccggaccagctcaccatgttccacgactacctgggcaaggtgcgcgacgccgccgggggacgccagggtgtcggatatcctgtcccggggcgtcttcgccatctgcgccggcagcgacgacgtggccaacacctacttcaccctgcgagcgcgcagcagctacgaccacgcctcctacgcgcgcctcctggtgcagcacgccaccgccttcgtcgaggacctcatccgcgccggcgcgcgccgcgtcgccttcatcggcatcccgcccatcggctgcgtcccgtcgcagcgcaccatgtccggcggtctcgaccggggctgctcgcagggccacaacgagatcgccgtcgcatacaacgccgggatggtgcagcagctggcggcgctgcgggccaagtaccccgacacgctgctcgtcttcatggacatctacggcttcctctacgacatgatgatgcacccgcgcagctacggcttcacgcagtccaccagaggatgctgcggcacgggcctcctcgaggtctccgtcctctgcaacggcgtcacctccgccgtctgccaagacgtcggcgactacctcttctgggacagctaccacccaacggagaaggcgtacaagatcctcgccgacttcgtcttcgacaactacgtcaagctcatcctcgtctagcttaccattattttcatttcatgagatggatttgatctgctggattatgcattaattgtttgctgctgtatttacatttgcttgtctgattaattgtttgctagctaatcttccggcctctacatctctctatctatctatatttacgtgcatttattacgactctattaattgaattattgtacgtccgtgtcataaattaattaattaatactataataatagttgtatctagtgc

SEQ ID NO: 126953 - DNA, 405 bp, Zea Mays
atggtctggtcaacatcaccaccaaaagtccaaaacaaagagggctcacgttggttggacctggcatttgcctctttggtcttctcatggcaaaacctatacaggctccgctcgcctctgtgtcctccaaacaatcatgatgatcacaataaatatgactcgacgacagtacgcccaaacttctgttggacatccttcggggtttcaatagcattcaaagctatgaagagagctttaatcacattaagtgggttccttgatccgataatctttgtcttgacattgctgaaaccagccaagtacagcacagtctcaacagtcctaccagcagcagacattccactcctcattggcccaggccagagatatatctttgttttctcatatttggcctggatagcatga

SEQ ID NO: 126954 - DNA, 1782 bp, Zea Mays
gctcgggggcaattctgtctatccatccacaaatagaagtttgtctcagaaaacaaaaataagaaggatgggaattggattctgatttgttgttcttcttcctaaataataaattctagggtttgcctcttccctctcggctctcgctcccaccaccaccaccaggcagacgcagatcggcggcgggataggctagcaatgatccccaattccgacttcctctagactgcctggcggtcgaattccgattcgattggagtagggaacgagaagggaacaaatacaccggcaccaccaccagaccagacagcacgtgcctccatactatggtttacgccccgtgccgctcatcgacgccgccgtcttcctcgccgatgctccacaagaacctccgcgccctcggacccggcttgaatcccttggctcccttcggcatgggcaactactcccgctagccgtttcctcctatccctctttctccgattccgatctctgagtgcttccgcctccgcccccggccgcttcctccatcggaaccgatccccgctattttactcccgttcgtttcattgttccgttgctttggatctgagtctcgagatcctcccctgtcctgctgctcgaggagccgccaaggataccaaaataccatggtgcaggtgcgcaggtcgctcagcatgagccgccttcggagctgccacgacgcggacgaccgtggctggaacccgctccatgttgctgctcgcaagggagacctcaaggaggtccgacgtctcctggatgagggggggatggatgtgaatgcacctgcatggggaccaaaatgtcctggtgctaccccactccatctggctgctcagggtgggcatgttaaaatcatggatgaactactggagcgtggtgccaatattgatgctcgaacaaaaggggcatgcggctggactcctctacacattgctgccaaggaaaggaacaagaaggctgtgagattcctgattgagaatggagcattccttcctcctgagatgaatgaccataggttcaatccccccctccattactgctctgggttagaatgggcgtatgagatgaagcgcatgcaggatgaaagcgattcgcctggcgaaacttcgttgagctcggataactagagagaaagcagcaggtgcatgcagcttgagaacgatgaagttaagtcaagtcattgagtacatttgcttgatgtctggatgatggagatgttctgttctgtgactttagaataattgttgagtggtacctgtaatatacgacgagtgatttgttgaataataatcatacactagtgtatagcgcgcacatgcgcgcatgccgttctgtggtgtaaaatcttgttataagcatgtataacttgatattgtatcgtgaacatgcatatatgcagagtagtcattattgagacatgagtatcagatcaaatttagcattaaagtaacgtgcaccaagagcttaagcaagcaatggtgctagacttagcacatttcttaagatttcaaagagtggaatgaactcaacataaattcatcctaacaaacatgtcctaaccgttccttctttagttcttcagctactcctttgaaggcataagaataatcaattgcagtatgaacagtgtaaggtaagcgattacgacaacattgttctcaacatatggatattttgattttacaattcttttccaatgtccaacatctgtaggtatctgctttatttttgggggtggagctagcaaagttgtagatc

SEQ ID NO: 126955 - DNA, 2859 bp, Zea Mays
cctcctcctcccgtgtcgccacctgccgtgtcataccatccatccacccacccaatcatcatgcactcgcattctttacgaatcatatcgatggactactcttccggttgatcggaatcaagagcggtggtgggagcattgatcagagaaggagagagacgtaggtgatcccttgtttgtcacacgcgcgggtgcccaagatgctcggttcgtcggcgtccaggcgggagagcaaaaccagcaacctcttctgggccgccgccatggccttccgggacgccgccaacaagaccactgccatcgagccggccaaggcggtacccaacaatatgctcgacgccaccaagcccgccgagccgaccacgacagtgtccaacgccgctgccgtgcgccacgagggttggatggtgcgctatggccgcaggaagattggcacttccttcttccacacgcgctacttcctgcttcatagcaagctgctcgcgtactacaagaagaagccaaaggacaacatggttccactcaagtcgctgctaatagacgggaattgcagggtggaggatagagggctcacaacataccatggccaaatgatttatgtcctgtgcatttataacaagaaagaaaaggagcaccagataacgatgggcgcttatgatattgaggatgcaatgacatggaaaaagaagatagagctcatcattgatctgcaacaagactctatcacagctaagaaccgtagagcctttgcttcagtggactttgacagggaacttggaggacagtttctgttttcagatcatgacaacacagcggaagatgacgacgaacgatccactttgactcacaggcctactatagggaacggccctcctgattcaatacatgactggaccaaagagtctgacattggtgtgaccaatcagaacgaccccattcaattttgctccaagaagaattggcgactacttagatgccaaaatgggttgcgcatatttgaagaacttctggaagtagattaccttgcacgaagttgcagccgagctatgaaggctgttggtgtagctgaagccacatgtgaagccatttttggtcttgtaatgagcatggatgtaacaagatacgagtgggactgtagctttcgtcacggtagtttagttgaagaggttgatggtcacactgcaatactatatcataggttgcagctgcactggtgcccaatgttagtttggcctcgggatctttgttatgctcgatattggcgtcgtaatgatgatggaagttacgttgtgctgttccggtctatagaacatcctaattgtggtcggcaacgaggatttgtgagggcattcattgaaagtggaggtttcaagatttctcctctcaagtgtcacaatggaagacctcgtactcaggtacaacaccttatgcagattgacctgaagggatggttcctgaactacactctttcctttcagtaccattctttgctgcagatactgaactgtgttgcaggattgcgtgaatatttttcccaaacagatgaaatccatataatcccaagaattcatgtaatggaaaccatgtttgatgtggattcaaagccaaaatttcataagcttcaagaagttgaaaccaaggaaaataaaaacatgggaatcattgatgaagaatcagatgatgatgatgattatcaagttcctgaagctaatatagaggaagacccaaacacatctgacaatgataacaagcacacagatgagcctccagaaaaaattgatttatcttgtttttcgagtattcttcatcgtgatcccgaggagaaaagccgtaattgttggacagtacctgatagcaaaaactttaaagttcgtagcaagaatttcccacaagacaaatcaaagatacctgcagcaagttatctaatggagcttgcagccattgactggtttaaggacaccaaacgtatggataacgttgctaggcagaagggttgtgttgctcaggttgctgctgagaaagggatgcatacatttattgtcaacatacagattcctggatcaactcagtatagcttggtcatgtattttgtcacaaataccttgaagaagggatcattactacaacgtttttttgatggcgatgatgaattctgcaatagcagactaaagcttataccatccgttcccaagggctcctggttagtgcgacagagtgttggaagcaccccttgtctgttgggaaaggctgttgattgtagttacgttcgaggtcctgcatacttggaggtggacgttgacattggatcttcggcggtagcaaatggagttttgggtcttgtttttggtgtggtgacaacattagtagttgatatggccttcctaatacaggccaacacatatgaggagctaccagagcaagtgataggcgcagctcgactggctcatgttgaaccggccacagcagtagttcctgatcttagcaacacatcaaatgacagtagcaacagcaacgacgataatagcaacaacaacattggttcctcagaggatgatgtgtccaagaaaacaaactgattttattttaatttagtatcagggtgttttgttggttatcactttaattatatctgctagctagtcattcaggtaaagttgtgtactaacctcagacaatggaatccagagagctcgagaggagagccgataatatatatttttgtgtctgtcctttaataattattgggaggaactggtgagcaaggttaacctccttgaaggccctcatacagtgacagagcccgattctaaacaacggtgatttctcaggagactgtgtaacagctacaaagccttccat

SEQ ID NO: 126956 - DNA, 1673 bp, Zea Mays
taataagtagctagattgccatgcgcttacgcaagtacactagtagtggtgctatatagctgtcattattgaagcatgcatgcatcgagaatttgcatccatgcatgtgtagtagtgcaggggggagctgacacatgagatcagcaggaacagtgaggatcgtccgactccccggcgtggagctcgtcatcgatcgtcgctcagctagtatatatggcaagcaggacgacaggcggcgcatggtcgatggaggcggtgacgctgccggcgagcatggtgctggtgcaggtcttcaccatggtcgccgtgctcctctccaagctggcgctgaacgtggggatggagcccttcgtcctcctcgcctaccgcaacctcatcggcgccatcatcgtcgctcccttggccttctactttgacagggcgatggtgcgaaaggtgaccctcaaggcctttgggtggatgtccatcagcgcgctcctcgggatcgttctcgccatgggtctctactactacggcctccgcgccaccaacgccgccatctccatcaacttcctcaacctcatccccgtcgtcaccttcctcatggccgtgctgctccgcgtcgagaagctggcggcggggacgcgggcgggccgtgccaagctggccggcacggccgtgtgcgtggggggcaccatggtggccagcctctacaggggcccgctgctgcacccgtggccgacgcacctgctccaccacgccgccgccacggccccgcaccaccaccgcaacatgccgctcggcaccgtcttcctgtgcgccagctgcctggcctacgcgctctggttcatcgtgcaggcccgcgtcggcagggagttcccctgcaagtacatgtccacgctgctggcctgcgtctccggcaccgtccaggcgctcgccatcgcggccgtcatccgcgggggcgaccgggactcgtggctcctctcctgggacctgcgcctcctcaccgtcgtctactcgggggtcttcaacaccgccgccaccttctgcctcatctcctgggccatcgccaggcgagggcccatctacccctccatgttcaactccctctcgctcgtcgccaccaccgtgctcgactcgctgctgctcggcaccgacgtgtccgtcggcagcctgctaggcgccctgctcatcgtactcggactctacgccttcctctggggcaaaagcacagagatgaggcacctcaaacagcagcagcagcagcagcccaacgccaacgggacgacgaccacgacgaccaacgccgccgaagaccacgtctagcaactaaatgcatgcagtatgcatggtaaataaatcaaattgagcagctagctagaactagctagatcgaaggagtaaattcgatcgatcgatcggccgatctcatcatgcatgtactcctacgtagacagacacacacaaattaagagacacacagggatcggagagagagacgcaaatgtcaatctcgtaagccagaaaatgaaacactagtcacccctatcctatcctatcatatcaggtttcataggtcaagcatagactgtattaattactttattgtcttctagaaagaggtattcttgttgggaattgtattaagatatcatgtgttgtagacttgtagtatactagtacttgttagtatt

SEQ ID NO: 126957 - DNA, 1377 bp, Zea Mays
tctcattattatatctcaggtgtcgtgttctgttacatgcagacaccaacactttcacctgcaatgcatgcttttgcttccaaactcctccctagctatgcatgtgtcttgtttatttgcatgggcgatggtgcgaaaggtgaccctcaaggcctttgggtggatgtccatcagcgcgctcctcgggatcgttctcgccatgggtctctactactacggcctccgcgccaccaacgccgccatctccatcaacttcctcaacctcatccccgtcgtcaccttcctcatggccgtgctgctccgcgtcgagaagctggcggcggggacgcgggcgggccgtgccaagctggccggcacggccgtgtgcgtggggggcaccatggtggccagcctctacaggggcccgctgctgcacccgtggccgacgcacctgctccaccacgccgccgccacggccccgcaccaccaccgcaacatgccgctcggcaccgtcttcctgtgcgccagctgcctggcctacgcgctctggttcatcgtgcaggcccgcgtcggcagggagttcccctgcaagtacatgtccacgctgctggcctgcgtctccggcaccgtccaggcgctcgccatcgcggccgtcatccgcgggggcgaccgggactcgtggctcctctcctgggacctgcgcctcctcaccgtcgtctactcgggggtcttcaacaccgccgccaccttctgcctcatctcctgggccatcgccaggcgagggcccatctacccctccatgttcaactccctctcgctcgtcgccaccaccgtgctcgactcgctgctgctcggcaccgacgtgtccgtcggcagcctgctaggcgccctgctcatcgtactcggactctacgccttcctctggggcaaaagcacagagatgaggcacctcaaacagcagcagcagcagcagcccaacgccaacgggacgacgaccacgacgaccaacgccgccgaagaccacgtctagcaactaaatgcatgcagtatgcatggtaaataaatcaaattgagcagctagctagaactagctagatcgaaggagtaaattcgatcgatcgatcggccgatctcatcatgcatgtactcctacgtagacagacacacacaaattaagagacacacagggatcggagagagagacgcaaatgtcaatctcgtaagccagaaaatgaaacactagtcacccctatcctatcctatcatatcaggtttcataggtcaagcatagactgtattaattactttattgtcttctagaaagaggtattcttgttgggaattgtattaagatatcatgtgttgtagacttgtagtatactagtacttgttagtatt

SEQ ID NO: 126958 - DNA, 1311 bp, Zea Mays
tcacatatacaacaaatggattaatgcatgcacgcatgcacatgcacgtacgtgcagggcgatggtgcgaaaggtgaccctcaaggcctttgggtggatgtccatcagcgcgctcctcgggatcgttctcgccatgggtctctactactacggcctccgcgccaccaacgccgccatctccatcaacttcctcaacctcatccccgtcgtcaccttcctcatggccgtgctgctccgcgtcgagaagctggcggcggggacgcgggcgggccgtgccaagctggccggcacggccgtgtgcgtggggggcaccatggtggccagcctctacaggggcccgctgctgcacccgtggccgacgcacctgctccaccacgccgccgccacggccccgcaccaccaccgcaacatgccgctcggcaccgtcttcctgtgcgccagctgcctggcctacgcgctctggttcatcgtgcaggcccgcgtcggcagggagttcccctgcaagtacatgtccacgctgctggcctgcgtctccggcaccgtccaggcgctcgccatcgcggccgtcatccgcgggggcgaccgggactcgtggctcctctcctgggacctgcgcctcctcaccgtcgtctactcgggggtcttcaacaccgccgccaccttctgcctcatctcctgggccatcgccaggcgagggcccatctacccctccatgttcaactccctctcgctcgtcgccaccaccgtgctcgactcgctgctgctcggcaccgacgtgtccgtcggcagcctgctaggcgccctgctcatcgtactcggactctacgccttcctctggggcaaaagcacagagatgaggcacctcaaacagcagcagcagcagcagcccaacgccaacgggacgacgaccacgacgaccaacgccgccgaagaccacgtctagcaactaaatgcatgcagtatgcatggtaaataaatcaaattgagcagctagctagaactagctagatcgaaggagtaaattcgatcgatcgatcggccgatctcatcatgcatgtactcctacgtagacagacacacacaaattaagagacacacagggatcggagagagagacgcaaatgtcaatctcgtaagccagaaaatgaaacactagtcacccctatcctatcctatcatatcaggtttcataggtcaagcatagactgtattaattactttattgtcttctagaaagaggtattcttgttgggaattgtattaagatatcatgtgttgtagacttgtagtatactagtacttgttagtatt

SEQ ID NO: 126959 - DNA, 529 bp, Zea Mays
ttttttggatagatggtgttgaaaggcagttgagattaatgatttggtcttttccacacacttggttttagggttttcctgtgaggttgtgaaaaactctttatgtgaggaaaaaatatttcataagtaagcatgccatgtcagctagatcgagtggatattgtgaattgtgaactttgagtctatgaacttgtgatctttatgaacttgttatactgtgaacttgttatattgtgaacttgtgatctttgtacactttttatattataaatttgtgatccttgtgaactttttatattatgaacttgttatatcatgaattgtgaacttgtggtctttgtgatcttttgtcaactttgttgtattataaagtttgatatatttaccgattgtattttagattccgaccgttactggtgtattttccgcaccaaacattcgtttccgatatttccgaaataccgataccgtttccatttctggagttaccgttttcgattttgttttcgataaaaaaaaatatgaaaac

SEQ ID NO: 126960 - DNA, 1556 bp, Zea Mays
cgacgccaagcaacccgaaccaaaagccactcggatccatctcccactctcccctcctcgtcatcggctcctccgcctccacctccgcccgccccctgatccggatcgacgacgccgaccccagatccctttcctctccgccgtctccccgcccgcccgcccgccgatcccacatccctcccaggccttcaagcagtgaaggagccttatgagctggttggctggggctttactccaattctggtgctactaagatgggccagggcctgctcagcaacaagtctgggacaagactaagcatagatgaaatagcaggcgcttaccatttcttgctcttgctctcccccgtggtttccttctgggactgcatcttccgcaagataagatactcattcagacctgagtgggtgtagcagcatcctgcactcacccacccatcttagcaacagttcctttccttttcttcctcgttattaaaataaaaaaaagttagacaaaccaatgaggccaaagaatgaagtttgaacattttgttttctttcttccctaattatacctagtagtgagtagaggagtcaggtctaccagaggtaatagtgaatagcagcaggcacggctgtcatggacagggctaccatgagcagcaatcaggcaggcaaagtgttgaagaaaggaaaaaagaagcaggccaaggacgagctggaccgccagaagcaggcggagaagaagcggcgccgacttgagaaagcgctggcaaactcggctgccataatctcggagctggaaaagaagaagcagcagaagaaggaagaacagcaaaggctggacgaggaaggtgctgccatagcagaagcagtcgctcttcatgtcctcataggcgaggactccgatgaaccctgccatttgatgctgaacaagcaccatataaggtgcaaccattgggccccctcggctgcttttgaattcaccgtggacgcacagcccgccgaggtgtacccgtctgaggatggactggtatgcggcagccatgcgtatgctcccagagcccccaaggggaggcgggctgattgggggattggacaggcactgccatgctggggagaagtgagtgacctccaaggcccgtactaccaaggaacgttccgtcagtctgttacctgccctggcttcatagccgctcaggctgtgtcatcgttgcagatcagggaagagtcgccagaggtcacctctccaagccatggggccgatgctgctgcgaccgtggttaaccggatgcttggtggcaccagcaggctcaacctttacagggggatataaacatttacacttgtcaaagaattgtattgtatatataaaaaagaagatgtgtttggctgcattgcctgcaatatatatataatatagtcttgtggtttccgaaagagaaatggacagaacatccatcctgttttgttgttgttttttctttgccaaaggttatttgtgtactgtcagttaacactgtgaacatatatgctttttaattaatatgttgagtgcttatggcttgatgtgaa

SEQ ID NO: 126961 - DNA, 98 bp, Zea Mays
cttgtatttaagtattgcaaagttcacttattgtttgttgcatgagaactggagtttgtggttgcatatgtatgttatatgttattttggtgaataca

SEQ ID NO: 126962 - DNA, 4994 bp, Zea Mays
atggcctcctcctccttcgcccccgacgaccagaccgacgccgacttcttcgacaagctcgtcgacgacgacgacccggccaccgacttgcctcgggccgtctccgccaccagcgtcgccgacgacccaccacccgtcctggagccgcaggttccggcgccggcgccttcggaggggtcaggcaagggcggcgccggcgtccacaccgcggtcaagcaggtgcagtgggcctccttcggaggtggcgtggacgacggccctgatccgttcgctgatctctcgggaggcgccggtgacgacgacggcttcctcgggaacacggcggggacccaggcggccttggatcacgccgccgaggtgacggatcaggacttcttcgctgggagcagctcctccgatcagcagaatgtccatggtcagcacgaccagggcagaggcagcgccgcggtggattccgcagatcccaaatctctggaggccatgtaccctgggtggaagtacgacgaggcctcacagcaatggtaccagcttgatggcagtgtaaattcaactgggaatgcagctcaggcgctggacgatagcgctcagaatgcacatcatcatcagcagcagctcgacgcggcttacctgcacaattcagcgcacgcggggcttgggacaattgccgaggagagcactaccgcagctggtgctgccaatagttggggccaaggggctgccccggagtacccacccagcatgctcttctatgcagagtatcctggttggtactttgacaccaacactcagcagtggcactcccttgagtcgtaccagcaggccgccgtgcaggctggaacatctagcacgggtcagactgttgttgcaagcgatgatgttgttgcgacttcctctctgacaggccataatgccgggcaaactgaggaccttgttgcccacaatcaggtgacacaacgcaactcatcctcgaatagtttcacccatcagaaccaatggcagaccaccgatgcacttggtaacaatgtacaatctgaaagcctggctagtagcttctatggttttgaacaacacatgaatgctgagactaccagttcctctacgagccaacagactggttttcacacagctgaaacaattacagatcactatggtggacgcaaagccttcgaatcatcaagtcttcagagtggttatagctcctctgacagtcaacaatccagtcacaaggcattcgaaccttccacgggttatcaggctggttacaacgggtttgaacctgcttcaggtcaccacacggcgtttgaacctgccatgcataaccagagtggatacaaggcatttgacccttctacgggtcaccatagtgcttcgtggggattcatgccttccacgggtcagcagactgatttcaagggttccagagcttccacagttcaccaggccggttatgaagagtttgaaatttctagaggttacaatacaaatttcaaggcatttgaatcatcttcatctcaaaatgctggttacaatggttcccagccttcttcaggtcaccaacctaactacatgggatttgacacctctgcaaaccaccatggttatactgatgtcaatggtgttgcgagtactcaaggctttgtcccaatgcaaaccacgtaccagggccagaaacaagcaaatgcaacctcacaagggcacctgtcaaatagctatttgggtactgacaactccatgaactttaatcagcaacaatttctgggtgcaaatgcctcaaatttgcaattcggtcactccccgcatgaaggtaggtcatcggctggacgaccaccacatgccctcgttgcttttgggtttggagggaagctcatagttatgaaagaaactacctccatgcctgcaagttttaacagtggaaatcagggtaactctagtagcacagtgtcggttcttaatctgttggaggtagtctttgataaagttgatccttcaagtgtcactaatggtagtgcacttagttatttccatgctctatgccgtcaacctgttcctggccctctggttggtggaagtgctgcatcaaaggatgtaaataagtggcttgatgaaatgattgcacggtacgagtcttcctctagtgaattccatagaggtgatactcgcaagttgcttatttcattgctgaagatactgtctcagcactatggaaaactgcgttcaccttttgcgtctgacccatcgcaagaggagacagatggtccagaaatggcagtaactaagctattttcatcgtgtaagagaagcactgttcatatgggagattatggatccctagttccctgcatgaaaagtattccttcagaaagtcagatgcaggctgttgcacaagaggtccaaagtcttctagtttctgggagaagaaaagaggcccttcactgtgcacaggcaggtcaactttggggacctgcaatcatactggcattgcagcttggtgataagttttatgtggatacagtgaagaaaatggcccacttccattttgtatctgggtcccctctgcgaacgctatgccttctcatcgctggacaacctgcagatgtttttaatgtagagaacaatgtcaacagtgactatggtgcatcccatcaacctgtggagcctggtcctaatatgttggatgattgggaggagaatttggctattattactgcaaacagaacagaaggtgacgttctagtaatcacccatcttggtgattgcctctggaaagaaaaaaatgaggttgcagctgcccattcatgctatttagttgctgaactaaacattgattcatactcggaaagtgcaaggttatgcctcattggtgcagaccatttgaagtgtcctcgaacatttgccagccctgaagccattcagaggacagaggtttatgaatatgcgaaggtgcttggtaattctcaatatatcctactatcctttcagccatataagctgatatatgcatacatgcttgtggaagtggggaaagtttctgattctttgaggtattgccaagcgtctataaaggtactgaaagcctctggtcgtgcccctgaattggaggtgtggaaacaattattttcttcgctggaggagaggatacgcactcaccagcagggtggatatggcacaaatcttgccccaggaaaaatagttgggaagatttttacctcgcttgataaatctatatcccgcatgatgggtacaccatctgcaccacttccaccgttgccacatggatcttttagtgataaagagagccactctatacctgcggcagcaaaatttgttaatagccaatcggtaatggtcatgccatcgttaataccatctgcttcaatgcagtcaatgactgagatagcagaggatagtggtggcactggcaggaaaattgcacacaacagaagtgtttctgagccggactttggtagatcatccaaacagggtgctggtggatcagatggtacacagagcagtgcatcaggatccagcagttctcgatttggttggctagtgcagaagactatgggattagtgtcaaaatcccaccgccaggcaaaattaggggatcagaacaaattttactatgatgaaaaattgaagcggtgggtggaggaaggtgctgctgttcctgccgaagagcctcctcttcctccacctccaacaaaaccatctttccagaatggtatgctagacaataagttgaatggccccatgagcgtaagccatgctcccaatggagtcacagaatggaaatcctcaaattcttcagagcaaggtctgggtatgccgccaattccacctagccaaaaccagttttctgctcgtggacggatgggtgtccggtccagatatgttgacacattcaatagatcaggtgcatctggtgcaatgccatcatataacaaaccagctgctccatctatgacaccaccagctggtgccaagttcttcatgccaactgcagcacctgttgccgcggatcagatgataccacaccaagcagcagagatacacagtgaaaccatccatcaggatgagcggtcagcctcaccgccagcagaaacatcattttcttcaaccccaccacccacgcaatttccatcaccagtgcaatcaacaatttatcggcaatctagtatggagaacatctccaccccttaccagggttccggggtatcgtcattaagcaacgacagctcattctcaaaatctcgagccgcgtcctggagtgggacatactctgagcagtttaatgcttttgcgggcactatatcgcctgacagacagacgacgcattcaccactgatgcctggcaaaccaccacacagccgttccaacagcaactcatcagggcatctcaatggattggcagaggatcttcatgaggtcgagctgtaactggcgactggtcagcatgaccgtcgcaactcgtgtcttaaaggcagcgatgacaacccctccccaagcaggtgacagaaaagaaggtgcccttaaaatgctgaccacggggatgccgcagctggaatgggcttggtgtgactttgcacgagattctggggcgcgctctaaaccaccgaggtgcgtcaggcctgtactaatagagatgcagggtttttttttgtagccatatatacatatatgttggttttgtgttttagagagaagggaaagggttgggtgggcctttgtttacaggtgggaagggaagagaagcagcatgcagatgcccttgtacagataatctgcccctacccagtttgtttaaaacgcaaacaacgccattttggttttagttccctggagaaggatagaggagaaggtgtgtgtctttgtagtgtgagaagcatggctctgtagtgttgttgttatagtgtactactactgtgctagccagccgcatacacagactgtttattctttggagacgaatcaattctttcatcttgactagggca

SEQ ID NO: 126963 - DNA, 1583 bp, Zea Mays
ttcccctcccacgagtcgagtagccattgcccattgccattccttccttcctccacagagaaatccgatccgcggagatttgacccaaccagatcatatcacacacgtaatcccatcccattccgcccgcaacagcagcaccaccggtgggaagaagaagatgaagaaggccacttcgctctccgagctgggcttcgacgccggcgacgcgtcgtcgggcttcttccgccctgtgtccggcgactcgtcgacgccgacgtcgcagcaccaccggcggaggctgaccaaggtgtcggtcatcggcgcgggcaacgtggggatggccatcgcgcagaccatcctcacgcgcgacctggccgacgagatcgcgctggtggacgcggtcccggacaagctccgcggggagatgctggacctgcagcacgcggcggcgttcctgccgcgcacgcgcctcgtgtccggcaccgacatgtccgtgaccaggggctcggacctggtcatcgtgacggccggggcgcggcagatccagggcgagacgaggctcgacctgctccagcggaacgtggcgctgttccgcaagatcgtgccgccgctggcggagcagtcccacgacgcgctgctgctcgtcgtgtccaaccccgtggacgtgctcacctacgtcgcctggaagctttcgggcttcccggccagccgcgtcatcggatccggcaccaacctcgactcgtccaggttcaggttccttctcgccgagcacctcgacgtcaacgcccaggacgtacaggcgtacatggtcggcgagcacggcgacagctcggtggcggtgtggtcgagcgtgagcgtggcggggatgccggtgctcaagtcgctgcaggagagccaccgctgcttcgacgaggaggcgctggagggcatccgccgcgccgtcgtcgacagcgcctacgaggtcatcagcctcaagggctacacctcctgggccatcggctactccgtcgccagcctcgccgcgtcgctgctccgggaccagcgccgcatccacccggtctccgtcctcgccagggggttccacggcatccccgacgggaacgacgtcttcctcagcctgcccgccaggctcggccgcgccggcgtccagggcgtcgccgagatggagctcaccgaggaggaggccaaacgactgcgccgctccgccaagaccatctgggagaactgccagctcctcggcctctgatgatcacatcaccgtctctcttcattaattaattattgcatcaatttccacaacctagcagcagcatccggtacccgtgttcaataaaaacaaaccgctacaatgtgtgctttctagctgcattaagctgcttactacgagtatttgggctgtggctttctttttcatgtatctcaccaaatcgttattgttgtgagagctatactacacggtggtatcaagagtatcacaatgcccaacaggcgatggattgagctttcctaattttttcatgataaattaagttctactccctccgtccacataaatttgtctttctagattttttcgtaagtcaaaatatttaaactttgat

SEQ ID NO: 126964 - DNA, 1318 bp, Zea Mays
aatagcagcccgggcttatcatctcagcatcgacgaaccaactccgactccaactagccggcaagccaagccaaagcaaagcaaagcagtgagatagatatatgatgaagaaggcctcatcactctccgagctgggcttcgacgccaacggcgcctcctctggcttcttccgcccagtgaccgacggcggcgtcacgccgacgtcgccgcaccaccgccgcaggctcaccaaggtgtcggtgatcggcgcgggcaacgtggggatggccatcgcgcagaccatcctcacgcgcgacctcgccgacgagatcgcgctggtggacgcgctcccggacaagctccgcggggagatgctggacctgcagcacgcggcggcgttcctgccgcgcacgcgcctcgtgtccggcaccgacatgtccgtcaccaggggctccgacctggccatcgtcacggccggggcgcgccagatcccgggcgagaccaggctggacctgctccagcggaacgtggcgctgttccgcaagatcgtgccgccgctggcggagcagtcccccgacgcgctgctgctcgtcgtgtccaaccccgtggacgtgctcacccacgtcgcctggaagctgtcgggcttccccgccacccgcgtcatcggctccggcaccaacctcgactcgtccaggttcaggttcctcctcgccgagcacctcggcgccaacgcacaggacgtgcaggcgtacatggtgggcgagcacggggacagctccgtggccgtgtggtcgaccgtcagcgtcgccgggatgcccgtgctcaagacgctgcgggacagccacagcagcttcggcgaggaggcgctcgagggcatccgccgcgctgtcgtcgacagcgcctacgaggtcatcggcctcaagggctacacgtcctgggccatcggctactccgtcgccaacctcgtgtcctcgctcctccgcgaccagcgacgcatccacccggtctccgtcctcgccgcgggattccacggcatccccgacgaccaagaggtgttcctcagcctgcccgccaggctaggccgcgccggcatcctcggcgtcgccgacatggagctcaccgaggaggaggccaggaggctccgccgctccgccaagacgctatgggagaacacacagctcctcggactctagcttcctcctatatacacacacacacatatagctgattttatgtattttcatggacaaaatgcgtttggttcgtcgatcctgtcttttggatttgtaaacttgatactagaataattgagaagtcctgataatgtttatttgttgct

SEQ ID NO: 126965 - DNA, 1869 bp, Zea Mays
cgtgccgaagcactatgggccgtgccgtgcttagtgtcggcccatttagcacggcccgtttggccatctatacacagcagtcactgctcatcagcatacgggcagtcgggcactctctctccttccccgtccctgtcgccatctatcactttccccgtttgcgttttggcccgaatctccgtctccgtctccgtctccatctccatctcctagccgccgcggctccactcctcagtcctcagtccgaagcgaactctccctccgcatccactgccaccatgagccgcgatcgctacttccaccgcctcctcgacctccacctccacgccaacgacgacctcttcttccccttccctacccctgcctcgtcctgcccctacatcaccgcctcctccgcccaccaccgcttcctcctcgacgaccaccccttctacccaacctcctgcccgctcggcatcacctcccgctccccgatcgacgacaccttcgacctcgacctcctcctccccctccccctccacgccgccgtctccgcgcccccgtgcgcggccttcgacttcgaccccttcctcctcgacaccctcggccaccgcatctccgtcctcgagcgcgcgctcgccctcgccccaccccgccgcaagtacacctacgccgccgaggccaacggcaggaagctcaagtggaccgccgaggacaggcccgccgggggccgcaacctcaagtgggaggccgagctcaggaccccgcacaccgacggcttcgaccgcaagtggaagtgggagtccaaggagtccgccaccggttccaccaaggtcaagtgggccaaggagatcaaggggaagggctgcctcgagccttggtccaactcctactccgtcgaggagacctacggtgaggatgaccatgccgacgacgacagggagaagaagaaacccactggcgtccagaagaaagtcaagggggaaaacaagcagcagcagaagaagcagggcaatgtggagatcgtcgagatcgaggacaacactgccggatgcgtcgccatcagaaaggcttttgaaatgaaccactgcaagggcaagaggaaggaactttccccacaggatgccgcactgctcatccagatgaactacagggcgcacctggcccatcgctcccaggtgctccgttgccttcgcgacctcgccgtcgccaaggccaagctcaaggagatcaggtccttcttctacaacatcacataccgccgccgcatcgcatatgacaatgaagagcgccagaggtttgctgagaagatcattgtcctgctactgacagttgatgcccttgagggaccggactacatggtccgcaacgcaaggaggtccatgctggaggagctggaggggatgctggagatcgtggagcctcagccgccggggaagccgaggacgcttagccgcaggaggttcgatctcccagaaggcggagccatcgaaaaggagacgagggaggagggcaagtgaagtgcatcggtgggtggtggcatgcttgggcagtttggtatgcgcgatgcggactatagagtttgagtttgtgctgctaccgaaccgtggaccaccttaccccgttgagatgtttgatagctggactttttgtgctgttgtatttgtagaccagaacgttgttctttgtaataaattggcgtgtgctgctttttgctaatattcgcttggctttaatctgtaccgtgttctactacctgaacaatgtttttttctcggtggactgaagtatcagtttgaatagctagctttaatttgaagcgaacaggctttgtacttttgaattctggcatcttgaatgaattttcttgaagtaccctttttattcttt

SEQ ID NO: 126966 - DNA, 615 bp, Zea Mays
atttgatcaggcaataacctgacgaccctggtttgttctgtgaatgcattttcgtcgtgcttcaacaacagggaccggactacatggtccgcaacgcaaggaggtccatgctggaggagctggaggggatgctggagatcgtggagcctcagccgccggggaagccgaggacgcttagccgcaggaggttcgatctcccagaaggcggagccatcgaaaaggagacgagggaggagggcaagtgaagtgcatcggtgggtggtggcatgcttgggcagtttggtatgcgcgatgcggactatagagtttgagtttgtgctgctaccgaaccgtggaccaccttaccccgttgagatgtttgatagctggactttttgtgctgttgtatttgtagaccagaacgttgttctttgtaataaattggcgtgtgctgctttttgctaatattcgcttggctttaatctgtaccgtgttctactacctgaacaatgtttttttctcggtggactgaagtatcagtttgaatagctagctttaatttgaagcgaacaggctttgtacttttgaattctggcatcttgaatgaattttcttgaagtaccctttttattcttt

SEQ ID NO: 126967 - DNA, 2608 bp, Zea Mays
ggaaagcggaggcaccgatcccaaccacactataaatacgatcccgcaatgccctctctctcccatcccacccctcgcccaatgcgtagttgtatctgcatctccaacaccaccagcagaggttccagttagttttttttagattagaaaaatcgagtccaacagactcgccgcactgcgcgggatcgacctcgtcgcaactcccgtgtgcgccgccaataatggagacccgggacacggatgcgacgccgctcccctactcgtacacgccgctgccggccgccgacgccgcgtcggccgaggtctccggcaccggcaggacgcggagcaggcggcggcccctctgcgcggcggcgctcgtgctctccgccgcgctgctcctagccgtggccgcgctcgtcggcgtcggtagccggcccggcgcggtggggatgacagagtcggcggcctcgtcgccgacgccgagcaggagcaggggccccgaggccggcgtgtccgagaagacgtccggcgcgtctgacgacggcggcaggctccgtggagccggcgggaacgccttcccgtggagcaatgcgatgctgcagtggcagcgcacgggattccacttccagccgcagaagaactggatgaacgaccccaatggccccgtgtactacaagggctggtaccacctcttctaccagtacaaccctgacggcgccatctggggcaacaagatcgcgtggggccacgccgtgtcccgcgacctgatccactggcgccacctcccgctggccatggtgcccgaccagtggtacgacaccaacggcgtgtggacggggtccgccaccacgctccccgacggccgcctcgccatgctctacacgggctccaccaacgcctccgtccaggtgcagtgcctggccgtgcccgccgacgacgccgacccgctgctcaccaactggaccaagtacgagggcaacccggtgctgtacccgcccccgggcatcgggcccaaggacttccgcgaccccaccacggcctggatcgacccctcggacggcgcatggcgcgtcgtcatcggctccaaggacgacgacggccacgcgggcatcgccgtcgtctaccgcaccacggacctggtgcacttcgagctcctcccgggcctgctccaccgcgtcgacggcaccggcatgtgggagtgcatcgacttctaccccgtcgccacacgaggcagggcgtcggccaacggcgtcgacatgtccgacgccatcgccagcaacggcgccgtcgccggggacgtcctgcacgtcatgaaggccagcatggacgacgaccgccacgactactacgcgctggggaggtacgacgcggccgccaacgcctggacgccgatcgacgccggcagggacgtcggcatcggcctgcgctacgactggggcaagttctacgcgtccaagacgttctacgacccggccaagcgccgccgcgtgctgtggggatgggttggcgagacagactcggagcgcgcggacgtgtccaagggatgggcgtcgctgcagggtatcccccggacggtgctcctggacaccaagacgggtagcaacctgctgcagtggcccgtggaggaggtggagacgctgcgcaccaactccaccgacctcagcggcatcaccatcgactacggctccgtgttcccgctcaacctccgccgcgccacccagctggacatcgaggcggagttccagctggaccgccgcgccgtcatgtcgctcaacgaggcggacgtgggctacaactgcagcaccagcgggggcgccgccggccgcggcgcgctggggcccttcggcctgctcgtcctcgccgaccgccgcctccgccgcgagcagacggccgtctacttctacgtggccaagggcctggacggctccctcgccacgcacttctgccaggacgagtcccgctcctccagcgccaccgacatcgtcaagcgcgtcgtcggcagcgccgtccccgtgctggaggacgaggccacgctctcgctccgggtgctcgtcgaccactccatcgtcgagagcttcgcgcagggcgggaggtccaccgccacatcgcgcgtctaccccaccgaggccatctacgccaacgccggcgtcttcctcttcaacaacgccaccgccgcgcgggtcacggccacgaagctcgtcgtccacgagatggactcgtcatacaaccacgactacatggcgccggtggcagacatctgatcgatgcaatgcaaccacgccactctgcaccgcaacaaattttccaacacacataaatataccaagcaattcccatctgtcaaattttcttatttccctgccatgattttggtctctatttttcctgctggctactacttatcttccagcactagtaatgtacgtactggctagtaactagggtatccagtgggaagacgtgtagcctctagttgtacatgcatgtatgatgctgtgtagcaccgcatcatgcacaccacaccaatgcaaatgagttataaatgtttttaagctccaaattaaaattttcggtgcctgaagagtcaagttattggagaatgatgaatggatcagataataacgca

SEQ ID NO: 126968 - DNA, 926 bp, Zea Mays
atcccacccctcgcccaatgcgtagttgtatctgcatctccaacaccaccagcagaggttccagttagttttttttagattagaaaaatcgagtccaacagactcgccgcactgcgcgggatcgacctcgtcgcaactcccgtgtgcgccgccaataatggagacccgggacacggatgcgacgccgctcccctactcgtacacgccgctgccggccgccgacgccgcgtcggccgaggtctccggcaccggcaggacgcggagcaggcggcggcccctctgcgcggcggcgctcgtgctctccgccgcgctgctcctagccgtggccgcgctcgtcggcgtcggtagccggcccggcgcggtggggatgacagagtcggcggcctcgtcgccgacgccgagcaggagcaggggccccgaggccggcgtgtccgagaagacgtccggcgcgtctgacgacggcggcaggctccgtggagccggcgggaacgccttcccgtggagcaatgcgatgctgcagtggcagcgcacgggattccacttccagccgcagaagaactggatgaacgaccccaatggtacgttacgatcctctctgtctctctctctctctctctgctgctgctgcgctgctgcatttggtttgggttgcatcccaactcaacatccccttccaaacgactatggattagatcgatttgaaccatatgaacgaattaattgtccacgcatttgattcctttcacgtgcatttcatccaacgaggcgctgggacccacacgcatggacgaattattcagcgggccccttttttctcttcacttttcccttttttctcttcacttttcccttttttttttctttctcatccacatacaaattccagatacccccgggccctccgggattccacccaaccaccaggc

SEQ ID NO: 126969 - DNA, 324 bp, Zea Mays
ccaaattccaattcaaccccctctctctactctgctcttcaaatcatcaccaccgcttcaccgctcgcgccagccaatgtcaggcgacggcgacggcgacgtgcgcggcctcgaggcgacggctgccgccgcggcagaggcgacgcgggagctgcaggaggcggccgcggccctcgtcgcaacccgcgccgccgaggaggacgcgctgcgccgcagcgtcgtggcgctggacaccgacgtccgccgcctccagggctcgctccacctcgacccctccacgctcgacaaggtcctcatcgcctcgtcttctgcccttctcttcct

SEQ ID NO: 126970 - DNA, 1405 bp, Zea Mays
gttgctcctactcgtactgatacaccggctcctccactgttggaaggaaaatcagatgccaatgaaattacaacagcaagaatcagcagtggaacaacagcaagggggagaggaaaagctccccgaaaatctcctcctctactttgagcaaatcctccacgatgacccactcatcgatgaggtggggttcttgcacccaacacaattctgctcactagattgcgcccgagatggtgactccgcttcacaatctacagagttccattgcgcaagatacttctggtgcagagaccacaagcttgccatctccgccgagatcctccccgagctttaccatgctgctcgggatgcctactacaacgcaagggatgccccactatcgcgcactaatctcatgaggcacaccaaggcactgctcatactttgtcctgacctactcactgcatggaactccaggaaaatggtgctatcagcgttgtatgatttcacaaagctcaaggatgaactgcaattgtgtgccttgatcctttcctactctccaaagaacgagagcacatggagccataggagatgggtgataaaacaagttgctgagcaacatcaagatatgttggagcttatagggaatgaatccatactggtcaaagagatagcagagaaatcgaaaatgaactatcgtgcatggaggcatcgatgttggcttattccttacatgacaaggaaacaagtgctggatgaactgaatgagtcaacaagatggagtgagctacatgttgctgacaactgctgcttccactatcgaagatctttgctgcttgcgctactagacaacttctttgggaatgaagaggattcccttagttgggagtcagatatttgcttgctatggaaggaggagcttaggtgggatgagatgctgatcaaacgctaccaggggagagagtcgttatggaaccaccgtcggttcctttcacacttgtggatacaacacttgctcactgttgaaggaaactggcccgcaacgacatcccagatggatatgtttgtcatccaggagatacaactgctgtcagagtgcctgcatgatcctgtggatgagtttgaggagtcgcgtgtccaagcagagctttcagcgctctacattatgtggataacaaagcaagtcccggatgtgaaggggaagctggaagagaggttgcattttgcctccatggggaggctgaaggacgtgctggcaggagcctgcaggccagagaagaggttttggatgaatttgctcaacctggctgatcaatccagtgacgtacaataatacatgacctttcttgttgagtttgagccgtcaacatacatgacatggacgccaagctcttgcttcaggtcctgtctcccggatttctgccaa

SEQ ID NO: 126971 - DNA, 1491 bp, Zea Mays
gttgctcctactcgtactgatacaccggctcctccactgttggaaggaaaatcagatgccaatgaaattacaacagcaagaatcagcagtggaacaacagcaagggggagaggaaaagctccccgaaaatctcctcctctactttgagcaaatcctccacgatgacccactcatcgatgaggtggggttcttgcacccaacacaattctgctcactagattgcgcccgagatggtgactccgcttcacaatctacagagttccattgcgcaagatacttctggtgcagagaccacaagcttgccatctccgccgagatcctccccgagctttaccatgctgctcgggatgcctactacaacgcaagggatgccccactatcgcgcactaatctcatgaggcacaccaaggcactgctcatactttgtcctgacctactcactgcatggaactccaggaaaatggtgctatcagcgttgtatgatttcacaaagctcaaggatgaactgcaattgtgtgccttgatcctttcctactctccaaagaacgagagcacatggagccatagacaattcccatctatttggactttggagctgattttgatataataaaactaaactgcatggagtttgaaataactgtctgccacaggagatgggtgataaaacaagttgctgagcaacatcaagatatgttggagcttatagggaatgaatccatactggtcaaagagatagcagagaaatcgaaaatgaactatcgtgcatggaggcatcgatgttggcttattccttacatgacaaggaaacaagtgctggatgaactgaatgagtcaacaagatggagtgagctacatgttgctgacaactgctgcttccactatcgaagatctttgctgcttgcgctactagacaacttctttgggaatgaagaggattcccttagttgggagtcagatatttgcttgctatggaaggaggagcttaggtgggatgagatgctgatcaaacgctaccaggggagagagtcgttatggaaccaccgtcggttcctttcacacttgtggatacaacacttgctcactgttgaaggaaactggcccgcaacgacatcccagatggatatgtttgtcatccaggagatacaactgctgtcagagtgcctgcatgatcctgtggatgagtttgaggagtcgcgtgtccaagcagagctttcagcgctctacattatgtggataacaaagcaagtcccggatgtgaaggggaagctggaagagaggttgcattttgcctccatggggaggctgaaggacgtgctggcaggagcctgcaggccagagaagaggttttggatgaatttgctcaacctggctgatcaatccagtgacgtacaataatacatgacctttcttgttgagtttgagccgtcaacatacatgacatggacgccaagctcttgcttcaggtcctgtctcccggatttctgccaa

SEQ ID NO: 126972 - DNA, 2250 bp, Zea Mays
gcgtgtggtcgcgcgtgatgcggaccagttccaggttccagcgagagtgcgcggatgtcggcggcgcggccttggcctagtgcgcaaacaaggaggggggagggccgcgggcaggcggccttgacttgcggcgcgggcaccgccatcgctgtctgaggccgcgcgggctcgctcgctcgctcgcaaactagggtcggtggaccgtgcttgcgcacgttttctcccctcctcctcgcccaccgctgccaccaatcacgccgctgccggctcagccgttggagccgcctcgatccggactcacccgcgttggacctctccgttcccctctactaggaattggagatcggtccagatacctctcacaattttgcctctatctatttgacttttcaaagagagattaatactatacccctactggctaaagggttacagagtattcctatggacatgatatcatcctgtcccatctgcaatatacaagttcttacggttgagctggaatggcatgccaatagccactttgatgacgatcaactccaaagggacatcgaattagcacatcagatagcagttgctgaatcaagtacagataccatgaatgacccaaaacattatagtggatcattcactagtgactctaatactataggggcctcatcgagtcatagtggatactcacaccattacagtgagctattggatgaacaaatctcttgtatggtcagagcacaaattcgaagcaaagttcaagaagtggaaggcggtattatgagcttgttgaggagctgcttggagtcagaagctggttcctcaaaaagtatgatatcaggctatattgaccatcatcagagtctttcatcagaagataagggatggggctgtggatggagaaatattcagatgctgagctctcatctattgaagcaaagacaagaagctagagaagtattatttggtggttctggatttgttcctgacatcccttcactccagaggtggcttgagattgcttgggataaaaaatttgatacgattggctccagccactttcacaacaaagtttatggtgccaagaagtggatagggactacagaatgtgctaccctcttccgctcttttggcctccgtgcaaagattgtagattttgatagcacagaatcatccgacctccaaagtaagaacagtagccatgcagcaagtcaagtacgaggacttatggataagttcttaataaagagtaattcccctaaatcatcgtctgaattttgtcaagaggatgctgaaagtatgagaggccaacacgcccttgttgactgggtttggaactattttgcatgtgagcgctctgatagattaaccacacagcgtgccactgtcagcaataaaacaccactctattttcaacatcaaggtcattcaaggacaattgttgggattcaaaaggaaatggttcaccgtggatctcaagaacaatacacccttttgattttagatcctggtcatagaactgcagatctagaaaggtccctaagaagcaaaaatggatggcagcgtctggtgaagagaggtgtccacacgctcaggaagccacagtatcagttatgttatgtggatcctggaattgctagttcagaagagatggagcaactgaagactattgatagtatgcttgtcaggttttaggttcctggtaagtgtgaaaacttatcctgtctttcttcgtttacatgtcaactatgagaaattgtggctaactaattattggttttcataccaccttttatgaacgccttcatcagttactttgatctaactcaatgctgtatttgttctgtattaccttgcatgtttctccgaatttcttggttgaacaacagaaaacaggatgaggattatatgtgttttgcacacagggcactcccctggttgaagaaacaagaacatctaatccattgccgaacggtgcgctgtacgaatgacacagcaaggatgggcctgcagaaagatctttgacgctgcctaactgaatctgcttgcagactggatctactgttgtttggaggaccttagaagggtcctgactgctttcgtaactggacctgcccgttgggcttgttcggttatctgaacgactgaacctgtggtgtaggtaaacgaagcagagcttgatgtacagtacagtcgcttgtgttgaagtggagagaataaaagtgtttgtacatataataacatcctgcagttgttaat

SEQ ID NO: 126973 - DNA, 2284 bp, Zea Mays
gcgtgtggtcgcgcgtgatgcggaccagttccaggttccagcgagagtgcgcggatgtcggcggcgcggccttggcctagtgcgcaaacaaggaggggggagggccgcgggcaggcggccttgacttgcggcgcgggcaccgccatcgctgtctgaggccgcgcgggctcgctcgctcgctcgcaaactagggtcggtggaccgtgcttgcgcacgttttctcccctcctcctcgcccaccgctgccaccaatcacgccgctgccggctcagccgttggagccgcctcgatccggactcacccgcgttggacctctccgttcccctctactaggaattggagatcggtccagatacctctcacaattttgcctctatctatttgacttttcaaagagagattaatactatacccctactggctaaagggttacagagtattcctatggacatgatatcatcctgtcccatctgcaatatacaagttcttacggttgagctggaatggcatgccaatagccactttgatgacgatcaactccaaagggacatcgaattagcacatcagatagcagttgctgaatcaagtacagataccatgaatgacccaaaacattatagtggatcattcactagtgactctaatactataggggcctcatcgagtcatagtggatactcacaccattacagtgagctattggatgaacaaatctcttgtatggtcagagcacaaattcgaagcaaagttcaagaagtggaaggcggtattatgagcttgttgaggagctgcttggagtcagaagctggttcctcaaaaagtatgatatcaggctatattgaccatcatcagagtctttcatcagaagataagggatggggctgtggatggagaaatattcagatgctgagctctcatctattgaagcaaagacaagaagctagagaagtattatttggtggttctggatttgttcctgacatcccttcactccagaggtggcttgagattgcttgggataaaaaatttgatacgattggctccagccactttcacaacaaagtttatggtgccaagaagtggatagggactacagaatgtgctaccctcttccgctcttttggcctccgtgcaaagattgtagattttgatagcacagaatcatccgacctccaaagtaagaacagtagccatgcagcaagtcaagtacgaggacttatggataagttcttaataaagagtaattcccctaaatcatcgtctgaattttgtcaagaggatgctgaaagtatgagaggccaacacgcccttgttgactgggtttggaactattttgcatgtgagcgctctgatagattaaccacacagcgtgccactgtcagcaataaaacaccactctattttcaacatcaaggtcattcaaggacaattgttgggattcaaaaggaaatggttcaccgtggatctcaagaacaatacacccttttgattttagatcctggtcatagaactgcagatctagaaaggtccctaagaagcaaaaatggatggcagcgtctggtgaagagaggtgtccacacgctcaggaagccacagtatcagttatgttatgtggatcctggaattgctagttcagaagagatggagcaactgaagactattgatagtatgcttgtcaggttttaggttcctgaaaacaggatgaggattatatgtgttttgcacacagggcactcccctggttgaagaaacaagaacatctaatccattgccgaacggtgcgctgtacgaatgacacagcaaggatgggcctgcagaaagatctttgacgctgcctaactgaatctgcttgcagactggatctactgttgtttggaggaccttagaagggtcctgactgctttcgtaactggacctgcccgttgggcttgttcggttatctgaacgactgaacctgtggtgtaggtaaacgaagcagagcttgatgtacagtacagtcgcttgtgttgaagtggagagaataaaagtgtttgtacatataataacatcctgcagttgttaatcttttgttacacatctgatgccgcccgcgcactcagctcagttgactggaatattgactcaaggatcgtattctgcacaagttggaatctggccatatgtttgttgtttgttgggtgtcgagccatcccttctttcgattaaatatagtcgcacgtatgagtacaaaatttgttgatcctatgtgtatttgcagtacggcctgttttaaggggcatttggc

SEQ ID NO: 126974 - DNA, 2242 bp, Zea Mays
ggtcgcgcgtgatgcggaccagttccaggttccagcgagagtgcgcggatgtcggcggcgcggccttggcctagtgcgcaaacaaggaggggggagggccgcgggcaggcggccttgacttgcggcgcgggcaccgccatcgctgtctgaggccgcgcgggctcgctcgctcgctcgcaaactagggtcggtggaccgtgcttgcgcacgttttctcccctcctcctcgcccaccgctgccaccaatcacgccgctgccggctcagccgttggagccgcctcgatccggactcacccgcgttggacctctccgttcccctctactaggaattggagatcggtccagatacctctcacaattttgcctctatctatttgacttttcaaagagagattaatactatacccctactggctaaagggttacagagtattcctatggacatgatatcatcctgtcccatctgcaatatacaagttcttacggttgagctggaatggcatgccaatagccactttgatgacgatcaactccaaagggacatcgaattagcacatcagatagcagttgctgaatcaagtacagataccatgaatgacccaaaacattatagtggatcattcactagtgactctaatactataggggcctcatcgagtcatagtggatactcacaccattacagtgagctattggatgaacaaatctcttgtatggtcagagcacaaattcgaagcaaagttcaagaagtggaaggcggtattatgagcttgttgaggagctgcttggagtcagaagctggttcctcaaaaagtatgatatcaggctatattgaccatcatcagagtctttcatcagaagataagggatggggctgtggatggagaaatattcagatgctgagctctcatctattgaagcaaagacaagaagctagagaagtattatttggtggttctggatttgttcctgacatcccttcactccagaggtggcttgagattgcttgggataaaaaatttgatacgattggctccagccactttcacaacaaagtttatggtgccaagaagtggatagggactacagaatgtgctaccctcttccgctcttttggcctccgtgcaaagattgtagattttgatagcacagaatcatccgacctccaaagtaagaacagtagccatgcagcaagtcaagtacgaggacttatggataagttcttaataaagagtaattcccctaaatcatcgtctgaattttgtcaagaggatgctgaaagtatgagaggccaacacgcccttgttgactgggtttggaactattttgcatgtgagcgctctgatagattaaccacacagcgtgccactgtcagcaataaaacaccactctattttcaacatcaaggtcattcaaggacaattgttgggattcaaaaggaaatggttcaccgtggatctcaagaacaatacacccttttgattttagatcctggtcatagaactgcagatctagaaaggtccctaagaagcaaaaatggatggcagcgtctggtgaagagaggtgtccacacgctcaggaagccacagtatcagttatgttatgtggatcctggaattgctagttcagaagagatggagcaactgaagactattgatagtatgcttgtcaggttttaggttcctgggcactcccctggttgaagaaacaagaacatctaatccattgccgaacggtgcgctgtacgaatgacacagcaaggatgggcctgcagaaagatctttgacgctgcctaactgaatctgcttgcagactggatctactgttgtttggaggaccttagaagggtcctgactgctttcgtaactggacctgcccgttgggcttgttcggttatctgaacgactgaacctgtggtgtaggtaaacgaagcagagcttgatgtacagtacagtcgcttgtgttgaagtggagagaataaaagtgtttgtacatataataacatcctgcagttgttaatcttttgttacacatctgatgccgcccgcgcactcagctcagttgactggaatattgactcaaggatcgtattctgcacaagttggaatctggccatatgtttgttgtttgttgggtgtcgagccatcccttctttcgattaaatatagtcgcacgtatgagtacaaaatttgttgatcctatgtgtatttgcagtacggcctgttttaaggggcatttggc

SEQ ID NO: 126975 - DNA, 3577 bp, Zea Mays
cacgaacacgcacaaaagtagcatgaggaagggttccatccaaaaccgaaatccaaattccaattcaatccctccgtcgctcgctccaatcatccccaccgcttcaccgcccgcgccacccaatgtcaggcgacggcgacgcgcgcggcctcgaggcagcggcggccaccgcggcagaggcggcgcgggagctgcgcgaggcggccgcggccctcgtcgccacccgcgccgctgaggaggacgcgctgcgccgccgcgccgtggcgctcgaagccgacgtccgccgcctccaggcctcgctccacgccctcgatccctccacgctcgacaaggtcgaggaggaattggagcgtgccagggtggcaatcacggatagtgatgtggcttcgtttcttcccagcaagcggaatggcaagtttcttaagacatttctaggccctgtgaatgtgcgggtggcgaggaaggaagataaactcaaaatcaaggatgagtacaacaattatagggataggacagcctataagtttctgttatttccatctatcctcctcctactgagatggtggatatgggatggatgccttccagcattggctgttcaaatttaccaggcttggttactatacctgtacacaagctttgctttgcgtgagaatgtattaattgcgaatggaagtgacattcgtccatggtggatatatcatcactatctagcaatgctgatggctcttattagccttacatgggagataaagggacagcctgattgttctagcaagcagaggggggtgcaacttttcttgcgctgggcaatcatgcaaggcattgcaatgcatctacagaatagataccagcggcaaagattgcgtactcgaatagctctaggaaaggctaaaagaatggatgtcgttgctggcgaaacagctggtgtggaggggcagctcttgctgctatatcctgtccttttcatattacagggtttcgaagcatatgttggagttttgcttcttcagacggctttgcatgggcttgcttccgaatggcaggtcttagtctgcgggatcttgctggtggttatggcagtcggcaactttgtccacactatggagacactggtactgaaactgaggtttaaagcaaagatgaagaaagcgaagagcagacaggatcgcccgcatcaaaattgacaggcatcatcgtccttggaaaacaaggatgctgacaccgcctcttttgtaaatcctttgacccacattaacattttttgcctgcttgtcattctctctctcttttttttttggtaattggccctgtaacattgaagttgatattccacacaacacggtggatgaaaccatatttgttcgctcttggatgagaactgagtttggcatgtactatatatttttctgtatgaaacctctgggttctgaaataagatgatgtgtatctgaagctgtgaattgacagaggggctctatacaaataatggagcagaggcttttgtaaggtcagatgttgtcatgtagtgtacttgttatacagagatcggtatgaatggttagcagatctttcttttcaacaatcataatatgaggtgtctggtcctccaaaagctttcggccacaacctgaatgacaagcactcccctgcctctgcctgctacacaggatcactcaatcattgaggggcgatagtgtcttgatggtttgaggtcatggtacaatgcaaaggatagtgtctcgggactaatccatttttcttacaatcctaaattttgtacccctaactaataaacatcaaggacaatgcaaggaatcatgtgagctccagcagcttgctgagctggatatggtggccgtaacccgccttggcgatggacctcgccgctttctccgcgatggcggcgcgcacctgcgccatcgacggccggagcccgggctgcgcggccaggcactccacggcgagctcggccacgctggcggcctcctcctcgtcgagcccgccgtccccgagcctgccgtcgacgagccccgccaccccgcgctccctgacccgcggcaggatccgcgccgtcaggttctgggcctcggacgccggcggcaggccggtgacggcctcgagcagcagtacgccgaagccgtacacgtcggacttggtggacacgatgcccgtgcggaggaagaaggggtcggcgtagcccggcgatcccacggcggcgcgcgccggcgccacggccgccgagaagccctcgcaggcggagcccaggtcgcagagccgcgcgccgccgtcgaagaggagcacgttggacgccgacacgtcgccgtgcaccacggcggtggaggtgccgccgccgccgccgcagtgcaggtgctccaacgcgcacgccacgtcgtggagggcgcgcatgcgctgcgcccacggcagcggggcggccgccgtgccgtggagcgcgtccgccagcgtgccgccggcgaggtactccagcaccagcgcgccttcttcctctgcatgcatgcagtaacaatcattagtttaccactctactcgactcgacatgggtaaattcacttgggatgggaatgggacagcgaggcgacgaccaagctgaagtgcagcgcaggtttgacgagaggaggtgggggagtcgccgtacaaaaaataaatgaataaatagcggttgctctcaactctcgttaggtagggagtaaagtgatgtcacgcgcgcggcaatttggaaatgcattttttttccagatcactactataaagcctgctcgatcaggtcgtctacccattcgtttccctttctttttgggtagtatattatttcttttgttttttcgttaaaaaaaacatgagcttgactgacttcgtgtgctaataagcaaagtgtaaacagaatagtatataaaaaaaagaaaaaaacatatatttaatttgcaccgtggtcgtcggagtaggcgaggagcgcgacgatgttggggtgtcggaggcggcggagcaggtccagctcctgccggaaggcgcgcagccggcgctcgccgccgcaccagcggtgcaccttgacggcgacgggcgagccgtcaaggagcctggcgaggtagactgcgctggagccgccgcggcccaccacggcggactcgtcgaacccgcctgtcagcgcctccacctcccgccacgccagccgccgcggcgcctcctcctcctccttcttgacggctattgacgctgctcgctgctgctgctggttggccgctggcggtggctgacgatggcgtggcgctgctgctcgcgcctcggcgccggaggccaggaagtggcggatgaggaggaaggcgatggcgccggaggccagcaggaggacgcagcagaagagcaaggagagcgccacggccacgtccatggcgcgcgccccccggccggcctctcgctctcgctctcgctgctgtcagaagccagcagccgcccacaacgtaacacggaaccggaaggaaaagtggtggcaagttacaaggccgagcttgatacatatgcaccagctaacttcattaacttagcttagcttccttctctc

SEQ ID NO: 126976 - DNA, 1422 bp, Zea Mays
aaaaccgaaatccaaattccaattcaatccctccgtcgctcgctccaatcatccccaccgcttcaccgcccgcgccacccaatgtcaggcgacggcgacgcgcgcggcctcgaggcagcggcggccaccgcggcagaggcggcgcgggagctgcgcgaggcggccgcggccctcgtcgccacccgcgccgctgaggaggacgcgctgcgccgccgcgccgtggcgctcgaagccgacgtccgccgcctccaggcctcgctccacgccctcgatccctccacgctcgacaaggtcgaggaggaattggagcgtgccagggtggcaatcacggatagtgatgtggcttcgtttcttcccagcaagcggaatggcaagtttcttaagacatttctaggccctgtgaatgtgcgggtggcgaggaaggaagataaactcaaaatcaaggatgagtacaacaattatagggataggacagcctataagtttctgttatttccatctatcctcctcctactgagatggtggatatgggatggatgccttccagcattggctgttcaaatttaccaggcttggttactatacctgtacacaagctttgctttgcgtgagaatgtattaattgcgaatggaagtgacattcgtccatggtggatatatcatcactatctagcaatgctgatggctcttattagccttacatgggagataaagggacagcctgattgttctagcaagcagaggggggtgcaacttttcttgcgctgggcaatcatgcaaggcattgcaatgcatctacagaatagataccagcggcaaagattgcgtactcgaatagctctaggaaaggctaaaagaatggatgtcgttgctggcgaaacagctggtgtggaggggcagctcttgctgctatatcctgtccttttcatattacagggtttcgaagcatatgttggagttttgcttcttcagacggctttgcatgggcttgcttccgaatggcaggtcttagtctgcgggatcttgctggtggttatggcagtcggcaactttgtccacactatggagacactggtactgaaactgaggtttaaagcaaagatgaagaaagcgaagagcagacaggatcgcccgcatcaaaattgacaggcatcatcgtccttggaaaacaaggatgctgacaccgcctcttttgtaaatcctttgacccacattaacattttttgcctgcttgtcattctctctctcttttttttttggtaattggccctgtaacattgaagttgatattccacacaacacggtggatgaaaccatatttgttcgctcttggatgagaactgagtttggcatgtactatatatttttctgtatgaaacctctgggttctgaaataagatgatgtgtatctgaagctgtgaa

SEQ ID NO: 126977 - DNA, 375 bp, Zea Mays
cacacactcaacaccctcaaccaaggcaaacaccccacccactcagttactccgctctgccggctacacgcatagtgtcgcttcgcctccagtccaccctcctggtaagcacctccgctccaccaccagtaatatcacaacaccacatgacacagattctactcaagactctacccatccatatatcgcttttctgaccactatactaaatatttgttggtatacttgctggtttgtatgtttgcttgttcatgttgcatagttatcggagcgttcatgccgtctcgtggaggctagatctgcaagtctacgccaggcagtggagctagaagccagttccgcgagctccccttcccccttcgtcggataagcacg

SEQ ID NO: 126978 - DNA, 4024 bp, Zea Mays
atggacgagtctggtatgaaaaaggagatcgggtaagagttacgactgttcccaaccttgcctgtggctattggaccgctgatttgcttcgctgcgtatatcgggctgcttcagccccactctgatgatatgtcccgagttgtggaccaactcttaaagttgatcgccacctttataggtttgtctcgtttaagcagatctgaaatcatctgttgtataaatgtgtttactagcctcctgggactagtaattgtatcacatttgagtcccagaggattggggacgcttcagaaagcccccacactttgatggagaggactattcattttggagtcataaaatgcgtagtcacctattttccctccatcctagtatttaggaaattgttgaaaatggaatgcatttcgatagcactgataatcctgtatttatcaatgagcaaatacataaaaatgcccaagccactactgttttgttatcatctctatgcagggatgaatataacaaagtaagcggcttggacaatgccaagcaaatatgggataccctcaaggtcttccacgagggtaatgacgccaccatgattaccaaaatggaacttgtggaaggcgagctagagagattcgccatgataaggggagaagagccaactcaaacatacaaccggctcaagacccttatcaacaaaattagaagctataggagcacaagatggatggatcatgacgttgtccgactcatgctaaggtcatttactgttattgatcctcatcttgtgaaccttattcgtgagaaccccaggtacactaagatgacgcccgaggaaatcctcggaaaatttgtgagcgggtgcatgatggtaaaggaagcgaggtatgtggacgatgccttaaacgggccgcttcctctacacaagccgtagatcgttgctctcaaagcaaccagcatcatggaggcgttacctagcaaggtagcacaagtagaggttgtcgggctcaacgaggacgaaatgacgctcatcatcaagagcttcaagaccgccttgaaaggacgcaaggagtaccctaacaagaataaataaaggggaaagcgctcctgcttcaaatgcggtaagtctggtcatttcatagcataatgtcccaataataacaatgaccaggcacaagaaaaatatggaaacaaggaaagaaaaaagaactacaggaaggcaaagagcgaggcacacattggaaaagagtgggactccgactgttcttcatccgactccgatgatgaaggactagctgcctcggccttcaataagtcttctctcttccccaacaaacgacacacatgcctcatgggctaaggagaagaaggtatgtatacgagatacaccaaagtacacttcttctagtgatgaggaatattctgatgatgatgaaatagattatagtgatctttttaaaggattaagatagatctaaggtaggcaaaataaatgaattgattgatgcacttaatgaaaaagacaaactactagaaaaacaagaagatattctctatgaggaacatgataagtttattagcattcaaaaatctcttgcactagaaattaagaaaaatgaattgttgtcttcagaattgtctacctgtcatgaatatatttctagaaaaaattaatgtgactagttcatgtgtagagcatgtcgtaatctccaataggtgtaaggattttaatattgatgcctgtaatgaacatgtttctactatcattaagttaaacaatgaggttgcaagtcttaatgctcaacttaagacttgcaaggataatcatgaaaaactcaaatttgctagggattcctacaccattggtagacacccctcaattaaggatggacttggtttccaaaaggggactaagaacttgacaagccaaaggacttccaatctcaataaggagaaagggaaggctcctatggtttatgcatccgggggctcaagctggattattgacagcggatgcacaaaccacatgacgggggagaagaaaatgttcacctcctacgtcaaaaacatggattcccaagatactatcatctttggagatgggaaccaagtcaaggttaagggcttaggcaaaatagctatcaagaccaagcattcaatttcaaatgtgtttttagtagaatcgctcgggtataatttattgtctgtaagtcaattgtgtcatatgggctataattctttatttacaaatattgatgtatctgtctttagaagaagtgatggttcattagcttttaagggtgtattagatggcacactctatttagttgatttctcaaaagagaatgtcgatctagatgcatgcttaatcgctaagactaatatgggctggctctgacatcgctgtctagcacatgttgggatgaagaaccttcataaacttctgaagggagaacatgtgttaggactaaccggcgtctgttttgagaaagatagaccatgtgcagcgtgccaagcaggaaagcaggtgggaagtactcatcaaaacaaaaatgtgatgacgacgtcaagaccactagaactcctacatatggatctctttgggcccgttacctgtctcagcatcgggggaagtaagtatggtcttgttatagttgatgaattttcccgcttcacttgggtgttcattttgcaggataaatctgaaacccaaggaacactaaagcgcttcttaaggagagctcaaaatgaatttgagctaaaagtaaagaagataaggagcgataatggatctaagttcaagaatcttcaagttgaagaatatcttgagtaggaaggcatcaagcacgagttctccgctccctacacaccacaacaaaatggtgcagtagagagaaagaacaggacactaattgatatggcaaggacgatgcttggagaatacaagacgcctgagcggttttggtcggaagatgtgaacacagcttgccatgccataaaccggctctatttgcatcgcctcctcaagaagacctcatacgaactcctaactggtaacaaacccaatgtttcctattttcgtgtattacattatggtaaagaaaggtaggcattcaaagtttgctcccaaagctgtagaagggtttttactaggatatgactcaaatacaaaggcgtatagggtcttcaacaaatcatcgggattggttgaagtctctagcgacgttgtatttgatgaaactaatggctctccaagagagcaagttgatcttgatgatgtagatgaagatgaggttccgacggccgcaatgcgaacaatgacgatagatgatgtgcgaccacaagaaccgcaagagcaagatcaaccttcttcctctacgatggtgcatcccccaactcaagacgatgaacaggaggaagaagcgtcactggttcctccaactcaagtccgaacagcgattcaaataaatcatccagtggatcagattttgggtgatatcagcaagggagtaacaactcgctcacgcttagctaatttctatgagcattactcgtttgtttcttctattgagcctttcagggtagaagaagccttgcaggatccagactgggtgttggccatacaggaagagctcaacaacttcaagagaaatgaagtttggagcctggtgccacgtccaaagcaaaacgttgtgggaactaaatgggtgttccgcaacaagcaaaacaaacacggagtggtgacaagaaacaaggcttgacttgtggcaaaagggtatgcccaagtcataggtttggattttgaggagactttcgctcctgtggctaggctagaatcaattcgactattgttagcctatgctgctcaccattttttaagctgttccaaatggacgtgaaaagcgccttccacaatggaccaatcaaggaggaagtgtacgtggaacaaccccctagctttgaggaggacaggtatcccaaccacgtctacaagctctctaaggcgctctatggacttaagcaagccgcaagagca

SEQ ID NO: 126979 - DNA, 732 bp, Zea Mays
atggatcctaagggaaaggggatggtggtcaacgacaaggagaaggagtctttcctcaacgagcctagagatgacaagccaaccgattcaggcttgagtcataagaaaagagatggaaagaagaaaaggcgcatcaagaagatcgtctactacgacagcgacaaatcttcttcttcaccaagagacgacgacaacgagaaaaagaaaccggttaattcaaattattcatttgattattctcgtattccttttaattccaatgctcatttgctttcaattcctcttggtaaacctccacactttgatggggaggactactctttttggagtcacaaaatgcgtagtcatctattctctctccatcctagtatttgggagatagttgaacatggaatgcaatttgatagtacggataaccctgtgtttattaacgagcgaattcataaaaatgcacaagctaccactgttttgctagcatctttgtgcagggatgagtacaacaaggtgagcggcttggacaacgccaagcaaatctgggacaccctcaaaatatcacatgagggaaacgacgccaccatgatcaccaaaatggagttggtggaaggagagctaggaaggttcgctataatcaagggagaggagccaacacagacgtacaataggctcaagaccctggtcaacaagattaggagctatgggagcacgagatggacggaccacggcgtcgtctga

SEQ ID NO: 126980 - DNA, 81 bp, Zea Mays
catgatgcttaccatcatggatcagtggccttcatgtctcatgttcgtgcttcctgtgatggtctcttatgtcttttgcag

SEQ ID NO: 126981 - DNA, 454 bp, Zea Mays
gctcgctctggagcttatctcccaccgccgatcgctgatcttcctggccgtgccgctcaacgtgtggagaaaaaaaaatcccaccgccccagccaggtcttcttccccctgcgcgcttatcttcagccgtcgttcagtgttcgtgggacagagaaaaatctggccgtcgttcttcacgcgcagctccctcgtgctccattttctctggccgctactctggccggtgttctctgcttgcttcagctccagcgcccagcctcagctcgcgcccaagctcctgcgcgtctctcagccctgcgcgcgagctcagcatctccctgcgcaccgctgcatcgcctctccctgaccgcggtctcctccagctcaccggagctctctgccgcgcctgctgcttcgccggccatggtagtcgctgctccagcccatggccgagctcgccctagcgccgtccccc

SEQ ID NO: 126982 - DNA, 726 bp, Zea Mays
ctttatcctatccaccgctgttctccttcattctcatttcttgcacgccgacaccagcccctccattttctattggccgccccttgctccctcccatggggctccccctcgatccctctccatggcatggatcagccccagcttcccatggatgtcgccctcctctccctgatggctggcatctccactccctgcagcaaggacgctttcctctgctccctgctcttcctcccatggccaacccatggtaagctcgccatgcctttctactcgtccatggtctctcccgattgctgcatctctcctgctcacttccaatggtgtggacgtcaccctctccctcaccttccagttgtggtgctcgccctggctccagccccttccacagtcggcaccctccccatctgctgcagattggagaagaggaaccccaggttttgcgtagagaggaaatccatgtggcgtgtgctaggtgtttgatagaatggatgaatcagagatccttgttgctcttgcgaattccgagtctatttagtgttggtaagttaattcattattaatgttgattgaattattagatgaatggaatagatatgttttatgaatatatatatatatgaatcatgagtcagtggtaatacctcttcgtggatagtgacatgattgtattcatgattatggttaaaataagtgatgacggtattgtagttcgaacctgcacttaca

SEQ ID NO: 126983 - DNA, 426 bp, Zea Mays
atgcaatggccatggaggcagcaacggcgaggttcgagggtaaaatggggcatccatttaagctccatcactggttgcaagtttttcaccatgagcccaagtggtcagcaaaacatggtcttggtagtggatctgatgcgactgcgaataagagaacctgactcggagcctctggtgaatatagttctggaggcatcgaagataccgaagaggaagtgccccgaccagtggggccaagcttttgaagtaatggaacatcctaagggccgatcaactagagatatagactcggctgaaatatgtacccataccgggatcgtaaagatggtcgaaaaagaacttggtatagtagacaatgatgaagaggaattggaagcggagcgtgaagaggaggaaaatgaggatgagatcgtggagtccgattag

SEQ ID NO: 126984 - DNA, 1384 bp, Zea Mays
gcaaaatcctccgacctcgctcgcgccaccgaaaaccaaacgaggaaaaatgccgtccccgtccctcctcctccgcgctcctcctctctgcccctccccgtcccaccccccgcgccgcttcgctcccccctccctcatcacctcgtctccgcctgcccgcctcctccctctgcgcctgccctccgccgcgtcccgccacacgcctcgcgccggtgacacgcgcgtgcccgacgacctcatcccgatcgcgcgctgctacgagggccgccttgctcgactcgagctcgccggcgccgcgcgccgggaacaggccgtcgcggcagcggccgcggccggcggaggggcttcggcggaggaccacctcgccgccggctccgacgccatggtcgtcgaggcattcctccccgggccccatggcggtgggacgaccgcttcctccacgcgagtgattttgcaagccaaggaagttaaagataaggccagtaagatagagaaacagttcggatctgattttttctttgcaaatcaacctgattcagagagtatgttggctatggcctttaagcaagttgtaattcagcggctctcaaactttcggctcgaggtcttccccccaggttcagagagagacttccaagattttggcaaaccccgaaaggggtctttggattgtagtatcagctcatcagatggaaaacttctgtcttctcttgctgaggccattttctcctgtgtcattgaggatgtcagaaaaaatcattttgggagcataggcagtttttttcagaagcgacagctcaactgctcaatggattcctcagtttgtatacacaaaacttctgaggcagaagtagtgaaaaatgctaagaggtgtctggagatcgttagtttaatgaagtcttctcatgaagtacgtgaaacaaagaatggatggtggccacctccacatcatgaaagtttggtgaagattgggggtcctgagttagtgctttgggccaatgagtacattcctacttataagctgcaaattaatgccaacgcattggagaattctaatcttgaagttgaaggtctttatgagttagaaagtaataggcgggaagttctcttaacccactcacaactggtggaactagggaacgttctagacatgtactttgaagatcaattcacattaccaggcaaaacattccatccttattggaatccagatctgtcaaagattaaaaagaacaatgtaagctgataccttcctggtcaaaatttactcatttaaatatttatcaaactcttcatgatattttattttatgcagggttacttgaacaaccttttcacttttttggctgggacctgtatttttctttttgtcaccatctttgct

SEQ ID NO: 126985 - DNA, 1939 bp, Zea Mays
atacaaatgcctgcgcattagcgatcctcctcgctctccttccccttccgctgagccgtgctgccgcggccccggcacgccatggcgtccacggcgtactcgcggtcgtcgtccaacaagctgccgggcggcgagcggcggctgcccccgcgcctcatgcggggcctcacgtccaaattcgagcccaagaagctgggcgtcggcctcgtcgccggctgctgcctggcgctcctcacctacgtctccctcgccaagctcttcgcggtctactcccctgtattcgccagcacggccaacacgtccgcgctgatgcagcagaacgcgccgctggcctcgtccaagccgtccgtgccggagacggagaccatccctccggaagagacgctggacgacggcgacggcgcggataccggcgatctgcgtgggacggagcccggcttgccggaagctgccgtcatgaggaacgacatggcagcggggtccgacgagcccggcttgcccaccaggaaggacggcggcgggaatgcggaggccgagcccaccaacaagccatctgaggatggcaacggcggccaacaaggaggcaagatgacgtgcgacgagaacagcgtggacgagcggttcccgtacgcccggccgaccgtgtgcgagctgtccggcgacgtgcgcgtgagcccgaagcagaggacggtgtacctggtgaacccgtccggcggcggcggcggggggttcgacgagagcgtcgagaagcggctccgaccgtacgcccgcaaggacgactcctcaatgccacacataacggtgaagtcggtggcttcgggcgcggcggcgcccgagtgcacgaagcggcacgcggtgcccgcggtggtgttctccgtgggcgggtacaacacggacaacaacctgttcgacgacgacatgacggacgcgctggtcccgctgttcctgacgacggcgcacctggacggcgaggtgcagctggtggtggccgactacaagccgcggtgggtgcgcaagtacgcgccgctgctgcggaagctgtcccgccacggcgtggtcagcctggacggcgacgccgagggggaggaggaggggccgctggacggcgtgcactgcttccccgcgggcgcgttcgtggtggggctgctgtaccgcgaccgcgaccgggatctggacctgtcgcctcacccggcccggaaccggaacccgcgcaacgtgacgatggcggacttcgcgcggttcctgcgcggcgcgctggcgctgccgcgggaccgccccgccgtcctcggcggggcgcccggcatgcgtccccggttgctcgtcgtctcgccgcggaggctgctgaacctggaggaggtggcggcggcggcggacgcgctcgggttcgacgtggcgtccgccgaggccggcgcggacgacgtggcggagttcgccgcgcgggtgaacgcggcggacgtgctggtgggcgtgcgcggcgccgggctgacgaaccaggtgttcctgccgacggaggcggtgctggtgcagatcgtgccgtggggcaagaagatagagtgggtgaccaccagctcctacgggcgggcggcggccgggatggggctccggtacctggagtactacgtcggggaggaggagacgaggctgagggacaagtacccgcgggagaccgtcatggagcaggacgtcgtcgtcaacctcacaaggttccggcccgtgctgctgcaggcgctcgacaagctgcagcagtgacgaggaatggattcaccatagccggccggcaggaggaagctcgctcaggtcgtcgggcatgggattggtaatttggttggttcatctgccggttttgttttgtttgtcgtaagaaaagaagagaagagaacatacatacactacacacgaacgaacgagaattctgttcattcttcattcgcttggcatc

SEQ ID NO: 126986 - DNA, 1930 bp, Zea Mays
gccatggcgtccacggcgtactcgcggtcgtcgtccaacaagctgccgggcggcgagcggcggctgcccccgcgcctcatgcggggcctcacgtccaaattcgagcccaagaagctgggcgtcggcctcgtcgccggctgctgcctggcgctcctcacctacgtctccctcgccaagctcttcgcggtctactcccctgtattcggtgagtgcgctcgccgacccctccgttcctcctcctcctcctcacgagtctaaccggagctgccttcctcacttcctcctcagccagcacggccaacacgtccgcgctgatgcagcagaacgcgccgctggcctcgtccaagccgtccgtgccggagacggagaccatccctccggaagagacgctggacgacggcgacggcgcggataccggcgatctgcgtgggacggagcccggcttgccggaagctgccgtcatgaggaacgacatggcagcggggtccgacgagcccggcttgcccaccaggaaggacggcggcgggaatgcggaggccgagcccaccaacaagccatctgaggatggcaacggcggccaacaaggaggcaagatgacgtgcgacgagaacagcgtggacgagcggttcccgtacgcccggccgaccgtgtgcgagctgtccggcgacgtgcgcgtgagcccgaagcagaggacggtgtacctggtgaacccgtccggcggcggcggcggggggttcgacgagagcgtcgagaagcggctccgaccgtacgcccgcaaggacgactcctcaatgccacacataacggtgaagtcggtggcttcgggcgcggcggcgcccgagtgcacgaagcggcacgcggtgcccgcggtggtgttctccgtgggcgggtacaacacggacaacaacctgttcgacgacgacatgacggacgcgctggtcccgctgttcctgacgacggcgcacctggacggcgaggtgcagctggtggtggccgactacaagccgcggtgggtgcgcaagtacgcgccgctgctgcggaagctgtcccgccacggcgtggtcagcctggacggcgacgccgagggggaggaggaggggccgctggacggcgtgcactgcttccccgcgggcgcgttcgtggtggggctgctgtaccgcgaccgcgaccgggatctggacctgtcgcctcacccggcccggaaccggaacccgcgcaacgtgacgatggcggacttcgcgcggttcctgcgcggcgcgctggcgctgccgcgggaccgccccgccgtcctcggcggggcgcccggcatgcgtccccggttgctcgtcgtctcgccgcggaggctgctgaacctggaggaggtggcggcggcggcggacgcgctcgggttcgacgtggcgtccgccgaggccggcgcggacgacgtggcggagttcgccgcgcgggtgaacgcggcggacgtgctggtgggcgtgcgcggcgccgggctgacgaaccaggtgttcctgccgacggaggcggtgctggtgcagatcgtgccgtggggcaagaagatagagtgggtgaccaccagctcctacgggcgggcggcggccgggatggggctccggtacctggagtactacgtcggggaggaggagacgaggctgagggacaagtacccgcgggagaccgtcatggagcaggacgtcgtcgtcaacctcacaaggttccggcccgtgctgctgcaggcgctcgacaagctgcagcagtgacgaggaatggattcaccatagccggccggcaggaggaagctcgctcaggtcgtcgggcatgggattggtaatttggttggttcatctgccggttttgttttgtttgtcgtaagaaaagaagagaagagaacatacatacactacacacgaacgaacgagaattctgttcattcttc

SEQ ID NO: 126987 - DNA, 699 bp, Zea Mays
ttggctctgaacttgtcgtccaggaggatgttggtggacttgatgtcgcggtggaggatgcgcggcgccgccgcctcgtgcaggtactccagccccctcgcggcgccgagcgcgacgctcacccgcgtctgccagtccatgggcttcctccctcgcttcaggtctaggcagtccctcaggttgccgttggccatgcactcgaacaccagcagccgctccagctgccggccctggctctccgagcagtaccccagcaacggcaccacgtggcagtggttcagcctcgacagcagctcgatctctgacaggaactccaagtcttcgtccgtgcctcctagcggcctaagcttcttcacggcaacgactctgccatcgccgagctggccgcggtacaccttgcttgacccaccgactccgataaggtggtcgtccgagaatctcccggtcgcttgctccagctctgcgtacgagaaccgggcgacgacaccggggaatgcgccgctctctcccccacagatgacaagattgcagctgcacagaaactctttcagaccaccaagctttggtttgggtttcatctggggaagcggagacgatcgactgctgacgaggttcgacctgctgctccagctagtagtgtatctatcgaaggagtatatctgcgatcgcggagagagggcgtccttgcggcggaagtag

SEQ ID NO: 126988 - DNA, 2420 bp, Zea Mays
ttctccctcaccgacaggttgaagcgcacatcgttccaatcgtcgccgccggctacctcctccagccgccgcgcctccctcctccacccgctgccgcctccctccaaaacttgtcgtcgtatccctccaacacccgcatctggcgcagacgaccatacacccgctctgatgctttaaatcaatgtgtatggggttccaagcgtctgacctgacaaagaccgccccaagcaacgatgattcttgaagcgattgcagagataaaattgaagtgattttatagtgattttttgcggagacagctgatttcccattggatatagtgattttatggtgattttttttttttgcagagggctgatttccttgatgtgcgcttcaacgagttggagaggtgggacgccagtttttttttttttttttttttgaaaaaaaacagggcaacgaaggggaggtgggaactgggaagacctgtttgataaattacagaggatacttcgccaaccgaacaagcctaagtgggggtgatgatgagccaccggaggcgttctcgcgctgccggctcgccgcctggcgacgccagtacgggtacgccccctactcctgagaagtcgggacgggtccggccgtgggcggcgacagcgtcgaaccggaaggtgctggtgttcgcgctggcgttccgcgcggccaacgcgctgctcgtgcgcacgtacttcaaccctgatgagcactggcagtgtctcgaggtcgcccaccgcgtcgccttcgggtatggtcatctcacgtgggagtggaagcggggcctgcgcagttatctccacccattgctctttgctgctttgtacaagaccctggcgctactccatatggacactccgtgggttatggtgatggctccacgtctcgtgcaatctttgtttgcagcttttggagatctatacctatataaactttccaaacttattttcaatggtcaagttgctaagtggacgttattttctcagttggttaactggttcatgtttttctgtatcacacggactctatcaaacagcttggagactgttttgaccgtggctggactctattattggtttgctgcaatagagtcttccaaggcaacctcaatcgtttcaaagcagcacgcggcctgtgaacaaagtatcccatcaagaaaagtggctcttctgatagcagccttgtcatgtgccattcggccaacaagtgctgtaacatggctatatgttggccttttggattttattcagatgaaatcaaaatgtcgctttatccttcttgatgtcattccagtgggggccattgtccttgcagtaacaacactccttgattggtggatgtatggttcctgggtcatagtgccgcttaattttttgaaattcaacttattgtcttccggaggagactactatggaacacatgtcttccattggtactttacacagggttttccatccatgatttggacattcttaccatttgcattgtgcggtattgtaaagtctcaggaatggaggctttcaggtctaattgcttgggtgttaggggtttacagcattcttggacataaagaattcaggtttgttcttccagtgctacctttagcattgatgttctcaggttactgcttagcttccatgtcacagtccaagggcaaaaatcagcataggaaaggaagtctttcaaggctgcagctttctgttattcttctcgtcataaccaatgttcccatggctttatatatgtccttattccatcaaaggggaacagaagacgttatgtattatttgtcaaaagaagcctatgatggaagagtgaggagtgttctctttctcatgccttgtcattcaacaccttactactcaaccttacattacaatctacctatgcgttttttggactgcactcctagtgatagcaaagggaccttggatgagtcagatcgtttccttacaagtccatctgagtttgtcggcgatgtttttggaaatttatctgcattcagtcacattgtattattcgagtcagaagaaagacatgttctccagttgcttctgcacaattcctttcttgagatgaggaggtttttccactcacatttcaagattgacagagaccttcagtcggctgttgtggtttattcatggagggatgtgctatgatttagtactgatgtggcagaaaatgcctgttagctcgtgtaacaatccccacatgtttaatgttgtttcagcttttcatttgagaaatgagttgtggcattgctggatacttctgatatcttaatcctcttggaatgagatgttatgttacttttacccaagtgctttacgacggcataacaattcacagttcgctttcttgcatcgagtctctatgtccatgatatctgcttctaagataaa

SEQ ID NO: 126989 - DNA, 2099 bp, Zea Mays
cttgaagcgattgcagagataaaattgaaagggctgatttccttgatgtgcgcttcaacgagttggagaggtgggacgccagtttttttttttttttttttttgaaaaaaaacagggcaacgaaggggaggtgggaactgggaagacctgtttgataaattacagaggatacttcgccaaccgaacaagcctaagtgggggtgatgatgagccaccggaggcgttctcgcgctgccggctcgccgcctggcgacgccagtacgggtacgccccctactcctgagaagtcgggacgggtccggccgtgggcggcgacagcgtcgaaccggaaggtgctggtgttcgcgctggcgttccgcgcggccaacgcgctgctcgtgcgcacgtacttcaaccctgatgagcactggcagtgtctcgaggtcgcccaccgcgtcgccttcgggtatggtcatctcacgtgggagtggaagcggggcctgcgcagttatctccacccattgctctttgctgctttgtacaagaccctggcgctactccatatggacactccgtgggttatggtgatggctccacgtctcgtgcaatctttgtttgcagcttttggagatctatacctatataaactttccaaacttattttcaatggtcaagttgctaagtggacgttattttctcagttggttaactggttcatgtttttctgtatcacacggactctatcaaacagcttggagactgttttgaccgtggctggactctattattggtttgctgcaatagagtcttccaaggcaacctcaatcgtttcaaagcagcacgcggcctgtgaacaaagtatcccatcaagaaaagtggctcttctgatagcagccttgtcatgtgccattcggccaacaagtgctgtaacatggctatatgttggccttttggattttattcagatgaaatcaaaatgtcgctttatccttcttgatgtcattccagtgggggccattgtccttgcagtaacaacactccttgattggtggatgtatggttcctgggtcatagtgccgcttaattttttgaaattcaacttattgtcttccggaggagactactatggaacacatgtcttccattggtactttacacagggttttccatccatgatttggacattcttaccatttgcattgtgcggtattgtaaagtctcaggaatggaggctttcaggtctaattgcttgggtgttaggggtttacagcattcttggacataaagaattcaggtttgttcttccagtgctacctttagcattgatgttctcaggttactgcttagcttccatgtcacagtccaagggcaaaaatcagcataggaaaggaagtctttcaaggctgcagctttctgttattcttctcgtcataaccaatgttcccatggctttatatatgtccttattccatcaaaggggaacagaagacgttatgtattatttgtcaaaagaagcctatgatggaagagtgaggagtgttctctttctcatgccttgtcattcaacaccttactactcaaccttacattacaatctacctatgcgttttttggactgcactcctagtgatagcaaagggaccttggatgagtcagatcgtttccttacaagtccatctgagtttgtcggcgatgtttttggaaatttatctgcattcagtcacattgtattattcgagtcagaagaaagacatgttctccagttgcttctgcacaattcctttcttgagatgaggaggtttttccactcacatttcaagattgacagagaccttcagtcggctgttgtggtttattcatggagggatgtgctatgatttagtactgatgtggcagaaaatgcctgttagctcgtgtaacaatccccacatgtttaatgttgtttcagcttttcatttgagaaatgagttgtggcattgctggatacttctgatatcttaatcctcttggaatgagatgttatgttacttttacccaagtgctttacgacggcataacaattcacagttcgctttcttgcatcgagtctctatgtccatgatatctgcttctaagataaa

SEQ ID NO: 126990 - DNA, 1740 bp, Zea Mays
gatggccaagattgtatatgtgcaccatgtgcatctctcctcaatgtgcacaggatacttcgccaaccgaacaagcctaagtgggggtgatgatgagccaccggaggcgttctcgcgctgccggctcgccgcctggcgacgccagtacgggtacgccccctactcctgagaagtcgggacgggtccggccgtgggcggcgacagcgtcgaaccggaaggtgctggtgttcgcgctggcgttccgcgcggccaacgcgctgctcgtgcgcacgtacttcaaccctgatgagcactggcagtgtctcgaggtcgcccaccgcgtcgccttcgggtatggtcatctcacgtgggagtggaagcggggcctgcgcagttatctccacccattgctctttgctgctttgtacaagaccctggcgctactccatatggacactccgtgggttatggtgatggctccacgtctcgtgcaatctttgtttgcagcttttggagatctatacctatataaactttccaaacttattttcaatggtcaagttgctaagtggacgttattttctcagttggttaactggttcatgtttttctgtatcacacggactctatcaaacagcttggagactgttttgaccgtggctggactctattattggtttgctgcaatagagtcttccaaggcaacctcaatcgtttcaaagcagcacgcggcctgtgaacaaagtatcccatcaagaaaagtggctcttctgatagcagccttgtcatgtgccattcggccaacaagtgctgtaacatggctatatgttggccttttggattttattcagatgaaatcaaaatgtcgctttatccttcttgatgtcattccagtgggggccattgtccttgcagtaacaacactccttgattggtggatgtatggttcctgggtcatagtgccgcttaattttttgaaattcaacttattgtcttccggaggagactactatggaacacatgtcttccattggtactttacacagggttttccatccatgatttggacattcttaccatttgcattgtgcggtattgtaaagtctcaggaatggaggctttcaggtctaattgcttgggtgttaggggtttacagcattcttggacataaagaattcaggtattcaccttttcctgtaagtgtatagtgcccttgtagtcaagtaacctcttctctctattcacatgatatgatacaaaaagattgaatactgcaggtttgttcttccagtgctacctttagcattgatgttctcaggttactgcttagcttccatgtcacagtccaagggcaaaaatcagcataggaaaggaagtctttcaaggctgcagctttctgttattcttctcgtcataaccaatgttcccatggctttatatatgtccttattccatcaagtaggttttccctatttcaatgtttttgtattgctctatgcatctatggatcacttttgttgcttatccattatttccatttatcccatattcaacattcattgtggcagaggggaacagaagacgttatgtattatttgtcaaaagaagcctatgatggaagagtgaggagtgttctctttctcatgccttgtcattcaacaccttactactcaaccttacattacaatctacctatgcgttttttggactgcactcctaggtggttattttatttgttttttaatgaaaaaaatagttaac

SEQ ID NO: 126991 - DNA, 986 bp, Zea Mays
gggcaaagactccctcttggcccattgacggcccaaagcccagtgaccagcgcgcgtccgtcggccgatataaagcgctagggttttacctatcgtttgccccacgccgtcactcctctcaacccgaccacgccgcgcctccgcttcgaaccctagccgagcggggtaaggagggaaatggtacgtgtcgccgccgtcgccgttgccacgcagctcccctctacgtctccgttcgtccgtgcgtctgtccgctgacgtggtgctatggtgctgttgttgtggctcgcaggggaagggtacgggcagcttcggcaagcgccggaacaaaacgcacacgctgtgcatccgctgcggccgccgcagcttccacctccagaagagtacctgctcctcctgcggctaccccgcggcccgcatccgcaagtataattggagtgtgaaggccatcaggcgcaagaccactggtacgggaaggatgaggtacatgcgacacgtgcctcgccgtttcaagagcaacttcagagaagggactgaggctgccccaaagaagagtgctgctgctgccaactaagtgtggatgttgccatcaagaacctcagaagctagacgttggatctttttgattgaattgtacttctgaactatttgcccgtaatactattacagtactggtttaccgtgtcttgaattgaagccagacgccatcttctttgggagcgtgatttatatattaccccagttttatgctcgtgaattatcttctcttgaaagccgttgcgcacgtcgtaccgctgtgttagtatgtacttatgttttctaaatacaagagactgtataatacaatcctgaatttgtagataataaacgcagttaagatacaatatatgtagagagttatacagatgagagatgagctcttcgtaaagaacttgccttttgattttatttagttagctccttagagcaactccagtagttctccaaaa

SEQ ID NO: 126992 - DNA, 1385 bp, Zea Mays
gggcaaagactccctcttggcccattgacggcccaaagcccagtgaccagcgcgcgtccgtcggccgatataaagcgctagggttttacctatcgtttgccccacgccgtcactcctctcaacccgaccacgccgcgcctccgcttcgaaccctagccgagcggggtaaggagggaaatggggaagggtacgggcagcttcggcaagcgccggaacaaaacgcacacgctgtgcatccgctgcggccgccgcagcttccacctccagaagagtacctgctcctcctgcggctaccccgcggcccgcatccgcaagtataattggagtgtgaaggccatcaggcgcaagaccactggtacgggaaggatgaggtacatgcgacacgtgcctcgccgtttcaagagcaacttcagagaagggactgaggctgccccaaagaagagtgctgctgctgccaactaagtgtggatgttgccatcaagaacctcagaagctagacgttggatctttttgattgaattgtacttctgaactatttgcccgtaatactattacagtactggtttaccgtgtcttgaattgaagccagacgccatcttctttgggagcgtgatttatatattaccccagttttatgctcgtgaattatcttctcttgaaagccgttgcgcacgtcgtaccgctgtgttagtatgtacttatgttttctaaatacaagagactgtataatacaatcctgaatttgtagataataaacgcagttaagatacaatatatgtagagagttatacagatgagagatgagctcttcgtaaagaacttgccttttgattttatttagttagctccttagagcaactccagtagttctccaaaaaatagcttgctaaaatcatgtttagcaagttgctaaatagctattggaggtaaaaaaataacttagtctccaatagttgctcatatttaggaagtagttcgattttgaatctagctttagcgaccctgcccctatgagatatgcctgataataaggttgagagctgaggatgtgaggacggaagaaaaaaggatgtgaggacggaagaaaaaaggccggtcgatatgaactatggatgagtagtgttccggtagcgcaacctacgaggaagttgggttcgacggtgaaggagaaacttgtgtcatacgtgtttgacctagctacctcattatgctagaaaatgaaaaagagcgtgctatacctggctatctcaccgtgtgagaaaggaaaaaataatcacgctagtgtgaagaaattgacgtcaactgcatttagggagttcctaccgagttgctaaatgtggagagtaaatagagttgaatagcaactaagtaaatttagcaagttt

SEQ ID NO: 126993 - DNA, 947 bp, Zea Mays
atcgatttgttggagaatactgcatccctatctatctatctaggcctagcacagctatatcctgggttacgttcctcgcacggcggaggcaaacaaaccctagccgccaggcgcaggcggtcagggagcgagtaccgagcgccccagttcacacggtttatatcctaatctacgcagtcaatcctccttagcggtttcgttaatttgtttgtttccagcggccgttgcttcggtgattttgcttagctacgctttggaccggcgttccttcgctgctagctagtaccttttggaagtcaaggagtgctgtctttcgcctgatctacctagacgccttttcttgaatcagcgacttctattttggttaattagcaccggtagcccccctgctctcttgaggttcgacacgtatggtcttcaaagttctctggttgctttctctgtgtactctatgtttgtctagtgcagtaatgtgttctattttctttggccatgcccatctgaataatggtactagctgtgctcgagtctgagctgtagtgtttagtcactgagaggcaacatgaagaggccttgtaatctgaagctatctgatgttgatacatacattcattgtcttcaaagttctctgattgctttctttgtgtaccttgtacctgcatatccgattgacgtttgtctagtgcactagtgttctattttctttgactgtgctatctgaatattggtactagttgtgcttgagtctgaactgtagtgtttagtcaccgagaagcaaaatgaagaggtcttgtaatctgaagctatctgatgttcatacatacaatcatggtcttcaaagttctctgattgctttctgtgtaccctgtatctgccatacgcgattgatgtttgtctagtgcagtagtgttctattttctttggctatgccatctgaatattggtag

SEQ ID NO: 126994 - DNA, 1036 bp, Zea Mays
atcgatttgttggagaatactgcatccctatctatctatctaggcctagcacagctatatcctgggttacgttcctcgcacggcggaggcaaacaaaccctagccgccaggcgcaggcggtcagggagcgagtaccgagcgccccagttcacacggtttatatcctaatctacgcagtcaatcctccttagcggtttcgttaatttgtttgtttccagcggccgttgcttcggtgattttgcttagctacgctttggaccggcgttccttcgctgctagctagtaccttttggaagtcaaggagtgctgtctttcgcctgatctacctagacgccttttcttgaatcagcgacttctattttggttaattagcaccgtgagatgtcagaatacaagaacgtcgttggggggaggctaaagctgaagggtaaggcactggatgtgaaggaaggtggagtcaagaagaaaaaaaagaagcatcagcttgaagagtcgtctcagattgagcacgatgagctccacaaagggggaaactctggcttaccagctgatcacaacaatgagcttattgaagctggcaaggtgggagatgaagaaaggaatctacatccagactacgaccacctcacaccggcggagcgacgctatatagatcagaagcagaagatcgacatgcaaaagctggccaaagttgctaacaagtcacacagggaccgtatccaggacttcaaccagtatctggcgaacctcagcgagcactatgacatccctaaagttggccctggctaacaaacatagccaaactgctgtgtacgcacaaacaattgtatgctcggtgggcttcaagaacattaaaaatatataaatgtatgttgggtgattgggtctatccagctttttgttagcatgttatatatatcctagtattttccacttttcttttaaaaaacataattgatactcttatgtgtattgatttgaattgaattacgtctgcatatgttcaatttgaaagtagcaagactcaatttgcctt

SEQ ID NO: 126995 - DNA, 814 bp, Zea Mays
atcgatttgttggagaatactgcatccctatctatctatctaggcctagcacagctatatcctgggttacgttcctcgcacggcggaggcaaacaaaccctagccgccaggcgcaggcggtcagggagcgagtaccgagcgccccagttcacacgtgagatgtcagaatacaagaacgtcgttggggggaggctaaagctgaagggtaaggcactggatgtgaaggaaggtggagtcaagaagaaaaaaaagaagcatcagcttgaagagtcgtctcagattgagcacgatgagctccacaaagggggaaactctggcttaccagctgatcacaacaatgagcttattgaagctggcaaggtgggagatgaagaaaggaatctacatccagactacgaccacctcacaccggcggagcgacgctatatagatcagaagcagaagatcgacatgcaaaagctggccaaagttgctaacaagtcacacagggaccgtatccaggacttcaaccagtatctggcgaacctcagcgagcactatgacatccctaaagttggccctggctaacaaacatagccaaactgctgtgtacgcacaaacaattgtatgctcggtgggcttcaagaacattaaaaatatataaatgtatgttgggtgattgggtctatccagctttttgttagcatgttatatatatcctagtattttccacttttcttttaaaaaacataattgatactcttatgtgtattgatttgaattgaattacgtctgcatatgttcaatttgaaagtagcaagactcaatttgcctt

SEQ ID NO: 126996 - DNA, 947 bp, Zea Mays
agccgccaggcgcaggcggtcagggagcgagtaccgagcgccccagttcacacggtttatatcctaatctacgcagtcaatcctccttagcggtttcgttaatttgtttgtttccagcggccgttgcttcggtgattttgcttagctacgctttggaccggcgttccttcgctgctagctagtaccttttggaagtcaaggagtgctgtctttcgcctgatctacctagacgccttttcttgaatcagcgacttctattttggttaattagcaccggtagcccccctgctctcttgagtgagatgtcagaatacaagaacgtcgttggggggaggctaaagctgaagggtaaggcactggatgtgaaggaaggtggagtcaagaagaaaaaaaagaagcatcagcttgaagagtcgtctcagattgagcacgatgagctccacaaagggggaaactctggcttaccagctgatcacaacaatgagcttattgaagctggcaaggtgggagatgaagaaaggaatctacatccagactacgaccacctcacaccggcggagcgacgctatatagatcagaagcagaagatcgacatgcaaaagctggccaaagttgctaacaagtcacacagggaccgtatccaggacttcaaccagtatctggcgaacctcagcgagcactatgacatccctaaagttggccctggctaacaaacatagccaaactgctgtgtacgcacaaacaattgtatgctcggtgggcttcaagaacattaaaaatatataaatgtatgttgggtgattgggtctatccagctttttgttagcatgttatatatatcctagtattttccacttttcttttaaaaaacataattgatactcttatgtgtattgatttgaattgaattacgtctgcatatgttcaatttgaaagtagcaagactc

SEQ ID NO: 126997 - DNA, 881 bp, Zea Mays
gttgttgatgcacctttatgtaatggcagtgtatttgttcggcgacttgggttagttagtgttatgacaggatatgatgtgacagctttctcatgttatggttgatcagtccttactaatacagtctgtagagttgtgtgccatagtgatttttgctgacgccttaagctgttgagaagaattcctgacttcgttggtaaataataggtagctgtccgtgtggagctcggttcatctttcgaacaacatgtttcgttttacatataaattggaccacttttgtgtgtgtatgtaacaggacttcatgaatctgaaatcattttcagcgggtcacaactcgcttcatatctaatgcaatggttatttttcagggggaaactctggcttaccagctgatcacaacaatgagcttattgaagctggcaaggtgggagatgaagaaaggaatctacatccagactacgaccacctcacaccggcggagcgacgctatatagatcagaagcagaagatcgacatgcaaaagctggccaaagttgctaacaagtcacacagggaccgtatccaggacttcaaccagtatctggcgaacctcagcgagcactatgacatccctaaagttggccctggctaacaaacatagccaaactgctgtgtacgcacaaacaattgtatgctcggtgggcttcaagaacattaaaaatatataaatgtatgttgggtgattgggtctatccagctttttgttagcatgttatatatatcctagtattttccacttttcttttaaaaaacataattgatactcttatgtgtattgatttgaattgaattacgtctgcatatgttcaatttgaaagtagcaagactcaatttgcctt

SEQ ID NO: 126998 - DNA, 583 bp, Zea Mays
acaaattcaaataactcgctgacctccactgctccacacctctacctgcctgcgccaaaacctagccgccgcggcgccgcccgccgacctgccgtgccgactgctgagtgccgaccgacgtgcgcccgctggccgctcgacgttgttggcctccctcgacgccgctggccggtggccgctcgacggagtcgacgcctcacagcctccctcgacgcgacgccgctggccactcgacggagtcggcgcctcagtcacagcgtcgggaaaccagtgccaatgtggcggcgtcgtaggccgcggaagccatctcgggcgtcgagtacgtgacgaggcagatcctgctgggtttgcgcagctcgcggccggatctccgataccacttgatgaacgtatggagagaagagaggggcatcctcacttctagtattcgtagcaagagagagacagagagagagacagtgattaatggcctgcgtcctaaatttaagctagggcctggcagtaattcaattttttttttgtaatctagcaaatcttgatacggaccattgctagtacctccttgcattgcgttgataaaggt

SEQ ID NO: 126999 - DNA, 2313 bp, Zea Mays
acaaattcaaataactcgctgacctccactgctccacacctctacctgcctgcgccaaaacctagccgccgcggcgccgcccgccgacctgccgtgccgactgctgagtgccgaccgacgtgcgcccgctggccgctcgacgttgttggcctccctcgacgccgctggccggtggccgctcgacggagtcgacgcctcacagcctccctcgacgcgacgccgctggccactcgacggagtcggcgcctcagtcacagcgagaattcagactgctgcgcgccttcatccccttcccggcggccgacgtccaactccgcctcacagtgcttctgtggttctgcctagcgcctgctcctgctcgtagtgctcgactacgggctgctcttctctagccttgagacagagagtcggagactccagtgcccctgctagcctgccctctggttttgtgttaagtgtgggggtgatgatgagccaccggaggcgttctcgcgctgccggctcgccgcctagtgacgccagtacgggtacagcccctactcctgagaagtcgggatggatccggccgtgggcagcgacagggtcggaccttaaggtgctggagcttgcgctggcgttccgcgcggccaacgcgttgctcgtgcgcacatacttcaaccccgacgagcactggcagtgcctcgaggtcgcccaccgcgtcgcgttcgggtatggtcatctcacgtgggagtggaagcggggcctgcgcagttatctccacccgttgatctttgctgctttgtacaagaccctggcgctactccatctggacactccgtgggttatggtgatggctccacgtctcgtgcaatctttgtttgcagcttttggagatctatacctatataaactttccaaacttattttcaatggtcaagttgctaagtggacgttattttctcagttggttaactggttcatgtttttctgtatcacacggactctatcaaacagcttggagactgttttgaccgtggctggactctattactggtttgctgcaatagagtcttccaaggcaacttcaatcgtttcaaagcagcatgcggcctgtgaacaaagtatcccatcaagaaaagtggctcttctgatagcagccttatcatgtgccattcggccaacaagtgctgtaacatggctatatgttagccttttggattttattcagatgaaatcaaaatgttgctttatccttcttgatgtcattccagtaggggcaattgtccttgctgtaacaacactccttgattggtggatgtatggttcctgggtcatagtgccgcttaattttttgaaattcaacttattgtcttccggaggagactactatggaacacatgtctttcattggtactttacacagggttttccatccatgatttggacattcttaccatttgcattgtgcggcattgtaaagtctcaggaatggaggctttcaggtctaattgcttgggtattaggggtttacagcattcttggacataaagaattcaggtttgttcttccagtgctacctttagcattgatgttctcaggttactgcttagcttccatgtcacggtccaagggcaaaaatcagcataggaaagatagtctttcaaggatgcaaccttttgttattcttctcgtcataaccaacgttcccatggctttatatatgtccttattccatcaaaggggaacagaagacgctatgtattatttgtcaaaagaagcccatgatggaagagtgaggagtgttctctttctcatgccttgtcattcaacaccttactactcaaccttacattacaatctacctatgcgttttttggactgcactcctagtgatagcaaagggaccttggatgagtcagatcgtttccttacaagtccatctgagtttgtcggcgaggtttttggaaatttatctgcattcagtcacattgtaatatttgagtcagaagaaagacatgttctccagttgcttctgcacaattcctttcttgagatgaggaggtttttccactcacatttcaaggttgacagagaccttcagtcggctgttgtggtttattcacggaggaatgtgctctgatttagtactgatgtggcagaaaatgcctgttagctcgtgtagcaatccccacacgttcatgttgtttcagcttttcacttgagaaatgagatgtaacactgccggatacttctgatgtattaaacccctttgaacgagatgttacgttacttttactcaagtgctttacaacgacaataacaattctctgcttc

SEQ ID NO: 127000 - DNA, 106 bp, Zea Mays
aaaacttgataatataaattatgatgattttgaaaagtggtattgccaaacaagccttaggctaatcacaatagaggtttcatgaggtgtttcatgtattaattag

SEQ ID NO: 127001 - DNA, 1037 bp, Zea Mays
gtttggatagtaaatggtattacacgtgcgacggcccagcccatcaaggcgaggccccaaactcaagtctctgaccccgcgaccccgacgcctgcgttgccctacccctacctgacctccactgctccacacctccacctgcctgcgacaaaagcaaaacctagccgccgcggcgccgcccgccgacctgccgtgccgactgctgagtgccgaccgacgtgcgcccgctgtccgctcgacgttgttggcctccctcgacgccgctggcaggtggccgctcgacggagtcgacgcctcacagcctccctcgacgcgacgccgctggccactcgacggagtcggcgcctcacagtcacagtgagatgtcagaatacaagaacgtcgttggggggaggctaaagctgaagggtaaggcactggacgtgaaggaaggtggagtcaagaagaaaaagaagaagcatcaactcgaagagtcgtctcagattgagcacgatgagctccacaaagggggagactctggcttaccaactgatcacaacaatgagcttattgaagctggcaaggtgggagatgaagaagggaatccacatcccgactatgaccatctgacaccggcggagcgacgctatatagaacagaagcggaagatcgacatgcaaaagctggccaaagttgccaacaagtcacacagggaccgcatccaggacttcaaccagtatttggcgaacctcagcgagcactatgacatccctaaagttggccctggctaacatacatagccaaactgttgtgtaggcacaaacaattgtatgctaggtgggcttcaaggacattaaaaataaataaataaatgtatgtttggtctatccagctttttgttagtatgttatgtatgattttatatttgttgtataatgacatggtcgattcatgccgtcaactgtcgcggtatatatatgtggattgatttgaattgattttatatttgttagcatgttatctattttccacttttcttttaaaaaacataatttatt

SEQ ID NO: 127002 - DNA, 1864 bp, Zea Mays
cagcattcacgaagccgcccaacgataataaaaaatgtcagcgcgatcgcgcactgcctataaaaccccggccgtcgcgtccatggcgtttcaggatccgagcaccagaaagaagctgagttagctagggtcaagaaagtagtcagcactcagcaggaaaagaagcagagactacacatcatggcgagtgacgccgcgcatggtagctcgctggacggggtgacgccgtcgagcaagttcgacctgccggtggactcggagcacaaggccaagaccatccgcctgctctccttcgcgaacccgcacatgcgtaccttccacctctcctggatgtccttcttcacctgcgtcgtctccaccttcgcggcggcgccgctgatccccatcatccgggagaacctgggcctgaccaaggccgacatcggcaacgccggggtggcctccgtctcgggcgccatcttctcgcgcctcgccatgggcgccgtctgcgacctgctgggcccgcgctacggctgcgccttcgtcgtcatgctggcggcgcccgcggtgttctgcatggccgtcatcgacagcgccgcgggctacgtcgcgtgccgcttcctcatcggcttctccctcgccaccttcgtctcctgccagtactggaccagcaccatgttcaacatcaagatcatcggcaccgtcaacgcgctggcgtcggggtggggcgacatgggcggcggcgccacgcagctcatcatgcccttcgtctacgaggccatcctccgctgcggcgccacgccgttcgccgcgtggcgcatcgcctacttcgtgccggggatcatgcacatcgccgtgggcatccttgtgctaaccgcggggcaggacctccccgacggcaacctccgcagcctccggaagcagcagcagcagcagcagcagggtgacggcggcgatgccagctgctgccgcagggacagcttctccagggtgctctggcacgccgtcgccaactaccgcacctgggtcttcgtcttcgtgtacggctacagcatgggcgtgcagctcaccaccaacaacatcatcgccgagttctactacgaccagttcgagctcgacatccgcgtggccggcatcatcgccgcctgcttcggcatggccaacctcgtgtcgcggcccctgggcggcgtgctctccgacctcggcgcgcggtactggggcatgcgcgcgcgcctctggaacatctggatcctccagaccgccggcggcgcgttctgcttctggctcggccgcgccagcgagctcccggcctccgtcaccgccatggtgctcttctccttctgcgcgcaggccgcctgcggcgccaccttcggcgtcatccccttcgtctcccgccgctcgctgggcgtcatctccgggctcacgggcgccggcggcaacgtgggcgccgggctcacgcagctgctcttcttcaccacgtccagctactccacgaggaagggcatcgagaacatgggcatcatggccatggcgtgcacgctgccgctcgtcctcgtgcacttcccgcagtggggttccatgctcctgccgcccagcgccgacgccgacgaggagcggtactatgcctccgagtggagcgaggacgagaagagcgtaggccgtcacagcgcaagcctaaagttcgccgagaacagccggtccgagcgtggcaagcgcaacgccgtcgccgtcctcgccacggccgcggccacgccggagcacgtcgtgtaacaactagcgtacgtacttgtaggttctgatcgagcatacagcaaactgtgtaatgtactctagcagtctagcttgctccgatactcctgcttccaacaaaattatgaaacatagg

SEQ ID NO: 127003 - DNA, 304 bp, Zea Mays
ccgagtgccacgtagctggcactcggcaaagaactctttgccgagtgtcttctatagacactcggcaaaccatatttttgttttttacattttggccaccaaactttttgtggtatgttactacactatgtagacctacatgtaccattttgggacaaatataatagtgtttgcaatagctagtagatttagttcgtttatttgaatttcttcggaaaattcagatttgaactgcaggtcactcgaaacttggaaaaccgtgcatgcaaaaatgatatccatgctacttaacacaagttacgac

SEQ ID NO: 127004 - DNA, 441 bp, Zea Mays
atggacatgggcagcaacaggccaacagcatacgccttacctacaggctacagtacaacagagcacaccagaaaacagggacaagctctgaatctggattctggagactggagaccgtacctgcaggccggctactggcgccgccgcgccggggatggaggaagggccgagggggacgatgccgccgtatcccccgtcaccggtagcgcgccgccgtcacctgcacagtgttccgctagggttcctccggtcctccctcggcagctggttgcctggttcgtgtcgtgtgtgcctgggcgttgctctgttggctcttggttgtgcagcttctgctcacgtggtgggaatgggaaaaaggaagctgggctgggccactgggccgaaatttcaatccaaccagccaggctgatcgttcaactaatcggacgatcagatatctga

SEQ ID NO: 127005 - DNA, 2003 bp, Zea Mays
cagcttaaactgtaaaaatcgaggggttcaaacagaaaagtgagccccaaaccctacaccctcatggaagcgtggccacctctcgcccccgcggcggccactccggcctgtgccttggcgtggggagcagcagcaacggcgcagcggaaggccgtggagcaggagtcagcggcgcaggcggtgagccgcatcgtggcgagctgcgccaactccagcggcgtggcagtcgccgtggtggacgccaacgccgtcatctccggcggctccgctctctccacttccgcggggcgccttgtcaccgtgcccgaggtgctcgaggaggtccgggacgcaaccgcgcggcggcgcctcgggctcctccccgttcccgttgagaccgttgaacctgcgccggagttcgttaagaaagttaccaagtttgccagggagacaggagacatccaaacgctttcagatgttgatataaagattattgctttggcttacatgttagaagctgagatccatgggactagccatttgcgagagcaccctcctcctctgcatgaggtgaatgtcagaaagctgtcagaagctcaaatgcctggttggggctctaatgtgcctaacctgaaagagtgggaagagttggatcagatgtctgaagctggtggagatatcaattctcgaatacttcctctgaaggatattgagagtcaagatatcctgatgtgtgataccaacagtctctgtggggcacaagaggatacagagctccagccatcaaagaaggatgcacctgttgcatgggaggacgatgagaacaatgtaggttggatgcctgctgttagccgcagcatgcacagaagatatttgcagaggaaggcaaggcgtgatgccctcaaggaatctggacaaagttttgagacaagttctgttgttccatcaatcgatgatgataaagttctctctgaaaatagtggattggagcatggtctgacttcaactgatggcctttcttctgtcactgagataatcagtgcacgttctgatgattttgaacatcaagcagaaaatgacactgaaattgctggagaacatttgcattctgatcagcgagcttacggtgatgatgctgatgcgtgcaccaaagaactggaaaacctagatatagaaggtgaggatgagggaggtggtgatgcacatttcattgttgatgagagcagcgagcagagttggaccctgaggtccttatccgaatcaactgtagcatgtgttactagtgattatgccatgcaaaatgtcatcctgctgattggtctccgtctcatagcaccaggtggcatgcagatacgccagatgcataggtgggttttgaggtgccatgcttgctataaggtgacccaagaggttggcaaaatattttgtccgaagtgtggtaatggtgggaccttacggaaggtttcggtaacagttggtgaaaatgggatcactatggcttcacggcgcccacgtgttacacttcgaggcacaaaattctccctcccaatgccccaaggtggaagagatgcaataactaagaaccccatccttcgtgaggatcaacttcctcagaaggttcttcatcctaaactgaagaagtcaaacaaggatgatgatttcttgggcgtggtcgacatattttcgcatggtggtgataagaaggcaccattgaaacctccagtgaggaaggcgctcgcaatgttcagcgggaaaagaaatccaaacgacaaccacttctctcgcaagaagtactaagctctgatctgtcgtcttctttttatgcacgcctgtggtaccgtagtctgtaatcccagcatgtacgtaatggttgaagcagagtgcctttttttttgttagtggcgtatactcatcatattcatatacacagatatatataagcatgtaagctatgcagttttgcagcaactttgtatggtttccgtgctactgtttttctaatgcatttgaattttgagtttgaa

SEQ ID NO: 127006 - DNA, 2035 bp, Zea Mays
cagcttaaactgtaaaaatcgaggggttcaaacagaaaagtgagccccaaaccctacaccctcatggaagcgtggccacctctcgcccccgcggcggccactccggcctgtgccttggcgtggggagcagcagcaacggcgcagcggaaggccgtggagcaggagtcagcggcgcaggcggtgagccgcatcgtggcgagctgcgccaactccagcggcgtggcagtcgccgtggtggacgccaacgccgtcatctccggcggctccgctctctccacttccgcggggcgccttgtcaccgtgcccgaggtgctcgaggaggtccgggacgcaaccgcgcggcggcgcctcgggctcctccccgttcccgttgagaccgttgaacctgcgccggagttcgttaagaaagtggagaaagcatgttgtcttcatttagcgtagttaccaagtttgccagggagacaggagacatccaaacgctttcagatgttgatataaagattattgctttggcttacatgttagaagctgagatccatgggactagccatttgcgagagcaccctcctcctctgcatgaggtgaatgtcagaaagctgtcagaagctcaaatgcctggttggggctctaatgtgcctaacctgaaagagtgggaagagttggatcagatgtctgaagctggtggagatatcaattctcgaatacttcctctgaaggatattgagagtcaagatatcctgatgtgtgataccaacagtctctgtggggcacaagaggatacagagctccagccatcaaagaaggatgcacctgttgcatgggaggacgatgagaacaatgtaggttggatgcctgctgttagccgcagcatgcacagaagatatttgcagaggaaggcaaggcgtgatgccctcaaggaatctggacaaagttttgagacaagttctgttgttccatcaatcgatgatgataaagttctctctgaaaatagtggattggagcatggtctgacttcaactgatggcctttcttctgtcactgagataatcagtgcacgttctgatgattttgaacatcaagcagaaaatgacactgaaattgctggagaacatttgcattctgatcagcgagcttacggtgatgatgctgatgcgtgcaccaaagaactggaaaacctagatatagaaggtgaggatgagggaggtggtgatgcacatttcattgttgatgagagcagcgagcagagttggaccctgaggtccttatccgaatcaactgtagcatgtgttactagtgattatgccatgcaaaatgtcatcctgctgattggtctccgtctcatagcaccaggtggcatgcagatacgccagatgcataggtgggttttgaggtgccatgcttgctataaggtgacccaagaggttggcaaaatattttgtccgaagtgtggtaatggtgggaccttacggaaggtttcggtaacagttggtgaaaatgggatcactatggcttcacggcgcccacgtgttacacttcgaggcacaaaattctccctcccaatgccccaaggtggaagagatgcaataactaagaaccccatccttcgtgaggatcaacttcctcagaaggttcttcatcctaaactgaagaagtcaaacaaggatgatgatttcttgggcgtggtcgacatattttcgcatggtggtgataagaaggcaccattgaaacctccagtgaggaaggcgctcgcaatgttcagcgggaaaagaaatccaaacgacaaccacttctctcgcaagaagtactaagctctgatctgtcgtcttctttttatgcacgcctgtggtaccgtagtctgtaatcccagcatgtacgtaatggttgaagcagagtgcctttttttttgttagtggcgtatactcatcatattcatatacacagatatatataagcatgtaagctatgcagttttgcagcaactttgtatggtttccgtgctactgtttttctaatgcatttgaattttgagtttgaa

SEQ ID NO: 127007 - DNA, 258 bp, Zea Mays
gtgtgggttgctccaatattagatcatcgtctaaaagaccaatcagggaagccacggtggatagccatcctaagaaaaagatgagtttggaagagcatattgctaatatttctgagtccatttgtatcagaaaccagagaactcttagtcgtggacaagaagaagttaacgaagttgtgcgagtcttaaagcaagatggacttgaagaagactctgatttgtactgcatggcaaatattctatgcaaaaacaatatag

SEQ ID NO: 127008 - DNA, 2504 bp, Zea Mays
atccgtgaacggtgaaccctcttgggttcttcgcgatttctccactgcttcacacgggaccggccacccatggaggcctacgcgggtgccgcgcccgcggccggcgtcttcgcaggctacagcaccgcggccacgcgccccttcatcatcttcctccgccgccgcgggtctccgcgttccggcgccaggcgggtgcgcctcgtccgggcgccgccgccgccgcgcgctgcagaggacctgcccccgctcgacaagtgggacattatggagctggatttcggcaggttcctcggggaggaccccaagcttaccctcgccaagattcttcttaagaagtcagatccggatgcctcgtctctcgatgtggagaaactaattgccaaaaatagagacaagctcgatgatattctgagggactgcatggaagctaataagaagggtcagggttttgacacatcagaaagtgggccctctttgaatacgacacggccaacaataagcaagccgaccgaatccaaaagttctttgaatatttccaagcccagtatgggcagacctatccaaggagggactccattgactttacttcgaccagcaggaagcaaaccgaagcaagatggtccttctctggctcagtcgcgaccagttggaagcaaagcaagtgaagatgcacctttgtttatcttgtcgcggccaattgggagcaatccaaagttaaggggcactccggtgcaagatagttggcccagtaaagagagtttagctgccgcaacagagttcagtgaggcggggagcatctcaagaacaggcgaggtggatgtcgccttgcggaaacccaccgtgcaccagagtcaggatgatgatctgaagtccaagctcaaaattaagccaaatgttaacctgaaaatgaggaaagatatgaatgaggacttaaggaacatttctctccttcaaaagccagatgttgcaaaagatactgtaaacccagagcaggaccatgcctccgctagccctgccacagtttctgctacagaggataacagcgaacttgaggcagaaaatgctcttgatgaaaaaatagcaaccgaaaatgtccatgaatcatctgggctcgatgatgattctgctgcagccatcagctcaaactttcatccaagaaacaagcactgctggaccagtagataaccaatcagctaccagcaacaatttctctatgcaggctttcttgcaaggaaaacctagaagagaaaaccaatctgctgaaatattgccatctgaagtagatgaaaagatgactgctactgataataaaaattatgttgatgatgggggaaatgtgttaccatcaaaattagaggacatcacagagagtgactggacaaggttagagaattacgcaagtaccggagaaaaggttgaggtggagctgataaattgcagtgcgaaggggtttgttgtgtcacttgactcactgataggtttcttaccgtaccgtaatcttgctacaaagtggaaattcttagcctttgagacttggttaagaaggaagggtggcgatccttccttgtacaagcagagtttgggattagaggatagttttgaggttaatgacacaaacctagaaccagaatctagctcagtttccaaaatagctggtgaggaccaagaatctctgtcatctaagccgaagtttgaagatcttattcgagcatacaaccaagaaaaatccaagtttttatcttcatttattggtcaaagactccgagtatcagttgtcctggccgacagaaattccaagcggatatttttctctatgaagccaaaagagagcgaagaaatgatccagaaaaagaaaaacctgatggctaggctcaacgttggagatattattcagtgcactatcaagagatttgtttactttgggatatttgttgaggttgaaggtgttcctgcgttgattcagcagtgggaagtgtcgtgggatgacaccttagatccagcagtttcttacaaaattggtcaggttgtggatgctaaagttatccaacttgactataataatatccgcatatttttgtcacttaaagatgtaaagccaaatccatccgtaggtgctttggaatcagtcgttggtgaggatttatcgtttggtggagctcttgaacccgtgcaagcagatttcgagtggcccgaggtagacgccctcatggaagagatgcggagaacagagggtgtaagagatgtctataaaggacggttcttccaaagcccagggttagctccgacgtttcaggtctacatggcacctgtggtcggtccgaaatacaagctcctggcgcggtatgggaacagcgtccaggaggtgatggtggagacggcacttggcaaagaagagttgaaggaggcagtcctgatgtgcactaatagggttagctaggatctccatgacgcgcatttgctgggaccggtttctcgggttgctagctggattggaacagcatacg

SEQ ID NO: 127009 - DNA, 2758 bp, Zea Mays
atccgtgaacggtgaaccctcttgggttcttcgcgatttctccactgcttcacacgggaccggccacccatggaggcctacgcgggtgccgcgcccgcggccggcgtcttcgcaggctacagcaccgcggccacgcgccccttcatcatcttcctccgccgccgcgggtctccgcgttccggcgccaggcgggtgcgcctcgtccgggcgccgccgccgccgcgcgctgcagaggacctgcccccgctcgacaagtgggacattatggagctggatttcggcaggttcctcggggaggaccccaagcttaccctcgccaagattcttcttaagaagtcagatccggatgcctcgtctctcgatgtggagaaactaattgccaaaaatagagacaagctcgatgatattctgagggactgcatggaagctaataagaagggtcagggttttgacacatcagaaagtgggccctctttgaatacgacacggccaacaataagcaagccgaccgaatccaaaagttctttgaatatttccaagcccagtatgggcagacctatccaaggagggactccattgactttacttcgaccagcaggaagcaaaccgaagcaagatggtccttctctggctcagtcgcgaccagttggaagcaaagcaagtgaagatgcacctttgtttatcttgtcgcggccaattgggagcaatccaaagttaaggggcactccggtgcaagatagttggcccagtaaagagagtttagctgccgcaacagagttcagtgaggcggggagcatctcaagaacaggcgaggtggatgtcgccttgcggaaacccaccgtgcaccagagtcaggatgatgatctgaagtccaagctcaaaattaagccaaatgttaacctgaaaatgaggaaagatatgaatgaggacttaaggaacatttctctccttcaaaagccagatgttgcaaaagatactgtaaacccagagcaggaccatgcctccgctagccctgccacagtttctgctacagaggataacagcgaacttgaggcagaaaatgctcttgatgaaaaaatagcaaccgaaaatgtccatgaatcatctgggctcgatgatgattctgctgcaggactacagccatcagctcaaactttcatccaagaaacaagcactgctggaccagtagataaccaatcagctaccagcaacaatttctctatgcaggctttcttgcaaggaaaacctagaagagaaaaccaatctgctgaaatattgccatctgaagtagatgaaaagatgactgctactgataataaaaattatgttgatgatgggggaaatgtgttaccatcaaaattagaggacatcacagagagtgactggacaaggttagagaattacgcaagtaccggagaaaaggttgaggtggagctgataaattgcagtgcgaaggggtttgttgtgtcacttgactcactgataggtttcttaccgtaccgtaatcttgctacaaagtggaaattcttagcctttgagacttggttaagaaggaagggtggcgatccttccttgtacaagcagagtttgggattagaggatagttttgaggttaatgacacaaacctagaaccagaatctagctcagtttccaaaatagctggtgaggaccaagaatctctgtcatctaagccgaagtttgaagatcttattcgagcatacaaccaagaaaaatccaagtttttatcttcatttattggtcaaagactccgagtatcagttgtcctggccgacagaaattccaagcggatatttttctctatgaagccaaaagagagcgaagaaatgatccagaaaaagaaaaacctgatggctaggctcaacgttggagatattattcagtgcactatcaagagatttgtttactttgggatatttgttgaggttgaaggtgttcctgcgttgattcagcagtgggaagtgtcgtgggatgacaccttagatccagcagtttcttacaaaattggtcaggttgtggatgctaaagttatccaacttgactataataatatccgcatatttttgtcacttaaagatgtaaagccaaatccatccgtaggtgctttggaatcagtcgttggtgaggatttatcgtttggtggagctcttgaacccgtgcaagcagatttcgagtggcccgaggtagacgccctcatggaagagatgcggagaacagagggtgtaagagatgtctataaaggacggttcttccaaagcccagggttagctccgacgtttcaggtctacatggcacctgtggtcggtccgaaatacaagctcctggcgcggtatgggaacagcgtccaggaggtgatggtggagacggcacttggcaaagaagagttgaaggaggcagtcctgatgtgcactaatagggttagctaggatctccatgacgcgcatttgctgggaccggtttctcgggttgctagctggattggaacagcatacggattatatatccggttaaaagttactgaaatgcagaaaaagaagaacgactctattaatcgagtttaggattgccaatttgattgaaaattctctgttgtggattggttgaggaaagaaacgaaggtggtctgcccccttctcttgtcatatcacgactctgcatgtggctcatactgcggaggactaggagttctttccacttattgaggattatatgattatatcttaaaaaaagatcaatagg

SEQ ID NO: 127010 - DNA, 1072 bp, Zea Mays
catgccacagattattataaaagatttcagtcctccatggacgacacgacgaaggtcgtccgacacaaaggtacagctggagagccctgtcgcacccgcacccgcacccgcacgcagcggcggcagcgcagctgcgcagatcgccatctcaattctcgacccaacccccacgctggccgctgcactgagcagcaaccaccagtccttctgtccgcagcctaccacacacgccacgcctcgcctccggtctacatggccggcgaactgcgccaccgccgcgcgccgtcggaggacgagggcgtcgcctcctctcaaagactcgactccgcccccgcaggcaacggcaaggctggcacttcgtccggcggcggcgagggggcggagccgcggggcgggaagagggacgcgctagggtggctggagtggtgccgcggttggatggccatcgtgggggagttcctcttccagcgcatcgccgccagccacctggccaacccgctcgagttgcccccgctcgatggcgtctccatcgtcgtcaccggcgccaccagcggcatcgggctcgagatcgcaaggcaactcgctctcgctggggcacatgttgttatggctgtaaggagacccaaggtggcacaagagttgattcagaagtggcagaatgaaaattcagaaacaggaagaccactaaatgccgaggtgatggaacttgacctgctctccctcgactcggtcgtaaaatttgctgatgcttggaatgctcgtatggcaccgctgcacgtgttgatcaacaatgctggcatcttcgctataggagaaccccaacatttttcgaaggatggacatgaagaacacatgcaagtgaaccatcttgcacctgcattactggcgatgctgcttataccttcccttctccgaggttctcccagcagaatcgttaacgttaattcaatcatgcacagtgtaggttttgttgatgctgaagatttcaacttgagaaaacataaatatagaagttggttggcgtattcaaatagcaagttggcacaggtaaaatttagtagcatgcttcata

SEQ ID NO: 127011 - DNA, 622 bp, Zea Mays
atatatatatacttctcctggaattgtcgacacgaatgttacaagagaccttcctaagattgttgtagctgcataccgttttcttccctacttcatattcgatggtcaagaaggttctaggagtgcactgtttgcggcatgtgacccccaagttccagagtactgtgagatgctcaagtcggaagactggccagtctgtgcttgcattaactacgactgtaatccgatgaacgcgtctgaagaagcgcacagccttgaaacctcgcagctggtctgggagaagacgctcgagatgatcggccttccgccggatgccctggacaagctcatcgccggagaaacagtgccgtgccgttatggacaataggatgtcgtcgcacagatccaaacaacaccacttttcagttaacagtttcgaggtggtttgttccagcctttgattagagcacctctgttgtatcctttttttatcctaaatttgcaggggggaaacaccgtgtaaggaagaaaaagaaactgttaacatctacaacctttgctctttcttgtactgtgttggaacttgctctctgctgcaagtgggccaacgggggtgaacaatggcgacaacagggttacgtgc

SEQ ID NO: 127012 - DNA, 3123 bp, Zea Mays
ggcgccgccgcgcagacgcagccgtgtggcgccggcgacctcgccgcgttgcgcgggttctcggcgggtctcgacgccggggtcgacggctggccgaccgccgccaacgcgtcggacgacgcgtgctgcgactggcccggggtgacgtgcggcgaggcggcggctgtcgtcgggctggcgctgcccaaccggacgctgcggggccaggtggccgcgtcgctcgccggcctcgtcgcgctccgggtgctcgacctttccggcaacgcgctgcgcggcgcgctgcccgcggggctgctccggctccgcagcctcgaggtgctcgacgtcagcgccaacgcgttcgccggcgggctgctggcggccgcggccggcgcgatcgacctcccggcggcacgcgtgttcaacgtttcgtacaacgcgttcaacggcacccaccccgtgctccccggcgcgcgcaacctgtccgcgtacgacgtatcgggcaacgccttcggggggcccgtccacgccgccgccctgtgcgccgagtctccggcgctgcgcgttttgcggctctccttgaacaggctgtccggcgccttccctgccgggttcgggcaatgccggtcgctcatcgagctctccctcgacggcaacggcatccacggcgcgctcccggacgatctcttcggcgtcacgtcgctgcagttcctcagcctccacaccaactctatctccggcggactgtcgcctcgcctgcgcaacctcagcagactcgtccgcctcgacttttccttcaacgccttctccgggccgctacccgacgtgttcgacgcgctcgccggcctccaggagctctcggcgcccagcaaccagctctccggggagctccccgccacgatctcgcgctgccgcttgctccgagtgctcaacctccggaacaactcgttcgtcggggacatcggcctcgacttccgcgcgctcaggggcctggtgtacctcgatctcggcgccaacggcttcacggggcccatcccggcgagccttcccgagtgcaggggcatggccgcgctcaacctgggccggaacaaactcaccggcgagataccggcgtcgttcgccaacttctccgcgctgtccttcctctcgctcaccggcaacagcttctccaacgtctcgtcggcgctgcagacgctgcagggcctccctaacctgaccagcctggtgctcaccaggaacttccacggcggcgaggagatgccgtcggacgacgccggcatcgcgggtttcccaagcatccaggttctggtcattgctaactgcgagcttcacgggacaattccgtcgtggatcgccggcctccggaaactgagagtgctggacctgtcatggaaccggctcgccggcccgatcccaccatggctggggcaattcgaccgcctcttctacctcgacatatcgaacaattccctgcagggggagataccgggtagcttggcgcagatgccagggctggtcgccgccggtgctcatggtgacggcggcgacgacgaggcgcaggtgcaggacttcccgttcttcatgcgccggaacacgtcggtgcaggggcggcagtataatcaggtggacagcttcccgccttcgctggtcctgggacacaacaacctcaccggcggcgtgccggccgcgctgggggcattgaccagggtgcacatcgttgacctgagctggaacaggctgtcgggacccatcccaccggacctgtcggggatgacgagcctcgagtcgctggacatgtccaacaacgcgctctccggcgtgatcccggcgtcgctgacgcagctcagcttcctctcccacttcgacgtctcgttcaacaacctctccggcgaggtccccgtgggcgggcagttctccacgttctcgcggggggacttccaggggaacccgctgctgtgcggcatccacgtggcgcggtgcacgcggaaggacgagccgccgcgcacggtcgacggcggcgggggaggcaagcaggagcggagcgccggcaccggcgtcgcggcggcgatcggcgtcgcgacggcgctgctcgtcgccgtagccgcggccgtgacgtggcgcgtgtggtcaaagcggcaggaggacaacgccagagtggcggcagacgacgacgacgacgacgacggcagcctcgagtcggcggcgaagtccacgctggtactgctcttcccggccggcgatgaggaggatagcgacgaaggcgagcgcgcgatgacgctggaggacgtgatgaaggcgacgcgcaacttcgacgcatcctgcatcgtcgggtgcggcggtttcgggatggtgtaccgcgcgacgctggcggacgggagcgaggtggcggtgaagcggctgtccggcgatttctggcagatggagcgcgagttccgcgccgaggtggagacgctgtcgcgcgtgcggcaccggaacctggtgccgctgcagggctactgccgtgcgggcaaggaccggctgctcatctacccgtacatggagaacggcagccttgaccactggctccacgagcgaggcggcggcgcgctggcgtggccggcccggctgggcatcgcacgcggcgcggcgcgcgggctggcgcacctgcacgcgtcgtcggagccgcgcgtcctgcaccgggacatcaagtcgagcaacatcctcctggacgcgcggctggagcccaagctggcggacttcgggctggccaggctggtgctcccgacggacacgcacgtgacgacggacctggtgggcacgctggggtacatcccgccggagtacgggagctcgtcggtggccacctaccgcggggacgtgtacagcctcggcgtggtgctgctggagctcgtgacggggcggcggccggtggacatggcgcggccagtcggcggcggccgggacgtgacgtcgtgggcggtgcggatgcggcgcgaggccaggggcgacgaggtgatcgacgccagcgtcgacgagaggaagcaccgggaggaggcggcgatggtgctggacgtggcgtgcgcctgcgtcaacgataaccccaagtcgcggccgacggcgcggcaggtggtcgagtggctcgaagccatcgccgcctccgcctcg

SEQ ID NO: 127013 - DNA, 1533 bp, Zea Mays
  misc_feature (411)..(412): n is a, c, g, or t
cctgcgcctcgcggtagcgtgcggctgtgccgtcgacccgtcgtctcctttctcctccactcctcgtcgcaggcggcataacggagcgcacgcacgcacgcaatggccatggccgccccgccacccacggctctctgcgcccgccgcttccggccccaccacttcgcatactcctcccccgccacgctccgcctacccacggcctcctcctcctcacagctccggcgccgccgccggctagccgtctccccgcgcgcggacgcggcgaccgggacgggggatgtggaggcgctcagggccggggtgtccgtgtacaagccgcggtcctacgacgtgctcgtcaccgacgcggctcgctccctcgcctgcgccatcgacgacggcaagacccggctcgagatcgaattcccnnctctgccaagcagcatctcttcttacaagggctcctcagatgagttcatcgatgccaacatccagcttgctctcgttgttgctaggaagctcaaagagctcaaggggactaggtcttgtatagtgtttcctgatcaacctgaaaaacgtagggcatcagagttgttcaagacagctatagacacgattgagggtgtaaccatcagctccctggatgatgtacccactgaccctgtcaacagcttcttcaaatcaataagaaacaccctggattttgacttctcagatgacaatgaaggtagatggaaatctgatgaaccaccatcgttatatatcttcatcaacagcagcacgcgtgaccttgcttctatagagaagtatgtggaaaagttcgccacatctgttccagcccttctattcaatctcgaactagatacattgcgttctgacctggggcttctcgggttccccccaaaagatctgcactaccggttcctttctcaattcaccccagtattttatatcagacagcgtgactattccaaaacaatcgcagttgctccatacatagtgaattatagtggagctgtattccgccaatacccagccccctggcaggtcatgctgaagcaggctgatggttcctatgcatgtgtcgctgagagcgaagctcggttcactttgggacaggcgaaagaagaactattgagagttattggtttacaagaagaagagggaagctcccttgaatttctcagaagaggatacaaggttcatcccatcctagctaaacagttggctgcagcttcaaagcgcctacttgcataaactacatttcactatagcacatcatggagacatcatgagctatagtaaccgagtttctgtgatgcagaatgctacctggtgggaagagaacgttgatcaggagacgtcgtctgcctggcgaacttgagatgctatacttgctggatggatgcttttctaacctggaactgggaatggataatttggccaacgagtgtccatgtcttgttgtatggaactaaaaaatctgaaattacagaaagagaagtccatgtacagcgtaataacattgcctgtgatgatcgtattattatt

SEQ ID NO: 127014 - DNA, 1501 bp, Zea Mays
  misc_feature (411)..(412): n is a, c, g, or t
cctgcgcctcgcggtagcgtgcggctgtgccgtcgacccgtcgtctcctttctcctccactcctcgtcgcaggcggcataacggagcgcacgcacgcacgcaatggccatggccgccccgccacccacggctctctgcgcccgccgcttccggccccaccacttcgcatactcctcccccgccacgctccgcctacccacggcctcctcctcctcacagctccggcgccgccgccggctagccgtctccccgcgcgcggacgcggcgaccgggacgggggatgtggaggcgctcagggccggggtgtccgtgtacaagccgcggtcctacgacgtgctcgtcaccgacgcggctcgctccctcgcctgcgccatcgacgacggcaagacccggctcgagatcgaattcccnnctctgccaagcagcatctcttcttacaagggctcctcagatgagttcatcgatgccaacatccagcttgctctcgttgttgctaggaagctcaaagagctcaaggggactaggtcttgtatattgatttcaggtgtttcctgatcaacctgaaaaacgtagggcatcagagttgttcaagacagctatagacacgattgagggtgtaaccatcagctccctggatgatgtacccactgaccctgtcaacagcttcttcaaatcaataagaaacaccctggattttgacttctcagatgacaatgaaggtagatggaaatctgatgaaccaccatcgttatatatcttcatcaacagcagcacgcgtgaccttgcttctatagagaagtatgtggaaaagttcgccacatctgttccagcccttctattcaatctcgaactagatacattgcgttctgacctggggcttctcgggttccccccaaaagatctgcactaccggttcctttctcaattcaccccagtattttatatcagacagcgtgactattccaaaacaatcgcagttgctccatacatagtgaattatagtggagctgtattccgccaatacccagccccctggcaggtcatgctgaagcaggctgatggttcctatgcatgtgtcgctgagagcgaagctcggttcactttgggacaggcgaaagaagaactattgagagttattggtttacaagaagaagagggaagctcccttgaatttctcagaagaggatacaagaatgctacctggtgggaagagaacgttgatcaggagacgtcgtctgcctggcgaacttgagatgctatacttgctggatggatgcttttctaacctggaactgggaatggataatttggccaacgagtgtccatgtcttgttgtatggaactaaaaaatctgaaattacagaaagagaagtccatgtacagcgtaataacattgcctgtgatgatcgtattattattattgttgttattattatgcgagtacacagagcttgtgagcactaagaatgtttttttacaatggtgatttgtacatttgttc

SEQ ID NO: 127015 - DNA, 1491 bp, Zea Mays
  misc_feature (411)..(412): n is a, c, g, or t
cctgcgcctcgcggtagcgtgcggctgtgccgtcgacccgtcgtctcctttctcctccactcctcgtcgcaggcggcataacggagcgcacgcacgcacgcaatggccatggccgccccgccacccacggctctctgcgcccgccgcttccggccccaccacttcgcatactcctcccccgccacgctccgcctacccacggcctcctcctcctcacagctccggcgccgccgccggctagccgtctccccgcgcgcggacgcggcgaccgggacgggggatgtggaggcgctcagggccggggtgtccgtgtacaagccgcggtcctacgacgtgctcgtcaccgacgcggctcgctccctcgcctgcgccatcgacgacggcaagacccggctcgagatcgaattcccnnctctgccaagcagcatctcttcttacaagggctcctcagatgagttcatcgatgccaacatccagcttgctctcgttgttgctaggaagctcaaagagctcaaggggactaggtcttgtatagtgtttcctgatcaacctgaaaaacgtagggcatcagagttgttcaagacagctatagacacgattgagggtgtaaccatcagctccctggatgatgtacccactgaccctgtcaacagcttcttcaaatcaataagaaacaccctggattttgacttctcagatgacaatgaaggtagatggaaatctgatgaaccaccatcgttatatatcttcatcaacagcagcacgcgtgaccttgcttctatagagaagtatgtggaaaagttcgccacatctgttccagcccttctattcaatctcgaactagatacattgcgttctgacctggggcttctcgggttccccccaaaagatctgcactaccggttcctttctcaattcaccccagtattttatatcagacagcgtgactattccaaaacaatcgcagttgctccatacatagtgaattatagtggagctgtattccgccaatacccagccccctggcaggtcatgctgaagcaggctgatggttcctatgcatgtgtcgctgagagcgaagctcggttcactttgggacaggcgaaagaagaactattgagagttattggtttacaagaagaagagggaagctcccttgaatttctcagaagaggatacaagaatgctacctggtgggaagagaacgttgatcaggagacgtcgtctgcctggcgaacttgagatgctatacttgctggatggatgcttttctaacctggaactgggaatggataatttggccaacgagtgtccatgtcttgttgtatggaactaaaaaatctgaaattacagaaagagaagtccatgtacagcgtaataacattgcctgtgatgatcgtattattattattgttgttattattatgcgagtacacagagcttgtgagcactaagaatgtttttttacaatggtgatttgtacatttgttc

SEQ ID NO: 127016 - DNA, 1583 bp, Zea Mays
  misc_feature (411)..(412): n is a, c, g, or t
cctgcgcctcgcggtagcgtgcggctgtgccgtcgacccgtcgtctcctttctcctccactcctcgtcgcaggcggcataacggagcgcacgcacgcacgcaatggccatggccgccccgccacccacggctctctgcgcccgccgcttccggccccaccacttcgcatactcctcccccgccacgctccgcctacccacggcctcctcctcctcacagctccggcgccgccgccggctagccgtctccccgcgcgcggacgcggcgaccgggacgggggatgtggaggcgctcagggccggggtgtccgtgtacaagccgcggtcctacgacgtgctcgtcaccgacgcggctcgctccctcgcctgcgccatcgacgacggcaagacccggctcgagatcgaattcccnnctctgccaagcagcatctcttcttacaagggctcctcagatgagttcatcgatgccaacatccagcttgctctcgttgttgctaggaagctcaaagagctcaaggggactaggtcttgtatagtgtttcctgatcaacctgaaaaacgtagggcatcagagttgttcaagacagctatagacacgattgagggtgtaaccatcagctccctggatgatgtacccactgaccctgtcaacagcttcttcaaatcaataagaaacaccctggattttgacttctcagatgacaatgaaggtagatggaaatctgatgaaccaccatcgttatatatcttcatcaacagcagcacgcgtgaccttgcttctatagagaagtatgtggaaaagttcgccacatctgttccagcccttctattcaatctcgaactagatacattgcgttctgacctggggcttctcgggttccccccaaaagatctgcactaccggttcctttctcaattcaccccagtattttatatcagacagcgtgactattccaaagtattcatctgtcttacttttatccatctagaaacatccttgtgtttatagcttcttgcaccatctatgactactttcccttaaccgtgtagacaatcgcagttgctccatacatagtgaattatagtggagctgtattccgccaatacccagccccctggcaggtcatgctgaagcaggctgatggttcctatgcatgtgtcgctgagagcgaagctcggttcactttgggacaggcgaaagaagaactattgagagttattggtttacaagaagaagagggaagctcccttgaatttctcagaagaggatacaagaatgctacctggtgggaagagaacgttgatcaggagacgtcgtctgcctggcgaacttgagatgctatacttgctggatggatgcttttctaacctggaactgggaatggataatttggccaacgagtgtccatgtcttgttgtatggaactaaaaaatctgaaattacagaaagagaagtccatgtacagcgtaataacattgcctgtgatgatcgtattattattattgttgttattattatgcgagtacacagagcttgtgagcactaagaatgtttttttacaatggtgatttgtacatttgttc

SEQ ID NO: 127017 - DNA, 1608 bp, Zea Mays
gatttcctttccatcaactccccccgttcccctcctcccctttccattttaccttctcgcccgtccccgaattcttccacctcccatcccgtgcagccggcctcaccgccggcgacgggacgcggagacccgggctgccggtaccgtcagccgtgctccttcctctcttcgtcgcccccgccaaaaccttcatctgccggggctgcaccggcggcgcggggacaacaaaagctcgagatccggtgactgatctcttcgttcctcggttcactttgatattccaacaaaggtcacattgctagactcccagattggttcctaacaatgagggcacatgaacgagctgccagtttggctcttgcctgtctgagcttggctccacttctggttaacgtaaacccaaatgtgaatgtggtattgacagcatgccttactgtctatgtgggttgctaccgatctgtgaagccaactccaccttctgagaccatgtccaaggagcatgctatgcggttccctttagttggaagcgctatgcttttatcactgttccttctattcaagtttctctcaaaagatttggtcaacgctgtgctcactgcctactttttcattctaggcattgttgctctctccgcaacactgcttccttctataaaacgttttcttccaaaagagtggaatgataatctcatcgtctggcgggctccattcttccactcactctcggtggagttcacaaagtcccagattattgcctcaatacctggatttttcttttgcttgtggtatgcgtcaaagaagcattggcttgcaaacaatgtcctgggattggctttctgtattcaggggattgagatgctgtcattgggatcatttaaaactggagccattctcttgggtggactttttgtgtatgacattttctgggtgttcttcactccagttatggtcagtgtggctaaatctttcgatgctccaataaagcttctgtttccaactgcagacgctgaacggccattctccatgcttggccttggtgacattgtaatacctggttagtaatgaaaatttctttcctagtgctatgtttatattctgctttgcagtgatgcagatttttctctttattgaacagtaatatcagcctctgtaggagtgtcaagcgtcaactttgttctacatgattaaattatgggcgtgttcggctggctacaagccgacactgttgcagctgtttggactgctgcagctgcaatccatagagagaaaaatactgtagaagccgcagccgcagccggattgcagccgcagcaagccgcagcgaacaagctgtatatgtaccaaactgctacatattggaacattcttagaatgtctataagaagcatttactgatatgctgtatagagctcttgcttttgttgattcatggttacttttggtatctatgtattctttgtagcactcaacagagaatcaaatgttgtaactagaattcgtcccactggattgagatcatgctctgcaccatattgttaggtccatgctcagatatacttttaggccatcccatcttgttgcatgcaatgcagcctaaagttattggca

SEQ ID NO: 127018 - DNA, 1639 bp, Zea Mays
gatttcctttccatcaactccccccgttcccctcctcccctttccattttaccttctcgcccgtccccgaattcttccacctcccatcccgtgcagccggcctcaccgccggcgacgggacgcggagacccgggctgccggtaccgtcagccgtgctccttcctctcttcgtcgcccccgccaaaaccttcatctgccggggctgcaccggcggcgcggggacaacaaaagctcgagatccggtgactgatctcttcgttcctcggttcactttgatattccaacaaaggtcacattgctagactcccagattggttcctaacaatgagggcacatgaacgagctgccagtttggctcttgcctgtctgagcttggctccacttctggttaacgtaaacccaaatgtgaatgtggtattgacagcatgccttactgtctatgtgggttgctaccgatctgtgaagccaactccaccttctgagaccatgtccaaggagcatgctatgcggttccctttagttggaagcgctatgcttttatcactgttccttctattcaagtttctctcaaaagatttggtcaacgctgtgctcactgcctactttttcattctaggcattgttgctctctccgcaacactgcttccttctataaaacgttttcttccaaaagagtggaatgataatctcatcgtctggcgggctccattcttccactcactctcggtggagttcacaaagtcccagattattgcctcaatacctggatttttcttttgcttgtggtatgcgtcaaagaagcattggcttgcaaacaatgtcctgggattggctttctgtattcaggggattgagatgctgtcattgggatcatttaaaactggagccattctcttgggtggactttttgtgtatgacattttctgggtgttcttcactccagttatggtcagtgtggctaaatctttcgatgctccaataaagcttctgtttccaactgcagacgctgaacggccattctccatgcttggccttggtgacattgtaatacctggtatattcgtcgcacttgccttgcgctttgatgtctcaagaggtaccaagaagcgttacttcaacagtgcatttttgggatacgctgtgggtatgacggtgaccatcgttgtaatgaactggtttcaagcggcacagcctgctctactataccttgttcctggtgtgattggttttgtcgctgttccctgtctgtggtatggagaagtgaaacagctactggagtttgacgagtcaaaaactgagtcagaggaaggcagtacagaagaggagcaagatgatgatagttccaaaggcaacaaaaaggtagagtagcaggatttagttccggaggtaaaaggacaggaaaacagttttcgtgtaatgtcgtctggcagctaaaaaaacgggcctgatgaccctctaataccggattcgctcgccttacttaagaacttagaagaaatggttcagcatgatacaagttttattttattttttgtttcgttttgcggattatttgccctgggctgttacttgcgatgtactccctgattcgttgaattcaccagaactgagacttgaccgacgcatatattcatcacgt

SEQ ID NO: 127019 - DNA, 1540 bp, Zea Mays
gatttcctttccatcaactccccccgttcccctcctcccctttccattttaccttctcgcccgtccccgaattcttccacctcccatcccgtgcagccggcctcaccgccggcgacgggacgcggagacccgggctgccggtaccgtcagccgtgctccttcctctcttcgtcgcccccgccaaaaccttcatctgccggggctgcaccggcggcgcggggacaacaaaagctcgagatccggtgactgatctcttcgttcctcggtctgagcttggctccacttctggttaacgtaaacccaaatgtgaatgtggtattgacagcatgccttactgtctatgtgggttgctaccgatctgtgaagccaactccaccttctgagaccatgtccaaggagcatgctatgcggttccctttagttggaagcgctatgcttttatcactgttccttctattcaagtttctctcaaaagatttggtcaacgctgtgctcactgcctactttttcattctaggcattgttgctctctccgcaacactgcttccttctataaaacgttttcttccaaaagagtggaatgataatctcatcgtctggcgggctccattcttccactcactctcggtggagttcacaaagtcccagattattgcctcaatacctggatttttcttttgcttgtggtatgcgtcaaagaagcattggcttgcaaacaatgtcctgggattggctttctgtattcaggggattgagatgctgtcattgggatcatttaaaactggagccattctcttgggtggactttttgtgtatgacattttctgggtgttcttcactccagttatggtcagtgtggctaaatctttcgatgctccaataaagcttctgtttccaactgcagacgctgaacggccattctccatgcttggccttggtgacattgtaatacctggtatattcgtcgcacttgccttgcgctttgatgtctcaagaggtaccaagaagcgttacttcaacagtgcatttttgggatacgctgtgggtatgacggtgaccatcgttgtaatgaactggtttcaagcggcacagcctgctctactataccttgttcctggtgtgattggttttgtcgctgttccctgtctgtggtatggagaagtgaaacagctactggagtttgacgagtcaaaaactgagtcagaggaaggcagtacagaagaggagcaagatgatgatagttccaaaggcaacaaaaaggtagagtagcaggatttagttccggaggtaaaaggacaggaaaacagttttcgtgtaatgtcgtctggcagctaaaaaaacgggcctgatgaccctctaataccggattcgctcgccttacttaagaacttagaagaaatggttcagcatgatacaagttttattttattttttgtttcgttttgcggattatttgccctgggctgttacttgcgatgtactccctgattcgttgaattcaccagaactgagacttgaccgacgcatatattcatcacgt

SEQ ID NO: 127020 - DNA, 2414 bp, Zea Mays
gatttcctttccatcaactccccccgttcccctcctcccctttccattttaccttctcgcccgtccccgaattcttccacctcccatcccgtgcagccggcctcaccgccggcgacgggacgcggagacccgggctgccggtaccgtcagccgtgctccttcctctcttcgtcgcccccgccaaaaccttcatctgccggggctgcaccggcggcgcggggacaacaaaagctcgagatccggtgactgatctcttcgttcctcggttcactttgatattccaacaaaggtcacattgctagactcccagattggttcctaacaatgagggcacatgaacgagctgccagtttggctcttgcctgtctgagcttggctccacttctggttaacgtaaacccaaatgtgaatgtggtattgacagcatgccttactgtctatgtgggttgctaccgatctgtgaagccaactccaccttctgagaccatgtccaaggagcatgctatgcggttccctttagttggaagcgctatgcttttatcactgttccttctattcaagtttctctcaaaagatttggtcaacgctgtgctcactgcctactttttcattctaggcattgttgctctctccgcaacactgcttccttctataaaacgttttcttccaaaagagtggaatgataatctcatcgtctggcgggctccattcttccactcactctcggtggagttcacaaagtcccagattattgcctcaatacctggatttttcttttgcttgtggtatgcgtcaaagaagcattggcttgcaaacaatgtcctgggattggctttctgtattcaggggattgagatgctgtcattgggatcatttaaaactggagccattctcttgggtggactttttgtgtatgacattttctgggtgttcttcactccagttatggtcagtgtggctaaatctttcgatgctccaataaagcttctgtttccaactgcagacgctgaacggccattctccatgcttggccttggtgacattgtaatacctgtaatatcagcctctgtaggagtgtcaagcgtcaactttgttctacatgattaaattatgggcgtgttcggctggctacaagccgacactgttgcagctgtttggactgctgcagctgcaatccatagagagaaaaatactgtagaagccgcagccgcagccggattgcagccgcagcaagccgcagcgaacaagctgtatatgtaccaaactgctacatattggaacattcttagaatgtctataagaagcatttactgatatgctgtatagagctcttgcttttgttgattcatggttacttttggtatctatgtattctttgtagcactcaacagagaatcaaatgttgtaactagaattcgtcccactggattgagatcatgctctgcaccatattgttaggtccatgctcagatatacttttaggccatcccatcttgttgcatgcaatgcagcctaaagttattggcaatacaaccaatatgtgtgtccattcctggtccctggaggaccacacaatagtgtatcaacagaaaacaatttgtaatttctactgattcaagttgcatatcattccagagcttctcagcagacaatctcagccccctagtttaagtctacgtcctcaggggcgccctttacttggttgagatctaaccaatacaaaactgtgatatttgaatctgaatttaggcagtttccgagtcattgagcacgtaatatgttatgtgtacttttgcttgcaggtatattcgtcgcacttgccttgcgctttgatgtctcaagaggtaccaagaagcgttacttcaacagtgcatttttgggatacgctgtgggtatgacggtgaccatcgttgtaatgaactggtttcaagcggcacagcctgctctactataccttgttcctggtgtgattggttttgtcgctgttccctgtctgtggtatggagaagtgaaacagctactggagtttgacgagtcaaaaactgagtcagaggaaggcagtacagaagaggagcaagatgatgatagttccaaaggcaacaaaaaggtagagtagcaggatttagttccggaggtaaaaggacaggaaaacagttttcgtgtaatgtcgtctggcagctaaaaaaacgggcctgatgaccctctaataccggattcgctcgccttacttaagaacttagaagaaatggttcagcatgatacaagttttattttattttttgtttcgttttgcggattatttgccctgggctgttacttgcgatgtactccctgattcgttgaattcaccagaactgagacttgaccgacgcatatattcatcacgtatacacgcacatgtgtgtgttgttgcc

SEQ ID NO: 127021 - DNA, 3242 bp, Zea Mays
aacagggttcacacactcattgaaaatttgctaacttctgcataagtttgtagcagcctctgaaacatttcaaccaaaatgaagatagcttttctcatgtcgttggttctgtccctgtttctcctccctaatgggatctgcaaaagcttagttgcaaggccttcggtcgtgaatattgggtctatacttcggttgaactccaccattggaggtgtttcagatgttgccatccgtgcagcagtggaggatatcaactcagatccaacagttctaaatggaacaacgttacatgttgaaacgagagatacaaactgtaatgacggttttcttggcatggttcaagctttgcagttcatggagactgatgttattgcaatcattgggccacaatgctctgctattgcacatatcatttcatatgtcgcaaatgagctccaagttcctttgatgtcctttgcatcagatgcaactctatcatcaattcagttcccattcttcgtgcggactatgcccagcgatctctaccaaatggcagctgtggctgcagttgttgattactatcaatggaagatagtgactgccatatacgttgatgatgattatggtcgaaacggcattgctgctttggatgatgaacttactgcaaggcgctgcaaaatttcgtacaagactgggttccgttccaatgctaaaaaaagtgagcttctaagtctattggttactgttagtaatatggagtctcgtgttattattcttcatactggttcggaacctggactcaagcttctgtcacttgctaatggactaaacatgatgggcaatggctatgtatggattgcgactgattggctttctgcttatctcgatgctaattcatcggtctctgctgaaactgtaaatggcatgcaaggtgttctgactgtacgtccacacacccctaagtcaaatatgaagagaaatctggtgtccaagtggagcagcttaagcaagaaatacaaccacagtgatcttcgcaccagtgcttatggtttttatgtttatgatagtgtgtggactgtagctcgggccctggatgccttctttgatgatggtgggaggatttcctttacaaatgactcaaggttgcgtgacgtaaccgggggaactcttcaccttgaagccatgagtgtttttgacatgggaaacaaattattggataagatcagaaatgtgaacttcgctggggtgtctggccaagtgcaatttaatgctcagtttgaactcattcatcctgcctatgatatcataagcataattgggaatggcatgcggaccattggtttttggtcaaactatacaagattgctatcaaccacccctccagaagacctatattcgaagcctcctaatacttctcttgccaatcaacagctctatgatgtcatttggcctggtgagactgcacaaaagcctcgaggttgggcctttccttacaatgccaaggagttaaaaattggtgtccctaacagatttagctttaaagagtttgttagcaaagataatggtactgggtcaatgaagggctattgcatcgatgtcttcacccaagcattgacactgcttccttatccagttacatacaggtttataccttttggcaatggtactgaaaaccctcactttgaccaacttgcacagatggttgcggacaacgattttgatgcagcgataggggatatcgaaattacaatgagccgaactaaaattgttgatttcacccagcccttcattgagtcaggcctggttatcttggctccaatcaaaaagcacataacaaattcttgggcattcttgcagccatttacattggggatgtggtgtgttacagggttgtcttttcttgttgtgggtgtggttatttggattcttgagcatcgaataaatgatgattttcgtggctcgccgtggcaacaattaataactattgtttggttcagtttttcgactctattttttgcacatagagaaaagactatgagtaccttaggacgtggcgttttgatcatatggctatttgttgtattgataattcaatcaagctacactgcaagtcttacttccatcctaaccgtgcaacaacttgatacttctattagaggacttgatgacctgaaacatagtgattatcctattggtttccaagttggttcttttgtcaaagaatacatgatcaaggaactgaacatctcacagtcaaggctaaaagctcttggttctcctgaagaatatgctgaaaacctcaagctaggccccaagaaaggaggtgttatggccattgttgatgagcgcccctatgttgagctgtttttgtcaacttactgcaagattgctgttgctggtcaagatttcaccagtggcggatggggctttgcatttccaagggattcccctctgcaagtagacctgtccaccgcgatcctaacactgtcggaggatggggaactgcagcggatccatgacaagtggctcaagacaggcgattgttcatctgacaacactgagtttgtggactcgaaccagctccgccttgagagcttcatgggcctgttcctcatttgtggcgcagcatgtgtcctcgccctgctcatttactttggcatcacgctgcgccagtacctgagacatgagcagccgggatcagcaatctccgcggactcaggatcatcgacatcgaagcgcagtctcagaaaattcatttcgttcgtcgatgaaaggcaacgatcaccaaagaaaaacggaccatgagcctctcaaggagttcaatgccaacaacgccgatgagtaaccgtcctggtactggtattgatatagaaagctagtgcttgacctggaatacatcatctatgggccaatgatccttagtagccaggttcccggattgatggggttgaggaatgggaacgtggtacagtacttgaaaaagattgtaacactacggggacgagattgttcctgcgttttcggaacggaacaaatgtttccggaatgaggaacgtggacacgttcccggtttgtaagggccaatctatgcgtccttatatataggaaattagagccaaaagtctgtgtagtggattgtaatagtcgttttttgcgccccgaccgcccaaggaatccgagtttggcaaaactgtcaaattgtaaagtcaacccttgtccacgaataatgatggtcttatgaatggaatatatgtttgtttcaa

SEQ ID NO: 127022 - DNA, 610 bp, Zea Mays
cttgcaactgatttgtttcaggggagtggttagatatattgacgatcacgctttacggcacaagcttagaaatctccatttattattatacttctactacgtactataaaacaaaaataaagaagtatctggaatcacgttttagatgaggtcaggaaaaaaaatctagagagcttgcatgagtaatgaacgggccaggcaggcaggcagggatcctcttctgtggagtctgaaactagagctttcttctcagcaatggccgaacatgtactgactactgggggtacgaggaggcaatgtcagtgcagagaaccgatccgggctctgaatctgatgagccgagtgaaaggaaaccgtcggcggagcagcaccgctggctgccggcgtctcggtcgtcggtcaacaaaccacgccaccagtcagtcatcagcttgctgcctaaactgacgatttgctagtcttgatatctagtacagctactacaagccaattctccctctctgatcattttaaaattattattattccggttgctgcacttgaattattattattattattattattattattattattattattattattattattattattattatta

SEQ ID NO: 127023 - DNA, 990 bp, Zea Mays
ctagagatttccatcgcacacctctctagtctccatctgtcgggacgccgcatctcgctttctaccagttgctttgtctcgctttcatcctctccgcgtcacttgggtttcgtcagcgtcaagtactccgcttccgcccgaagacttcgccttctcttggcttgctcaccggctacgtctctttgatcctattgcttcggtgcgtggagattgagatctaaacgacaactattttcttttggttaaccggttcgcaagaagtgcagatgcacatctggttccaaatttgtgcttcgatcgtatctagctgccagcttggtcgtcgacacgtttatttccatagttgtgctcccattcttgcttcgccgattgtttcgttttggtgcacagctgatctcgtttgtgtcaaatgcataaggttgtctcaggtcggagatttccagttgtgctcattgcgaccaagacgaagaagacgacgacgatccgtccacgacgaccgtctcctccacgggcgtattgacgccacaacccgctatgggtaccttgagttggccatcgagcagatggcagagaccgcagatgctagcaacgcacttgaccatgggcttcactaccttcggtcaaccggcaatgcatgtgcggcgagggcgctgttatggtggggatgggataactctgatgctcacgctggtatggccacttccgtcgaactttccttgttcttgcctccttcggtgaacttcctcggttcttgcctccttcggcaacttcatgtactcacggccgatgttgccgccacacaccgtctcttgtgctcctcctccggcgaacatccactgctcgaaccaccatggcgctcagctacagggcgtcatgacagcagctccccaagcgatgcaagccgcctgttcgacgaaatgtgtgagaagcaaaatagagacatcaacgatgttttcatgtgtctaatacaaatttattttttaaaacata

SEQ ID NO: 127024 - DNA, 959 bp, Zea Mays
gcgtgttaggtcctttatgtgacccaaataactgaatttcagctaagcaccagagctaatatctctaatcagcttccatgggtgaggcaattaacacttactccaatttgttcttccttcacggtgctacttaattcaacacgttcttcgttgcaatgattacagttacacttggtttatcaccattgctttcagcttgacaaagccttatctttgctacatacttaattaatgcttcaaagcactgacaattccaaatgacaggtacaagcttagtttcattgtcactgatggaacatgtgaagcagagttcttttgttttgatagcatagccagaaaaatagtaggaaaaccttgtaacaaccttgttacagcagttacaacttctcaaggtcccctagcagacctagccgatgttatgtgactgaaatttacccttgcagttgccatcaatatgccagcctactctatcacaaacagtcttctctattctgtctattttgacaaatcatgtaagacatgccttcatgccatctaacatgtctaaccatcctgaagagttgtatacacaagatgaagtacctagccttccggtcacacaaaactctccaacaacatctttggcgaaactatctacctgtagcaacgaaagaaacgagggtgatgaccaacgtacaagtgaactcaacaagcaagatttatcatcaccaccgaaaaggtatttgctttttgtgcacctatcaggatcaccatcacttttggaccatgaatgcttcagcttttagcctatttgtggatctatacatatggacttaacacctgcaagcacactgttgctaggtcttgatgtacggtggttgaatgctacttactatatattttttattgtagtctaaattaactctacaactgatatcaactattagagaaaaacaatgttatatgcttatatttggttc

SEQ ID NO: 127025 - DNA, 1661 bp, Zea Mays
cccttcgtcagtcagtctccgcgcatacttatatccccctctccttgacttcgccatctccctctcctacgctttgttctgggctcttcccgacttcctcctcctgtagagagagaacctagagagaacccgggatggggaacatctgcggcggctgcgggaaggacagggtcgccgaggatttcaggccgtctagcccagggacgacaatgacctccaagacgagcggcagcataaccaccaccagtcagagcaccacggggaagctctcctccgtgggcagcagcttcatggcgtccgccggcagccgcagcaccagcggcggattcgacgagggggccaagtaccccgacggaggccagatcctggaggcgcccaacctccgtaccttcacattcatggagctcaagacggccaccaagaacttcaggctcgacagcgtcctcggcgaaggcgggttcgggacagtctacaaagggtgggtggacgagaagaccatgaccccgaccaggaacggcaccggcatggttgttgccgtcaagaagctcaactcggagagcatgcaggggtacgaggaatggcagtcggagataaattttctaggaaggctctcccatccgaacctagtgaagctcttgggctactgctgggaggacagagaactgcttctcgtgtatgaattcatggccaaagggagcttggaaaaccatctattcaggagaggatgcgccccgttgtcttgggaactgaggctgaagatagccatcggcgcagctcgaggactcgcattcttgcatgcatcagaaaagcaagtgatctaccgtgacttcaaggcgtccaacatacttttagatgcgaactataacgctaagctctctgattttggccttgctaaacttgggccgactggtagcaagtcacatatcacaaccagggtgatgggaacgtatggctatgcagctccagagccatttgtacgtgaagagcgacgtgtacggcttcggcgtggtgatgctggagatgctgtccgggcagcgcgcgctggacccgaaccggccgaacgggcagctgagcctggccgactgggcgaagccgttcctggccgaccgccggaggctggcccggctcatggacccgcggttcgaggggcagtacaactcgaagcaggcgttccaggcggcgcagctgacgctcaactgcctggccggcgagccccgcagccggccgtcgatgaaggaggtggtggagacgctggagcagatcgagtcggtgaagagcagggcgcgggaggcgcgcggcggctcgtcgcgggaccggcaccacggccgcgccggcgcgacgcaccagcggtcgccgcgcgccggtggcgagccgcgcggccgcggtgggtcccgggccgccgccaacggccacgccgccagggccgccgcgcggtgacgcgtccagacgatgacgattcttcatgtaaatggcgttttttttttgcctaatctgtgtgcctctccttctgcttgtggtgtttgtcatggctcacgaggttgttcttgcccaatcattgatgagatgtattattattataagattaattagcagtgaatttgagaagggatgggtgttgttgcaagttgtagccagtagtgcaatgcaatagtagaagaaag

SEQ ID NO: 127026 - DNA, 1768 bp, Zea Mays
cccttcgtcagtcagtctccgcgcatacttatatccccctctccttgacttcgccatctccctctcctacgctttgttctgggctcttcccgacttcctcctcctgtagagagagaacctagagagaacccgggatggggaacatctgcggcggctgcgggaaggacagggtcgccgaggatttcaggccgtctagcccagggacgacaatgacctccaagacgagcggcagcataaccaccaccagtcagagcaccacggggaagctctcctccgtgggcagcagcttcatggcgtccgccggcagccgcagcaccagcggcggattcgacgagggggccaagtaccccgacggaggccagatcctggaggcgcccaacctccgtaccttcacattcatggagctcaagacggccaccaagaacttcaggctcgacagcgtcctcggcgaaggcgggttcgggacagtctacaaagggtgggtggacgagaagaccatgaccccgaccaggaacggcaccggcatggttgttgccgtcaagaagctcaactcggagagcatgcaggggtacgaggaatggcagtcggagataaattttctaggaaggctctcccatccgaacctagtgaagctcttgggctactgctgggaggacagagaactgcttctcgtgtatgaattcatggccaaagggagcttggaaaaccatctattcaggagaggatgcgccccgttgtcttgggaactgaggctgaagatagccatcggcgcagctcgaggactcgcattcttgcatgcatcagaaaagcaagtgatctaccgtgacttcaaggcgtccaacatacttttagatgcgaactataacgctaagctctctgattttggccttgctaaacttgggccgactggtagcaagtcacatatcacaaccagggtgatgggaacgtatggctatgcagctccagagtacgtagcaaccggccatttgtacgtgaagagcgacgtgtacggcttcggcgtggtgatgctggagatgctgtccgggcagcgcgcgctggacccgaaccggccgaacgggcagctgagcctggccgactgggcgaagccgttcctggccgaccgccggaggctggcccggctcatggacccgcggttcgaggggcagtacaactcgaagcaggcgttccaggcggcgcagctgacgctcaactgcctggccggcgagccccgcagccggccgtcgatgaaggaggtggtggagacgctggagcagatcgagtcggtgaagagcagggcgcgggaggcgcgcggcggctcgtcgcgggaccggcaccacggccgcgccggcgcgacgcaccagcggtcgccgcgcgccggtggcgagccgcgcggccgcggtgggtcccgggccgccgccaacggccacgccgccagggccgccgcgcggtgacgcgtccagacgatgacgattcttcatgtaaatggcgttttttttttgcctaatctgtgtgcctctccttctgcttgtggtgtttgtcatggctcacgaggttgttcttgcccaatcattgatgagatgtattattattataagattaattagcagtgaatttgagaagggatgggtgttgttgcaagttgtagccagtagtgcaatgcaatagtagaagaaaggatcaatcatccagaatctgtaattattctaaatcaaattgtattttggaatagagggagtagttatcagagataaacaagaacatgagaaaa

SEQ ID NO: 127027 - DNA, 1021 bp, Zea Mays
aactgggaaagatgctcctccccactctccgtcctgctccggcaagaggcggcacaccgcgcaaggatgccacctagggctgctccggcgctgcgggtgctcccgctcgcgctcgcagcggccatcttctcggggctcaccgccatcctcttctacctctccggcgtctcctcctcacatagcggctctcggctctcggaggcggacctggcggcgctcgccgcgctgcggggtggcttcagcaagtgcgtggatgcaaatgggctaggactgaaagccgtgaccggggaggactactgtcgtgttgtgatacaatacccaagtgacacagtttctaagtgggtccggaacagtacaacagtactcacaaaggagtacattgatgctttgccaaatggctgggaggaatatgcatggagaagaatcaacaaaggaatccttctgtgggaataagtgccagaacagaagcctctgcatggaaaagctctcactagttctacctgagacatcaccatacgttcctcgccactttggtcgatgtgctgttgttgggaactcaggtgatcttctcaaaactaaatttggggatgaaattgattcttatgatgctgtcttcagagaaaatggtgcacccacccagaattacactgaatatgttggtagaaagagtacatttcgccttctgaatagaggatccgcaaaggcactagataaagttgttgagttagatgaaacaaaaaaagaggcactgatcgttaagacgacaatacatgatatcatgaaccaaatgattcgggaacttccaataaccaatccagtatacctcatgctaggcacatcatttggttcctcagctaaaggaaccgggcttaaagctcttgaatttgccctctccatctgtgacagtgttgatatgtatggcttcaccgtagacccaggttacaaggaatggttagtgcatgtcgatctccacgcagtgacaataaaaaattctagtctacagttctgtgcttacagctga

SEQ ID NO: 127028 - DNA, 1339 bp, Zea Mays
aactgggaaagatgctcctccccactctccgtcctgctccggcaagaggcggcacaccgcgcaaggatgccacctagggctgctccggcgctgcgggtgctcccgctcgcgctcgcagcggccatcttctcggggctcaccgccatcctcttctacctctccggcgtctcctcctcacatagcggctctcggctctcggaggcggacctggcggcgctcgccgcgctgcggggtggcttcagcaagtgcgtggatgcaaatgggctaggactgaaagccgtgaccggggaggactactgtcgtgttgtgatacaatacccaagtgacacagtttctaagtggagagatccaatcacccataaggctgaaagtctgtcgtttgagttcaatctgtgtgaagctgtggcctcatgggagcacgtccggaacagtacaacagtactcacaaaggagtacattgatgctttgccaaatggctgggaggaatatgcatggagaagaatcaacaaaggaatccttctgaataagtgccagaacagaagcctctgcatggaaaagctctcactagttctacctgagacatcaccatacgttcctcgccactttggtcgatgtgctgttgttgggaactcaggtgatcttctcaaaactaaatttggggatgaaattgattcttatgatgctgtcttcagagaaaatggtgcacccacccagaattacactgaatatgttggtagaaagagtacatttcgccttctgaatagaggatccgcaaaggcactagataaagttgttgagttagatgaaacaaaaaaagaggcactgatcgttaagacgacaatacatgatatcatgaaccaaatgattcgggaacttccaataaccaatccagtatacctcatgctaggcacatcatttggttcctcagctaaaggaaccgggcttaaagctcttgaatttgccctctccatctgtgacagtgttgatatgtatggcttcaccgtagacccaggttacaaggaatggttagtgcatgtcgatctccacgcagtgacaataaaaaattctagtctacagttctgtgcttacagctgaagttatctttcaggacaaggtacttctcagaggtaagaaagggacacactccactacatggtagagcatattatcagatgatggaatgtcttggtgtgagttcctttcttgctctaatgttagctaacagaactgtttgcacccatgatgctatgctattttgtttgttacccatgtggtgtattgatgtgaaaagaaaatcatgtgcagctggtgaaaatccattcaccgatgcgaggagatc

SEQ ID NO: 127029 - DNA, 1646 bp, Zea Mays
agatgctcctccccactctccgtcctgctccggcaagaggcggcacaccgcgcaaggatgccacctagggctgctccggcgctgcgggtgctcccgctcgcgctcgcagcggccatcttctcggggctcaccgccatcctcttctacctctccggcgtctcctcctcacatagcggctctcggctctcggaggcggacctggcggcgctcgccgcgctgcggggtggcttcagcaagtgcgtggatgcaaatgggctaggactgaaagccgtgaccggggaggactactgtcgtgttgtgatacaatacccaagtgacacagtttctaagtggagagatccaatcacccataaggctgaaagtctgtcgtttgagttcaatctgtgtgaagctgtggcctcatgggagcacgtccggaacagtacaacagtactcacaaaggagtacattgatgctttgccaaatggctgggaggaatatgcatggagaagaatcaacaaaggaatccttctgaataagtgccagaacagaagcctctgcatggaaaagctctcactagttctacctgagacatcaccatacgttcctcgccactttggtcgatgtgctgttgttgggaactcaggtgatcttctcaaaactaaatttggggatgaaattgattcttatgatgctgtcttcagagaaaatggtgcacccacccagaattacactgaatatgttggtagaaagagtacatttcgccttctgaatagaggatccgcaaaggcactagataaagttgttgagttagatgaaacaaaaaaagaggcactgatcgttaagacgacaatacatgatatcatgaaccaaatgattcgggaacttccaataaccaatccagtatacctcatgctaggcacatcatttggttcctcagctaaaggaaccgggcttaaagctcttgaatttgccctctccatctgtgacagtgttgatatgtatggcttcaccgtagacccaggttacaaggaatggacaaggtacttctcagaggtaagaaagggacacactccactacatggtagagcatattatcagatgatggaatgtcttggtctggtgaaaatccattcaccgatgcgaggagatcctggcaggacagtgaggtggctgcctaccaaggctaccatcgaggctgctagagttgcttccgagaagttgttgaagagacctggtgctggaagtgatgatcctctggggacttgcaccatgataaagaagcgcaggaaagggaaggcgccaaacagatctggtctacgagatgctgccatgaagcacctcgaggacatgaaaggtgccgctaggtatcccttggagcggaatgcagggggtggttacctctgcatgatcaatgatagataggaccgcggctgattatggcatcagttgccccctcccccctcccctccacttgagtcgaagaaaggaatgcagtttgagggaacgaaaaggccgattctttgatttatgcagctggtgtacaacgtttgagtgtagagaaagttaggtgtaatgttttgagtgtagagaaagttatatgttgtggatggatacaaatggtcaaattgtagcacttttggtgcttataatactaatttccgctc

SEQ ID NO: 127030 - DNA, 1604 bp, Zea Mays
agatgctcctccccactctccgtcctgctccggcaagaggcggcacaccgcgcaaggatgccacctagggctgctccggcgctgcgggtgctcccgctcgcgctcgcagcggccatcttctcggggctcaccgccatcctcttctacctctccggcgtctcctcctcacatagcggctctcggctctcggaggcggacctggcggcgctcgccgcgctgcggggtggcttcagcaagtgcgtggatgcaaatgggctaggactgaaagccgtgaccggggaggactactgtcgtgttgtgatacaatacccaagtgacacagtttctaagtgggtccggaacagtacaacagtactcacaaaggagtacattgatgctttgccaaatggctgggaggaatatgcatggagaagaatcaacaaaggaatccttctgaataagtgccagaacagaagcctctgcatggaaaagctctcactagttctacctgagacatcaccatacgttcctcgccactttggtcgatgtgctgttgttgggaactcaggtgatcttctcaaaactaaatttggggatgaaattgattcttatgatgctgtcttcagagaaaatggtgcacccacccagaattacactgaatatgttggtagaaagagtacatttcgccttctgaatagaggatccgcaaaggcactagataaagttgttgagttagatgaaacaaaaaaagaggcactgatcgttaagacgacaatacatgatatcatgaaccaaatgattcgggaacttccaataaccaatccagtatacctcatgctaggcacatcatttggttcctcagctaaaggaaccgggcttaaagctcttgaatttgccctctccatctgtgacagtgttgatatgtatggcttcaccgtagacccaggttacaaggaatggttagtgcatgtcgatctccacgcagtgacaataaaaaattctagtctacagttctgtgcttacagctgaagttatctttcaggacaaggtacttctcagagctggtgaaaatccattcaccgatgcgaggagatcctggcaggacagtgaggtggctgcctaccaaggctaccatcgaggctgctagagttgcttccgagaagttgttgaagagacctggtgctggaagtgatgatcctctggggacttgcaccatgataaagaagcgcaggaaagggaaggcgccaaacagatctggtctacgagatgctgccatgaagcacctcgaggacatgaaaggtgccgctaggtatcccttggagcggaatgcagggggtggttacctctgcatgatcaatgatagataggaccgcggctgattatggcatcagttgccccctcccccctcccctccacttgagtcgaagaaaggaatgcagtttgagggaacgaaaaggccgattctttgatttatgcagctggtgtacaacgtttgagtgtagagaaagttaggtgtaatgttttgagtgtagagaaagttatatgttgtggatggatacaaatggtcaaattgtagcacttttggtgcttataatactaatttccgctcgctctgttgggccacg

SEQ ID NO: 127031 - DNA, 2090 bp, Zea Mays
agatgctcctccccactctccgtcctgctccggcaagaggcggcacaccgcgcaaggatgccacctagggctgctccggcgctgcgggtgctcccgctcgcgctcgcagcggccatcttctcggggctcaccgccatcctcttctacctctccggcgtctcctcctcacatagcggctctcggctctcggaggcggacctggcggcgctcgccgcgctgcggggtggcttcagcaagtgcgtggtatggtcttgctcgtatgcctccctctgggctgattacggttcgatttgccttactggtgttcctgctcatctcgtgccgcattgtcgttttcgcctctgggtatgggggcactacttcgtcacaaccacgagctgtggcggattgggaacgtggttgcctcgagattcttggttccgtgcgccaattgttccgagtccgaggttcactgtttagtgtaggaggtagcactgtgacagtgaggtctttgttctggcgtgaaataagatttcatggattgtagcgtatctgtagttgaattggatgacagtggctgcatagatttgcagtgtcagcagcttcaggatcttctttgctgtcttggttcagacagacaaacctcacttgcttaaaagtaactgcaggatgcaaatgggctaggactgaaagccgtgaccggggaggactactgtcgtgttgtgatacaatacccaagtgacacagtttctaagtggagagatccaatcacccataaggctgaaagtctgtcgtttgagttcaatctgtgtgaagctgtggcctcatgggagcacgtccggaacagtacaacagtactcacaaaggagtacattgatgctttgccaaatggctgggaggaatatgcatggagaagaatcaacaaaggaatccttctgtgggaataagtgccagaacagaagcctctgcatggaaaagctctcactagttctacctgagacatcaccatacgttcctcgccactttggtcgatgtgctgttgttgggaactcaggtgatcttctcaaaactaaatttggggatgaaattgattcttatgatgctgtcttcagagaaaatggtgcacccacccagaattacactgaatatgttggtagaaagagtacatttcgccttctgaatagaggatccgcaaaggcactagataaagttgttgagttagatgaaacaaaaaaagaggcactgatcgttaagacgacaatacatgatatcatgaaccaaatgattcgggaacttccaataaccaatccagtatacctcatgctaggcacatcatttggttcctcagctaaaggaaccgggcttaaagctcttgaatttgccctctccatctgtgacagtgttgatatgtatggcttcaccgtagacccaggttacaaggaatggttagtgcatgtcgatctccacgcagtgacaataaaaaattctagtctacagttctgtgcttacagctgaagttatctttcaggacaaggtacttctcagagctggtgaaaatccattcaccgatgcgaggagatcctggcaggacagtgaggtggctgcctaccaaggctaccatcgaggctgctagagttgcttccgagaagttgttgaagagacctggtgctggaagtgatgatcctctggggacttgcaccatgataaagaagcgcaggaaagggaaggcgccaaacagatctggtctacgagatgctgccatgaagcacctcgaggacatgaaaggtgccgctaggtatcccttggagcggaatgcagggggtggttacctctgcatgatcaatgatagataggaccgcggctgattatggcatcagttgccccctcccccctcccctccacttgagtcgaagaaaggaatgcagtttgagggaacgaaaaggccgattctttgatttatgcagctggtgtacaacgtttgagtgtagagaaagttaggtgtaatgttttgagtgtagagaaagttatatgttgtggatggatacaaatggtcaaattgtagcacttttggtgcttataatactaatttccgctcgctctgttgggccacg

SEQ ID NO: 127032 - DNA, 1595 bp, Zea Mays
agatgctcctccccactctccgtcctgctccggcaagaggcggcacaccgcgcaaggatgccacctagggctgctccggcgctgcgggtgctcccgctcgcgctcgcagcggccatcttctcggggctcaccgccatcctcttctacctctccggcgtctcctcctcacatagcggctctcggctctcggaggcggacctggcggcgctcgccgcgctgcggggtggcttcagcaagtgcgtggatgcaaatgggctaggactgaaagccgtgaccggggaggactactgtcgtgttgtgatacaatacccaagtgacacagtttctaagtgggtccggaacagtacaacagtactcacaaaggagtacattgatgctttgccaaatggctgggaggaatatgcatggagaagaatcaacaaaggaatccttctgaataagtgccagaacagaagcctctgcatggaaaagctctcactagttctacctgagacatcaccatacgttcctcgccactttggtcgatgtgctgttgttgggaactcaggtgatcttctcaaaactaaatttggggatgaaattgattcttatgatgctgtcttcagagaaaatggtgcacccacccagaattacactgaatatgttggtagaaagagtacatttcgccttctgaatagaggatccgcaaaggcactagataaagttgttgagttagatgaaacaaaaaaagaggcactgatcgttaagacgacaatacatgatatcatgaaccaaatgattcgggaacttccaataaccaatccagtatacctcatgctaggcacatcatttggttcctcagctaaaggaaccgggcttaaagctcttgaatttgccctctccatctgtgacagtgttgatatgtatggcttcaccgtagacccaggttacaaggaatggacaaggtacttctcagaggtaagaaagggacacactccactacatggtagagcatattatcagatgatggaatgtcttggtctggtgaaaatccattcaccgatgcgaggagatcctggcaggacagtgaggtggctgcctaccaaggctaccatcgaggctgctagagttgcttccgagaagttgttgaagagacctggtgctggaagtgatgatcctctggggacttgcaccatgataaagaagcgcaggaaagggaaggcgccaaacagatctggtctacgagatgctgccatgaagcacctcgaggacatgaaaggtgccgctaggtatcccttggagcggaatgcagggggtggttacctctgcatgatcaatgatagataggaccgcggctgattatggcatcagttgccccctcccccctcccctccacttgagtcgaagaaaggaatgcagtttgagggaacgaaaaggccgattctttgatttatgcagctggtgtacaacgtttgagtgtagagaaagttaggtgtaatgttttgagtgtagagaaagttatatgttgtggatggatacaaatggtcaaattgtagcacttttggtgcttataatactaatttccgctcgctctgttgggccacgaaaattagacc

SEQ ID NO: 127033 - DNA, 531 bp, Zea Mays
gctgcagacgtgctcgtagctttgacaactgacgctgcttcaaccctccacccaaagcaactccaccacgtacagttgtcctcgctgctgctgcccggtcgctggttaagcatgccgcccagcccgtctacccctgcaccgctgcccagccctgcacggagccgcctcgtagccgttcgctggtcaccgtaccagcacggctgcctcgccgacgcgtccccgcacacccgttgttgtgtggaggagtcgtacagcctcgccgctcgtcgtgcccgcgcctcgccatcgtcaagctcgctgatgccttcgccctctcgccgccgagcaggtaacaaccaccctcccttccccggctccagtccctacgcgtggccagcccctgcgtgcagctagccccagcggtctggcacggcacgcgctcagccccgccccattgtgccaccggcgagcccgcccaggccggagcggtcagtgcccctccctctccgacagtaacttttccattccccatttattcctgtaatcgtgagg

SEQ ID NO: 127034 - DNA, 483 bp, Zea Mays
atggacaggggaaactccgagctgggcgagctgcacgcgaccccggcgcacagggacgagctcggctggggccttggcgagagagctcgaccggctgaagcagagaagtgcggcgtgagagagagctgggggcacagttgctggcaccatggcaggggacaagaccgagctgctgctggggcgagcgggacgcagaaacacctggccggacgcggctggggcagagggcgttcggctgggagccgcagagcagcagccagcgccatgagcgagcagggcgcgcgacgagcagggagctccggcaacgcgcgtccatggataagagagagacaaagagaaagcagggactgggggtgcgccatgggcattcgcggccagcgaattttagcgacgagcagaggaaggagacgactgggggaagaacgccaagggaagcaggggcagacgacgccggagatccgggccggcgagcaggatttttaa

SEQ ID NO: 127035 - DNA, 1091 bp, Zea Mays
aatgcgaaatagaaattgtattgattcgattgatgattacaaatcggccgtagacctctctttttatagaggagaggggctggaccctttacacgactggattccgagctaattttgcaaatctagcaaacaaacatagcacaaaactcggaaccctaaactactctgcgcatgcgcggaccggccggccgacacgcgcggactgtccgtaccgcgtaccgtccggcctcagggccggactgtccgccaggctcaaaacggtgctcaacaggacccggtcaggaacgagctagaggaacaaagagcaggggcagtccgagctgagcgccatgcgagatgggcgtagggaggagcagagccgaatcaggagctggggcgcggcacaggaggagcgagctgagggagaagaagcgcgcgcacggagccaagctcgacaggacgcggctgggaaggggaagatgcgtgaaagggagatggaacagagggagctgcgcgtcaggaaactcagtcgaacgagcgccatgggagccgctcggtctcaaggaaaacagggagttcggaccaggggcgcgcgtgggagcaacctcgacagggcgccatgggcgagcagcagcagggcaagctccaggacgcgattcagcagggaacaagcgtaaagaagatgagcccgaggtaacaccaccggcgagaaaaagggcagcagagagattcacggggagaggatccgggcgctgcgagcagcggagaggaacaggcggccgacctccatggttggggacaggaggcgagctgggaggatgagaacagcagatagcagagggcgtagggagatgctcgtgagctccatggctgaggaggtgggcgtgcgccattggggcaggagcggcggtggattcgagcgaacggctgctggaatatctgggctacgtaagaaatggagaggagagggcataagatgagacatccggtggaaaaatcttcagaagatgcacactagcgcgcggcggtggaaaaaatcagatgcgctggagagtgagctggggaaggaagatagagatgcgcgggagaagaaatctggccaccgcgagggg

SEQ ID NO: 127036 - DNA, 2165 bp, Zea Mays
cggcatcggcatcaagccaccaagcgcgtcaactcgtcgattacgcgtcgtcgtctcgcgctgctgctgtcgctggattttgttgttattatattcccacttccgctgccattccgttccagactgcctcctccactccagtgtggccgttcgttcccctctgttccgcgccggcgcgccgcccaactctgagcgatggaaggcaccgtgctgtgcgcggccaaccacgcgccgctcacgcccatcagcttcctcgagcgcaccgcgctcgtctaccccgaccgccccgccgtcgtcgccgccggacacgccgccgcgccgccgccgcgcacctggcggcagacccgggaccgctgcctccgcctcgccgcggcgctcgcggggctcggcgtcgcgcgccgtgacgtggttgcggtgttcgcgcagaacatcccggccttctgcgagctccacttcggcattcccatggcgggcgccgtgatctgcgcgctcaactcgcggctcgacgccggcatggcgtccgtgctgctgcagcactcggaggccaaggtcgtgttcgtggacgccgcgctactgggcgtcgcccgggaggcgctccgcctcatctcccagcaggccggcggagcgagcagggtgcccgccgtggtactaatcaacgaggcgctcgacgagccgccgtcagcggcgacaggaaacgacaagatcccaggcgtcgatcggtgctacgagtacgaggccctcctcctcagcagcagcagaggcggcgatccagagttcttgatccggtggccggacgacgagaacgagccgatcgcgctgaactacacgtcggggacgacgtcgcggcccaagggcgtggtgtacacccaccgcggcgcgtacctgaactcgctgtcgtcggtgctcctcaacgacatgacggcgctgccggtgtacctgtggacggtgcccatgttccactgcaacgggtggtgcctggtgtggggcgtggcggcgcagggcggcaccaacgtgtgcctgcgcaaggtgaactcgggcgccatcttcgcggccgtggcggcgcacggggtgacgcacatgggcggcgcgccgacggtgctgagcatggtggtgaacgccacggcggaggagagggcgccgctgggcgcggggaggaagaggccggtgactgtgatgacgggcggcgcgccgccggcgccgcaggtgctgttccggatggaggagctcgggttcctggtgatccactcgtacgggctgacggagacgtacgggccagcgacggtgtgcacgtggcggcccgagtgggacgcgctgccggcggcggagcgcgcggccatcaaggcccggcaggggctccaccacctggggctggaggtggacgtgaaggacccggccacgatggccagcgtgcccgcggacgggcgcaccatgggcgaggtgatgttccgcgggaacacggtgatgggcgggtactacaaggacgcggccgcgacggcggaggccatggccggcgggtggctgcggtcgggcgacctggcggtgcggcacgccggcgacggctacgtgcggatcctggaccggtccaaggacatcatcatctccggcggggagaacatcagcaccatcgaggtggaggcggcgctgttcgcgcacccggccgtggcggaggccgcagtggtggggcggcccgacgagtactggggcgagacgccgtgcgcattcgtgacgctcagggagggcgcggccggcagcgtgcgcgccgaggaggtggtggcgttctgccaggcgcgcctgccgcggtacatggcgccccggacggtggtgttcgtggccgagctgcccaagacagccacggggaaggtgcagaagttcgcgctccgggagcaggccagggccatgggcagcatctccagctccgagcagcaggatggggcagggacgaggagcaagctctgatctgaactcgcatgcccacatggatgtctcctccattccactgacgagtagttgagcagcaacgaacctaagtgtgctgagctgtgctgtgctgtgcttggacatgtagagaaagagaatcaccacactcagtgatacagattcgtcatttcagtaatataatttacagtatcaaccttcaatgctctcaataaaaatgggggcaagca

SEQ ID NO: 127037 - DNA, 108 bp, Zea Mays
gcccaagggcatatttccctttcaggatttaaagtttatggtttgctctcaccaggtataataacatctttcttcagtatgttctatctagaaattaactatgagttg

SEQ ID NO: 127038 - DNA, 1404 bp, Zea Mays
atggacccctgcaactcctccgtgggcaccatcgcgtacatgagccccgagcgcatcaacaccgacctcaacgacgggtacgccggcgacatctggagcttcggcctcagcatcctcgagttctacctgggccgcttcctgctgtgcgagaacctggggaagcagggcgactggccgcgctcatgttcgccatctgctactccgactcgtcgcaggcgccgtgcaacgcctcgtaataagccatctgctcaagtgagaatagatgttgtggttggaaaggatcgtctattagacgtttccatgcataagataagtgttgcagctatacaaactggttttggttttgagagatttcaggctatgtcttattcagcagttatgaaagctaacaagcaattcactattatgttattattggttaaactggacccttcagcacattcacattcacaactagctcaacacattcacattctcagataccgatctactggacatcatcaactcagagatcaagtacgcccgaggactcaggactgcgatgaccacgacacgaaagtatactaccattctggcggacttcggctgaacccgaacctgtacgagagcgggaaagtgtgcctgagccttctgaacacctggtggggcaaggggtgcgagaagtggggcaagtcgagctccaccatgctgcaggttctggtctccatccagggcctcgtgctgaatgacaggccatacttcaatgagccaggatacaagaactcggctgaaacgacaggtggtgagaggtgttccttggcttacaatcagacgaccttcgtcagatcatgcaagacgacgctgtattcactccggaagcctccaatgcattttgagacccttgtgttgtggcacttccacgagcatgagcgtgccatcctcgacgcttgcagggcttacatgtctgggacagtcgttgggtcgtctgctgggactgggagcaaccgcagatacgtccatgacaagtgctttgcagaattccacaagtcgctgacgctctacactgaacatctcagggctgagtttgctacaaacagaagacgagtgatggagctagaaacagaagacgagatcgtgcctagcatagcagctagcatgaaatcgtgttgaaggcaaatgccccacagtgttgctctcatcatcagatatttgctgccttagctatttctagcttcattcatgtcaagtgaataatctaattcatgacaattgtacctgtctctatatctaatgaatctgtcctctcttttgaaagtactaagtgtatgcccgtgcgttgctacagaataaacatgttatgatgagatgcagaaacattagttatcgttctatgcttttgttagcatcttctaaaggttaagaata

SEQ ID NO: 127039 - DNA, 468 bp, Zea Mays
acccgacccactcttcaactctgctgcctccctatccacctcaccatctccgccttcacccgaagctgttggtggtagtggtgcctccgacaatggggatatgacatggtaggagagagggtgtgtcccaccgctcaagggtgcggggacaccgtcggtctctgtcacgccgccgcagtggcgacacaccgtgctggcgatgttggtaggaccgtaggaggagggcctcgccactcgcgagcggggtcggtggccaacaacacaagcacggggctctaagttttacaggatcatgcgccaacacaaagatatgccggttttggggaaggatactcatggagatgaactatatgcttgcttatggttcaactgaagcttctttgaggttgttgtggaggtttgtccaccttgaacatttgttgcccttttaggtaaacccatgtccaggaaaataaacatatcttgata

SEQ ID NO: 127040 - DNA, 1297 bp, Zea Mays
ccacatccagtcgcacaaaaacggcccaagtggagcaggttctgcttctggctgcccgctgtcccgtggtccctctctccctccctgtcctgtccgccgccgccggtccccgacggcggctctgcagccacacgcacaaggactagagcggacataatacggtgcaagcggagggaccaaaccgcaaaagcgcacagttcccgttccccctccgacccgttcattccgcttggttttctcctcctccgtcctcttcgctccccgtcagaccatccctgtgaggctgtgacgcaaccgggcgccggcggtctctcctgcaccacagggcacgccgcctcccgcgcacgtgttctcctcttccggggattcagatctggggattgctattctgtccgtctgactccgtccgtcccgaggcgcggcgaggggagcgagatgggttacattggccaccacggcgtcgccacgctgcggcgctacaagtacagcggcgtcgaccactcgctcgtcgccaagtacatcctccagcccttctggtcccgattcgtcaacatcttcccgctatggttcccaccgaacatgattacactgacaggtttcatgtttctactgacatcagcattccttggctttttatattcaccccatctagatacagcaccccccagatgggttcaccttgctcatggactgcttctctttctttatcagacttttgatgctgtggatggaaaacaagcaaggcgtaccaactcatcaagtcctctaggcgagctttttgaccacggatgtgatgcgcttgcgtgtgcttttgaatccttggcttttggaagcacggcgatgtgtggaaaggctaccttctggttttggttcatttcagctgtcccattttacttcgcaacctgggaacacttttttacaaatacacttattcttcctatagtcaacggaccaactgaaggccttatgctgatctacttgtgccattttttcacctttttcacaggagccgagtggtgggcacaggattttcagaagtcaatgcccctgctgggttgggttcctcttatctctgaaatcccggtgtatgacattgtgctatgtcttatgattgcttttgctgtaatcccaacaattggatctaacatccacaatgtatataaagtcgttgaagcaagaaaaggaagcatgcttctggcactagccatgctctttccttttggtttgctcttggctggagttcttgtctggtaagtcttttgagacccttgcttgcttcacgtgtatgcagttatgc

SEQ ID NO: 127041 - DNA, 587 bp, Zea Mays
aataatatagctaaccgttttggagggcgtcttatagccgatatgtataatggttagctctttacaattaatatatgatccacttatctcttttataaaaggcaacgtatactgtgtaaaactgtttcctgtgctaacgtgctaagacgtgttgacatccgtcagattccaaatcaatggatacacttaaccacacctcataatcttgttctttttcttaagagcccctcgtttctcttttgtttgtgtaaaccgaatagttttatagccgccgacccttctctcccgtacaccgtcgttgacgccgtctccatcgaacgtgttggcgttggtcaccgctagcctacctcgatattctccatcgctttctacggtcgacacaaccccgcccccatcttctcaggcgtctgccatggtcgacgccggcccgccccgatcttctcaagcgcatgccacggtcgacgccgatctacctcgatcttctaccgcgcctgccatggtcgacacagcacgaccccaatcttctccgctgcatgccatggttgacgccaactcgcctcgatcttgtacctgtgttgccatgttga

SEQ ID NO: 127042 - DNA, 1665 bp, Zea Mays
aaggtcgatttcctaggacattgtaaggaggaggatttcgaagaagggtacgagctggtgctctcaatgttgaagagggatcttatgcctgacagtgagtgctatattgctgtaatagatggctttatgcagaaggggaggatgaaatctgcctgggaagcgcttcacaggataacagtggtcttcgacctagcacaagtacgttccactctgttcttctgggtgcttttgaagaaagatggctgtgcgaaagaagccgcagatttgatagagataatgctggagaggaagatcaggcagaatgttgacctttctactaatctgattggtgtgttgttcaaaagtgatcttaatggccgtgcatacaagattactaagcatctgtacgacaatggatattacattaagatggaaaaactaatcgcgacactttgtgaggacaagaagttcatagatgccgcagagttttctttgttcagcttgcggaagcgccatgaactgggtgtggcagttcacagccaggttctggatggcctttgctcgaatggtagaacttcagaggcattccagcttttctatgagctaattgagaacaaaagaacttctgcggttgctgcgccccacagcctagtctttctgcatcatgctcttgaggaagctggaatggtgcaagaagctggttttgttgctaaacaaatgagacgtgcaactgccacaactaggcgaaggagctaaggatttactccatgtttttttggcatctttgtggggagggaagggattcccacctggatagctgttattgctaacatgtatagcctgactctacgctattttcttacataatggtgcaagaccaaggatggctggctcaaccaccaggaaggagttcacgccaccgcactaaatgtggatttattccatgtttgttggaagaaaaacttgggagttcttcgcaacaaaccatgcagggtggtctgtgaagaggaaggatgctggaactggatgtcaagttggttgcctttcctcagctgatcagcaagggaatggctggtcattgaataatggttgtttgatgatggaagattgcatatggcattaaggggtctgtaaatgatttgattttcttgagctaactcctatcagcagatattcagattgcagaagctcatctgatggtcagtcctaaagacaaactaaagcctgtatttcctgatactgacatactgtgtatttaagtgcatgtgagacaatagagctgctgctgcttcctcctgttcaactggagaagagttgtgaaaatcaaagtgtctcaaattaaaaagataactcctggtaaaatgctagcgaaagaacaccacggtctgtcatgatatttagcagccagtgacatcgtcctgtcatgacagtatatgtctaggaccgaagaacttgagaagttgggcgtgaagcttcagaacctgagcaacatgccatgatgccagcgggagtggtgttgctttctactccctctgctctgctccatattagaagacattttggtttttttttatttcaactgcttttgctatgtatttagatatatactgtatcaaacagaatgtatctagaaaagtataaaaatttggaacggaggggatagtttgcgtgatgagaaaaaaaaaa

SEQ ID NO: 127043 - DNA, 642 bp, Zea Mays
atggaggctgcggcgtcgaatatggatcacgcgcccatggaggaggatgcagcgccggcgtcgatggtggagatgaatgcggaggagctggaggtggccgacattctgagcgacctgagcaggctcatccgctcacgggaccggcaggagcggtgtcgggaacggagggagaggcaccgccggcggccggtgcagcgggacgacaatccctccccggaaccagctcccgcggccgcgtcgtccgccgtccctagccccgaaacaccgctcgcgtacccgcagagcggcggggacgacgacgcgccgcccaaggacaagggcgaggccgccgccgctgttcgcccacgggaccagagcgcggagcagcagtacggcgaggaggcggcggcgagctcggggcaggccccggaaaacgcgcgtccactaacggtggcgacgaggaagaagaaggacacaccgtggacggtgccgtcgagagacctgactgacgagcgactgctagagtgggcaaaggcggtagaggatcggtacctgcaggccatggccaagaagcagaaggcggccgcgcggcggcgccgtgtcggcatcctgcgcgccaagggcctctcgctagtgtctagaaggatgtggcgcgctagctag

SEQ ID NO: 127044 - DNA, 1050 bp, Zea Mays
aggaagctaaagagaagtttcagctgctgcagaaggttatatccattcttggagatgcagagaaaagagcgtttatatgatgatactggcatcactgatgatgcactggtgggagaagctgcagacaatcttcaggagtacttcagaacaatgtacaagaaagtcacagaggctgacattgaagaatttgaagctaaatatagagggtcagattctgagaaaacggacttgaaggaactctatacaaaatataagggcaacatgaacatgcttttctgcacaatgatttgctcagaaccaaagcttgattctcaccgcttcaaggatataattgatgaggcgattggtgaaggtgagctgaagtcaactaaggtgtatgagaaatgggctaaaaagatctcagggatggagccaccaacaaatccgctagagaggagagcaaagaagaggaagaacagtgaggagaatgatctgatactggctatctcacagcgcaaggctgagcggaaaaaacagttcaactccatcctctcgaacatcatgtccaaatgtgactccaaggcgagcagctcggagcccacggaagaagagtttgagcaggcgcaacagaggccggagagcagaagggccaagaggcgcaagtgatgttgctgccagccttcttgccctatgctgaacattgtctgaagcttttggtgtgacctgaatttaccagcatgcaagtgatggttctaagacccagtttgagcgtgtcagggtgtgtgtcatatctcttgtcctctcacggtacactatgttgtatggttatcggcttgtcaccttgccgagagggaagctctatttgacttgaaagtatcatgacatattttactgcgacaattatcattacacatttctccaaattatgttgcaagaataaaaattggcttcaatttcaaaattactatgcttgtcttagttggcagctttttttgtgtcattacatacttaaattttcaatggtaaaatttagcattcctttgcattgtactctgatttttttttaaaaaa

SEQ ID NO: 127045 - DNA, 96 bp, Zea Mays
atggaagaggcgacgatgccaaaactcttgcagagctcggattccagatcggtgattacttgagcgtcgcaatcatgtagacggtgcccgcaccag

SEQ ID NO: 127046 - DNA, 400 bp, Zea Mays
acgctgacgcagcatccgtttgacgtccgtcgatagctacctggagatcgaagtcactccgcagcagcgtgttggacgacgatgatgccgccaaagtacggaccaagtggccgcgctggcggacttggtggtggctgtttgcagctgccgctgccgccgccggcgaagctgctgcaaggagaagaggctccacgaaggaggaagaagagatgatgcttgcaggtgcagcagacatggttgctcctggtagagagtacatcgtctactactcgaactaactgaacaacaaccagctaatcaatcagaaaccaaagcaagccgctgctaattaatggcgatgcgccgatgtatagctgtgagcagctagctgtgcctgcttgtgttgtgagtgagtgagtga

SEQ ID NO: 127047 - DNA, 1981 bp, Zea Mays
atgtactctctaccaggagcaaccatgtctgctgcacctgcacgcgtcatctcttcctcctcctcctcctccttcgtggagcctcttctccttgcagcagcttcgtcggcggctgcaaacagccaccaccaagtccgccagcgcggccacttggtccgtactttggcggcatcatcgtcgtccaacacgctgctgcggagtgacttcgatctccaggagggcctgacgacggacgtcaaacggatgctgcgtcagcgtcagaagaagagcggcggcgggcgggagatgctggtcaccatcgacaacctcaagcgcctctgcatcgaccacttcttcgaggaagagatcgagggcgccatggcgacgggcgcctgcacgcgtctcctccacagcgacgacctcttcgacgcaacactcgcgttcaggctcctgagagaggcaggccatgatgtctcagcaaaagaggatgttctacggaggttcatcgacggcgtcagcggcgacttcaagctatctctgaacaacgacgtcagagggctcctgggcctgcacgacatgtcccacctggacgtgggaggggaggaggcggcgctgctccacagggccaaggagttctcgagcagccacctcgcgtccgccgtcaggtaccaggacaaccctagcctcgcggagtacgtgcggcagtccctggaccacccctaccacctcagcctgacgcagtacaaggccaggcatcacctccgctacctgcagagcctgccctccagctgcagagacgccgccgtggagagactcgcagttgccgagttccagctcaacaagtcgctgcatcagagagagatgcgagagattaaaaggtggtggatggacctagggttggctgaagaaatacctgtggtacgggatcaggtgatgaaatggtacatgtggtccatggcagcactccaaggatcttctttctccagataccgggtctacgtcgtggacgacatattcgatctcgttggcaccctggaggagctctccgccttcaccgaggcagtcaaaatgtgggatactgcggctgctgattcacttcccagttgcatgagatcatgctataaggccctccacaccgttacgaacgagatcgcagagattgcccacaaggagcatggatctaaccctatcaatcgtctcaggaaagcatgggtggtgctgttcgacggtttcatggttgaggcgagatggctagcgaccgaccaggtccctacggcggaggactacctacgaaatggcgtcgtcacatcaggagtgccgctcacatttctgcacatattcagcatgctagggtatgatgacccaagcaccgaggaagaagaagaagcgatcatcgaccacatgccctcgatcatctcctgcccagccaagatcctcaggctctgggatgacatgggcagcgcagaggatgaggctcaggaaggattcgatgggtcttacagggacttctacctcatggagaaccctagccgcagccccggcgaggcggaagcgcacatgcgcggcctgatcgcgagggagtgggtggagctcaacagggagtgcttctgccggaggaccttcccctcggacatcgcgcaggtctgcttgaacaccgccaggatggtcagcgtcatgtactcgtacaacaaggagcagaggcttctcgtcctcgaggactacgcggcgatgatgttggtgctttgatttgaagcatgcatgcatgcatttgctctctccgatccgcggatatgaaagtaaagtagtgattaggttgatgatttgttttgagaccagtaatgtagagtagcgattaggttgtgtaaaattagatagctaggattagaataactgggcaaacgaatatggtatgtgtccatatgtaatgatgcaatatatagcaacatatatggtatcggcgttattatctttttctttcaaaaaatgtaataatattcacata

SEQ ID NO: 127048 - DNA, 1362 bp, Zea Mays
atgtcggccacctccagctccaccgcatccacctccaccactgacgccggcgcctccttcatgtgcgcgtgctgcatgcaattatcgccgcactccttcaactccctcctcgccgcgctcctgcgctgccccggcgcctcccccgacgtggccacgctcaacaccctcatccacggcctctccaccgcctcgccgtgcccgtccgcccccgcgctcctcaggctcttccgcttcctgccggaggcctacgccttcgcgcccgacgccatcacgtacaactccatgttggctgctctgtgccgagcgggggacctggccaccgcgcgcaggctgtttgatggaatgcgcgtgggcgagcaaggcggggaggctggcgccttccctaacgtggtcacctacaccaccatgatcagggcgtgctgtgcgaggaggcttgccgatgaggcgctgtcgctcttcaagatgatgctcgtggaaggcgtgcggccgaacaggatcacctacaacaccatgatgcagggcttctgccaggccggaaggatggagctggtgaaggaggtgttcgggatggactcatttaagccggacacgtgcacgttcaatacgctgatggccgcgcattgtagagaagggcggatacaggacgcgaagaaggtgtttgatcagacgatggagctccgcgtgaggcgtgactctgcgagttacagcatcgtgacccgggcgttgtgcgagaacggtgagtttggtcgagcagaggagcttgtggacagcctcttggagaaggaggttctcaagaaaagaggtggttgtgtgccactcattgcatattacaatccagtttttaagtacctctgtgagaatggcaaggcaaagaaggccaggttgttattcgggcagctgctggatattaggagcaaggtcgatttcctagcattcaagacactaatcctaggacattgtaaggaggaggatttcgaacaagggtacgagctggtgctctcaatgttgaagagggatcttatgcctgacagtgagtgctatattgctgtaataaatgccgcggagttttctttgttcagcttgcggaagcgccatgaactgggtgtggcagttcacagccaggttctggatggaacttcagaggcattccagcttttctatgagctaattgagaacaaaagcacttctgcgggtgctgtaccccgcagcctagtctttctgcatcatgcagtgtggtctgtgaagagaaaggatgttggaactggatgtcaagctggttgcctttcctcagctgatcaacaagggaatggctggtcaatgaacaatggttgtttgatgatggaagattgcatatggcattaa

SEQ ID NO: 127049 - DNA, 210 bp, Zea Mays
gtataaatcagctaaatgattaggtgggaaagggaggattccaagctgtacgtgcagagtggtgacaacaagtggagctacagagaaaagattgagttcacgatctacttcgcataggagatctctcaaggcctgctatttgagatggaggaccagatcccttcgctcgctgaccttattaagttcggcagcttgctggatttccaacaa

SEQ ID NO: 127050 - DNA, 1164 bp, Zea Mays
atgggcgccgcgagccagctccgtcgccggacccgggcgcggacgccgccaggtccagggccggaggccgccgccgccgacgacgacgtgaggtgcgaggcgtgcgggtccggggacgcggccgcggagctgatgctgtgcgacgggtgcgactgcgggttccacatcttctgcctccgccccatcctcccgcgcgtccccgccggcgactggtactgcccgtcctgccgcgccccggcctcctccaaatccgaacccgccgctgccggcaagaagccgaagcgtgagtacatttttcctctgcggtttcagttgccagttgcttctttggctcagtcaattaaccgtcggcgatttgttcgtgtccctgtcgcagagttcccgctggtccagacgaagatcgtggatttcttcaagatccagcggagcccgacgccgttggtggaagcggcggagctgaagaagcggaagcggaagcacgggggcgcgctggtggcgtcgaagaagaagagccgtaggctgctgcccttcgtgcctagccccgacccggcgcagcggctgcggcagatggcgtcgctggcgacggcgctgacggcgacgggcgccgcgttcagcaacgagctcacgtaccagcccggcatggcgccgcggtccgcgaaccgcgcggcgctggaggccggcgggatgcaggtgctgggcagggaggacgcggagacgctggcgcggtgccagcagatgatggcgcgcggggagtggccgccgttggtcgtggcgtacgaccccgtggaagggttcacggtggaggcggaccgccccatccgcgacctcaccatcatcaccgagtacgtcggcgacgtcgacttcctccgcaaccgggagcacgacgacggcgacagcatgatgacgctgctgtcggcggcatcgccggcccgcagcctcgtcatctgccccgaccgccgcagcaacatcgcgcggttcatcaacggcatcaacaaccacacgccggaggggaggaggaagcagaacgtcaagtgcgtgcggttcgccgtcggcggcgagtgccgggtgctgctgttggccaacagggacatctccaagggggagaggctctactacgactacaatggctcggagcacgagtaccccacgcaccatttcgtgtga

SEQ ID NO: 127051 - DNA, 229 bp, Zea Mays
attattttgtatataaatattactaataaaaatattcatatcaaacaacaagtaaataaaaagatacatgttacattaaaattttcttctaacatgtttaaatatggccgagctataaatatgtcgtggttgctaactattcgacatttcacagaactattagaccatatactgatagtctgacaactatatctatacacctagggctgggtcttgtgaacttgggggg

SEQ ID NO: 127052 - DNA, 1956 bp, Zea Mays
tccacacactgttggtccatcgccctatatatatgtgtatacatgtctagctagttgcattgccaacgacaacgacgatggcgccaacgtcgacggagacgaggagctctgccaaggccacggtgtcatcgtcccagctggctctcgccgccgccgtcctctgcctcacggcgtgtggcggcaacggcgtggcggcgttcaactacgcggacgcgctcgacaaggcgctgctcttcttcgaggcgcagcggtcgggaaagctcccgccggggcagcgcgtgacgtggcgcggcgactccggcctgaccgacggctccgcggcagggcttgacctcgccggcggctactacgacgccggggacaacgtcaagttcggcctgcccatggccttcaccgtcaccatgctgtcgtggagcgtcctcgagttcatgcccagcggcggcgccggcgccgacgccggcgtcaccggcagggccgccgtgcgctggggcgccgactacctgctcaaggcggccgcagcggcccccgacgcgctctacgtgcaggtggccgacccgtaccaagaccacaagtgctgggagcggcccgaggacatggacaccccgcgcgaggtgtacaaggtcacgcccgacaggcctggctccgacgtcgccggggagaccgccgccgcgctcgctgccgcgtcgatcgtgttccggacctgtgaccctgcctactccgccaagctgctccagactgctcacaaggtgtttgacttcgcggaccggtacaggggctcgtacagcgactcgctcagctccgtggcctgcccgttctactgctcctactctggctaccaggacgagctgctgtgggcggcggcctggctgcacatggcgacggcggcgcaggggaactcgtcggacatgtacctgtcgtacatctactccaacgggcacatcctaggcgcggagcaggacgacttcaccttcagctgggacgacaagcgcgtgggcaccaaggtcctcctctccaaggcgttcctgcagggcatggtgggtaagggcaagggccacgcggaggacgacgcgctgcggctctacaaggcgcacgccgacgcctacgtgtgctcgctcgtgccgggcgcctccggcttccagccgtcgcagttcacgccggggggcctcctgttcaaggagggcgacagcaacatgcagtacgtcacctccacggcgttcctcctcctcgcgcacgccaagtccctcgccggcgcgcgggtctcctgtggcggcggcgcgggggtgccggcgtccgcgctggtggccgccgccaagaggcaggtggactacatcctgggcgccaacccggcggggatgtcctacatggtggggttcggagcgcggtacccgcggcacgtgcaccaccgcggcgcgtccatgccgtcgatgcgcgaccaccccgcgcgcatcggctgcgacgaggggttccagtacctgcactcgccggaccccgacgtcaacgtgctcgtgggcgccgtcgtcggcgggcctgacgacagcgacgccttcaccgacagccgcgacaactacgcgcatacagaaccctccacctacaccaacgcgccgatcgtcggcgcgctcgccttcttcgccgccggccgccaccgctgaagctagtaattaggctagccgccatgattattagcccctgctgctgcactgcacgtaagaagtgcatgcacatgtaggtttggtgtgtgtcctgtatgtatgtgtgatcgaagcgtgtactgtgccatgcgtcatgctagagtgcaatgcgtcatatacttttcggcgtgacacagtgagcacttggttcttgcgaggaccaataggaagcgataccttgcgcgggtgctccaataagaactagtgcagagtgccgactcttcgatacctcgagaaaaaaatgaaggagtattttaaaccttgcttt

SEQ ID NO: 127053 - DNA, 777 bp, Zea Mays
atggcacgcgcgtgcctcctggtcggctgctgctccctgcgctcaccgtggctccctgctgcagctcgcccccagctcaccacgcggctcccatggcgtgctcctctctgccgagcggctcttccccacggcgccgtcgaatcccgtcttcctctgctcgcgcgggccgtgcccctgcttcccctccctagccgagctcgccgattccctttccccaagctccatggctggccgcgcccagcgtcctcctctcagcttcccacgcgcaccggcttgctccctgctcggttccgtgaccgcgccgtgtgcccatctcctatgcacgcatgctccctccctgttcctccaaaccagtcgagctcctccttgtgtccgtaccgagctccttccctacgccggtcggatctctctggtgctcccccagtctggcgcggcaaacggggaaagaaacagccgagttcctctgcgcgctaccacgtcttctcgctcggcctgctccggatccgaagctggtcaccctgtgtgctcgactttgccttgtcgcaaaaccccgacgccgttgagcctcactgcccatcacgaagttccctactatcagcctccgcacccgttccgttagaccgtcgtagtcagtttgcctccatcccgtggtggtgttgcgctaccgtcgagtcccgatatcgatccggtggtcgtcgaagtgaagctctgaacggatttgaccatatccagcactacccatgtcgttgtcgttcgccttcgtgctgtgagcgatag

SEQ ID NO: 127054 - DNA, 245 bp, Zea Mays
taatggggaggacgacgccggcggcggtggcggcagctgacgacgacggccagaagacgtcgtggccggaggtggtggggtgggtgacgctgaacgcggcgctgcagatcagcagcgacaggcccgacgtgtcgacggacttctacagtgagaccaccacgctgccgaccgactacgacgccaaccgcgtcatcatcgtcgccgacgaccggaacgtcgtcgtcaggactccggtcatcggctag

SEQ ID NO: 127055 - DNA, 738 bp, Zea Mays
atggccatggaacactgttggaaacgaccgtctttgaccgacgtcacatggcaaccatacaacgcacctgagttggatgggatgatctttagttcagtatgcaacagcgaagatgaactctataggatgcaatgtcctatgatctgtttctggtgtgttgagtggcacctaccacatagggttcagaggcagtttggcaggaagatatggccggttgaagatattccaacttctaaggagctacacaaatttgaccggcggaagcaaaagaagataacagactttcgtcaacatcatctggcatttattgaagagtgggatttggctgcggagaatgtgcataacaatgatgagttgcacaacaacagtgactacaggccgtaccaagcttggtaccagggtgcgattcgttgtaagcttcgccagcagtggacatcggatgactacgctgacattgattcttccgacgatgaagacacagagtacgaccagtccactagactaggaacccaagtggaggtggcacccatcttggatcaagtgagtaacacattaaaatgctcggtacaggacattgatcgacagcttttgactgtgggcgataacagcatgcatagcttcttggagaataggatatttgatctagagagggaaataagcaacataaatgatgaggaagaaagagacaacaacaatggaggtggttcacaggtgcaagtatgctcagatccacattga

SEQ ID NO: 127056 - DNA, 3079 bp, Zea Mays
atacaggatgcttgtttatctgaaatattgctttcagggtttggcatttcctccagggcatggaataattccccaatcccggcttcattcagtgagggaagaactccttcaatttctgcttgaagaatctaagccactcacttctgaagtatttaagggtttcaatgcttcttgtggaaagtgcctaaacatatgctatctgctatggttggatactgaagctactttggaagtcatcaaatgtgcttttgtacaggataactttgagtctagagatgaacttccgagtactgtcaatacatctgcttcagataatgaagatggtattgatgctggaagaccagagggccaaaatgctatggtacaaaatgtggttgatgccatcattgacatagttggtttggaaaatgatgtgattcggtctgttatgggtagaactgaatcagaattatggccttcggagaaggattttggctatttaatggagtttgtgtccttttttgtttctcacaaaagggctaatgcatctaagagggttgttatgcacattcttacttatctcatttcgtcatatgatgacacaagaacaaggattcagaaagaaaaagaagttcttcaactcttcaatgcggttccccgaaacgattggaattcggattttgtcttgaacctttgttcagatgctcatttttatcaggcctgtggtttgatatttacagccaggaatcagaatttggctgctttagatagttacatgaaggataaagaggaacctttccatgcttttatcttcattgataagaagttactagaattggttgacgatgaagctttgtcgtttcataccacagtaatatctcgctttcctgagctagtcaagctaagcagggaatgtgcatttgtcttggcgattgatcatttctgtgataagatacagcaaatattagcagagcttcgttctgaccgacacagcctctttcttttcttgaaaactgctattgaagtacacttgtctggaaaacttgacttcagtaagcttgaattaagaaacaaacaaactgttgaactccagtactcttctactgaagttgaagcttatcagcagaggctatcaaatctctccaagttatgccacaatcctgtttacatcgacgacgagttagttgagctttatctggagcttttatgtcagtatgagcgaaggtcagttctgaagtttctggagacttttgacagttacagattggaacggtgcttgcatctttgcctagattatggagttacagatgctgctgctttcttgcaagagagggttggtgatgttgggagtgcccttgaccttattctggctggacttgatgagaaaattagcttatttatctcttctgtggaaagtactttctctggcgtcgcatcaaaaagtatcgctgaaattaagcaaccagacatcgttctagaaatgagtgaggctcatccagtgcttgatgcattgcatgcctccattggattgtgccaaaggaattcacagcgcttggacccagaggaatctcagtccctttggttccaactccttgactccttctcagagccattaaaaaaactgtatgggatcaaggatgtaaatggaaaaggtgtcaagtccaattggagtgaagcatcaatggaacatctgaaggaaaaaggactatctcaacaaatgaggatttcaactaaacaaaagtgcctaaatgttctgcgaaaagtattttcacaatgtgttggagaaataatagaggccatggctgggtatattcccctaccggcaatcatggcaaaactgttatctgataatgggaatcaagagttcggtgatttcaaacttgtgatacacagaatgttatctatgtatctttacgaaaaaagaatactggaaacggctaagtcagtaattgaggatgactcattttacaccttgagcttattaaagagaggagtttgtcatgggtttgccccacagactttcgtatgctgcatatgcaactgttcactttctaaagaaggtgctatttcagccgtacgtttgttcagttgcgggcatgcaacacatcttcagtgtgagtctgagcagaccaggtcatccaatcaggaatccaaagagggatgccctgtttgtctctcaatgagtgatacgcaagctcgaagcaaatcacctatgtttgagaatgggctaatgaagtattctggggctgaacatgaagtgtcacatggcatgtatcagattcatgaagttgatcatgctgagagatctcgtgggcttcaacagatgtcacggtatgaaatactgaataatcttcagaaagcgcagaagtcctttcatatagaaaccgtacctccattgaaacttgcaccgccagctatataccatgagaagatacagaagaggaccacttcggttggtgaaactagcaaacattctgttagaagtcagaaaccccagaaaatttggcaaatgaaggagaaaaaatcaaaagaggctgggagtcatcatccacaaaagtcaagttttctacgttaatagaagaaaagattgctgatttgttaagtatgaaaccagatccaaactgattgttaatttgcttcatgccatcaccacgatcgaatcttcaagactacaaatttgtcagcgtgatggagcctgcccatcagtacatagcttttttttttgtcttggggatgcatcctgttggtgagatcctcttcccctgcaccatggtcagaggttctgtggagccaaggtgctttgggctagggaggaaattgtaacagtaaattttcatacagttcatcgtgattagttttgtgtacagagcagagcatacacgtggtgacatggtccctgtagagggacacattcgcagtaaaggtgggatgcctcgattcatactcaacaatgtaaagtaaaggtgggatacctcaattcatgatcattgtaaaatacgtgcacagtataacacaggagcactggctgagtggcatgtatccttgcagttcatcgcgattaatctctgtacagagctgttatactgtcggttttgatatc

SEQ ID NO: 127057 - DNA, 1197 bp, Zea Mays
acaaacaccccattatatatttatattttgtactgatgtatactagtacttcttccaaattgttgggttattaattcagcttctcagagccattaaaaaaactgtatgggatcaaggatgtaaatggaaaaggtgtcaagtccaattggagtgaagcatcaatggaacatctgaaggaaaaaggactatctcaacaaatgaggatttcaactaaacaaaagtgcctaaatgttctgcgaaaagtattttcacaatgtgttggagaaataatagaggccatggctgggtatattcccctaccggcaatcatggcaaaactgttatctgataatgggaatcaagagttcggtgatttcaaacttgtgatacacagaatgttatctatgtatctttacgaaaaaagaatactggaaacggctaagtcagtaattgaggatgactcattttacaccttgagcttattaaagagaggagtttgtcatgggtttgccccacagactttcgtatgctgcatatgcaactgttcactttctaaagaaggtgctatttcagccgtacgtttgttcagttgcgggcatgcaacacatcttcagtgtgagtctgagcagaccaggtcatccaatcaggaatccaaagagggatgccctgtttgtctctcaatgagtgatacgcaagctcgaagcaaatcacctatgtttgagaatgggctaatgaagtattctggggctgaacatgaagtgtcacatggcatgtatcagattcatgaagttgatcatgctgagagatctcgtgggcttcaacagatgtcacggtatgaaatactgaataatcttcagaaagcgcagaagtcctttcatatagaaaccgtacctccattgaaacttgcaccgccagctatataccatgagaagatacagaagaggaccacttcggttggtgaaactagcaaacattctgttagaagtcagaaaccccagaaaatttggcaaatgaaggagaaaaaatcaaaagaggctgggagtcatcatccacaaaagtcaagttttctacgttaatagaagaaaagattgctgatttgttaagtatgaaaccagatccaaactgattgttaatttgcttcatgccatcaccacgatcgaatcttcaagactacaaatttgtcagcgtgatggagcctgcccatcagtacatagcttt

SEQ ID NO: 127058 - DNA, 853 bp, Zea Mays
cacaaactcacctcgtcatctccccctcaaactgtcggataagccgcgcgccgtcgccgtggccatggcgtccctctcccccgcgctcctccccggcgccggcgtgaccctcctccgagcgccgcccgtgttccgcgtcaccgcctcttcctcgagctcggggagcaagaagggcaagaagcccaagagcggcagcaagggcaaggacaccaaggcgctggagcctccagcgcccgtggtccgccgcgcgccgccgggaagcgcctccatattccagcagcagaagaatgaggcggcgtccagggccgggggcgccggtgggaaggggcccacggaggaggagctacggcagcggcaggccaacgagaacgccttcctcctcgcctggcttgggctaggcatcatcatccttgtcgagggcatcgcactcgccgcctccggttttctgccagaggaatatgacagcttctttgttaagtacctttatccatcgttcactccaacagttgttctgtttttggctggtacggttgggtatggtgtcctcaaatactttgaaagcgagaaaagcaaaagctagatgacagcacgaagcatgtttggagcaatgatgagggtagagttagcaaatgtgcttgttatgtatgaagtagcttaaagcagcagatatgtgccagagaataggctggtgtttttatttatttttccttatatcctgcatcccaaattcctaattattcttttttgtttgtttgtaaattaacgatcaatggatactttcctgaatatgtattaagttgagttgtatattggtttttggcgatcaattggcttgttgagaccattttgacca

SEQ ID NO: 127059 - DNA, 1616 bp, Zea Mays
cgcaattttttaagcgttatgtgtctgtctgtccatttgcgagatatttttatataaaaaaaacactttctgcccttgcttaaattaaaaccaatcgatggctttaatttcgtcgatgtagtattttcatttctcctcgtctccttcctcccctcgtcgcttctgtgtccttgaattcctcgccggaacacggccggcgggcgagcgcgaaggtcgccggagaaccgtaccggccgctcgccttttcatgagttgttcgtgctgagttccgggctgtgggtgtgaacaattccgagttcctgcgtctcgtgatcgcgcccgtgtctgtgaacaggcagagctgcagcctctgatggtcacggcccgaacagggacgtggcggtagcgttatagtctggagcccacgatggagatcacggaggcctcgccggccccggccccggccccggcgccgatgccggagacaacgccggtgccggcgagctctcagcctgcgccagcggctccggcggctgcgctttccttggcgacggtagcggcggggaggggagacgggaagaggaagcgggggaggccgcggaagtacgggccggtacacgcccgcggcggccgtcggcgccgtcatgaagcggggcaggggccgcccggtcgggttcgtcagccgcgccacgccgatatcgatggcggtgacggccgccgcgcccaccccggcggtggtcgtgtccgcgccgacgcccgcgctgcactcgccgctcgggccactcggtgaactggtagcttgtgcttctggtgccaactttacaccacatattattaatgttgctgctggtgaggatgtcagcatgaaggtcatatctttctcccaacaaggtccaagggctatttgcattctatctgccaatggagttatcgcaaatgttacactgcgtcaacaagactcattaggtggtacagttacttatgagggtcggttcgagctgctctccctgtccggatctttcactcccactgatagcggcggcggcaccagaagccgctcaggtgggatgagcgtgtccttagcagccgccgacggccgcgtcatcggaggcggagtcgccggcctcctcgtggccgccagccctgtccaggtcgtggtgggaagcttcctcccgagctaccagctggaccagggcgccaacaagaagccggtgatagagatcacgacagtgccgccggcgcccgtcgggttcaccatctcaagcggggacatggacgacgcgtacagcggcagccagcatccaaggtcggcggcggcgaaagggggctcgaccaccacggcactgttcaaggtggagaactggacggcgcccgcgcccgcgcccgatcaggcgaggaaggcgccggcgccggaggccaaagtccccgtccccggaggctgaagccgacatcctctacctagctagccggccgaccgtcgatcgatcaggccctgcagcttgttgggaatccagtaattcgtgatccttgtaaccgacgccgtcttagtacagaagtggatcagtatgaatcacccgctgttcatcattaattaggtgtcgacattttcccggtttatatatgtgtggagtttcatt

SEQ ID NO: 127060 - DNA, 718 bp, Zea Mays
ggcgcgcggcattggtcggtccggagcggtttcgcgtcatcgatgcggttcgctgatacggcaatacggcatgcatgagcggcgacgcacgcacgcactagaaggaaacttctgggggagtccggagaagctttcgttccttcgtccttctccttcccaccgccacgccacgccacgccacgccggctcggtacatatactagcctgcctcgatcggcctccctcgcattccccctcgatcggcctccctcccccaagatcctccactcgatcccaaacaaaccaacaaatccatccatcgcacatggacgcgttcttctcggcctcctccgcgtcggcgccctacggctacggcgccggcggatggagctacgactcgctcaagaacttccgccagatcacccccgccgtccagacccacctcaagctcgtacgtcccccgttcgcgattctccctgttcttctcgtcgtgggcgtgcgtttcagaaattccgggggctatagtcgttgtgactcgcgcaattagcatttcgtatttttttaaaaatatatatcagtcgttggtttcgtgcgttccagaaattctcctgcgggttgcgtgtagctgatgcgtaattccctgacgtaatcttgtgattcgcgcgcgtcgtgttccttgcgttgagaactgcaactgcggatgccaccgattcgatcgattcgtcactttaagaacatg

SEQ ID NO: 127061 - DNA, 1669 bp, Zea Mays
ggcgcgcggcattggtcggtccggagcggtttcgcgtcatcgatgcggttcgctgatacggcaatacggcatgcatgagcggcgacgcacgcacgcactagaaggaaacttctgggggagtccggagaagctttcgttccttcgtccttctccttcccaccgccacgccacgccacgccacgccggctcggtacatatactagcctgcctcgatcggcctccctcgcattccccctcgatcggcctccctcccccaagatcctccactcgatcccaaacaaaccaacaaatccatccatcgcacatggacgcgttcttctcggcctcctccgcgtcggcgccctacggctacggcgccggcggatggagctacgactcgctcaagaacttccgccagatcacccccgccgtccagacccacctcaagctcgtctacctcaccctgtgcgcggcgctggcctcgtcggcggtgggcgcttacctgcacgtggtctggaacatcggcggtacgctgacaatgctcggttgcgtcggcagcatcgcctggctcttctcggtgcccgtctacgaggagaggaagaggtatgggctgctgatggcggctgccctcctggaaggcgcttcggtcggacccctcgtcaagctcgccgtggaatttgacccaaggtaaccttgcacttgtcgtcttgtctctcggaaattgcctgcgctgtgcgctgcttgattaagataataataatacagtaataatcaggattcgaacgctaccaggctggcaatgcgtcaccagcccgccataagttgtagtagtagacaaatgcttagatgacgaatggctgttttttttccctcagcatcctggtgacggcgttcgtggggactgccatcgcgttcgcgtgcttcaccggcgcggccatggtggccaggcgcagggagtacctctacctgggtgggctgctctcgtcggggctctccatcctgctctggctgcagctagccggctccatcttcggccactccgcaaccagcttcatgttcgaggtctacttcgggctgctcatcttcctgggctacgtggtgtacgacacgcaggagatcatcgagagggcgcaccgcggcgacatggaccacgtcaagcacgccctcaccctcttcacagacttcgtggccgtcctcgtccgcgtcctcgtcatcatggtgagtgagctctttcctcttggtgatgatgctgggttgctgccgcggattatattggtggaatagcttgcgcatgattttgatttcagatttctccctgtgctgccggtggcggttgtttctgaatggctgtactgaccgaaccgttggtgttgcatgctctgcagctcaagaacggggccgacaagtcggaggacaagaagaggaagaagaggtcgtgagcgcgtcgagaagggaagctcttccacttccacatatgcataggagtaactgctggggttccttcctggggtggaagtgtggaactgagctgagtgttcagaagtgttcctttgttcggcacctttgttctcttcctctcttgatgagtctgtaaatagctatgtcaatctggttaagcttggtttggttgcctgtgcctgtgttcgctggcctttggatagaatgcaaattaaagatgttgctattgcac

SEQ ID NO: 127062 - DNA, 1324 bp, Zea Mays
ggcgcgcggcattggtcggtccggagcggtttcgcgtcatcgatgcggttcgctgatacggcaatacggcatgcatgagcggcgacgcacgcacgcactagaaggaaacttctgggggagtccggagaagctttcgttccttcgtccttctccttcccaccgccacgccacgccacgccacgccggctcggtacatatactagcctgcctcgatcggcctccctcgcattccccctcgatcggcctccctcccccaagatcctccactcgatcccaaacaaaccaacaaatccatccatcgcacatggacgcgttcttctcggcctcctccgcgtcggcgccctacggctacggcgccggcggatggagctacgactcgctcaagaacttccgccagatcacccccgccgtccagacccacctcaagctcgtctacctcaccctgtgcgcggcgctggcctcgtcggcggtgggcgcttacctgcacgtggtctggaacatcggcggtacgctgacaatgctcggttgcgtcggcagcatcgcctggctcttctcggtgcccgtctacgaggagaggaagaggtatgggctgctgatggcggctgccctcctggaaggcgcttcggtcggacccctcgtcaagctcgccgtggaatttgacccaagcatcctggtgacggcgttcgtggggactgccatcgcgttcgcgtgcttcaccggcgcggccatggtggccaggcgcagggagtacctctacctgggtgggctgctctcgtcggggctctccatcctgctctggctgcagctagccggctccatcttcggccactccgcaaccagcttcatgttcgaggtctacttcgggctgctcatcttcctgggctacgtggtgtacgacacgcaggagatcatcgagagggcgcaccgcggcgacatggaccacgtcaagcacgccctcaccctcttcacagacttcgtggccgtcctcgtccgcgtcctcgtcatcatgctcaagaacggggccgacaagtcggaggacaagaagaggaagaagaggtcgtgagcgcgtcgagaagggaagctcttccacttccacatatgcataggagtaactgctggggttccttcctggggtggaagtgtggaactgagctgagtgttcagaagtgttcctttgttcggcacctttgttctcttcctctcttgatgagtctgtaaatagctatgtcaatctggttaagcttggtttggttgcctgtgcctgtgttcgctggcctttggatagaatgcaaattaaagatgttgctattgcacagtccattcc

SEQ ID NO: 127063 - DNA, 1325 bp, Zea Mays
ggcgcgcggcattggtcggtccggagcggtttcgcgtcatcgatgcggttcgctgatacggcaatacggcatgcatgagcggcgacgcacgcacgcactagaaggaaacttctgggggagtccggagaagctttcgttccttcgtccttctccttcccaccgccacgccacgccacgccacgccggctcggtacatatactagcctgcctcgatcggcctccctcgcattccccctcgatcggcctccctcccccaagatcctccactcgatcccaaacaaaccaacaaatccatccatcgcacatggacgcgttcttctcggcctcctccgcgtcggcgccctacggctacggcgccggcggatggagctacgactcgctcaagaacttccgccagatcacccccgccgtccagacccacctcaagctcgtctacctcaccctgtgcgcggcgctggcctcgtcggcggtgggcgcttacctgcacgtggtctggaacatcggcggtacgctgacaatgctcggttgcgtcggcagcatcgcctggctcttctcggtgcccgtctacgaggagaggaagaggtatgggctgctgatggcggctgccctcctggaaggcgcttcggtcggacccctcgtcaagctcgccgtggaatttgacccaagcatcctggtgacggcgttcgtggggactgccatcgcgttcgcgtgcttcaccggcgcggccatggtggccaggcgcagggagtacctctacctgggtgggctgctctcgtcggggctctccatcctgctctggctgcagctagccggctccatcttcggccactccgcaaccagcttcatgttcgaggtctacttcgggctgctcatcttcctgggctacgtggtgtacgacacgcaggagatcatcgagagggcgcaccgcggcgacatggaccacgtcaagcacgccctcaccctcttcacagacttcgtggccgtcctcgtccgcgtcctcgtcatcatggtgaaagaacggggccgacaagtcggaggacaagaagaggaagaagaggtcgtgagcgcgtcgagaagggaagctcttccacttccacatatgcataggagtaactgctggggttccttcctggggtggaagtgtggaactgagctgagtgttcagaagtgttcctttgttcggcacctttgttctcttcctctcttgatgagtctgtaaatagctatgtcaatctggttaagcttggtttggttgcctgtgcctgtgttcgctggcctttggatagaatgcaaattaaagatgttgctattgcacagtccattcc

SEQ ID NO: 127064 - DNA, 1005 bp, Zea Mays
gctgtgtcgtgtcgctctgtgccaccccaccagcctccctccccctcttctactcctggatcggcccagcttctttaattcccttccttcgcctggccgcgaccagtaccacccaccgctcgctctcgctcccaggcctcctgccgcccggcccgcgccgcgccatggaagagccgccgccggggagcagcaaggccgccgcggcgcgcgcgccccgggtggtgggcgtgctggcggggctgctggagcgcgcggcggagcgcggcgacacggcgacgccgacgctggcggactcggcgttccggggccgcgcgctgccggggatccccgtgcggcggtacgcggagcggatataccggtacgccgggtgcagcccggcctgctacgtcctcgcctacgtctacctcgaccgcctcgcgcggggccaatgcgacgccggcgccggcgaggacgaggacgaggacgaggcggcggttgtcggcatcgactcgtacaccgtccaccgcctcctcatcacctccgtcttggtcgccgccaagttcatggacgacaggcaccacaacaacgcctacttcgcgcgggtgggcggcgtggaggtggcggagatgaacgcgctggagctgcgcctcctcttcgccctgcgcttccgcctcaacgtcgcccccgacaccttcgcgcggtactgcgccgcgctcgagtgccacgtcgacacgcccgacgccggcggccccgtgccgcggatgccgccctcctcccacgtcgacggcgaggaggcagtgaccagcagcaagggcaaggttgccgccgccggtggcggttccgtcgtcgtccagcgtagtcaccgtcagcggagagccgtggtacagatcatgacgacggcccaatgacgacgacggacggcctaggtcgacgtacgggagattgtttcatttgttcttttttaatatacgctccatataagcttttgtacgcacctgctatatacactccataagcttttgtaca

SEQ ID NO: 127065 - DNA, 1846 bp, Zea Mays
gctgtgtcgtgtcgctctgtgccaccccaccagcctccctccccctcttctactcctggatcggcccagcttctttaattcccttccttcgcctggccgcgaccagtaccacccaccgctcgctctcgctcccaggcctcctgccgcccggcccgcgccgcgccatggaagagccgccgccggggagcagcaaggccgccgcggcgcgcgcgccccgggtggtgggcgtgctggcggggctgctggagcgcgcggcggagcgcggcgacacggcgacgccgacgctggcggactcggcgttccggggccgcgcgctgccggggatccccgtgcggcggtacgcggagcggatataccggtacgccgggtgcagcccggcctgctacgtcctcgcctacgtctacctcgaccgcctcgcgcggggccaatgcgacgccggcgccggcgaggacgaggacgaggacgaggcggcggttgtcggcatcgactcgtacaccgtccaccgcctcctcatcacctccgtcttggtcgccgccaagttcatggacgacaggtacgtaacctatgtatatctatctatcaacctaagctagtacactgtagtggcctcacttgtcggtcgaggaccccaaccgtgtgttcgtctccactgcgcccggccgtcctgctcgtcttggttccgtggctggtaattagtgtactcctagtagtacgtataatcagcttggaactgatgagcacgccgcagcgggcagtcggccaacggaacagctagatccagctacgcatcgcagtggggaagagaagccggtagtattcacatgcacgcaaaacgtatgtactatatgcgaatggtcctagtcctatcctattgatcattcctatctacctgctgcacagccatttctgcattccgctcacaacaacaacaacaaaaaaaaggagcagccggtagcggtaggtgtgcggtggtgccgtggtggtacctggtacgtgtcgtcactcgtcagtcgttgggacgtccagctctctcgctcgtcggtcctctcgccaggctagctgtagctgggatgtcgctggtcgctgctctcgctcgctgtcgtccgcggttcgtcgggatccccatatatcaatgcacaagctgacaaacacaactcgactcgactgcgtctgcatgcaatactccctcgcacacctaccaccctactgacctacctacctaccagagagagagagagatatttcatcacaatagaaccgtactagtacaattcttcttctaaacacgcatcaacgcgtggatacacatgcgtaatccgtcgtggcataacaattttcgcacgcaggcaccacaacaacgcctacttcgcgcgggtgggcggcgtggaggtggcggagatgaacgcgctggagctgcgcctcctcttcgccctgcgcttccgcctcaacgtcgcccccgacaccttcgcgcggtactgcgccgcgctcgagtgccacgtcgacacgcccgacgccggcggccccgtgccgcggatgccgccctcctcccacgtcgacggcgaggaggcagtgaccagcagcaagggcaaggttgccgccgccggtggcggttccgtcgtcgtccagcgtagtcaccgtcagcggagagccgtggtacagatcatgacgacggcccaatgacgacgacggacggcctaggtcgacgtacgggagattgtttcatttgttcttttttaatatacgctccatataagcttttgtacgcacctgctatatacactccataagcttttgtacacccgtctatggctcgatatcgagccatccagcggttgattggttgtct

SEQ ID NO: 127066 - DNA, 1785 bp, Zea Mays
agttcggcccggctctcaaccagccggaaaaccccacagaagcgtttccttcgctcgcttcccttcgctccgccgcgtcctcgaaagtcgaaacccccacccgtcatggagccacccgcgtggtcgccgccgcgtgaggaggaggaggaggaggagaccgagatcgacttcgacgaggaggaggacccggaggaggtggagccgtggttcacgtcctccggctcggagccggagctagaaccagagccagagccgaagcacccggcgccgaccccatcccccgcccccgcttgggctgagccggagcagcagccggctccggtcacggcggtggaggcgacgaagaagggcgagggggaggatgcgaggccgcggtggcccgggtggcctggcgcgagcgtgttccgcctggtggtgcccgcggacaaggtcggcggaatcatcgggcgccgcggcgacaccatcaagcgcctctgcgacgagacccgcgcccgcgtccgcgtcctcgacgccccgcacggggacggggccttcagccggattgttttagtgtctgcaagagaagaagttgaagcagagttgtcacctgcaatgaatgctgcaattaagatcttcaagcatataaacgagatagaagatatcaattctgatggaactttaatggctcctgcaccagaaatttcttctgttagattattagttccttttgcacaagctctccatgtaattggcaagcaaggagtcacaattaagtcaattcaggaaagtacaggtagtaccgtaaggatcatggatgaagatgagctattgagtcatgagacaatgggtgaaagaattgtggagataaatggtgcttcgctcgaggttctgaatgccctaaaattggtgcttggacttctccggaagttcctagttgatcatggtgtgcttcatcttttcgaaaggaagaacccagaagtagctcaaccacagcagagtcgtggtaacccaaaaggcagtagattcttgtatggacatgatccatcttttcatgccccgtactctcgagatctcagccaaccagctgattcgttaataacaaagattacacggacaatgcaaatcccgctggcagatgttggagagataattggcgtaaggggagaaaacgttgaactcattcgttctgttagtggagcagttgtcgttcttgagaaaatcggaaacggtcaagaggttcgagtcatgattgaaggcactccttcacaagttcaaactgcacatcaacttgtacaggaggctctttcaggtgacagagggctaccgtccgggagcagttactacagcgctgaggggggcgacggtgacccaagtctggtaaagcccccacatgctggcccaaggtttctgcaccccatctcagcaatcgaagcaagttgggactacctgccatggcagtaccaagaacaaacgccccgtgacgaccatcggggataccctactctctctgattacagaggctacttgccataggaagcgcactcagctgccaaggtaccttttgcagccaccgttacaagatcgtgtggacgattgatgtggaatggcaacatgtagtagctgccgtcccgtaccttctctatctaggactaggagccgagtaatggctgccattcatagaggggacgacgtggatcgcttgtatgaaaaagattgaacaaactagcaactgcactagattgtttcgtgagctgtcctctgtcttaccacgtgctcaccaaaagctgagcctcaagttccttgtcc

SEQ ID NO: 127067 - DNA, 1782 bp, Zea Mays
agttcggcccggctctcaaccagccggaaaaccccacagaagcgtttccttcgctcgcttcccttcgctccgccgcgtcctcgaaagtcgaaacccccacccgtcatggagccacccgcgtggtcgccgccgcgtgaggaggaggaggaggaggagaccgagatcgacttcgacgaggaggaggacccggaggaggtggagccgtggttcacgtcctccggctcggagccggagctagaaccagagccagagccgaagcacccggcgccgaccccatcccccgcccccgcttgggctgagccggagcagcagccggctccggtcacggcggtggaggcgacgaagaagggcgagggggaggatgcgaggccgcggtggcccgggtggcctggcgcgagcgtgttccgcctggtggtgcccgcggacaaggtcggcggaatcatcgggcgccgcggcgacaccatcaagcgcctctgcgacgagacccgcgcccgcgtccgcgtcctcgacgccccgcacggggacggggccttcagccggattgttttagtgtctgcaagagaagaagttgaagcagagttgtcacctgcaatgaatgctgcaattaagatcttcaagcatataaacgagatagaagatatcaattctgatggaactttaatggctcctgcaccagaaatttcttctgttagattattagttccttttgcacaagctctccatgtaattggcaagcaaggagtcacaattaagtcaattcaggaaagtacaggtagtaccgtaaggatcatggatgaagatgagctattgagtcatgagacaatgggtgaaagaattgtggagataaatggtgcttcgctcgaggttctgaatgccctaaaattggtgcttggacttctccggaagttcctagttgatcatggtgtgcttcatcttttcgaaaggaagaacccagaagtagctcaaccacagagtcgtggtaacccaaaaggcagtagattcttgtatggacatgatccatcttttcatgccccgtactctcgagatctcagccaaccagctgattcgttaataacaaagattacacggacaatgcaaatcccgctggcagatgttggagagataattggcgtaaggggagaaaacgttgaactcattcgttctgttagtggagcagttgtcgttcttgagaaaatcggaaacggtcaagaggttcgagtcatgattgaaggcactccttcacaagttcaaactgcacatcaacttgtacaggaggctctttcaggtgacagagggctaccgtccgggagcagttactacagcgctgaggggggcgacggtgacccaagtctggtaaagcccccacatgctggcccaaggtttctgcaccccatctcagcaatcgaagcaagttgggactacctgccatggcagtaccaagaacaaacgccccgtgacgaccatcggggataccctactctctctgattacagaggctacttgccataggaagcgcactcagctgccaaggtaccttttgcagccaccgttacaagatcgtgtggacgattgatgtggaatggcaacatgtagtagctgccgtcccgtaccttctctatctaggactaggagccgagtaatggctgccattcatagaggggacgacgtggatcgcttgtatgaaaaagattgaacaaactagcaactgcactagattgtttcgtgagctgtcctctgtcttaccacgtgctcaccaaaagctgagcctcaagttccttgtcc

SEQ ID NO: 127068 - DNA, 3140 bp, Zea Mays
cgccagagctctctttcaaaaactagcaaagatggtacaatgtactcaacctcctccccagttaaagctcccagagagtaagatcacagaaccgacagatgatgagaaccaagatttgccaccaaaacctgagaaaaggactaggatgcaccacattgagaggcacagatcttgtgttgtgaccttatctgacatagaacttaatggtctgcaacctcgtcatctgcaccaacccattgagatcagcccaggaggatcacagtgttcgctccatgaagaaacacctacagatactaatgcatcacacaggcatgcaattgcagatgctgcttgggaagccctcaaaaggtcaatggtttacttcagaggccaaccaattggaactgttgccgcaatagacaagtctcagggggcagcactgaactatgaccaggttttcatgagggatttcattcctagcgcattggcttttcttatgaaaggagagcacttgattgtgaagaactttctggtagaaactgcacgccttcagtcaagggagaagatggttgaccttttcaagcttggtcagggtgtgatgcctgcaagctttaaggtgcatcatcgcaaccctactcagaagacagaaagcttactggctgattttggtgaaactgccattgggagggttgctcctgtagattctggcttatggtggattattctccttcgtgcttacaccaaatggacaggggacaattctctggctgaaagtactaactgccaaagggccatgcaccttattctcaggttgtgtctctcagaggggtgtgatacttctccagccttgctttgtgctgatggatgctccatgatagaccgaagaatgggcatatatggctacccaattgaaatccaggctctctttttcatggctatgagatgcgccctgagtctgttgaaacaagagtccgatgctgacttcgtgaaccacatcacaaaaagaatccaagctctgagctaccacttgcacagttactactggttggacttccagagacttaatgacatataccgctacaagaccgaagagtactcacagacagctctgaacaagttcaacgtgatgcccgaatcgatacctgactggatatttgacttcatgcctagccgtggtgggtacttcattggcaacgttagtcccgcgaggatggatttccgctggttctgcctaggcaacttcatcgcgattctgtcgtcgttggctaccggagagcaggctgaagcgatactggatcttgtggaggagcgctggcaagaactcatcggtgagatgccgctcaagatctgttaccctgcgatggaaaatcaggaatggcagatagtcactggatgcgacccgaagaacaccaggtggagctatcacaacggaggctcgtggccagtgctgctgtggctgctggtggcggtgagcgtgaagctggggcggccgcacctggcgcggagagccgtggagctgatggagcagcggctggccaaggacgacttccccgagtactacgacggcaaggccgggcggtacgtggggaagcaggcgcgcaagttccagacgtggtccgtggccggctacctggtggccaagatgctcctggacgacccctctcacctgcgaatcgtggcgctggagggcgacagccactccagggcccccttcctcaagcgctccaactcgtgcccatgacccccaggccccagcacagcacaggccgcatgcattacctttccacgcaccagtttgcccacaccgagactacgagagtaaaaagtttcgtttcgatgcagtgcattcttcttactacataagtatgtataatcaagcggtagtagtgtgatgtgctaccaagaggaggatgacagggacaggataccgagtatgtatgtactgtctccatttgccagatcagatgccactaaactggttaacattttggaatgtcaggggctcacggctagcaatgcgtctggtagctgaggaaatgtaaaaactccatgtgctgatatactgtttcttagacctgacggcatgcggtcctggtgctgataaaaagctattgatattcaccatcttcatgttagcttctgtagctgctggagaagtacacgctggacaggaccggccctgccgccctggtggctacttctccagctggaccccggcctggccctgctggccacacgctatcggctatcctctcccctctatccttttcttcactccccccacacactgtcactgccagcctccccttcgcttcgcttagctcgccgtcaccatggcgacctccaccttctctccgcgccccgccaccctcaagcccctgcgggcacgcgccaagcccgccggcctccagctccacctcctccccttcccgcgcctccgcgtcgcctgcgccaccgccgccggggaggcgccgcccgttgagcagcgggacgaggtggagccggcctctgccgcggcatccaacgggactgccgttaaggtcgaggcgtccgccgcgaagcccgagtccccgcccgcgcccgcgccggtcccggccttccgcgacgccaggtgggtcaacggcacctgggacctcaccaagttcgacaagggcggcggcgtcgactgggacgccgtcatcgacgccggtgagggctcctccttcctagtatctctatcctatgtggaaccaggattggattcacatgctggagcgggaattgctgcctgtctgtcatagtgccatcgccatgctaatatgctatcctagattggtggatggctgcggcgtgcgccaccaacctgattttttctgtggttgtagagctttgaaaagtctggtggttcaagatgaatttccagtttaggattaggagaaattaagaaggaatttgacttgctatagatttaaacccacccacccgatcccccgagatgttagctggctggttgggactggggagacgaatacaagagggaagatgagtgaactggctagaaaaacagagtcctgcatgtacaggacacgcaacgcatgtgtaaactcagacatttgttgctttgctacgatgagtgacagatagacaggcaactgatgccaatagctccatctttgtttgat

SEQ ID NO: 127069 - DNA, 1686 bp, Zea Mays
gtataatcaagcggtagtagtgtgatgtgctaccaagaggaggatgacagggacaggataccgagtatgtatgtactgtctccatttgccagatcagatgccactaaactggttaacattttggaatgtcaggggctcacggctagcaatgcgtctggtagctgaggaaatgtaaaaactccatgtgctgatatactgtttcttagacctgacggcatgcggtcctggtgctgataaaaagctattgatattcaccatcttcatgttagcttctgtagctgctggagaagtacacgctggacaggaccggccctgccgccctggtggctacttctccagctggaccccggcctggccctgctggccacacgctatcggctatcctctcccctctatccttttcttcactccccccacacactgtcactgccagcctccccttcgcttcgcttagctcgccgtcaccatggcgacctccaccttctctccgcgccccgccaccctcaagcccctgcgggcacgcgccaagcccgccggcctccagctccacctcctccccttcccgcgcctccgcgtcgcctgcgccaccgccgccggggaggcgccgcccgttgagcagcgggacgaggtggagccggcctctgccgcggcatccaacgggactgccgttaaggtcgaggcgtccgccgcgaagcccgagtccccgcccgcgcccgcgccggtcccggccttccgcgacgccaggtgggtcaacggcacctgggacctcaccaagttcgacaagggcggcggcgtcgactgggacgccgtcatcgacgccgaggccaggagaaggaaatggctcgaagactacccggaggcgacgagcacagacgatgccgtcgtcttcgacacctccattatcccgtggtgggcatggatgaagcggttccaccttcctgaagccgagaagctaaacggtcgggccgccatggttggcttcttcatggcctacttcgtggacagcttgacgggcgtgggcctcgtcgaccagatgggcaacttcttctgcaagacgctgctgttcgtcgccgtcgccggcgtgctgctggtcaggaagaacgaggacgtggagtcgctcaagaagctcatcgacgagactacgttctacgacaggcagtggcaggctacctggcaagatgacccaaccgaggggccaaagaattagttcggcgttgggggtgcaaacgcagaatgctcgcttcttgtggtgtgtctttgcctctttcttcggcccctttttgtttcaccgtttagtcaggcttggaggaactttttgatgaacgtcataatctatctacgtgatcttgtgcaaaaacaaaaggtatgggagtactttctgtgctagagataataatcatgttgcagtttcactggtttatgctttctgtcaacacgcgtcaaggtgctcgtcgaagaagactttgagcaaatcgcaaataatttgatgtcagacatggaattcgctcacatatcgatcaaataaatgccatgtcaaggtactcgtcgaagaagattagtctgaaaccaacctgtgagacacaaagcgaaaaggcatgcctgttgatggttaacttttcacgtactactacttgctttgatctggcatggaattcaagtcaggcatgacacgactgaataaattac

SEQ ID NO: 127070 - DNA, 1828 bp, Zea Mays
gtataatcaagcggtagtagtgtgatgtgctaccaagaggaggatgacagggacaggataccgagtatgtatgtactgtctccatttgccagatcagatgccactaaactggttaacattttggaatgtcaggggctcacggctagcaatgcgtctggtagctgaggaaatgtaaaaactccatgtgctgatatactgtttcttagacctgacggcatgcggtcctggtgctgataaaaagctattgatattcaccatcttcatgttagcttctgtagctgctggagaagtacacgctggacaggaccggccctgccgccctggtggctacttctccagctggaccccggcctggccctgctggccacacgctatcggctatcctctcccctctatccttttcttcactccccccacacactgtcactgccagcctccccttcgcttcgcttagctcgccgtcaccatggcgacctccaccttctctccgcgccccgccaccctcaagcccctgcgggcacgcgccaagcccgccggcctccagctccacctcctccccttcccgcgcctccgcgtcgcctgcgccaccgccgccggggaggcgccgcccgttgagcagcgggacgaggtggagccggcctctgccgcggcatccaacgggactgccgttaaggtcgaggcgtccgccgcgaagcccgagtccccgcccgcgcccgcgccggtcccggccttccgcgacgccaggtgggtcaacggcacctgggacctcaccaagttcgacaagggcggcggcgtcgactgggacgccgtcatcgacgccgaggccaggagaaggaaatggctcgaagactacccggaggcgacgagcacagacgatgccgtcgtcttcgacacctccattatcccgtggtgggcatggatgaagcggttccaccttcctgaagccgagaagctaaacggttctctcaccaagcgcctctctccttttgtcctgtcattttaagctaactgctgcatatgacgggttgctttgaacagcggttggatacgatgtgttcggttccacttcaaaccctagttcttctcgtctgatgcgtgcaggtcgggccgccatggttggcttcttcatggcctacttcgtggacagcttgacgggcgtgggcctcgtcgaccagatgggcaacttcttctgcaagacgctgctgttcgtcgccgtcgccggcgtgctgctggtcaggaagaacgaggacgtggagtcgctcaagaagctcatcgacgagactacgttctacgacaggcagtggcaggctacctggcaagatgacccaaccgaggggccaaagaattagttcggcgttgggggtgcaaacgcagaatgctcgcttcttgtggtgtgtctttgcctctttcttcggcccctttttgtttcaccgtttagtcaggcttggaggaactttttgatgaacgtcataatctatctacgtgatcttgtgcaaaaacaaaaggtatgggagtactttctgtgctagagataataatcatgttgcagtttcactggtttatgctttctgtcaacacgcgtcaaggtgctcgtcgaagaagactttgagcaaatcgcaaataatttgatgtcagacatggaattcgctcacatatcgatcaaataaatgccatgtcaaggtactcgtcgaagaagattagtctgaaaccaacctgtgagacacaaagcgaaaaggcatgcctgttgatggttaacttttcacgtactactacttgctttgatctggcatggaattcaagtcaggcatgacacgactgaataaattac

SEQ ID NO: 127071 - DNA, 3632 bp, Zea Mays
tcaactccgtagggataccctggctgtgcctggtgcctgcccgccgccgccgtcctgcccacccgcccacctgcacgcacccagatgccacctgccgctgccggccgccactgctgccggcggccacgtccgcggcgctgaccaccgcccgcctcgccatgccccgcatcctcctcgcccagttctcccgccgccggctccacgctcacctctcgcgtcccctcgccattctctcgaacgccttctcggcgtccgccgcctcgtctcggccgcgcccgccgccgctcccgccactctctccgctgctcccagcgcgccccgaggacgcgcgcctcgtagccgcgtcctcgtccgccatcgccgccgccttccacgactggttccacgagtcccgcaactccgcttctgcgccgacaccgcccaaggcgctcgacgcgatctacgaggcgctcgcgtccgatgagacggccccgctagaggcgctcccgctctcggagacgctcgtcctcgccgtgctccgccaccatccgagggggttccacaacgacgccgccctgctgctgctccgcctcaagttcttcgactggtcgggccgtcaccggcgctaccaccacacgcgggccgtctaccacaccgtcttccgcctccttagatgcgcgcgccgcaatgccgtccttctcgattggctccaccgcttcttcgacacctccgcgagaggcggccacctgcgtttccacgacacgctcatcatcggctatgccatcgcgggcgacccgcagcgcgggctcaacatcttcggccgcatgcgcttccacggcctcgaccccgaccccgtctcttcacgtatcctcctcaactccctggtcgatgcgtcgatgcacgatcttgccgagtccttcgcccacaaccttgcccccagccccgtcgctacaagcatatgcatcaagagcctctgtcgtcgcgcccgcctcgacgatgccgttgctctcctcgacaccatgccgtttgctgatgcatcccgtggcccggcggctggctgcatcctcaccgagttctgccgccgtggacgttttgcggaggcaagcgagctcgttagtaagtttccatccagtgatgtgtatggtgcgtggatcaatggactctttggtgctggcgagcttgatgctacgatgaagttcctctctgataagaaggaaagtgaaggctacatccttgatgggcggcggtgtgacagccttatttatcgcttgcttgtcaggaacagacttggcgaagtgtatgacttgcttgttcaaatgatggaggagggcattgctcctggcatacgcaccatgaatgctgcgctttgcttcttttgcaaggctggtcttgttgaagtagccatggatttgtataggtcgagagtggagctcgggatcaacccaaacaaagatgtctaccataatctgatcaaggcactgtgccatggtggggagacagaggaagcatgcctggtatttgaggaaactatggaaggagggtacttcccggggcgtcggacatttaccatgctttcaaacgtgctgtgtcaggaggggaagctggacagggtgcgggagctgctaaatagggcagtcaagcaggaagcctgggcagttgactctgttttggccaagtacctcgcggcactatgcaagagtgggaacatggaggcggcatgcgaactgcctcatgtagcaagcagcaagagccatgtgggcttatatcgctatgagtcaacatacaagaacctgattcgagcattggtattgactaagagggtggacgcgctgccaaggcttatactgcaaatgcaagaaatggggcacatcccaagccggagcctctatgtgtcagttgtctgttctttgtgtgaaatgaataggtatgccgaggttcttgatctgttagacaaccagttaatgcggaatgagatccatcccgttgtgtgctacaaccacttcatttctggtgctggtcatgctaagagggcagacatggccaaggcgatatatgaccgaatggaggcttcagggattgaaccatcaataacaagcaacgtgcttcttctcattagttatgtaaggagcaaaaatctcgggggtgcacttaatttttttaacctcgttcgtcggaagaaaacaccttgtgccaggttatataatgtatttatatctggcctatgtgaagttaggaagcctgagcaggcaatgatgttctttagggaagcaagggataatggtataatcccaagcatgtactgctacgagaatcttcttctcttgctgtgctctgttagcgattataccaatgctgtaaaggttgttgatgatttcagagaaacgggtcgccctgtttcagctttcttgactaatgttcttctgttgcacacattgatgggccacaagcttctgcaggcttttttacgttcaagagataaatcaaagcctctagaactgaaaggtgaagatatccaaggtcggaaggcaggaaggctcttgattggtgatctagttgcctcgtttgcaagtggtatcagaaacatgagtgacttagagcatttgggagaggagatggaaaagtattttcctgttgatatttacacttataacatgctgttacgagggttctctatggcaggaaggatggactctgcctgtaggttgtatgaaaggatatgcaggcaagggtatcaaccaaatcgatggacttttgatacaattgtgcatgggttctgcaagaatggtgacataattgaagctcagaggtggatggatgcattgtatcgaagtggtttctatcccacttggtacactatgagggtatacaacaatttgttgttgcgagcacaagacaagaagatcatttctttgtatgagtaacgatatctatttcatattcgactggtggtctgctctctgccttgatcctattatgcagctgacacaggtgtttacctggataaagttgcttattaactttatcgccatgcacatgggatctacaaatggcttccctgaccttgtgcagtgctcctcgccctcaagatgagcacatcctcagatgcttattgcaggcattctcttggaagatcaaatatactcttcgtagacatgtactccaagatttaacacttctttttaaggaagcgcatctcatctatcatcacctgatgtctgggatgcttctgggatatcagtttacgtgtagcatggagttctcctttgactttgatgtatctatcagtggtactcaatttttgcgaaaaggtcctctaatgtaatggttaagacttccgagcagcacttataggtctcgggttcgatccctcttgagaacgaatttcgggcttagctaaaaaaaatctcctctatatgtcccatccgctctcggagatcgatatcaaacgcgtcaccctccagctgggccgttgtagagtgggcaattgatcagcccgttagtgatggagggcagagtttgagggttttctcggtcgggatcatgtactgggagaacggtctttccctcctctgccgagtttttttagttctcatttttgctgtagaattatacattgtgcctgaagtttcaaggttcctggcattcaatatttt

SEQ ID NO: 127072 - DNA, 3622 bp, Zea Mays
tcaactccgtagggataccctggctgtgcctggtgcctgcccgccgccgccgtcctgcccacccgcccacctgcacgcacccagatgccacctgccgctgccggccgccactgctgccggcggccacgtccgcggcgctgaccaccgcccgcctcgccatgccccgcatcctcctcgcccagttctcccgccgccggctccacgctcacctctcgcgtcccctcgccattctctcgaacgccttctcggcgtccgccgcctcgtctcggccgcgcccgccgccgctcccgccactctctccgctgctcccagcgcgccccgaggacgcgcgcctcgtagccgcgtcctcgtccgccatcgccgccgccttccacgactggttccacgagtcccgcaactccgcttctgcgccgacaccgcccaaggcgctcgacgcgatctacgaggcgctcgcgtccgatgagacggccccgctagaggcgctcccgctctcggagacgctcgtcctcgccgtgctccgccaccatccgagggggttccacaacgacgccgccctgctgctgctccgcctcaagttcttcgactggtcgggccgtcaccggcgctaccaccacacgcgggccgtctaccacaccgtcttccgcctccttagatgcgcgcgccgcaatgccgtccttctcgattggctccaccgcttcttcgacacctccgcgagaggcggccacctgcgtttccacgacacgctcatcatcggctatgccatcgcgggcgacccgcagcgcgggctcaacatcttcggccgcatgcgcttccacggcctcgaccccgaccccgtctcttcacgtatcctcctcaactccctggtcgatgcgtcgatgcacgatcttgccgagtccttcgcccacaaccttgcccccagccccgtcgctacaagcatatgcatcaagagcctctgtcgtcgcgcccgcctcgacgatgccgttgctctcctcgacaccatgccgtttgctgatgcatcccgtggcccggcggctggctgcatcctcaccgagttctgccgccgtggacgttttgcggaggcaagcgagctcgttagtaagtttccatccagtgatgtgtatggtgcgtggatcaatggactctttggtgctggcgagcttgatgctacgatgaagttcctctctgataagaaggaaagtgaaggctacatccttgatgggcggcggtgtgacagccttatttatcgcttgcttgtcaggaacagacttggcgaagtgtatgacttgcttgttcaaatgatggaggagggcattgctcctggcatacgcaccatgaatgctgcgctttgcttcttttgcaaggctggtcttgttgaagtagccatggatttgtataggtcgagagtggagctcgggatcaacccaaacaaagatgtctaccataatctgatcaaggcactgtgccatggtggggagacagaggaagcatgcctggtatttgaggaaactatggaaggagggtacttcccggggcgtcggacatttaccatgctttcaaacgtgctgtgtcaggaggggaagctggacagggtgcgggagctgctaaatagggcagtcaagcaggaagcctgggcagttgactctgttttggccaagtacctcgcggcactatgcaagagtgggaacatggaggcggcatgcgaactgcctcatgtagcaagcagcaagagccatgtgggcttatatcgctatgagtcaacatacaagaacctgattcgagcattggtattgactaagagggtggacgcgctgccaaggcttatactgcaaatgcaagaaatggggcacatcccaagccggagcctctatgtgtcagttgtctgttctttgtgtgaaatgaataggtatgccgaggttcttgatctgttagacaaccagttaatgcggaatgagatccatcccgttgtgtgctacaaccacttcatttctggtgctggtcatgctaagagggcagacatggccaaggcgatatatgaccgaatggaggcttcagggattgaaccatcaataacaagcaacgtgcttcttctcattagttatgtaaggagcaaaaatctcgggggtgcacttaatttttttaacctcgttcgtcggaagaaaacaccttgtgccaggttatataatgtatttatatctggcctatgtgaagttaggaagcctgagcaggcaatgatgttctttagggaagcaagggataatggtataatcccaagcatgtactgctacgagaatcttcttctcttgctgtgctctgttagcgattataccaatgctgtaaaggttgttgatgatttcagagaaacgggtcgccctgtttcagctttcttgactaatgttcttctgttgcacacattgatgggccacaagcttctgcaggcttttttacgttcaagagataaatcaaagcctctagaactgaaaggtgaagatatccaaggtcggaaggcaggaaggctcttgattggtgatctagttgcctcgtttgcaagtggtatcagaaacatgagtgacttagagcatttgggagaggagatggaaaagtattttcctgttgatatttacacttataacatgctgttacgagggttctctatggcaggaaggatggactctgcctgtaggttgtatgaaaggatatgcaggcaagggtatcaaccaaatcgatggacttttgatacaattgtgcatgggttctgcaagaatggtgacataattgaagctcagaggtggatggatgcattgtatcgaagtggtttctatcccacttggtacactatgagggtatacaacaatttgttgttgcgagcacaagacaagaagatcatttctttgtatgagtaacgatatctatttcatattcgactggtggtctgctctctgccttgatcctattatgcagctgacacaggtgtttacctggataaagttgcttattaactttatcgccatgcacatgggatctacaaatggcttccctgaccttgtgcagtgctcctcgccctcaagatgagcacatcctcagatggcattctcttggaagatcaaatatactcttcgtagacatgtactccaagatttaacacttctttttaaggaagcgcatctcatctatcatcacctgatgtctgggatgcttctgggatatcagtttacgtgtagcatggagttctcctttgactttgatgtatctatcagtggtactcaatttttgcgaaaaggtcctctaatgtaatggttaagacttccgagcagcacttataggtctcgggttcgatccctcttgagaacgaatttcgggcttagctaaaaaaaatctcctctatatgtcccatccgctctcggagatcgatatcaaacgcgtcaccctccagctgggccgttgtagagtgggcaattgatcagcccgttagtgatggagggcagagtttgagggttttctcggtcgggatcatgtactgggagaacggtctttccctcctctgccgagtttttttagttctcatttttgctgtagaattatacattgtgcctgaagtttcaaggttcctggcattcaatatttt

SEQ ID NO: 127073 - DNA, 3515 bp, Zea Mays
tcaactccgtagggataccctggctgtgcctggtgcctgcccgccgccgccgtcctgcccacccgcccacctgcacgcacccagatgccacctgccgctgccggccgccactgctgccggcggccacgtccgcggcgctgaccaccgcccgcctcgccatgccccgcatcctcctcgcccagttctcccgccgccggctccacgctcacctctcgcgtcccctcgccattctctcgaacgccttctcggcgtccgccgcctcgtctcggccgcgcccgccgccgctcccgccactctctccgctgctcccagcgcgccccgaggacgcgcgcctcgtagccgcgtcctcgtccgccatcgccgccgccttccacgactggttccacgagtcccgcaactccgcttctgcgccgacaccgcccaaggcgctcgacgcgatctacgaggcgctcgcgtccgatgagacggccccgctagaggcgctcccgctctcggagacgctcgtcctcgccgtgctccgccaccatccgagggggttccacaacgacgccgccctgctgctgctccgcctcaagttcttcgactggtcgggccgtcaccggcgctaccaccacacgcgggccgtctaccacaccgtcttccgcctccttagatgcgcgcgccgcaatgccgtccttctcgattggctccaccgcttcttcgacacctccgcgagaggcggccacctgcgtttccacgacacgctcatcatcggctatgccatcgcgggcgacccgcagcgcgggctcaacatcttcggccgcatgcgcttccacggcctcgaccccgaccccgtctcttcacgtatcctcctcaactccctggtcgatgcgtcgatgcacgatcttgccgagtccttcgcccacaaccttgcccccagccccgtcgctacaagcatatgcatcaagagcctctgtcgtcgcgcccgcctcgacgatgccgttgctctcctcgacaccatgccgtttgctgatgcatcccgtggcccggcggctggctgcatcctcaccgagttctgccgccgtggacgttttgcggaggcaagcgagctcgttagtaagtttccatccagtgatgtgtatggtgcgtggatcaatggactctttggtgctggcgagcttgatgctacgatgaagttcctctctgataagaaggaaagtgaaggctacatccttgatgggcggcggtgtgacagccttatttatcgcttgcttgtcaggaacagacttggcgaagtgtatgacttgcttgttcaaatgatggaggagggcattgctcctggcatacgcaccatgaatgctgcgctttgcttcttttgcaaggctggtcttgttgaagtagccatggatttgtataggtcgagagtggagctcgggatcaacccaaacaaagatgtctaccataatctgatcaaggcactgtgccatggtggggagacagaggaagcatgcctggtatttgaggaaactatggaaggagggtacttcccggggcgtcggacatttaccatgctttcaaacgtgctgtgtcaggaggggaagctggacagggtgcgggagctgctaaatagggcagtcaagcaggaagcctgggcagttgactctgttttggccaagtacctcgcggcactatgcaagagtgggaacatggaggcggcatgcgaactgcctcatgtagcaagcagcaagagccatgtgggcttatatcgctatgagtcaacatacaagaacctgattcgagcattggtattgactaagagggtggacgcgctgccaaggcttatactgcaaatgcaagaaatggggcacatcccaagccggagcctctatgtgtcagttgtctgttctttgtgtgaaatgaataggtatgccgaggttcttgatctgttagacaaccagttaatgcggaatgagatccatcccgttgtgtgctacaaccacttcatttctggtgctggtcatgctaagagggcagacatggccaaggcgatatatgaccgaatggaggcttcagggattgaaccatcaataacaagcaacgtgcttcttctcattagttatgtaaggagcaaaaatctcgggggtgcacttaatttttttaacctcgttcgtcggaagaaaacaccttgtgccaggttatataatgtatttatatctggcctatgtgaagttaggaagcctgagcaggcaatgatgttctttagggaagcaagggataatggtataatcccaagcatgtactgctacgagaatcttcttctcttgctgtgctctgttagcgattataccaatgctgtaaaggttgttgatgatttcagagaaacgggtcgccctgtttcagctttcttgactaatgttcttctgttgcacacattgatgggccacaagcttctgcaggcttttttacgttcaagagataaatcaaagcctctagaactgaaaggtgaagatatccaaggtcggaaggcaggaaggctcttgattggtgatctagttgcctcgtttgcaagtggtatcagaaacatgagtgacttagagcatttgggagaggagatggaaaagtattttcctgttgatatttacacttataacatgctgttacgagggttctctatggcaggaaggatggactctgcctgtaggttgtatgaaaggatatgcaggcaagggtatcaaccaaatcgatggacttttgatacaattgtgcatgggttctgcaagaatggtgacataattgaagctcagaggtggatggatgcattgtatcgaagtggtttctatcccacttggtacactatgagggtatacaacaatttgttgttgcgagcacaagacaagaagatcatttctttgtatgagtaacgatatctatttcatattcgactggtggtctgctctctgccttgatcctattatgcagctgacacagcttattgcaggcattctcttggaagatcaaatatactcttcgtagacatgtactccaagatttaacacttctttttaaggaagcgcatctcatctatcatcacctgatgtctgggatgcttctgggatatcagtttacgtgtagcatggagttctcctttgactttgatgtatctatcagtggtactcaatttttgcgaaaaggtcctctaatgtaatggttaagacttccgagcagcacttataggtctcgggttcgatccctcttgagaacgaatttcgggcttagctaaaaaaaatctcctctatatgtcccatccgctctcggagatcgatatcaaacgcgtcaccctccagctgggccgttgtagagtgggcaattgatcagcccgttagtgatggagggcagagtttgagggttttctcggtcgggatcatgtactgggagaacggtctttccctcctctgccgagtttttttagttctcatttttgctgtagaattatacattgtgcctgaagtttcaaggttcctggcattcaatatttt

SEQ ID NO: 127074 - DNA, 570 bp, Zea Mays
atggtgtttgtgatgattacttcttggaacaatccacttgatagcctttcgatggcgggtgggctggaaagcaagcatatacttctcgggcgccttcctggtgcagtagctcagctcctttggaaatggtacctgtttgggtttgatggtcccatgaggataatgatatcccaaagcgaagtatcttctcagccccttcaaagcgggttttctggccccatttgggctttgtttgggtactctagtatttacctcaatacacatggattgagaacaacggttaggatgatgtggcccacagagcttatgcatctggaggacagtagtgactggtctgcattgatgctcaagcctccagagcaggcgcaccacctagtctactgtctcagcaccagggccgtcgatggccatgtgccagggtctcttattaagttcgctccggggcctcatatttctggagacggccctgctcagcgctcagttgtttgccctattcaaaggaacaacgagcagcctcgtgcttctcaactcaagatgaaacgcaagcttccttcttatgctggaacataa

SEQ ID NO: 127075 - DNA, 1360 bp, Zea Mays
aaaaaataatagaattcaggaaatattcctttgattcgagaggagtcctaaaactctacataaaactcgatcaagactacaaaatggacgaacacgaaacctaccctaccaccacacgtccacgcagcccaactcttcgcataatcacatcgcgccggcgggccattggcattcccaccactccaccatcgggggtcgactggggccccatcgccgatgggcttcttccgccggatcgccggcttcttcggcgtgtcgcgggacgacgccgaccactcggactccccgtcctccgcgggcgtcgccgcggaactcccgcgtgacagggcggccgcggcgcacggggcgaggcgcgggttcagcgtccaggttcccgtccccgtccccgtcgagcggcatgggcccgggcccgggcccgtgctgctgccctgcccgcagggggacggcggcgttcagggttttaggtggtatacaaggcagcttagtatggatgaagacggcgacgtggctgatgagttcttggatgaaattatcccagaaagctcagtcaacaacgccaaaagcccagtcggaaggttccaagtgaaatataacacgaaacgaactgctctagcattgaggaagcatgtcattgctgtcgatggcgagatccgccatagcttggaacaccaagggcaactgcggtgggtgtgaccgagtctgttgagcccatatgaaagtgcaggttgggcagaggcaggcgcgcacatgggcgaagcgaatgacctaggttacccatctttgaagtggacctagaggtagttcattgctgatttatccatcgttctccgctcagtgtgttggtacgcctgatctcgaggttattcagacaccttgtaccactagtagtttgtcacgatatacctgaggatagcttccagcctccaggccacgaagggaaagcatgcccaataggagaatttctgggccagaatgggtcctgtaagcggtgcagtggagagtttttctttttctgttggcagtagtgaacgggtttattatatatatgggagatggttcgtgtggatgagactaggctgggaactgaagattgaaccggctgcctccgggagggcgctcctccagataaatctccagtgattcgtgagaggaaacgaacaccgggagcggtgttcagattcctaccgagttcttacatagttgtacattattgaacagctaccgctggacaaattgaatgtgcttggctggcaatggagccaccgaatccgtgcatcagatgatgttggttagccattcattcatgtatgctgttcggccaatctgcgagctgacagactgacggaaaaaaaaaatagaa

SEQ ID NO: 127076 - DNA, 1501 bp, Zea Mays
ccgcctccgcctcccccgccccgcccgcctgcgccctcgcccgccgctgcattttcggtggcctcgccgcgtgcggccgcgagaagtgggaggctgctgcggtcctcgcccgcgtctgcccgtcgtctccacgtgggggcgtgcccggtaccggcgcgacgagaagccttacgcctgttcaagacgtcaggtgttggtatttgggttgcaattgagtgattgggaaacctgattggacagaagcattgttggtcaaccaatgggaagcaatgaccctagcacaccctccaaggcttcaaaggatcaacctccagctaccacatccagtggaacagtttcagtttaccctgaatggcccagctttcaggcataccaagcaattccaccacatgggttcttcccccctaccgttgctgcaaatccacaggcccattcatacatgtggggagctcagcccatggtaccaccttatgggactccaccaccaccttatgtgatgtatccacctggagcagtatatgcccatccctctacacctcctactatgcatccgtttagtcattaccctatgccaacaaatggacatgctgaaactcctggaaccgcgccaagtgctccagaaatgaatgggaaaagtgagcctggcagaacatctgctccatctgccaatgggattacctcgcacagtgagagtggaagtgagagtgagagtgaaggaagtgatgccaattatgaaaatgattcacattcaaaggacaatgatggaaaggaagatggcaattctcagaatagcatatcttattcagcatcacaaggagtgttaaaccaaaccatggcgatgcttccaatacaaccgggcgcaatggttggaggagtttctagctccacagctaacttgaatattggagtgcactactgggaagctccaggttctgcagctgtctctgcaacgcatggcaaagcaccagctggttcagctcggggagaccaatgggatgaaagggaactcaagaagcaaaaacggaagcagtctaatagagaatcggcacgcagatcccggctgcgcaagcaggctgagtgtgaggagcttgggcaacgtgctgaaactctgaggtcggaaaactcgtctctcagggccgagcttgaacggatcagaaaggagtacgaacagctactttcgcagaacgcttcactcaaggaaaagctggggggcagcagtgacccgattcctgatatgaatgaacagaacgacggcaacggcagcgacaagaagcaatctgattccgatgcccagcctgggagcgagtcttgacccgtttagctcaggatccttgggaatgcacattgctatttattttctcgaacatggttgaacagaacataggagaaaaagaattgtttatgtaactcttaccccttgactgcctaatgtctctgacggcatgtatataatgtatgccctcactgctgaactagtactagtaattgaggaattgcagat

SEQ ID NO: 127077 - DNA, 890 bp, Zea Mays
caagaatacacggtacacaccactggttgtctgcttgcttctccccgtctctgttctccgccagaccaaacctgaccaaccccacccactggaccggcccgcgcccgcttggtccagcgccggccctgcctgcagccagccaccgttgtccgttccctcccgcgatccactcctctcgagctctaggggacggaaggaatccggcgggggtggggtgcgagcagggggagggagaagagcagccgcccgccccgcgagggggcaacagctgcccaagaacctgaccggaagagttgtgggagcggcggcggaaagatggggcaggccctgcgcaggctcttcgactccttcttctccaccagggagatgagggttgtgatgcttggtctggatgcagctggtaaaacaacaatactgtacaggcttcacatgggagaggttctttcaacagtccctacagtcggttttaatgtcgagaaggttcagtataagaatgtggcattcactgtgtgggatgtgggtgggcaagaaaaactcaggtcactgtggaagatgtacctgagtaattctgatgcactggtaataactattacttgcaagtgcagagacacatgagtagcttcccattatgtctctttggttcccttgtctttctcaactcttgatatggtgtttactttgtgcattgttcttcctcttccattgtactccctccattcttttttatttgtcgcattttaattcaaaaatgaactagaggacgacatatattcaagaacggagttagtagttaatatccacatcacagccctgcatttttttttttttgcatagggtagcttagtaagtgtcctgcataatagtaatcgaaggtcatttggtcttcttgc

SEQ ID NO: 127078 - DNA, 974 bp, Zea Mays
caagaatacacggtacacaccactggttgtctgcttgcttctccccgtctctgttctccgccagaccaaacctgaccaaccccacccactggaccggcccgcgcccgcttggtccagcgccggccctgcctgcagccagccaccgttgtccgttccctcccgcgatccactcctctcgagctctaggggacggaaggaatccggcgggggtggggtgcgagcagggggagggagaagagcagccgcccgccccgcgagggggcaacagctgcccaagaacctgaccggaagagttgtgggagcggcggcggaaagatggggcaggccctgcgcaggctcttcgactccttcttctccaccagggagatgagggttgtgatgcttggtctggatgcagctggtaaaacaacaatactgtacaggcttcacatgggagaggttctttcaacagtccctacagtcggttttaatgtcgagaaggttcagtataagaatgtggcattcactgtgtgggatgtgggtgggcaagaaaaactcaggtcactgtggaagatgtacctgagtaattctgatgcactgctttgggtttgttgcagatctatgtcgttgattctctggacagagaaaggatcagagacgcgaggcaagagttccagaccattatcaaggaccctttgatggcaaacagcataatcttggtatttgcaaacaaacaggacctgagaggcacgatgagcacggacgaggtcagcgaagggctggggctgcacgacctcaggaacaggatctggcacatacaggggacctgcgcgctccgcggcgagggcctctacgacgggctcgactggcttgcgtccaccctgaagcagctgcaagaatcgggccacgcgacttcggtcgctggcccttccatctgatccagcgcaaggctcagctcggtcagagctttcggttgcatgtggatcggatgggat

SEQ ID NO: 127079 - DNA, 1081 bp, Zea Mays
cggtacacaccactggttgtctgcttgcttctccccgtctctgttctccgccagaccaaacctgaccaaccccacccactggaccggcccgcgcccgcttggtccagcgccggccctgcctgcagccagccaccgttgtccgttccctcccgcgatccactcctctcgagctctaggggacggaaggaatccggcgggggtggggtgcgagcagggggagggagaagagcagccgcccgccccgcgagggggcaacagctgcccaagaacctgaccggaagagttgtgggagcggcggcggaaagatggggcaggccctgcgcaggctcttcgactccttcttctccaccagggagatgagggttgtgatgcttggtctggatgcagctggtaaaacaacaatactgtacaggcttcacatgggagaggttctttcaacagtccctacagtcggttttaatgtcgagaaggttcagtataagaatgtggcattcactgtgtgggatgtgggtgggcaagaaaaactcaggtcactgtggaagatgtacctgagtaattctgatgcactgatctatgtcgttgattctctggacagagaaaggatcagagacgcgaggcaagagttccagaccattatcaaggaccctttgatggcaaacagcataatcttggtatttgcaaacaaacaggacctgagaggcacgatgagcacggacgaggtcagcgaagggctggggctgcacgacctcaggaacaggatctggcacatacaggggacctgcgcgctccgcggcgagggcctctacgacgggctcgactggcttgcgtccaccctgaagcagctgcaagaatcgggccacgcgacttcggtcgctggcccttccatctgatccagcgcaaggttatgtgcgattctgagcacgcaactggacccacttttctctttttcattagtagtatgtgaacaggctcagctcggtcagagctttcggttgcatgtggatcggatgggatgcttgtttggtttgtggctaactgtgccccactttgcctaaggttagtcgttcgaattgagggcgtg

SEQ ID NO: 127080 - DNA, 1047 bp, Zea Mays
atgatgggatggaatggaacacagcggtgtaccaccataaccaccagtcaacggaatgtgtgcgggggtgcttttcattgcccttgctccctccagatgcggccggtgacccgcagcttgagctcctgcctgccgccgcccgagaagaagagcgccatgttcctgtggatgatgagcccgtcgaagctgtcccgcaccttccggtggctgtccctgacgctccgcggcgtgccctgccacgtcagcttccgcccgcccccgcccacctccaggctgtacccgaacccctgcgcctcgctctcctcgcccatgaaccgcaggaacgccatgtacaccggcgccatccccagcacgaacgcctcgaagtgcaggcagaagtgctgcccgaaacacttgaaaaccttgagcatccacgtggcattctccacctcgtacgggttgggcttcacgtaccggtggttgaacgtgcagccctcgtgcaagtccaccttatggtcgttgatgagatgggacaccaggaacgggacgtcgcctgcgatcaggcactcggaacctgcgtacgggcagctgtacggcctgaacctgcagagctcctcgtgcttcagtttgctcttgtatgggtggatctcggtgcatcccgtgctctggtacttgcacggaagctggagttgctctgccaccttctcgagagctaggcacctgatgtttcccagttcctggcgacaggttgggcaatggttctctaccctgtgcttgcaactagagcagatcgtgtggccatttgggcactggagtataggtgggcgcatcgagttggtacacactgggcattcgagcaaatcattcaagccacacagcgacgacaatgcaacattggctagcgatgccgatgtagaccacggtttacttgcagagtctacgtcaagcatgatacccccaagtgattcagaaagcccatcgtcatctccacagtccgactcggggactacagtcacaatgctgcttcccggtgccattgtaaaaagctcctttcaggtccggaagtag

SEQ ID NO: 127081 - DNA, 2231 bp, Zea Mays
catctttaaccgccccccctccctccctctccgtggtcttggaggagctcgctgttctacggctggctgcctgccgcggcgatccctgtctgttcgtttccgtcgcgcgggagccgcggttgcttttgcttgcttgcgttgccgcgagagaatcgtgagcagagagtgtgacctggccttattggcgtcttccgtgggcgggggcgggggcctgggccggggccgttgctggctgtttgttcgttgcccatcgatacactcctcccttgtctcccccgcatgcaatccgtgtgtgtgtgtgtgtgcgctctgcctctgctcgccggcgttggtttcgtgtgtcgcctgcctgtcgtcctcaccgcaacgctactcgttaccagctatcaactagcattgccttctccttccgctacaagaatctgacgagcccccctctccctcccgtcccggcgctgttcccagctcgctcctttcgagagtgtactgtttagtccgcgcgcattgctcggaccgagccaccgagttcttgccgcgcgccgcagcagtagagccattgccgcgttcgctcgcgccgcgcggttcatgcgccaggagtctgaggcggctacctagttaacggcgggggcatgcgtttcatcacaggcggcggcggcggcggagtaggaggaggagtaggaggaggcggaagctcggcggcgcggtcgtacgagcccatggccacggccgacaccacgagcctgcactactggctgcactggcgggtggggctctgtggcctgtgggtgctggcctgcatggccgtcgcgggctacctaatctggcgtcacgagggccccagcgccgaccggcgtcccggcggcgcgggcgcgggcctgtcgtccccgggcgctgcggctgacggcggcaaggagaggtgtcacggggtgctgtacgacgacgaggcgtggcggccgtgcctccgggacatccacccggcgtggctgctcgcctacaggctcatctccttcttcgtcctcctcagcctcctcgtcgtcattgtcatctccgatggcggcagcatcttctactactacactcagtggaccttcattctggtgacgatttacttcgggctcggcacggccctgtccatctacggctgcagcaggttcgccgaggagaacgtcgccgcggcggcggcggcggcggcggcagacatggaggacggcgcgggatacgtcgtcgcccgtggcctggggcctgctgctgctaagccggccttggatgaacgagacggtgccggagaggtcgctgggttctggggctacctgctccagatcatctaccaggcaaatgcaggcgcggtgatgctcacggactgcgtgttctggttcatcatcttcccgttcctcaccgagaaggactacagcctcaacttcctgttgatcgggatgcattcggtgaacgcagtcttcctgctgggcgaggccgccctgaatagcttgaggttcccgtggttccgggtcgcctacttcttcctctggaccgcgctctacgtcgtcttccagtggatcgtccacgcagctacgccgatgtggtggccttacccgttcctcgacctgacatcgaacctggcacctctgtggtacctcgcggtggcggcgctgcagctgccgtgctacgtggtgttctggctgctgatcaaggtgaagcaccacctgctggccaggtgcttcccggtctcgtacgtacgctagctaggggctagggcacaagcaggcaggcccgtcttctccgccgccaacggtgagagcaacgcaagctagctagagaataatatatggcgggtccgggctgtttataatttggtggtggtggtggtggactggtgatggggagtgaggggacgagcgtttcgtgtgcaggtgccctccccgatcaagcgaagaacagaggggagtggcgcgtggtggaagggaaggagatgcgtgcagtttttttacagggggtataaaaactataaaatagtttggtgtacattggaaggaagctaagcatggtggtagtctttatttgagaatttttttgtattttttttgccgtggtggagtggaagtgaacaggagagaggttcagggcagcagggaatggctgtgtatagctttgactgattggatgagattgaaatgaaatgaaatggagaagatactgttccttgacatcttatatttacccgtaccattccatcc

SEQ ID NO: 127082 - DNA, 542 bp, Zea Mays
ctgaatatcctcgctcaaatattacacggcggggagaggcttagcggcaagagatcagcaggcaattcggtatgactggccgccgcagcagcttggtttatgggactgccattgccatatgtgtgtctattctcttgggatccctagcaatgactgcacaagcaggccgttcctctcatcagctgctgagcaaggcgaggtcgtcgtccacaacaagagcgctctatatagccagcaacacatcgagcggctaccacaccgaggtgcagtgcttcgatgaggccgcggacggcggcgacgagaggaggaagacggcggagctgctcacgctgatattctgcaccgcgaagtgctactgccacagcgacaacgccgacgacatctgctactgctgccagaagccgcccacgcaggtctgctacgagacgatcaaggactgccaggcccactgccccgtctgcaaccctaagtgcccggctgcttccggaacggcgggtggatcgcagcagctgcatgctgcagcgaagaacgccaccttatag

SEQ ID NO: 127083 - DNA, 1947 bp, Zea Mays
ctccattgcaggcaggcacatcactagctagtacagaaaatggagcaggccggtgacgagacgccgggagagatcgggcgagaggctgctcgccgtgaagctgcgctccggagcggcggcggagacgccggagagcgcgtagacaaggctgtggtggacggcggagaagacgagcggtttcgcgtgcagcggaaatggaggcggttcttggcccatgtcgggcccggagctctcgtggccattggcttcctggatcctagcaacttggaaaccgacatgcaagctggggctgacttcaagtaccagcttctgtgggtgattttagtcgggatggtcttcgcgcttctgatccaaacactggccgccaaccttggagtgaagacaggcaagcatctcgctgagctctgcagggaagagtacccacgttccgtcaacatctgcctgtggatcatcgcggagctggcggtgatatccgacgacatccccgaagtgctgggcacagccttcgcgttcaacatcctgctcgggatcccggtgtgggccggagtcgtcctcacggtgctcagcacgctgctgctcctcggggtggagagattcggggcccgcaagctggagttcgtcgtggcagctttcatgttcgccatggcggcctgcttcttcggggagctgagctacctgaggccgtccgcgggggaggttgtcgagggcatgttcgtccccaggctccgagggaaaggcgcggcagccaacgccatcgcgctcttcggcgccatcatcacgccgtacaacctgttcctgcactcggcgcttgtgctctccaggaagaccccgcggtcagtgaaaagcatcagggccgcgtgcaggtacttcctcgtggagtgcagcctggcgttcgtggtggcgttcctcatcaacgtggcggtggtcgtcgtcgccgggtccatctgcaacgcggcgggcggcaacctgtccccggccgacgcggccgcgtgcggcgacctcactctgcagtccacgcctctgctgctcagggacgttctggggaggtcgagctccgtcgtgtacgccgtcgcgctgctggcgtccgggcagagcaccaccatcagctgcacgtttgccgggcaggttatcatgcaggggttcctggacatgaggatgaagagctgggtgcggaacctgaccacgcgcgccatcgccatcgcccccagcctcgtcgtctccatcgtcagcggcccgtcgggtgctggcaagctcatcgtcttctcgtcgatggtgctgtcgttcgagctgccattcgcgctcatcccgctcctcaagttctgcaacagcagcaacaaagtcgggcccctcaaggagtccatctacacggtggtgatcgcgtgggcgctgagcttcgcgctcatcgtggtgaacacctacttcctggtgtggacgtacgtggactggctggtgcacagtcggctccccaagtacgccaccgcgctcctctccgtcgccgtcctggcgctcatggccgcctacctcgccttcgtcgtctacctggcgttcaggagggacgcggtgcgcacgtacgtgccggtgtcggagcgggcggaggacggcagcgggtcgcaggcggtggcggcggcggcctccgccgacgacgctgacatgccggcgccgttcaggaaggacctggctgatgcttccacgtagacacggagatgctctcgttcgggcagtgaccatatcgatcaatcctgttcatgcatatgatttgtggatcgtcgtcgagaggcgtgctggctcattcgtctgctcagtgaccgaatttgttcgtgtacgtagattatcataagatcttacacgcagccgcataccaagccacacgaaccttcgtgtacggttttgatatatcccatatccaacagttcatccatgttttacaatatagataatattattcgc

SEQ ID NO: 127084 - DNA, 2224 bp, Zea Mays
cctgtcctgactcctccatgtctctcacttccctcacttctcggctttgacctcggctcgcaatgaactctctcctgcgtccgccgctgccgggcccgacgccgagcctgagcgcgagacgcatggtctcgccgccgccagcgccggtgcgggtcagctcggcggcgctggccggcagcgggcgcagatgccggctggggctggcagtggcggcgtcggcggctccgtcgtggatggaggaggccggggtggccgtgctggaggaaggcgggcggaggaacccgtctgtgtcggactcgtaccgccctgctgggctgccgcggcccaacgccacggtgctggaggcgcaggcgcgggtgtgcacgggccccgcacagacgcgcccgctcggggaggagcaggccatgcgcgtcctcgacactatcctccgctccgcaatgggagaactcaaagaggagccagtctctagtgcacagttaggtgcattctttgcaggcatgacaataagatccaactcgtttccagaggccacacagtggagcgagggtgaacggcgtgccatgagcatattttggccacgccttgtacaaattcttcctccggaggtgaagtttatagcagaccctgaagggacgatcatgggtgcaaatggtttaacagggcctcggtatgttggtcaaggaactggagagatgagactagtcggtgctctgagggaagtgcttgctggtggccatttaggctatgaggaggttcaatgtgtgctaaaggatattttaccaattggaccgagttcagatttgacagtgactagtgaagcattgctggcagcatttttgattggacaacggatgaatagagaaactgatcgtgagctcaaagcgtattgcctagcctttgatgatgaactaggtcctcctctggttgctgacgtcaagtccttgacacactatggtgaaccatatgatggcaatacacggttttttagaagtactctatttgttgcagcggttcgagcctgctatagtgaatcatgcctcctccatggtgttcaatggatgccacccaagggtggaataacagaaggacaaatgcttaaattcatgggcgcaaacatacacttatctccaacacaagccaagatactgttggaggatgagactgctggttttgcatatttgaatcttcaggaagcatgtccaccattatattcaattattgggctcagggagcatattaagaaacggccaccattggctacctctgagaaagttcaacaatttgtgagggcacgggggagagaatcaatggttgcaggattttatcacgaaggctatgaagatccattgcttatgctgatgagaaggagaactgttcatgctggactagttgtgaagggtgaggaaggtgcgctttccttgacaaccaaggaaagatcagcccatgcatcaaaaggactccctgttaaccactgttcagggtttcggacaccaagcggcataaatttctctgagactgatggtattcctagagaaagcttcagggtcattgtgaatgcccaggaacttggttttgaatccactgaaactccaagaactgatagatcaattctaaggaacttggagcttggtctggcagcactaggtggcgaaaaaggagcagcgtatgaccgaatcgttcttaacgcggctatggctgaccacttactaggctgcagcggagctgaggatatcgacgctgcacttgaccgagcgagggaagccattggtagcggtgaagctctgagaaggctcatgagttacataaagatctcgcacaaagtgtcctagtgttgacccgtgagtctgtgaccatgtactgactgtacaattttggcgtgagtcacgactggatatcttcttcgcgttgtctgagtgccttccccactcaatgttacaaagccaccatgaaaaagtatactcccttgccctcaaggacatgtccaaaaaaaacagttgaaaggaaacaatgccttgttggcaaggaatgtgtttttataagatttttgttttgcaccgagagacacgtacagattctcctcttgagatgtccgaatctggttattgtggctattgtgaatactctgcatagcctcatcgtcaatcgtcatccaggttgagaacttgtaaaccgtatttgattttgtttatgaatgtatgtgctcttctttatgttgtgtatcgtg

SEQ ID NO: 127085 - DNA, 328 bp, Zea Mays
taactcccttgtgatgttggtggcatggtggctttggaagcagcggaataattgtgtgtttgagggggatgctcctagtggcaaccagattattcagaatatcaaagacgacgctcagaggtggtgtctcgcgggtgccaaagatctgggcaccatctggccttagtttaggagcagtttttggctgtttttttttatttttatttttatttttattttcttatatttttttgttgtttctctgtactctggtcttctttagaccattggtatttcttctatcttaatatatctaatgcgcagttctcctgcgcgttttagaaaaaaa

SEQ ID NO: 127086 - DNA, 2957 bp, Zea Mays
gttccacatgttcgaccgccctggacaaaggaaaacaccaagttggccagcccaagggccacgctggatccacgtcacgcagtccaacttcttgcagccggaaaagaagtccagccgtccatcacctgctacggaattatcaaaacttgaggcagggaacgctaagctgtgcttgtgctgttattatcctaagcatatagctgcgccgaaaggagggatgttatggcgccattggaggatgacatgtctgctttgcaaatcctcgtttccagccgcccccggggtggcgctgtcaagcttgactcagcatggaaaggacgagagtaattcagaaaagaaaaggaggacatctccacttctaaaaaaggcagaggagaggtgcccagttatccgtagatgaaggcaacagctgcggtgaatacaagagctgatggctatcaccagcacctgcaccggccatgctaaagccatgttgtcattttatgccgccagagtcatagccacctacggatttcccgactaatttcgtcatcaggtaacatacatggggctgtcaatccgagcaatttctgccagccctctggaatatttgaggccggtgtgcgccggacccggacagacaaaaaaaaagaaggagaaataccaaagccataccatacgccacacaaacaaactagtctagtagtattgtttgagatgaggagagcatctttcttggaccaacattgccagctccatctggatgcttggacggacgcattttcctatccagcgtgtcacctcgtgctgatgaggcgcgtacgtacctcggaggccagagcgagaccacacgtgaaatacggctggatttggcagatcaggcaggaaccatctccttctcgttctgaaagaaaaaaagaaagaatgggagcgtgggggcctgttctcgtggttgagctgtccctgcgcatggggcgcgtacgtcatgcgggccccgccacgacagtaggtacacaagatcttcctcctccttcctttgttctccacttctcctcctctctacctgctaccagattaggtgaactagattaagagatgggagctatattataatgccaaatggcagagccagccagtcggtgggtaggtgccatgcagtgcaacggtgacatgctgccatatgcagtgcagcaggatcgagctggctcccatgtcggtctctctcacactctcaccccgcaacagcaacgaaggggttttgtcgctttggcttcaaatgacaggaaggaatcagaatccagtcatatcatcaaatacgagagttcctagcttcatttcagtgtgtgctgtgctggtgtggttgcccagtcggtggaagtgtccatgcatgtgtgatgtgtgcagggcagggctgcatgcaggtaagctaggctgctaggtctggataccttgtgatggacatggacaggatagtggtcatcgggcatcatgcgttcatgcatgtatagtataggtgtgtgtgtcgctgtcagcaaccacagtcacacatgtcttcccgtttagaagctggtacggtctacagtgtgtgtgtcagtgtgtgtgagcactactgatctgactgccaaaaagggaggacaaaaaatggtggtggcgcaagtgagatttgcgatgggccgtgctattagcagcatcgtgggcctggcactggcaagcccactagtaacggcccattttccatgcctcggaaaataatgattgcgcgcgtctttgtaagtgtgtccaattaatcttctctgctcttttctttcttgccttcatcatgcctgcctgcctgcctgcctccctccctccctccatgtctatatatttttttatatatgtatatattatacatgcgcgcacacacacacaaactagagtaagagtaaccccttgagctttgtcaaaagaaggcagagctcagaaagcctaaagcctcgcttatttagcctccagtagcacccctctttctttgtgtgctccaacaaagctctcactcactctcatacacacacgcaccctacactccatttccattgcctgcattcttggttgggcaagaacaagcaggcagagaggtgagaggaggaggagaagaagaagaagcagatgatcatggggctgccggaggtgaagcagaagaagaagaagcggctcgtgcatagcacgcgaggggaagatcgtcacgggcaccaccaccaagacggcagcgaggcctgggtgctgggcctgtccggcgccgggatcgccgccctgccgctgcaccagctcaagcccgtacgcgtcgaggtcaaggccggccgccgacggcacgcggcggccaccgaggacggcgaggaggaggaagagcccgtgacgccgaggggggaagggtggaggataccggcggaggcggtggcgtgcccgcccgctcccaagaagcccaggacggcggtgttcatcgtcagagacaacgccgccgccggcggccgccggtgcaactacgacggcggcgacgtggtcgacgagttcttccgcgtgccggcggatttggaggccgtcttcgtcgcccgcgcagccaaggccaactagctagctagctgcattgtgggcaccaaggggaggactgccagtgtgtgtgtatgtgatgcttgagctgctccaggcaggctggctcaagcagagtgtgatgcatcggctgctgctgctgctgagtgagtgtgatagagtgagtgcacttgtacaaattgtcttctagtgcatgttaatgcaattcctaattacgtgaaatggaattgcgttgaaatggaaaaactgtcattattgtttatcctttgtggactgtgatctttctttcttcttttttggtgcgggaggggtagagggggtggcatcattttgggcataatggatagacctttttttaataaaacataaaaatatatgtatttaatctaacc

SEQ ID NO: 127087 - DNA, 1655 bp, Zea Mays
aaaacttgaggcagggaacgctaagctgtgcttgtgctgttattatcctaagcatatagctgcgccgaaaggagggatgttatggcgccattggaggatgacatgtctgctttgcaaatcctcgtttccagccgcccccggggtggcgctgtcaagcttgactcagcatggaaaggacgagagtaattcagaaaagaaaaggaggacatctccacttctaaaaaaggcagaggagaggtgcccagttatccgtagatgaaggcaacagctgcggtgaatacaagagctgatggctatcaccagcacctgcaccggccatgctaaagccatgttgtcattttatgccgccagagtcatagccacctacggatttcccgactaatttcgtcatcaggtaacatacatggggctgtcaatccgagcaatttctgccagccctctggaatatttgaggccggtgtgcgccggacccggacagacaaaaaaaaagaaggagaaataccaaagccataccatacgccacacaaacaaactagtctagtagtattgtttgagatgaggagagcatctttcttggaccaacattgccagctccatctggatgcttggacggacgcattttcctatccagcgtgtcacctcgtgctgatgaggcgcgtacgtacctcggaggccagagcgagaccacacgtgaaatacggctggatttggcagatcaggcaggaaccatctccttctcgttctgaaagaaaaaaagaaagaatgggagcgtgggggcctgttctcgtggttgagctgtccctgcgcatggggcgcgtacgtcatgcgggccccgccacgacagtaggtacacaagatcttcctcctccttcctttgttctccacttctcctcctctctacctgctaccagattaggtgaactagattaagagatgggagctatattataatgccaaatggcagagccagccagtcggtgggtaggtgccatgcagtgcaacggtgacatgctgccatatgcagtgcagcaggatcgagctggctcccatgtcggtctctctcacactctcaccccgcaacagcaacgaaggggttttgtcgctttggcttcaaatgacaggaaggaatcagaatccagtcatatcatcaaatacgagagttcctagcttcatttcagtgtgtgctgtgctggtgtggttgcccagtcggtggaagtgtccatgcatgtgtgatgtgtgcagggcagggctgcatgcaggtaagctaggctgctaggtctggataccttgtgatggacatggacaggatagtggtcatcgggcatcatgcgttcatgcatgtatagtataggtgtgtgtgtcgctgtcagcaaccacagtcacacatgtcttcccgtttagaagctggtacggtctacagtgtgtgtgtcagtgtgtgtgagcactactgatctgactgccaaaaagggaggacaaaaaatggtggtggcgcaagtgagatttgcgatgggccgtgctattagcagcatcgtgggcctggcactggcaagcccactagtaacggcccattttccatgcctcggaaaataatgattgcgcgcgtctttgtaagtgtgtccaattaatcttctctgctcttttctttcttgccttca

SEQ ID NO: 127088 - DNA, 1105 bp, Zea Mays
atatatgtatatattatacatgcgcgcacacacacacaaactagagtaagagtaaccccttgagctttgtcaaaagaaggcagagctcagaaagcctaaagcctcgcttatttagcctccagtagcacccctctttctttgtgtgctccaacaaagctctcactcactctcatacacacacgcaccctacactccatttccattgcctgcattcttggttgggcaagaacaagcaggcagagaggtgagaggaggaggagaagaagaagaagcagatgatcatggggctgccggaggtgaagcagaagaagaagaagcggctcgtgcatagcacgcgaggggaagatcgtcacgggcaccaccaccaagacggcagcgaggcctgggtgctgggcctgtccggcgccgggatcgccgccctgccgctgcaccagctcaagcccgtacgcgtcgaggtcaaggccggccgccgacggcacgcggcggccaccgaggacggcgaggaggaggaagagcccgtgacgccgaggggggaagggtggaggataccggcggaggcggtggcgtgcccgcccgctcccaagaagcccaggacggcggtgttcatcgtcagagacaacgccgccgccggcggccgccggtgcaactacgacggcggcgacgtggtcgacgagttcttccgcgtgccggcggatttggaggccgtcttcgtcgcccgcgcagccaaggccaactagctagctagctgcattgtgggcaccaaggggaggactgccagtgtgtgtgtatgtgatgcttgagctgctccaggcaggctggctcaagcagagtgtgatgcatcggctgctgctgctgctgagtgagtgtgatagagtgagtgcacttgtacaaattgtcttctagtgcatgttaatgcaattcctaattacgtgaaatggaattgcgttgaaatggaaaaactgtcattattgtttatcctttgtggactgtgatctttctttcttcttttttggtgcgggaggggtagagggggtggcatcattttgggcataatggatagacctttttttaataaaacataaaaatatatgtatttaatctaacc

SEQ ID NO: 127089 - DNA, 123 bp, Zea Mays
ctaattaatacgataatattagatatatggtggcccaattattggaatgggttgtggcaaatgaaagaaacaaggagagataggaaaagttttatttacgggtgtggtttcctagatgtttat

SEQ ID NO: 127090 - DNA, 135 bp, Zea Mays
ctttgcacacaatcatatttgatacccataaaaaatatatgttctatacacatttggatcttctatacacatttagatctcgagatgtctcattccctctagcgaaataagtccaagaaattctgtttgaggcct

SEQ ID NO: 127091 - DNA, 2795 bp, Zea Mays
gtcgacggtctacctgatggcagcaggttccggcggtggaggttttctgggcgacgtcaacgacccatggctgaagccgcggctgctccgcgcggtggtcaccgggcgccttccgcagcctggcgccgccgccgagctctcgccgacggaggtcgcctccatcctcgaggtggtacgcactcacggcctactcacggaggatctcccgggccgcggcgcgctggtgaacccgaagctcgccgaggcgtggcgcgccgccgtggacgcctgggttgagcgtgtcgtggcgctggtggagagcgactcgcaatcgtctagctttcaacttgttattgttatttcctgtacttccatgtctgatttatttgtaagattggctaagttttcgaacttaaagaaagagggatcatcctttgctggaagggttgttgaaccagtgctgcggcttttaaatcaaaatggtctagtagctgtatggtctactcttttcattcttatggcttatttgtttgagttcaaccactcaatggacgaagcaattgatttgctgaggacagttattaaattgtacccatcctctgtaaaccggcactacaataaagttgaatctgctattgcagcaaagattatgagcaatgtaaaaccatctgagaattccccaagtcttacatatactgtttcaatgctccagaaatttgcgagaaccttagcattgttaccttctgtccgagtgtccgaggacagttggtcactgatgattcggaggatactgattgtggtaaacaatcttttgaatgatgctttcattgggcttgaagaagaaaagaaaggccatgatattatgctgctgctagttccacctggaactgatcctctaccaacattgggagatgaagtaatgcctggaggcaatgtgcatatcatgaagaaatttcgtgtctttactgttcctaccatttcagctcttacgctttgctgcagcgtgatgctgactagttattatccagttcaggtcaatgttccaattcatgctttgatagctttgatgcgaagagtgctgttagttgatggatcattgcataacaagctgttcccttctacaacttcattgcatcaagagcttatttgttttgatcttccatcgttacattcaactttcttggatttgctgaatgcaactattaaaggcatgcgaagccaactcttacctcatggtgctagtatcatacggcttataacagagtacttcaaaatagcaaagctgcctactttgaggacaaaaacttatagcattttgcagctgttgctgacctccatgggtgttgggacgtctctgcacctgcttgaggcaacagtccgcaatgcagttgctgatctgaatgatgatggtgaaattaacatgactatgatcaacacaaattcatcgcaattgaccaatgaatcatcatcaaaagtttattcgaagaagaggaagcaagaaccacagatgcaaaactcaaccatctcaggttcagagaaagtagcaatcagcccaaggaaaagaaaaggttcttccataccaattacatcaaagggagtggcccctgaaagtacaggagatgttacactatcaactccacattctgtcaaaatagctgcgcttgaaacattggaagttcttctgaatgtgggaggttcattgcggatggatcgctggaggtcagaagtggacatgctcttaattaacgtggctagaagtgcttgcggcatgggagggagttatgagcaaaagccatccacatttggggagccaaacatatcggacttccaacttgcttcgcttaagggcctgctggcatcttttctttcttctcatgcccgtcctccttatttagccaacggaattgaactcttcagaaaagggaagctagagataggcactaaggttgcagagttttgttcacatgctttgcttgctttggatgtccttgtccaccctcgagccctttctctggaaagaacagttcctgcaagctctgggttcaactacactgcacagaaaaaaacagtttttggtgctggtacacaccagatctcaccatttggggaccagcctcaagcaatggaggtcgaagacatgtacgatgactggctaatatccaacaacaatgaaccaccagaggttccagtgaacggtagtgatgctgtggtaagtaaaggtgtgctggtggaggatggaaagcagctcaatcccatagcagaagatccaaaagtcgacccacccagaatcacagacgcagcacaagatgcaccagcatccaccaagactgatgtcaaggtggtcgatgcagctgcagccacagctgccaagccaaacacagcggagaatccttcgagttccaatgctgtcccctctccagtgcgcacaacagattctgattcacgtaagcatgcgtcatttcccgagcaggatagtcctcatgagaacaaaagcgcagccgtccatccaggtgaagcttctgcgactccaggtgttggttcaagccaccaccgccatgaagcacctgaggcccgttcagccagcttcacggaattgtttggttctgagtctggcatcgaatcagagtccgaagacttgatgccagatatcgtcgacggggaccctgactctgactaggtttgccgtcgtcatttgtgacatggcaatggaaattttgtgatgttcctgttttgttttgagcaaattgtacgacattgccggctgacagatgatgcagtatttgattgatagatatagatggagctaaattttgtga

SEQ ID NO: 127092 - DNA, 1736 bp, Zea Mays
caggacaatccaaccaaccctttccattcccaatcttcccgtctccaagtctccggtctcgaatccctcccttccagaacaagacacctgacgccgccgcccccccgccggccgcacccgtccataccataccataccatacctccggccgctcgtctcctatctcgtcaccttcgcccggcgctcagatctccgccgcgcctctgcctgatccccccacccccattggagggagacacatcccgcgtgggcgcacgaggacctggtttttttatcaaatgcttgacaaaatgcttgcttggtgatgtctggctatgatttgggtcctgtttatcatgcagttggcttctcatggcactcaaacagaagagacgatgcagtttgtgccccattgtgatcatgcagaagtgtcagattcacagtcaacaagttcacaactaaacctgatagagagatcaacagagcatctagcctcatgtgaaatcaacccagtgagcgttgatgatgacaacgacaatgaacatatcgatgccaatgaagaaactcaccttgttattcaggacgttcctcaatgccggatttgccttgatagtgaaggtgatgacttgattgcgccctgccgttgcaagggaacgcagaagtatgtccataggtcctgtcttgataactggagatcaacaaaggaaggttttgcattttcacattgcactgaatgtcgagctgcattctttcttcgtgcaaatgttcctccagatcgatggtggttaagattgaagtttcaacttctggttgttagggatcacacactaatcttctttattgtgcaactggtagttgctttcatgggtatggtgatttacagattttatggagatgaactgcgcgaaatgtttggttatgaagagcacccatatgctttctatgccatggcgatactggctattgttttggttggtttgctgtatgggttcttcattgctataatatgtggacagaggataactgaacggcattaccatgttcttgcaaagcaagagttaaccaaggagtatattgtagaagatcttgaaggagctgaccatgtgccagaccttgatcctagccatgttatagagttgaagatattaggactatattaaacatagctgcatattacatcagataaacattgttgatgaatggggaacagcataccggaaacaaatctcaggttgatgttgcaagaaatacgtacgtcattccacttcacctggagacagtgcaaaatgggcctttgtgtgactgtcgcccataaattcttgtgaagcaaaacacacttgctcattcgaagaacaccatttgaagattctttggttccaatgtaggcctgatagctctcaaacaagataataacattcatcgccgcacatctcaacgaatgaagattatcgtgaaagaagcgctaggatgatggtctcaatggacatttttgtaaagtagtagcatattatattcttttctcccttgcttcagatacacaacaaacatgcaacagccaagatgctaatgccccgtttgttgtacataccctgtaaaacattactgccaaactcgcagtactttgtccttttgattattttcatcgaatcgatgaactaaataatgtaacctggagctggagccgctcaaaagtctacacgcgcttcagaaaacgggattgatgtgaggcttgtgctggatcgcttcactttgctgcc

SEQ ID NO: 127093 - DNA, 1366 bp, Zea Mays
aattaaagtgtagattatatggtgcacttcctttgtttgacagcagagacactagtaaacttactgctctgattcttacatagtagtggagtgacacagtcagtacacaaacagtaacaagagcaggactcgagagttacacttacacctggtaactaatagcagttcatgcattaaccatagccccagcagctagctagctagctaattacccccaccagttgatcgcacagtacagtaacagtaaagttcactttcatggctagtcaccaccacgtctgatctgacctcagttcttccatctcactagcagattactaaacctgaaacaccagaagaagaagaagaaaaaaaaacaaaaacaaaacaaaacaaaagaaggtgttttgcgctgccatggtgacttcgcgcggtctggagctagcagagctggtactggaacatgttctcggggcaggatctgaggaggtcgtccagggcggtggcgccgtcgaaggcgaggcaggggtcggaggaagcggcggcggcggcggcggctgtgagggagacggcgacggcgccgacggcgttggtgttcatgcaggcgaggatgtcgttgagggagccgaggcgcgcggcgagctcggcggtctgggtgcggaggacggcgttctcggcgtccacggcgaggaggccctgcgcggtgaggccgagcgcggtggccacgtgcgcgttctcgcggcgcaggtgcgccgcctgcgcggtcagctcgtcgaggtggcgctgcttgcgcatccgcgaccgccgcgcggactcgcggttggacagcatccgcttcgcgcggcgctgctccatgagcgcgcgcagctcctcctccgtgcccgccgcggcggccagggccgccgttgccgccgagagggagcccgagctcccgctcccgctggaggaagccattcttgcaagagacaaaagagacagagcagctctctgcttcttgatccctggctcgcttacttactagaagcacacactaccacaccacactagcagagatcaaagccgtcttttttctcggcctcgaaattttctttctttcttcttctttcgtaacttaattgacactagtaataaaggtctttgctagcagcagtagggaaaagaggaggacggtagatgctactagatggaagggaaagaggaggaggaggagtgggagagaaggggcgtggctatgatgggggcgagtagttcatgagaagacatagaaccagtagaggaagacgacggagaaggactggaccaggtgggtgcggcgccggagtgtggagttgatcataaaccccgagaggaggatctcactgatcacaggcgacatcaatgaggaact

SEQ ID NO: 127094 - DNA, 1822 bp, Zea Mays
ctctgtccttagcgcagaagcatcaccctgtcttcttcctcgacgccccctgctcctctctctaccgagcccccattctccacggcgtttggcagcagggagcccttctcccccagcaggagcagagcctccatggcgttcgacccctctcctttctcctccccgctcggagctctgccatagcgcacgcaaatcccttccccctccattcctaggcgcaggaacttctcccccacgccgtccagctccaggccggatccaattcgccctatccctgctcgcccagaatttcttgccccaagtccggcaatcccctcgccgtggatttcctcgagcttgcctccccatggccgccaaccatcctgcccctgcccctggtgcgctgggtgcgtagtgctctgacctcgatggacgacggactccaggcacccggagctctatccggtctagcttcgagcaccctctgctccattccttcaccagcgcaccctattccattgagcacatgccgcagggaaggccgtttccccatggtgctgctctccggcgatgcccccaggtccggcgacccctctcctccatggtcgagctcccatggttcagacgccccttccccatcggatccatggcgcaggggagcagcagctcttcctcccctaacctccatttccctgctcggttttgtctttaacctctaggccacgaccttctcccatggcgcgggccctcctctagtccagtgcgcgcaaggagatcctccaatgccgcacccaaggtccgctccagcctccccttgtcttgcggatagccatggcgcctgggtcccctgcatctccctcatcgctcctgctccctatggcgtgctgtagcagtgtcgagctagtcccatcctccatctcgtcgatggctcccctgctgatatccccatggtcacttgcccctgcgtttcccctcatggcgcgctctgcgcaccgttgccggcatgctctacctcgctgtccgccccatctgaatccgagcagcagctcgtgcatcagttccccaatacgtagccatggtggtgctctactcaccatgctaaccacaacagcaagccccaagccactctcctcttcactcggtctgctcgacgaaatgcccctcagtgcacgctactgcccccatgccatgtcacttgcgcgagtgttcgtcaagagcagccgtgtcgtcgatccatgcaaccccgacgtctccgcgtctcgcttcgccgtcgatctgcacagtccccgtcgcaatgccgtcaatccgcgtcctccgtcgatgtcgcgcctcgtgctatgcctatgcgacgcaatgcgagccggtggacagcacatgcgactcaccgatccggccaggttgcttttgttttatttacgatttagtcgatgacatgaacatgtgcgtgaaagtataattgtatgaatggacgcgtgtaaagaagaaactgaagtagaaaagaactcggatatttttatatatatttgataggaaaatatgcaatgcgttgtttgatgcgaaaaactaagttacaaaatgcggattatgttttgggaaatgcgtcaatatgtgtttatgtgaaaagtataattgttctatgcaatgtgctgtgattcgtgattataccgagagtatatttattgatgtgacaagaagtttagaaaatgctagtttgcatagaggatgaattgttaagacttgagtgtcggagttcatatactagtggttacgctccgatgatcgaagtgtctcgagtgcacgccaccatatggttgtatgcgagacgaggttatgcgcatgatgg

SEQ ID NO: 127095 - DNA, 98 bp, Zea Mays
acaggaatggtggcctgtggtcaccaaaggggcatcaaatatggctagtggtctcatgatctctttgcaatcccttggatgtacgattgcttgtttcg

SEQ ID NO: 127096 - DNA, 1790 bp, Zea Mays
cgggcgcgggcgtggagaccgaccaccacggcaccacctcctcctccggttgcctccggcctcgccatccctctgtcctcgacttccctccgtcctcccggtctccagcctcccggaccggaagctccacgtggcgcgacagctcgtctctgtcgtctatggcggcggcagaggtgtactcgccgatcgcggcggcggcggcgcagcagcagcgggagaaggcgacgtcgcagatctggcgggcggtggtggggtggtggggtggatcgacgaaacgccgctcccgccgggacgtccgcgcctacaacaccgtgctacacgcgctctcccgcgcgggccagtcaaacttcctcagcacaaaatttatgatctctaacatgcagtcgccttataatggggctgtagtccctcatgctggccggacaaatcggagattcgactccaggaatgtctccctaagggaggtctcccgtaaagtgccaactggtctgcaattaggggatgcaagcaacttggggatgagcgacgaggagctcatggagcagtgcgatatgggcacgttcaaggcgtccggccccggcggccagcaccgcaacaagcgcgagtccgccgtccggctgaaacaccttcccaccggcatcatcgcccagaaaaggaactatagtgcttcagttaggaggccgataaacctggaagactacactccacctgttgagattcttcagatattacccctgaagtccagcgttagaggaaaagatgttggcccccaaatcggtccaaataactcaaaattttctccagaaatgcaagcattattagacctattgtttgctgttgaaggttctgtatcagatgcagcaaagattttaggcctaagcactggtgctttgtcaagattgattctgtcagatgattctctccgaacagccgcgaatgaactgcgagcttcgaagggaagaaacagaacccagagaggtagcctgaggagaaaccacaaaacggagatttcccagcaatggttcctggatctgaacaagcctggcacaaaaattaggaaaataacaaagcacggggtaaggcttgcctcgatttttcttcttccccagaccctactcatgtgggagccgccaacactcgttatggcgatggaatcccaagcagaggcactcgaccagttagcaactgatgatttattagaaggaaagtttgcactgcttgagacttcatctgttgatgatgatctttcacaactgaaaaaggaattgtctggaagctctttggacgtgggagaacctggaacagctgtggagaatgctactatttgtacaaatagaagatataatgcggactacactacctgggcttatttcatcgcctttgctataactcaagggcacattatggaagatcatagtgttgacaccaatactcgagaaatactagaaatccctgtactgtggtttttcttcaacctgctttggtggcagggtgccattttaggagcatatgagattctctttgtttctggtgtcttgctgaccattgggtcaaaaccaactgtgcagttcttcactaagcctaaggttcacaagtgtgactcatcggaacctgatttatgtgattcgggatgcaatggtgtgcagatgacgcgtccttcagtcatctccaaggctggtggccttgaaagagagaaggattatcgttacactgggagtgatggtaaatgcaagtttgacaagtctaagattattgcttcaattcagaacttcagtgttgtctgtggatga

SEQ ID NO: 127097 - DNA, 2305 bp, Zea Mays
cgggcgcagcttatccaccatccttcttcttccctggccacggccgccaaacagcagtcaacaccaaccgcccccaccccacccccacccccacccactcttctgatcttctccatgtgccgcctccgtctcctcctccgccccatctcgcggcctcatctccatccccttccgcctcccatgtgccgcctccgtctcctccttcccttcttcctcctcctccgccccatcccacacgcgtcccaaccggccgccccctctccggcgctgcaatgcgctctcaacttcacggcgctgctccccttcctcgcgccgccgctgccgtcggacgacgcctcccgctgcgcggtcgccacgcagtccgtcgcctttctcctctcgctccacctcgcggccacatcgtccttcgtgctcccacccgacgcctcctcctgcctgtccccgctccgcgccgcgctcccctacccgctccccgcgtcggcctgcggcctctcgggcctcgacgccgccctcgcctccccgggctgcggcaacgtctccacggtcgccgacttcgacgcgctcgtcccgcccagctcgcgcggggacatcgacgccagctgcgaccgcgacctctccgccgtccctgactgcaccgcctgctccaccgcgctcagcaaggccgccgcggcctatctcctggctggatccccgagcgccaggagtaacaacgtcaccgggtgcgtgcagtacccctccatctacgctggcgccgaggctagcccgcacgggcccgccgacccggccactgcctactgcctctttctactcaaggcgaacccgcctcagtcccacagctccggtgccgccccctgggtctacggcgtcgcattcggctccctcgcggcagtgctgctcctcgccgcagccttgggatgctgcttcgtcgtgaggcgaaggcaggcgcgagatgccgctgccgccctggctgcggacagcaggagcaagcgctctcaggccatggagtccatcagcgccagcaccacgctcgtcaagttcacctacgacgatatcaaggctgccaccgacggattcgccaggaagagtattattggccagggtggctttgggaatgtctacaagggggtgctgcgcgacggtgctgaggtggcggtgaagcggttcaagaactgctccgcggctggggacgccgcctttgcccatgaggtggaagtggtggccagcgtgcgccatgtcaacttggttgcgctgcgtgggtactgcattgccaccacacagagagaaggccaccagcggatgatcgtttgcgacctgatgcataatggcagcttgtatgaccatctgtttgctgccggagaatgccagttagcgtggccggtgcggcagaggattgccattggcatggcaagagggctggcctacctgcatcgcggtgcacagccagccattattcacagggatatcaaagcgagcaacatcttgcttgatgatgaatttgaggccaaggtggctgattttggactggccaagtttgcacctgaagggatgacgcatgtgagcacaagggttgccggaacactaggttatgttgccccagagtatgcactctacggccaattgactgagaagagcgatgtgtatagctttggtgttgtgcttcttgagcttctgagtggaaagaaggcattcatttctctcagcgagggacagagctttgtgctcactgattgggcttggtctttggtgcgaagggggaggacagtggaggtgatccaagagggaatggttgatcctggtccaactaaggtgatggagaagtacgtgcttgttggtgcactctgcacacatccccagttgcatgcaaggccgacaatggagcaggcgctgaagatacttgaggctgattcagtaccaagtcctttgattattcccgagaggccaatccctgttgttgcaaacctggccgagattgagaggtcagccagcagcagtggatcaggtcagctgtttagcccctctggtttccgatcttttattcatgcaaatgaggatgctgctctggtgtctccaaatgacacatgacaatttacttagacaattagtgagatgatatcactataattcactgtgtaccatatttgtttttgtttgctcgattttgttccatcggcttacaaactcatggcaaatattgtatatatcaatttgtagttttgccccaacacaaaaactgaagttcttgggtgacttcattgaacttttttggtgacatttccattgctacatattgaactttccaatctcc

SEQ ID NO: 127098 - DNA, 164 bp, Zea Mays
tataatataccaaacatatagcttaaggatgaatggtcataattcgttatcgttagtgataaataacagtttgtcccctgaattggtgatttcagataaggcaagtgatctacattctcttaccaatcatacttcacacacacacacacaaaagaaaatcgccc

SEQ ID NO: 127099 - DNA, 459 bp, Zea Mays
atgctcagcgacgagcaacaacgtcctcctcgaccgtcctccccttccttgcggagcatcctcctcggtcgttctccccttcctcgcgattgtaggggtctagggtttggcggcgggggtggggcggcaagctcggaggatggatggaggcaacatctggaggtgtcggggctggcggcaggcacaacgtggctcctgcggcgggggacgcggacgggcgtggagctgcatctcagccgctcagggggaggcggcgactgctgcaaatcccgggcatcacgggtgaggcgaaggcgtgttggtggggagtgggaggttgctcatgactcccggatgaggctggcgatgttggacatgtgtggcatgtggcggatgcggatggggcgcgaggtcggcctgcgcgacattcggccaccggcggcggatgcggatggggcgaggaggaccgatgacggatga

SEQ ID NO: 127100 - DNA, 189 bp, Zea Mays
atggtaacaacatcggatctgctccgtagaccactcgaagactcaggcttggaatcagaaacttacggcacgagcctctgcgggtcgcgcgggaacagggaggtcttcctgatgttgttcagggcacagaacagcatcaccaccctctccaaacccaccccgaaaccgccgtgtggcggcacgccatag

SEQ ID NO: 127101 - DNA, 2329 bp, Zea Mays
ttctttactttaaagttactcccactagccccagcccccgcgccgtcccatcacccccaatcccagccttctcctcctcgacgacaccacacgcccccaaaaaatcccccttcgcctcggattcccacgcggccctcgagtcgccggcgcccgccgacgccacagcgaggtggttccgttcaaggcttgggaggcggaagtagggagcgggaggatccgttcgcgtccagcgcccgttgacgcgcccatgtcgggccacctcgatcgcttcgcgcggccatgttttgaagggcgctcaagtcatgatgaatgcagagaccataagtcagactttgaagtctctgaagacgaaaagaagaccagaatgggctctttgaagaaaaaagcaatagatgcatcaactaagattaggcattcattaaagaagaacaggaggaagagtggtagccgggtcctttctgtgtctattgaggatgtgcgtgatctagaggagctgcaagctgttgaagcatttagacaagcactactcttggatgagctgttgcctgcaagacacgatgactatcatatgatgctgagatttctaaaagcaaggaaatttgatatcgacaaagcaaagcaaatgtggatggatatgcttcattggcggagggagtatggcactgatacgattttggaggacttcgaatacactgagttggacgctgttttgcaatattatcctcatggttatcatggagttgacaaagaggggagacccgtttatattgaaaggcttggaaaggttgaccctagcaaacttatgaatgtcacaacgatggatcgatatgtgcgataccatgtgaaggagtttgagaggagcttcttgattaaatttccagcttgctctgttgctgcaaaaaggcacattgattccagcacaacaattctggatgtccagggcgtgggtttgaaaaatttcagcaaaactgcacgtgaattaattcagcgactgcagaaaattgacaatgataactacccagagactctataccaaatgtttattgtcaatgctggtccgggtttccggctactatggaacactgtgaagtcctttcttgatcccaaaactaccgccaagatacatgttcttgggaacaaataccaaagtaagctgcttgaaataattgacgccagtgaattgccggaattccttggtggcacttgtacctgtcctgaatacggaggctgccttaaggctgaaaagggaccatggaaggacccaaacatacttaagatagtccaaagtggtgaggttcattgtgctcgtcaaattgtaactatttccaatggtgaagaaaaaattattacttatgccaaaccgaagcaccattcaatgcgagggagtgacacatcaactgctgagtctggctcagaagctgacgatgctatctcccccaaagctctcagaagttacatacaacatcctaagttgaccccagttcgtgaagaggtcaaaattgtcagggctacgagcttttctactcgtctccctgaatatgatgtacctgttgttgacaaggctgtggatgctacatggagaagagagcagccacgaaagataccattcatgccccaagatgcagactcttctgtgaaaactatgtccaggccatctgattcctcctgggataagatcgttgcaactctgatggcttgtcttatggctattgtaatgttggttcgatcagtcaaagatcttgtcacaaggagattgccatataaaggcgggtcagaagaaatccactctacgctgtacccagaccccatccagaaagaggaattccgtcctccttctccgatccctggatttgctgaagccgacctgttcgccgtggtcttgcaaaggctgggagagcttgaagagaaggttcagatgcttcaagaaaagccttccgaaatgccttgcgagaaagaagagttgcttaacgccgctgtgcgtcgtgtcgatgcattggaagccgaactaattgtaacaaagaaggctttgcacgaggctcttatcaggcaagaggaactgcttgcgtacatcgaccgcaaagagattgccaaggctcagagaaagaagaaagcaatgctttgctactaggacaaggagggagatacttctgcttcctcagaggagatgccaaagatggcgcctgagatgtaaccagcgatccccttcattttcctgacacttgtgaatcttctacaagtttccgttgtaaatcgagaatattctgacatgaataaagtgttttttggcatcatgagctttgctgcctccggtcttgcaatctggttgttc

SEQ ID NO: 127102 - DNA, 2261 bp, Zea Mays
ccagccttctcctcctcgacgacaccacacgcccccaaaaaatcccccttcgcctcggattcccacgcggccctcgagtcgccggcgcccgccgacgccacagcgaggtggttccgttcaaggcttgggaggcggaagtagggagcgggaggatccgttcgcgtccagcgcccgttgacgcgcccatgtcgggccacctcgatcgcttcgcgcggccatgttttgaagggcgctcaagtcatgatgaatgcagagaccataagtcagactttgaagtctctgaagacgaaaagaagaccagaatgggctctttgaagaaaaaagcaatagatgcatcaactaagattaggcattcattaaagaagaacaggaggaagagtggtagccgggtcctttctgtgtctattgaggatgtgcgtgatctagaggagctgcaagctgttgaagcatttagacaagcactactcttggatgagctgttgcctgcaagacacgatgactatcatatgatgctgagatttctaaaagcaaggaaatttgatatcgacaaagcaaagcaaatgtggatggatatgcttcattggcggagggagtatggcactgatacgattttggaggacttcgaatacactgagttggacgctgttttgcaatattatcctcatggttatcatggagttgacaaagaggggagacccgtttatattgaaaggcttggaaaggttgaccctagcaaacttatgaatgtcacaacgatggatcgatatgtgcgataccatgtgaaggagtttgagaggagcttcttgattaaatttccagcttgctctgttgctgcaaaaaggcacattgattccagcacaacaattctggatgtccagggcgtgggtttgaaaaatttcagcaaaactgcacgtgaattaattcagcgactgcagaaaattgacaatgataactacccagagactctataccaaatgtttattgtcaatgctggtccgggtttccggctactatggaacactgtgaagtcctttcttgatcccaaaactaccgccaagatacatgttcttgggaacaaataccaaagtaagctgcttgaaataattgacgccagtgaattgccggaattccttggtggcacttgtacctgtcctgaatacggaggctgccttaaggctgaaaagggaccatggaaggacccaaacatacttaagatagtccaaagtggtgaggttcattgtgctcgtcaaattgtaactatttccaatggtgaagaaaaaattattacttatgccaaaccgaagcaccattcaatgcgagggagtgacacatcaactgctgagtctggctcagaagctgacgatgctatctcccccaaagctctcagaagttacatacaacatcctaagttgaccccagttcgtgaagaggtcaaaattgtcagggctacgagcttttctactcgtctccctgaatatgatgtacctgttgttgacaaggctgtggatgctacatggagaagagagcagccacgaaagataccattcatgccccaagactcttctgtgaaaactatgtccaggccatctgattcctcctgggataagatcgttgcaactctgatggcttgtcttatggctattgtaatgttggttcgatcagtcaaagatcttgtcacaaggagattgccatataaaggcgggtcagaagaaatccactctacgctgtacccagaccccatccagaaagaggaattccgtcctccttctccgatccctggatttgctgaagccgacctgttcgccgtggtcttgcaaaggctgggagagcttgaagagaaggttcagatgcttcaagaaaagccttccgaaatgccttgcgagaaagaagagttgcttaacgccgctgtgcgtcgtgtcgatgcattggaagccgaactaattgtaacaaagaaggctttgcacgaggctcttatcaggcaagaggaactgcttgcgtacatcgaccgcaaagagattgccaaggctcagagaaagaagaaagcaatgctttgctactaggacaaggagggagatacttctgcttcctcagaggagatgccaaagatggcgcctgagatgtaaccagcgatccccttcattttcctgacacttgtgaatcttctacaagtttccgttgtaaatcgagaatattctgacatgaataaagtgttttttggcatcatgagctttgctgcctccggtcttgcaatctggttgttc

SEQ ID NO: 127103 - DNA, 1346 bp, Zea Mays
ttgtttttttgcttggaatatattgggttaatttgttgcatctccagactctataccaaatgtttattgtcaatgctggtccgggtttccggctactatggaacactgtgaagtcctttcttgatcccaaaactaccgccaagatacatgttcttgggaacaaataccaaagtaagctgcttgaaataattgacgccagtgaattgccggaattccttggtggcacttgtacctgtcctgaatacggaggctgccttaaggctgaaaagggaccatggaaggacccaaacatacttaagatagtccaaagtggtgaggttcattgtgctcgtcaaattgtaactatttccaatggtgaagaaaaaattattacttatgccaaaccgaagcaccattcaatgcgagggagtgacacatcaactgctgagtctggctcagaagctgacgatgctatctcccccaaagctctcagaagttacatacaacatcctaagttgaccccagttcgtgaagaggtcaaaattgtcagggctacgagcttttctactcgtctccctgaatatgatgtacctgttgttgacaaggctgtggatgctacatggagaagagagcagccacgaaagataccattcatgccccaagactcttctgtgaaaactatgtccaggccatctgattcctcctgggataagatcgttgcaactctgatggcttgtcttatggctattgtaatgttggttcgatcagtcaaagatcttgtcacaaggagattgccatataaaggcgggtcagaagaaatccactctacgctgtacccagaccccatccagaaagaggaattccgtcctccttctccgatccctggatttgctgaagccgacctgttcgccgtggtcttgcaaaggctgggagagcttgaagagaaggttcagatgcttcaagaaaagccttccgaaatgccttgcgagaaagaagagttgcttaacgccgctgtgcgtcgtgtcgatgcattggaagccgaactaattgtaacaaagaaggctttgcacgaggctcttatcaggcaagaggaactgcttgcgtacatcgaccgcaaagagattgccaaggctcagagaaagaagaaagcaatgctttgctactaggacaaggagggagatacttctgcttcctcagaggagatgccaaagatggcgcctgagatgtaaccagcgatccccttcattttcctgacacttgtgaatcttctacaagtttccgttgtaaatcgagaatattctgacatgaataaagtgttttttggcatcatgagctttgctgcctccggtcttgcaatctggttgttc

SEQ ID NO: 127104 - DNA, 1277 bp, Zea Mays
ccactgaggcacaagcgacagaacttttttcttgataacattgcttaatgtctaaggtattcttatgtttttaggttcttgggaacaaataccaaagtaagctgcttgaaataattgacgccagtgaattgccggaattccttggtggcacttgtacctgtcctgaatacggaggctgccttaaggctgaaaagggaccatggaaggacccaaacatacttaagatagtccaaagtggtgaggttcattgtgctcgtcaaattgtaactatttccaatggtgaagaaaaaattattacttatgccaaaccgaagcaccattcaatgcgagggagtgacacatcaactgctgagtctggctcagaagctgacgatgctatctcccccaaagctctcagaagttacatacaacatcctaagttgaccccagttcgtgaagaggtcaaaattgtcagggctacgagcttttctactcgtctccctgaatatgatgtacctgttgttgacaaggctgtggatgctacatggagaagagagcagccacgaaagataccattcatgccccaagatgcagactcttctgtgaaaactatgtccaggccatctgattcctcctgggataagatcgttgcaactctgatggcttgtcttatggctattgtaatgttggttcgatcagtcaaagatcttgtcacaaggagattgccatataaaggcgggtcagaagaaatccactctacgctgtacccagaccccatccagaaagaggaattccgtcctccttctccgatccctggatttgctgaagccgacctgttcgccgtggtcttgcaaaggctgggagagcttgaagagaaggttcagatgcttcaagaaaagccttccgaaatgccttgcgagaaagaagagttgcttaacgccgctgtgcgtcgtgtcgatgcattggaagccgaactaattgtaacaaagaaggctttgcacgaggctcttatcaggcaagaggaactgcttgcgtacatcgaccgcaaagagattgccaaggctcagagaaagaagaaagcaatgctttgctactaggacaaggagggagatacttctgcttcctcagaggagatgccaaagatggcgcctgagatgtaaccagcgatccccttcattttcctgacacttgtgaatcttctacaagtttccgttgtaaatcgagaatattctgacatgaataaagtgttttttggcatcatgagctttgctgcctccggtcttgcaatctggttgttc

SEQ ID NO: 127105 - DNA, 723 bp, Zea Mays
atgagcgtggtcggcttcgacgtcggcaacgacaccctggtggcggcggcggcacagcagcggggcattgatatgctcctcaacgccgagtccaagcgcgagtcacccaccgccgtcgccttctcccacaacacgcgcctcatcggctaccacgtcgcgtccgcctcgtccgcccatgcccccttctccagcgtcaaacgcctcctcctaggcgccgcggggaggaacccggactcctccctcctccgcgacctcccccgcctccctttctccgtttcccacgtcgccggtggcggcgccgtcgtccacgttgaccgcatcggccacatcgcgctctctccgacccatctcttctccatgctgctcgcctacctcaaccgggccaccgcacagacgtcgtcgctgcggtgctctcccgctccaacctcgacttcctacacatcatcggtcctggcgactccaccgcgcctgcgaatccacgccctcaggcgcgtgattcggacgaagcggatggacgacatcgtggtgtttaccgacgagaaccgcatcctccgcaccgagctgttcgacgaagcgcagaaggtgaccaccgtgtgcgccgtgcccgtcggcatcctgggcaaggatgacggcgccagcgagtccttcctacaggcgccgtcgtgcgacgtggaagggaacctggtgggctaccgcgtctcgcaggagaccgcgacatactga

SEQ ID NO: 127106 - DNA, 523 bp, Zea Mays
cccttttcatttttcttccccatcttggagaagaagaaggcccgacgctctcaccgctgccaccaaaatcgcacgcgagccccaagagatccccaaaccctacacctgcccgccggcgcactcggggaccgtcgaatcgagcaggttgacggaggagagggagcctcgaagatgttccggaaccagtacgacaccgacgtgacgacatggagcccccaggggcggctgttccaggtggagtacgccatggaggccgtcaagcagggctccgcctgcgtcgggctccggtcgagcacccacgccgtcctagccgccgtcaacaagcccgcctccgagctctcctcctaccagcggaaggtgttccgcgtcgctgaccacgccggggtcgctctcgccggcctcaccgccgacggccgcgttctctcgcgtttcctccgcaacgagtgcatcaaccactccttcgtctacgaggcgccgctccccgtctccaggctcgcgctcaagctcgccgacaaggcgcagg

SEQ ID NO: 127107 - DNA, 1419 bp, Zea Mays
tcgtctcgtttcagttcctcgtcgccctcgccacttcgccgccgccgctttggctccacccagtccgcttccggcatccgcccatggctgcggcccccgcccgccacctcgccgcggccttcacggccgccgctgcgcaccagcgcgtcgcgttcaggcgcgtccaggtccgggccccggtgtccgcctctctctccttcccgccgcgccatcccgcgacatttcgcggcagggccagcctcgcctgccccgccgccgcctctctatccgtcccctccggcgccgcgcctccgggctccgtgccattcaacctcctgccgcccgactccgaccctttcatcgagtgggacccgcccccgggcgactccgccccctcgccgctcgctggcggcggtgctgccgggggtgccacgctggtcgtgctgctcggctggctcggcgcgcgccagaagcacctgcgccgctacgccgacctctaccgcgagcgcggggtcggcgcggtgcggttcgtcgtgcccgtgcgcgagctcgtcggcctcgacctcggccgccgcgtcgagcgcagggtcgccgacctctccgagcaggtcgccgcgtggtgcgacgccgatcggcgccgcacgctcctcttccacaccttcagcaacaccggatggctcgcctatggtgctgtactggagaatttacaatcaagagctgacctaactgagagaataagaggatgtattgtagactctgcaccagttctagagataagaccagaggtctgggcggccgggttctctgctgcaatgttaaagaaaagcagttccatgactggtcctacgactgaatctcttgatgggcctgttgtaaatggcaccttgaacagagttggctccaatgtgacgcaaccttcatggggtgaatgttttctcctgtcaactctgcggaaattcttcgagattgttctttacgtacctgatgtaaacaagcggctgtgcaaggttctctcggtgctttcagagcagcagcctccttgcccgcagttctacctgtacagctcggccgaccgagtcatcccggcggagtgcgtggagcgcttcgtggagtcgcagaggtccctcgggcgcagcgtgttcgcccacgacttcgtctcgtcgccgcacgtggaccactaccggagcttcccccacgtgtactccgccaagatcgacgagttcctcaaggtctgctccacggtcgaggtgtcatgaccaacaggcagggccgtcgaatctatctgtgtttggtctgttactctgttctgagaatggataggtgtttctttgccactcagaaaatctgatggtaggctcccaaagatgtttgcctgaggttattgagatactgtatgcttgctttgtttgagcctgttcgctggctggttgcagcgctgtg

SEQ ID NO: 127108 - DNA, 813 bp, Zea Mays
atggccatggaggaggggtcaggagcggtggagaaagggccggccgtgggcacggtggctgacgcctccgccagcgtcatcggcgaaggcgccgtgaaggaggaggccgggggcagacggcagccaccggccggctacgcggccgtcgtgatcggcggcaccttcgaccgcctgcaccagggccaccatctcttcctgaaggcggcagcggagctggcgagggagaggatcgtggtcggcgtctgcgacggccccatgctcgccaagaaacagtacgccgacctgatacaaccgatcgagaagcggatgcagaatgccatggattatattaagttcataaagcccgaccttgatgttcgtgtggagcccatcgtcgaccctttcggcccatccatcgttgaccaaggccttgaggccatcattgtcagcaaggagacgttgccgggaggacacgctgtcaacaggaagagagcagagagagggctcactcagttgcagatcgaggtgatagagctggtgccagaggagtcgacgggggacaagataagttccacggcattcagaaagatggaagccgagagggcgctgcagcaacagaataaacaagatgatacagcagtaggcactccggcaataaactggaggtgcgctagaaacagttgggaaattctggatgatgatcttacaagcatagcaaaagacagcagttcagtactttttgtggcggccctcagacatccaaggaaggattctgcagcattagctctcaagcctggcagggcgaaagctcttaggcggcaactgcgaatgtag

SEQ ID NO: 127109 - DNA, 4836 bp, Zea Mays
gcgcattggggtgccaggaattttcctcgcctagtcttttttttccctttctgagccaaacggaagcgccattaaaccatctctctcccggcactcccacgctcgctgcctttctttggctggcagccgctggctccccacctgtccctctccctcacacccttttccccccgtggcttctctcgctgccgcccctccgcaataaaccgctgccagcccgagcggctccatcgccccgctcgcgcttttcggagtgccaaaggccgtgattccagcgctgctttttttggaattcccgaccttcttcctctcctcgtcgtctcattgccattggagctagcgtctcttgcacagagacaggcccagggaggccgcgatggcgaacctgacgaacggctttgcgagcctccattgcgcaggggcgatgcatgtggacaaagggcacatgcaagcatcgggactgccttttctctctttcagaagatgcgcccagcttgatatctccagactaggtagcgtgcctcgtttcatgggcgcaacatctgctactgtctcccaacatcatgtgaggcagaggatcagcgccatcagagcctctactctttcctgcctgcaagacgatgccacaaaattctttgattttgtggttattggcagcggtgttgctggcctaaggtatgctctggaagtttcaaagcacggctctgttgctattatcaccaaggcagagcctcatgagagcaacacaaactatgcacaaggcggtgttagtgccgttctatgcccctcggattctgtagaaagtcacatgaaagacacaattgttgcaggggcttatttgtgcgatgaagagattgtcagggtagtttgcacagaaggtccagagcgtgtcaaggaactaattgccatgggtgcctcattcgaccatggtgaagatggtaggctgcaccttgcaagggaaggtggtcattctcacaacagaattgtccattctgccgatatgactggaagagagattgaaagagcactgcttcaagcagttcacaatgatgataacatatctttgtttggtcatcactttgctattgatctattgacatgtcagaaaaatggtgaaatctattgctatggagtggattcaatagacattgaaacccagaaggtagtccgcttcatctcgaaagtgacattgcttgcatcaggaggagctggccatatatatcccacaaccaccaatccaccggtagctactggggacggaatcgcaatgtgtcatcgtgctcaggctgtaatatccaatatggagtttgtgcagttccatccaactgcactttcagatgagggcctgccaataaagccaaagacaagaagagagaatgcatttctcataacggaagcggtgagaggagacggaggaattctttacaaccagtccatggagagattcatgccgatgtacgatgaccgctcggagctggcgccgagagacgtggttgcgaggagcatagacgaccagctgaagaaacgaggcgaaaagtatgtcctcctggacatcagccacagaccaagagacaaggttcttgcccacttccccaacatcgccgccgagtgcctgcggtacggcctggacatcacccggcagcccatcccggtggtcccggcggcgcactacatgtgcggcggcgtccgggcagggctgcagggggagaccaacgtgaagggcctctacgtggccggcgaggtcgcgtgcacggggctgcacggtgccaaccggctagcaagcaactcgctgctggaagcgctggtgttcgccaggagggcggtgcagccgtccatcgacctcatggtggatgccgacggagatgccagaccgtcgctggtggcgaggtgggcacggccgacgctgccgcggtcggtgctgggcgacagcgtgctgtcggacatcgtggggcggacgaggcaggccaggatggagctgcaatcagtgatgtgggagtatgtcggcatcgtgcgctcgacggggcggctgaagcaggccgagtggaggatcggtgacctggagtcggagtgggaggagttcctgttccggcgggggtggaagccgaccacggtgggcgtcgaggtctgcgagatgcgcaacctcttctgctgcgccaagctcgtcgtcaggagcgcgctggccaggcgcgagagccgcggcctgcacttcaccgaggacttcccgtacctggaggagagcaggaggaagcctacggtcatcttcccggccgccgtgcaggagctcacgtggagctccaagccgttgcagaggcagctgcaagcagatgacaatgcatgcagttcatccggctgggccttggggattcgttaattcattcattaatttttaagaactctcagtcgacagcatacacaaaatccagacagttaggctgtagtagcctgcgtatctttgcaattcttgccagttccagctgttgcaacttgtaaacggtgttgttggagctgcattatggtttatgaaccttgatccgtagtatatgtatgtggtgattggctgattgcacaccaactgatgaccattgtgatgtcatgcagaaaaaattgcgagaacttctgaatttcatttaccacacaagtgagttgccatttgacatgtagatacatcatcgctagaagttcagagttcccatcacatttatacacacatgaaacctgcaccaaaaactttgttcagaaatgaagttgtcaggatcagctacatgtctcggcggaacagattgtatgcggagatgagggagcaaatggcgaaaacaacaaatgccacgaaagatatggcaatggagccgttcgccatgctcgggaaggaatcgctcccccagttctcaatcaaatcacttgctcgagcagttgctgatgacgatgacgatatcagaaggtatgctaccacctgaaacggcaaaagaagttaccatcatgagagcaagctcgtccctggaaattgggagtacacatctatattcacaatagttggggatcaggggcggactcaccacccaggcaccgcaggcggtggcctgggctggctcgccagctgcaatggagggcaaggcgcgagcacagtgcacggaagcaagcagcacgtggcacgagcacaggcgtggggatcacaccgtattctcgcctaggctgtcatcagttcctgggtccgccactgttggggatagacgggggagaaacgagctactccaatgcacagtttggttatctagtcgattctattccctaagagacagaccaggtgaccaattgtgattagtcatcgaccagggcgactaaacaacactagtagtcccctatatgtcaggacaaatatatatcatatactatgtatacaagtgcagaaccaaatctacacaagtgcagcagccaagacacaagccagcacccaccagcagcagtagacatacacatcagtaaatggcagaaaagcagaacaaacaggaattgctacaccgctactgcagcagtcaagattcaggaataagatctcaagaaaatggaggaatggaggaagtaccatgatcgtgagctcatcctcgcagaccagcagcagttaggatgggaagggttgcaaattggtccaaaaaaattaatcccaaaaacttaaaccgaagtggctccagccatagtagatgcacccaatgtctcagctgctcagcaattgcaatatgtttcttgctgctcaccccctagccgcctgactaatcatgattagtcatcacatgtctagaaaagtaatcagtctaatcaggttgtagctcctagtcgagtccagagtagcgattaggactactaaccgtgattaattgaatgacttaataacactgcaagtttcaaccctgaaactattgtgtttgtgggatacttgttgaagttagccatctaaactatctatttaacctttcacaaagtcaattctggcactagctatcacgtgcttagaaacagggaggaatggagatatgtcacctcaaatgtaagtgacaaggaggcagtatcaagtttgtgtaactgacaaaataaggagtataattgacactagtacagtgacatcacagtaaaggtgctgcacaccaatattatggtcttgtaactctatgcacttgagcacatattcgttgtgaagacatattaactaagcaagctcatgctcatcaattgctcactcactcaatttacatttgagcatggatgcaatgaacgtgaaaatgagatatgtcgaacatgccaatgatcttgctgatcctcatgtataaagtatcaagagtaagctaggttttatttccaggctgatgttgaatattctctactcaacttcagataagtagcaattaacatccacaaatattcatcacaaatttggatgacgcaaagtttagcacaggataggacgatcagaatgcaggcatttggtgcgtatcatatgaagaggcgatgaactaaccatgccgacttcaatccaggcagcaaatggagggagcataaattaaccaaggagtgtatcagcaatcacaagtaagtcatctccttcaccaccagattaaaaagcctatactgtgcttcagtaagacgacttctaccaattcctcttcctcggtgtaacatcatagcaaggagggcaaccatttgcacagccgtaaacaagcctacgaagagcgagcggtaaagacgacacgaggcagcaggcacacacctgatccatggtgaagtcgaagagatcacgcttgggatggggaatcaaatgcttgttcctcctcatgagctcggcgagcg

SEQ ID NO: 127110 - DNA, 2769 bp, Zea Mays
cgcgcttttcggagtgccaaaggccgtgattccagcgctgctttttttggaattcccgaccttcttcctctcctcgtcgtctcattgccattggagctagcgtctcttgcacagagacaggaacgatcccacaacgttgcctcgttgtttcctcggaattcttgcttctcctgccccttgttcctcgggattaatcttgcttcttctgcctctgctctgtgaaattcgaggtttttgatcaatcccggtgctctggtgtcgttgtttttcaggcccagggaggccgcgatggcgaacctgacgaacggctttgcgagcctccattgcgcaggggcgatgcatgtggacaaagggcacatgcaagcatcgggactgccttttctctctttcagaagatgcgcccagcttgatatctccagactaggtagcgtgcctcgtttcatgggcgcaacatctgctactgtctcccaacatcatgtgaggcagaggatcagcgccatcagagcctctactctttcctgcctgcaagacgatgccacaaaattctttgattttgtggttattggcagcggtgttgctggcctaaggtatgctctggaagtttcaaagcacggctctgttgctattatcaccaaggcagagcctcatgagagcaacacaaactatgcacaaggcggtgttagtgccgttctatgcccctcggattctgtagaaagtcacatgaaagacacaattgttgcaggggcttatttgtgcgatgaagagattgtcagggtagtttgcacagaaggtccagagcgtgtcaaggaactaattgccatgggtgcctcattcgaccatggtgaagatggtaggctgcaccttgcaagggaaggtggtcattctcacaacagaattgtccattctgccgatatgactggaagagagattgaaagagcactgcttcaagcagttcacaatgatgataacatatctttgtttggtcatcactttgctattgatctattgacatgtcagaaaaatggtgaaatctattgctatggagtggattcaatagacattgaaacccagaaggtagtccgcttcatctcgaaagtgacattgcttgcatcaggaggagctggccatatatatcccacaaccaccaatccaccggtagctactggggacggaatcgcaatgtgtcatcgtgctcaggctgtaatatccaatatggagtttgtgcagttccatccaactgcactttcagatgagggcctgccaataaagccaaagacaagaagagagaatgcatttctcataacggaagcggtgagaggagacggaggaattctttacaaccagtccatggagagattcatgccgatgtacgatgaccgctcggagctggcgccgagagacgtggttgcgaggagcatagacgaccagctgaagaaacgaggcgaaaagtatgtcctcctggacatcagccacagaccaagagacaaggttcttgcccacttccccaacatcgccgccgagtgcctgcggtacggcctggacatcacccggcagcccatcccggtggtcccggcggcgcactacatgtgcggcggcgtccgggcagggctgcagggggagaccaacgtgaagggcctctacgtggccggcgaggtcgcgtgcacggggctgcacggtgccaaccggctagcaagcaactcgctgctggaagcgctggtgttcgccaggagggcggtgcagccgtccatcgacctcatggtggatgccgacggagatgccagaccgtcgctggtggcgaggtgggcacggccgacgctgccgcggtcggtgctgggcgacagcgtgctgtcggacatcgtggggcggacgaggcaggccaggatggagctgcaatcagtgatgtgggagtatgtcggcatcgtgcgctcgacggggcggctgaagcaggccgagtggaggatcggtgacctggagtcggagtgggaggagttcctgttccggcgggggtggaagccgaccacggtgggcgtcgaggtctgcgagatgcgcaacctcttctgctgcgccaagctcgtcgtcaggagcgcgctggccaggcgcgagagccgcggcctgcacttcaccgaggacttcccgtacctggaggagagcaggaggaagcctacggtcatcttcccggccgccgtgcaggagctcacgtggagctccaagccgttgcagaggcagctgcaagcagatgacaatgcatgcagttcatccggctgggccttggggattcgttaattcattcattaatttttaagaactctcagtcgacagcatacacaaaatccagacagttaggctgtagtagcctgcgtatctttgcaattcttgccagttccagctgttgcaacttgtaaacggtgttgttggagctgcattatggtttatgaaccttgatccgtagtatatgtatgtggtgattggctgattgcacaccaactgatgaccattgtgatgtcatgcagaaaaaattgcgagaacttctgaatttcatttaccacacaagtgagttgccatttgacatgtagatacatcatcgctagaagttcagagttcccatcacatttatacacacatgaaacctgcaccaaaaactttgttcagaaatgaagttgtcaggatcagctacatgtctcggcggaacagattgtatgcggagatgagggagcaaatggcgaaaacaacaaatgccacgaaagatatggcaatggagccgttcgccat

SEQ ID NO: 127111 - DNA, 2617 bp, Zea Mays
cgcgcttttcggagtgccaaaggccgtgattccagcgctgctttttttggaattcccgaccttcttcctctcctcgtcgtctcattgccattggagctagcgtctcttgcacagagacaggcccagggaggccgcgatggcgaacctgacgaacggctttgcgagcctccattgcgcaggggcgatgcatgtggacaaagggcacatgcaagcatcgggactgccttttctctctttcagaagatgcgcccagcttgatatctccagactaggtagcgtgcctcgtttcatgggcgcaacatctgctactgtctcccaacatcatgtgaggcagaggatcagcgccatcagagcctctactctttcctgcctgcaagacgatgccacaaaattctttgattttgtggttattggcagcggtgttgctggcctaaggtatgctctggaagtttcaaagcacggctctgttgctattatcaccaaggcagagcctcatgagagcaacacaaactatgcacaaggcggtgttagtgccgttctatgcccctcggattctgtagaaagtcacatgaaagacacaattgttgcaggggcttatttgtgcgatgaagagattgtcagggtagtttgcacagaaggtccagagcgtgtcaaggaactaattgccatgggtgcctcattcgaccatggtgaagatggtaggctgcaccttgcaagggaaggtggtcattctcacaacagaattgtccattctgccgatatgactggaagagagattgaaagagcactgcttcaagcagttcacaatgatgataacatatctttgtttggtcatcactttgctattgatctattgacatgtcagaaaaatggtgaaatctattgctatggagtggattcaatagacattgaaacccagaaggtagtccgcttcatctcgaaagtgacattgcttgcatcaggaggagctggccatatatatcccacaaccaccaatccaccggtagctactggggacggaatcgcaatgtgtcatcgtgctcaggctgtaatatccaatatggagtttgtgcagttccatccaactgcactttcagatgagggcctgccaataaagccaaagacaagaagagagaatgcatttctcataacggaagcggtgagaggagacggaggaattctttacaaccagtccatggagagattcatgccgatgtacgatgaccgctcggagctggcgccgagagacgtggttgcgaggagcatagacgaccagctgaagaaacgaggcgaaaagtatgtcctcctggacatcagccacagaccaagagacaaggttcttgcccacttccccaacatcgccgccgagtgcctgcggtacggcctggacatcacccggcagcccatcccggtggtcccggcggcgcactacatgtgcggcggcgtccgggcagggctgcagggggagaccaacgtgaagggcctctacgtggccggcgaggtcgcgtgcacggggctgcacggtgccaaccggctagcaagcaactcgctgctggaagcgctggtgttcgccaggagggcggtgcagccgtccatcgacctcatggtggatgccgacggagatgccagaccgtcgctggtggcgaggtgggcacggccgacgctgccgcggtcggtgctgggcgacagcgtgctgtcggacatcgtggggcggacgaggcaggccaggatggagctgcaatcagtgatgtgggagtatgtcggcatcgtgcgctcgacggggcggctgaagcaggccgagtggaggatcggtgacctggagtcggagtgggaggagttcctgttccggcgggggtggaagccgaccacggtgggcgtcgaggtctgcgagatgcgcaacctcttctgctgcgccaagctcgtcgtcaggagcgcgctggccaggcgcgagagccgcggcctgcacttcaccgaggacttcccgtacctggaggagagcaggaggaagcctacggtcatcttcccggccgccgtgcaggagctcacgtggagctccaagccgttgcagaggcagctgcaagcagatgacaatgcatgcagttcatccggctgggccttggggattcgttaattcattcattaatttttaagaactctcagtcgacagcatacacaaaatccagacagttaggctgtagtagcctgcgtatctttgcaattcttgccagttccagctgttgcaacttgtaaacggtgttgttggagctgcattatggtttatgaaccttgatccgtagtatatgtatgtggtgattggctgattgcacaccaactgatgaccattgtgatgtcatgcagaaaaaattgcgagaacttctgaatttcatttaccacacaagtgagttgccatttgacatgtagatacatcatcgctagaagttcagagttcccatcacatttatacacacatgaaacctgcaccaaaaactttgttcagaaatgaagttgtcaggatcagctacatgtctcggcggaacagattgtatgcggagatgagggagcaaatggcgaaaacaacaaatgccacgaaagatatggcaatggagccgttcgccat

SEQ ID NO: 127112 - DNA, 3594 bp, Zea Mays
caaaggccgtgattccagcgctgctttttttggaattcccgaccttcttcctctcctcgtcgtctcattgccattggagctagcgtctcttgcacagagacaggcccagggaggccgcgatggcgaacctgacgaacggctttgcgagcctccattgcgcaggggcgatgcatgtggacaaagggcacatgcaagcatcgggactgccttttctctctttcagaagatgcgcccagcttgatatctccagactaggtagcgtgcctcgtttcatgggcgcaacatctgctactgtctcccaacatcatgtgaggcagaggatcagcgccatcagagcctctactctttcctgcctgcaagacgatgccacaaaattctttgattttgtggttattggcagcggtgttgctggcctaaggtatgctctggaagtttcaaagcacggctctgttgctattatcaccaaggcagagcctcatgagagcaacacaaactatgcacaaggcggtgttagtgccgttctatgcccctcggattctgtagaaagtcacatgaaagacacaattgttgcaggggcttatttgtgcgatgaagagattgtcagggtaagcgttagcatccgccatttacagtggtttttcaattgcctcaatgttatatagatgcattttacaacagatcgtcgcttgtgaacaaattctttcatgcatttgtacagttgttaattcatatttgttagcagataaataacatttgtgctgtctttcaggtagtttgcacagaaggtccagagcgtgtcaaggaactaattgccatgggtgcctcattcgaccatggtgaagatggtaggctgcaccttgcaagggaaggtggtcattctcacaacagaattgtccattctgccgatatgactggaagagagattgaaagagcactgcttcaagcagttcacaatgatgataacatatctttgtttggtcatcactttgctattgatctattgacatgtcaggttggtatatattttttatgacagtcgttgacctatggtggattatactttcattaggcatgttcttgcatctatttttcttatgttacttttggaggctttccgctatatagttgtgtgcatgttgttttcctaatttcttctgtgaacattgatacctaggactacccttggactacgcgaaagctgtttgcaaactggtgattcgctagattaattatttcttttttatcatctgacttaaaaaaataacaaactaacagaactttgtagaaacaaccaaaatagtggaacctgctcataattaatggccctgcagtctcgagtataaaaaggttttagaacctggttgctgaagtgttcacttttcaggaaacagagtaggaagcgacaaggccaagatatcgtatcttaatggcctgctatcattggcttccggtcaacatgtttgttgatagtgacctcttaaacgcaaccttaaaatgtcgcactcagtgatgcttagcttgcaatatgcctctttcatttgatcatttccccacttctgttctcagattacactcacatctgacatgatgtacttgtttttgtttatttcccagctttcaatgcctttgttcagttaatttgtttaaattacatgaactttacggcctttttacatgtgcgtttgatggaaacaaagccaattacagttatgttctataggtggaaatatgtgctgtgctatatgacatgcctattttgcttctccacttgtaaagtttctacttaaagtgttctttacacccatgacaagttgatgactaatatgagcagttctgttgcagaaaaatggtgaaatctattgctatggagtggattcaatagacattgaaacccagaaggtagtccgcttcatctcgaaagtgacattgcttgcatcaggaggagctggccatatatatcccacaaccaccaatccaccggtagctactggggacggaatcgcaatgtgtcatcgtgctcaggctgtaatatccaatatggagtttgtgcagttccatccaactgcactttcagatgagggcctgccaataaagccaaagacaagaagagagaatgcatttctcataacggaagcggtgagaggagacggaggaattctttacaaccagtccatggagagattcatgccgatgtacgatgaccgctcggagctggcgccgagagacgtggttgcgaggagcatagacgaccagctgaagaaacgaggcgaaaagtatgtcctcctggacatcagccacagaccaagagacaaggttcttgcccacttccccaacatcgccgccgagtgcctgcggtacggcctggacatcacccggcagcccatcccggtggtcccggcggcgcactacatgtgcggcggcgtccgggcagggctgcagggggagaccaacgtgaagggcctctacgtggccggcgaggtcgcgtgcacggggctgcacggtgccaaccggctagcaagcaactcgctgctggaagcgctggtgttcgccaggagggcggtgcagccgtccatcgacctcatggtggatgccgacggagatgccagaccgtcgctggtggcgaggtgggcacggccgacgctgccgcggtcggtgctgggcgacagcgtgctgtcggacatcgtggggcggacgaggcaggccaggatggagctgcaatcagtgatgtgggagtatgtcggcatcgtgcgctcgacggggcggctgaagcaggccgagtggaggatcggtgacctggagtcggagtgggaggagttcctgttccggcgggggtggaagccgaccacggtgggcgtcgaggtctgcgagatgcgcaacctcttctgctgcgccaagctcgtcgtcaggagcgcgctggccaggcgcgagagccgcggcctgcacttcaccgaggacttcccgtacctggaggagagcaggaggaagcctacggtcatcttcccggccgccgtgcaggagctcacgtggagctccaagccgttgcagaggcagctgcaagcagatgacaatgcatgcagttcatccggctgggccttggggattcgttaattcattcattaatttttaagaactctcagtcgacagcatacacaaaatccagacagttaggctgtagtagcctgcgtatctttgcaattcttgccagttccagctgttgcaacttgtaaacggtgttgttggagctgcattatggtttatgaaccttgatccgtagtatatgtatgtggtgattggctgattgcacaccaactgatgaccattgtgatgtcatgcagaaaaaattgcgagaacttctgaatttcatttaccacacaagtgagttgccatttgacatgtagatacatcatcgctagaagttcagagttcccatcacatttatacacacatgaaacctgcaccaaaaactttgttcagaaatgaagttgtcaggatcagctacatgtctcggcggaacagattgtatgcggagatgagggagcaaatggcgaaaacaacaaatgccacgaaagatatggcaatggagccgttcgccat

SEQ ID NO: 127113 - DNA, 2730 bp, Zea Mays
ttgtctgatccgatctctcaaaagtttctttattattattttgtcgccgggatgattagatctcctcctcttgtcgcccaggaacgatcccacaacgttgcctcgttgtttcctcggaattcttgcttctcctgccccttgttcctcgggattaatcttgcttcttctgcctctgctctgtgaaattcgaggtttttgatcaatcccggtgctctggtgtcgttgtttttcaggcccagggaggccgcgatggcgaacctgacgaacggctttgcgagcctccattgcgcaggggcgatgcatgtggacaaagggcacatgcaagcatcgggactgccttttctctctttcagaagatgcgcccagcttgatatctccagactaggtagcgtgcctcgtttcatgggcgcaacatctgctactgtctcccaacatcatgtgaggcagaggatcagcgccatcagagcctctactctttcctgcctgcaagacgatgccacaaaattctttgattttgtggttattggcagcggtgttgctggcctaaggtatgctctggaagtttcaaagcacggctctgttgctattatcaccaaggcagagcctcatgagagcaacacaaactatgcacaaggcggtgttagtgccgttctatgcccctcggattctgtagaaagtcacatgaaagacacaattgttgcaggggcttatttgtgcgatgaagagattgtcagggtagtttgcacagaaggtccagagcgtgtcaaggaactaattgccatgggtgcctcattcgaccatggtgaagatggtaggctgcaccttgcaagggaaggtggtcattctcacaacagaattgtccattctgccgatatgactggaagagagattgaaagagcactgcttcaagcagttcacaatgatgataacatatctttgtttggtcatcactttgctattgatctattgacatgtcagaaaaatggtgaaatctattgctatggagtggattcaatagacattgaaacccagaaggtagtccgcttcatctcgaaagtgacattgcttgcatcaggaggagctggccatatatatcccacaaccaccaatccaccggtagctactggggacggaatcgcaatgtgtcatcgtgctcaggctgtaatatccaatatggagtttgtgcagttccatccaactgcactttcagatgagggcctgccaataaagccaaagacaagaagagagaatgcatttctcataacggaagcggtgagaggagacggaggaattctttacaaccagtccatggagagattcatgccgatgtacgatgaccgctcggagctggcgccgagagacgtggttgcgaggagcatagacgaccagctgaagaaacgaggcgaaaagtatgtcctcctggacatcagccacagaccaagagacaaggttcttgcccacttccccaacatcgccgccgagtgcctgcggtacggcctggacatcacccggcagcccatcccggtggtcccggcggcgcactacatgtgcggcggcgtccgggcagggctgcagggggagaccaacgtgaagggcctctacgtggccggcgaggtcgcgtgcacggggctgcacggtgccaaccggctagcaagcaactcgctgctggaagcgctggtgttcgccaggagggcggtgcagccgtccatcgacctcatggtggatgccgacggagatgccagaccgtcgctggtggcgaggtgggcacggccgacgctgccgcggtcggtgctgggcgacagcgtgctgtcggacatcgtggggcggacgaggcaggccaggatggagctgcaatcagtgatgtgggagtatgtcggcatcgtgcgctcgacggggcggctgaagcaggccgagtggaggatcggtgacctggagtcggagtgggaggagttcctgttccggcgggggtggaagccgaccacggtgggcgtcgaggtctgcgagatgcgcaacctcttctgctgcgccaagctcgtcgtcaggagcgcgctggccaggcgcgagagccgcggcctgcacttcaccgaggacttcccgtacctggaggagagcaggaggaagcctacggtcatcttcccggccgccgtgcaggagctcacgtggagctccaagccgttgcagaggcagctgcaagcagatgacaatgcatgcagttcatccggctgggccttggggattcgttaattcattcattaatttttaagaactctcagtcgacagcatacacaaaatccagacagttaggctgtagtagcctgcgtatctttgcaattcttgccagttccagctgttgcaacttgtaaacggtgttgttggagctgcattatggtttatgaaccttgatccgtagtatatgtatgtggtgattggctgattgcacaccaactgatgaccattgtgatgtcatgcagaaaaaattgcgagaacttctgaatttcatttaccacacaagtgagttgccatttgacatgtagatacatcatcgctagaagttcagagttcccatcacatttatacacacatgaaacctgcaccaaaaactttgttcagaaatgaagttgtcaggatcagctacatgtctcggcggaacagattgtatgcggagatgagggagcaaatggcgaaaacaacaaatgccacgaaagatatggcaatggagccgttcgccat

SEQ ID NO: 127114 - DNA, 2343 bp, Zea Mays
ctggttaggagcgtcggcgtcggcgtcggcgtcagacaacgcagcacatagcaggggccgccaagcagctagccactactcggccgtcagtccgttgttccccaccgctcagtgcagaatcaacggctctagcctcgcctgctgctccctgccccgccgggcgccggccgccggcgcccctcccagtcccgggtagttggcctggccgccccggcctcgctgtccgcgcaccggtcaaccccgcgtcgtgctcatgctcgtgcccgacgcctgggttagattattgcactagtattaggctagactagatgccgctgaagccgatggcaaaactctcaatcacagcgttgttgtttaatgtgctaattgccccgtagatccatctcggcacggcagcttaagaccagtcttctcctgccgcttccttcccttccctttcttcttcggcttggcatctccacccttccttccttcctcgcctggcgttcccaccccctgccacctcgcccgctcccggctcctcccccctcggccgtcctgctctggtcgcggcggagccgccagatctgggccacgggtgccagcccagccggcgggcggcgggacggagggctgcgggatgaagtcgtcgctgaggagccggcaggagccgcggcgggtcagcaacggcgtcatcatcggcgccatgctgctatccctctgcgtcctcagcatcgtcaaggcaaggccgaggaccagctccaggagcagatgaactccagcatccggatggagccggaggagtcgtcgccggccaggacgcccggagaggaggaggaggaggacgacggagagaatggggcgtcggccaccaccaccacggcgcccgcggtgacgaaaacgccggcggccgtcgcggccggcggcaacaggggcaagggcaagcccacgtgctacatgacgagcaagcgctcggagcggtgcgacgcgtccggtgacatccgtgtggacgggaaccgctccaccatctacgtcagcgggatagaccgggagtggaagaccaagccgtacgcgcgctaccacgacccggtcgccatggcccacgtccgcgagtacaccctcaagccgctcccggaggcggcgccggcgccggcgtgcacccggaaccactccgtcccgggcttcctcttctccaacggcggcttctccggcaacctgtaccacgactacacggacgtgctggtgccgctgttcatcagcacgcaccagttccggggccgggtgcagttcctgctgagcgggatgaagccgtggtgggtggccaagttcacgcccttcttccggcagctgacccggtacgacgtcatcgacgtggacaacgaccaggaggtgcactgcttcccccggatcgtggtcggcgccaccttccacaaggacatgggcgtggacccgcggcggtcgccgggccacgtctccgtggtggacttcaagcgcgcgctgcgccgcgccttcggccttccgcgcgaggccgcctcccgcggcggcgccacggggcgcggcaagccccggctgctgatcatctcgcgccgcggctcccggcggttcctgaacgagcgggagatggcgcgcgccgcggcgggcgccgggttcgaggtgcgcgtggcggagcccgaccagcacacggacacggccgcgttcgcggcgctggtgaactcggcggacgtgatggtgggcgtgcacggcgccgggctgaccaacatggtgttcctgccccgcggcgccgtgctcgtccaggttgtgccgttcggcgggctggagtggctcacgggcgtcactttcaaggaccccgccgcggacatggaggtgagctacatgggctacgacgtgacgctggaggagagctcgctgatcgaccagtacccgaggaaccaccaggtgctcacggacccctacgccgtgcacaagcagggctgggacgcgctcaaggcggcgtacctggataagcagaacatccggatggatctcgacaggttcagggccacgctgagggaggccatgagccggttgccgccggctccgtgaccggccgccgtgccccggcccggaggtagataggttggtgtatctatcgtccccgttgtcatgctctcaacaagttgacttaatcttcttcttcttcgtccccctttttatttttattttgtcactagcaagattcttttggtccattgttttgttgtgttgtttactgctgctacataaggaatcaatctcatgggaagatgatgagcagaagcaaagcaataccaggttgctgttataaattatatatatatgcagtgagaaaggccagctgaatccggc

SEQ ID NO: 127115 - DNA, 2175 bp, Zea Mays
caatcacagcgttgttgtttaatgtgctaattgccccgtagatccatctcggcacggcagcttaagaccagtcttctcctgccgcttccttcccttccctttcttcttcggcttggcatctccacccttccttccttcctcgcctggcgttcccaccccctgccacctcgcccgctcccggctcctcccccctcggccgtcctgctctggtcgcggcggagccgccagatctgggccacgggtgccagcccagccggcgggcggcgggacggagggctgcgggatgaagtcgtcgctgaggagccggcaggagccgcggcgggtcagcaacggcgtcatcatcggcgccatgctgctatccctctgcgtcctcagcatcgtcaaggccagatactgcgccacccccttcggcaaggccgaggaccagctccaggagcagatgaactccagcatccggatggagccggaggagtcgtcgccggccaggacgcccggagaggaggaggaggaggacgacggagagaatggggcgtcggccaccaccaccacggcgcccgcggtgacgaaaacgccggcggccgtcgcggccggcggcaacaggggcaagggcaagcccacgtgctacatgacgagcaagcgctcggagcggtgcgacgcgtccggtgacatccgtgtggacgggaaccgctccaccatctacgtcagcgggatagaccgggagtggaagaccaagccgtacgcgcgctaccacgacccggtcgccatggcccacgtccgcgagtacaccctcaagccgctcccggaggcggcgccggcgccggcgtgcacccggaaccactccgtcccgggcttcctcttctccaacggcggcttctccggcaacctgtaccacgactacacggacgtgctggtgccgctgttcatcagcacgcaccagttccggggccgggtgcagttcctgctgagcgggatgaagccgtggtgggtggccaagttcacgcccttcttccggcagctgacccggtacgacgtcatcgacgtggacaacgaccaggaggtgcactgcttcccccggatcgtggtcggcgccaccttccacaaggacatgggcgtggacccgcggcggtcgccgggccacgtctccgtggtggacttcaagcgcgcgctgcgccgcgccttcggccttccgcgcgaggccgcctcccgcggcggcgccacggggcgcggcaagccccggctgctgatcatctcgcgccgcggctcccggcggttcctgaacgagcgggagatggcgcgcgccgcggcgggcgccgggttcgaggtgcgcgtggcggagcccgaccagcacacggacacggccgcgttcgcggcgctggtgaactcggcggacgtgatggtgggcgtgcacggcgccgggctgaccaacatggtgttcctgccccgcggcgccgtgctcgtccaggttgtgccgttcggcgggctggagtggctcacgggcgtcactttcaaggaccccgccgcggacatggaggtgagctacatgggctacgacgtgacgctggaggagagctcgctgatcgaccagtacccgaggaaccaccaggtgctcacggacccctacgccgtgcacaagcagggctgggacgcgctcaaggcggcgtacctggataagcagaacatccggatggatctcgacaggttcagggccacgctgagggaggccatgagccggttgccgccggctccgtgaccggccgccgtgccccggcccggaggtagataggttggtgtatctatcgtccccgttgtcatgctctcaacaagttgacttaatcttcttcttcttcgtccccctttttatttttattttgtcactagcaagattcttttggtccattgttttgttgtgttgtttactgctgctacataaggaatcaatctcatgggaagatgatgagcagaagcaaagcaataccaggttgctgttataaattatatatatatgcagtgagaaaggccagctgaatccggcactggtgttgatttgtaaaccaatactagtacaagccagcattttgtgattattgatagctttgatgccatgatcaagatgtaaaagtacgccagcaaggatcatgcatgatgcatgaaactttttatgtacccccatttctg

SEQ ID NO: 127116 - DNA, 1582 bp, Zea Mays
ggtcccggactcccggttccggcctagaggatctcgttcccggccgtctgccgctcggtcctcacccgtcgccgtcgcccccctcccggtcccggcctcccggccttccaaatcgtcagcgcagggcgcacacgcttgcccgcgccgcccagccagcggcacacgcctgcccgcgccgcccagccgctctcccatagccgtcgcgccgtcccggccctccaagattcagattggtgttttgctggcaccatgtccagtccgtggagccctatgagtttggaggaagaggaagagatccaagagctcgatgccgaggagcagcaggacggtgagcagccgcagcagggtgatgggctgcagcaggggtccacagctgaagcaagggcacaacaaaccggaaagaaacgcgcaagatcagtggccaactcgtctactaagtctgaggcaaagataaaggtcgaggaaagtgcaccaggagctgcgacaggagtgattctgtctcttcgtgaaagtttacaggactgtaaacaaagccttgcatcctgccaggtggaacttgaagctgcaaaatcagaaattgagaagtggcattcagcatttcagagcattccagctgtaccttctggtaccagtccagatcctgtttcagtggtatcttacctcagtaacctgaagtcatcagaggaatcattgaaggagcagctggagaaagcaaagaaaagggaggcagcttttatagtaacatttgcaaaacgagagcaggagattgcagaactgaagtctgcagttagagatttaaaaacacaattaaggccaccgtcaatgcagacaaggagattgttgcttgatccagcaattcatgaggaatttacacgcttaaaaaatcttgtggaggagaaagagaaaaaaataaaggagctacaggacaacgttgctgctgtcaatttcactccatccagcaaactgggaaaaatgctgatggctaaatgcagaacattgcaagaggaaaacgaagagattggggcgatggcatcggaaggaaaaatccatgagcttgggatgaaaatcgccgttctgaagtcgcagaacaacgagctccggaatcaatttgatgttttgtataagcacatggacggcgtgacgaatgacgtggagagatcaaacgaactggtggccatcctgcaagaggagctagaagccaaggagttagaggtgactagactgaaggaggagacgctttcccagaaggaaggcactcaagaagcaccggcaccggcaccagctccggtggaagagggagacggagctggaaacgatctgaagccggcttcagatccgctgcaagtgaagctggaaagttaaggggagacggaggggtggaaacgaccagacggtagtgtgtttgttgagactcccgatgtgcgggaagtcgtagcatattaggccaatcttaactagtagaaccgttcgatttttataatatctatgttcattttagttctatctatatagttacaatataaaacatgctctctatctctcatctagatgtgtacgtatctgtgccgcagttgaagttctc

SEQ ID NO: 127117 - DNA, 717 bp, Zea Mays
gccacattatcttggttatccatgtattccaaatcttaaattctgcttttgtgccagaatcttgtggaggagaaagagaaaaaaataaaggagctacaggacaacgttgctgctgtcaatttcactccatccagcaaactgggaaaaatgctgatggctaaatgcagaacattgcaagaggaaaacgaagagattggggcgatggcatcggaaggaaaaatccatgagcttgggatgaaaatcgccgttctgaagtcgcagaacaacgagctccggaatcaatttgatgttttgtataagcacatggacggcgtgacgaatgacgtggagagatcaaacgaactggtggccatcctgcaagaggagctagaagccaaggagttagaggtgactagactgaaggaggagacgctttcccagaaggaaggcactcaagaagcaccggcaccggcaccagctccggtggaagagggagacggagctggaaacgatctgaagccggcttcagatccgctgcaagtgaagctggaaagttaaggggagacggaggggtggaaacgaccagacggtagtgtgtttgttgagactcccgatgtgcgggaagtcgtagcatattaggccaatcttaactagtagaaccgttcgatttttataatatctatgttcattttagttctatctatatagttacaatataaaacatgctctctatctctc

SEQ ID NO: 127118 - DNA, 640 bp, Zea Mays
gctggccatggaccacgcatatatgcgtctgaccttttttttttcatttgctgtcagttttgtataagcacatggacggcgtgacgaatgacgtggagagatcaaacgaactggtaagcgtcaccgttactgctacgactgtgcactgctgttagtcggttgcctttctctggtgacgaggttttgagctcgcatttttttttcttgtcaggtggccatcctgcaagaggagctagaagccaaggagttagaggtgactagactgaaggaggagacgctttcccagaaggaaggcactcaagaagcaccggcaccggcaccagctccggtggaagagggagacggagctggaaacgatctgaagccggcttcagatccgctgcaagtgaagctggaaagttaaggggagacggaggggtggaaacgaccagacggtagtgtgtttgttgagactcccgatgtgcgggaagtcgtagcatattaggccaatcttaactagtagaaccgttcgatttttataatatctatgttcattttagttctatctatatagttacaatataaaacatgctctctatctctcatctagatgtgtacgtatctgtgccgcagttgaagttctccgactggtctcgttgcc

SEQ ID NO: 127119 - DNA, 4267 bp, Zea Mays
caacgtccgcgcagaaaaaaaaagcaggaaaaaagtcgagaaggaaaacccctaaccctaggcaagggcctcccccgccgtctcgtgtcggcataaaccccagccgtctctcctcgactctccgaggcacggccctgcctctccgcctcgactctgtggtaagcatcgcggcgagggagctccgatggccgggaaaaaacggacccagactgatcgcgcggttctggaggcggtgcctgcctcggacgctatccggaatgaggctgcagctgcggaggcgccggcgaagaagaagctggccatggagcggaagaaggagcggaaggagatggataaggagcgccaccgccagtcggccgaatttgccaagccccagccgccggcagcggagtctgcggctcctgtgaatcccccggccgctccggtggctgtgggaccgggactgcacatgaacgtgttcagagacctggcatcaccagaggcatcggttagagaggctgcagccgaggcgctggtggtggagctccggcaagtgcagaaggcgtacgagaagagcgcgcggaatggggagagggatgctggtgatggggatacgcagatggaggctgagaaggacgacgggctggataactgcgccccatcagtgcgttacgccatccggcggcttattcgtggcatctcttcttctagagagtatgcaaggcaaggatttgctttgggtcttgccgctgtcctcgaatcgattcgggcaatcaaggtggaagcaattatgaagttgatccctaatttattggaacattcatcttctatgaagggaccggaagctaaggacaatcttttggggcgcctgtttggatttggagcaattgagaggtctggtcgtgtgtcacgacagtggtcacgtgacaaaagctcacccattgttaaggaatttgtgagtgtggttgtagaactcggtggcaagaaacgatatttgacggagcctgcagttgctgtgattctggatttagtcaggaagctgcctgatgaagccatactatctgaggttcttgaagttcctggtgttcaagattggtttaacaaagctgctgaggttggagatccagatgcactctttctagctttgaagttgcaagagagaactattgtccagaaggagatatttgggaagctcctgccttatccattcagctcggacaatttttttgccgaacaacatcttagatccattgctgcttgttttaaggaatcttccttttgtcttccacgtattcatagtttatggcttgtcatcacggagatgcttgttcgagaagcaacatctcagcatgatattagcaccagttctggcaagaagcacaaaaagaataagaaagccagctcctgtgaggataacagaaggaatctacgtaatttctgtgaggttataattgaaggatctttgctgctctcctctcatgacagaaaacatttagcatttagtatacttgttagcctcctcccaaaattgtctccttcagctatccaagtagtactgtccagcaaagttgttcagggtttgatggatattttgtcaaatgaatcttcatggttgtataatgccggcaaacattttctgaaagagttaatgagtgttgcaagtcatgacaatgatcggtgtgctgctgtcattatcaacttacagaaatacagtggtggaagatttgactccatgacaaaaacaaaaactgttaaagagctgcttctcaaattccataatgttgaagattgtttgtatcttgtgcaaaatttgatggccctattcgtggatgaagaatctgttacagacgaaccatctgatcaaagtcagacaactgatgataattcagaaaatggcccaactgaagagcaggacctttttagccaagggaatgctgatcttctgaagagctgggtggtgaatacaatttcttgtgttctaaaaaatttaaagcttacttctaaagggaattcagattctgaaatggctaggtgcattgaagaaaagtttcaagtgcaaacggaaatattaaaattccttgctgtccaaggtctgttctcagcatctttaggaactgaggttacatcatttgagttgcaagagaagttcaaatggccaaagaatcccatatccacatcgctacgtaaagaatgcatagaacgacttcaattcttgctggaagatgcacaaaaggatgcatctttacatgttcctaatgaggtcaaatccaatgacttaggctactaccttatgtgtttcattaacaccgtatgcaacatcccctcagtctccctcttcaggatcttgagtggccacgatgataacgcattcaagaaattgatggcagtagaatcaatgcttttccacgaggagagaaaaactggtcctggattggagtctactaagatgcatgcaatgcgttatctccttatacagttactgctacaagttcttctccatccggatgagtattgggaggctgcagttgatgtgactatatgttgcaagaaatcctttcctgtcattgctcaaggtgataactcgagtgcacaagaatccgctgaacacggttcacaggagtctgatgaggatggttttgaggaatctgacgaggatggttcagaggatcccaatgaggaagtttccctagagtttatggatgttcttgtccagactttcctctctattttgcctcatgcatctggacctgtgtgtttcacagttgaacaggtttttcgtgtgttctgtgatgatattacagaaactggtctccttgatatgttgagggtcgtgaagatagatttgaaagaccgtcatcaaacagatagtgatgatgaagatgatggtcgtgttgatattgaagacgatgatgaaactgtaatggaagatgaagaggttggggaaattgataatgttacagatggtttggatgagaatacagatgatgattctactgatgaagatgatttggatcaagatgatttcaacaaaacagtcccgaatgagacaaaaggtggaggcaaaacagaaactactaaagatggggatgattcagatgattcagatggcatggatgatgatgctatgttccgtattgatccttacattgcaaggatattcaaggagcgcaatcttcctggtagtgatactaagcaatcccaacttatgcgattcaagcttcgtgtgctgacgttacttgatatatatcttcagaggaatccagggaaagttctggtgctggaggtgtattctttcttaatgcaagcttttgtaaaatcacatggtgctgatggtactgaacagttcaggcaacgtatttccggcatactgcagaggagggtattcaaagggaacgagtatccaaaaggcgatgccgtcgaatttggtaaactcgagagcttgttggagaaagctctgaggttgacatcgcgctcaagatacaacacggttgcttccgtagcacagaacgccacattttggatcctgaagatcatcaactcgaagcactgttctgagcaggagctcgcacgcgtggttgatctgttccgttcaatcttgagcgattacgacaggaagaaatcgcggctgaagcttggctttgtgaagcaggttgctaagaggaacccttggatagggcagaagctcttcggttttgtcctgcagagggccgaaaacacgaaggcgcagtatcggagaaaccagctgctggagttggcagagttcatactgaaatcatgggccgatggcacgtcagagatgttcttgaaccatctgtctcagctgtgcgggttgatacaagcagccctttcagccgttgccgaaaacaagtcgcgccgcaaggaagtgcgcaacttctgcactgggatcctgcagacggtgctgaagcttggtctcaaagaccagttccagaaagcgttgagtcctgaaacttattccctctgcgaggccaagctaggggctgcgtttaccgccttcaaaaagtgatcatgtgggacaccgattaaattcatttcacacagaccgtggatccttggaagttttataagaagaattagtgtatcttctagtttttgagctcggtgagagtaggatcaatcaaattaatgggtgcttgtgctagacttttagccgcagggagggatgcatgtacaagttgcttgggcccttattggatacaaaatgtttttatgttgttgcgtacgtaaatttgagcaaatattttttttattgaaagagcgtatttggata

SEQ ID NO: 127120 - DNA, 1181 bp, Zea Mays
aaaataaaaaaaataccgttttagttttcagccctaggagttcagaatggccacgggccaaaaatggtggagtttgctaatttgaattcagccaaaaaaggtgcctccaaaaacctgcacggagctccattaatagaagcagtccacccgtggcccgcgcccatctccggccgtccaggcgccgccgtggtggtttccctccgggcccaccgtcccacgcacgctttattacctgccctgccccgcggtcgatccccggctccccgtcctcctccccgacgaagcgaataggccggccccaacgcgccgccgcccaacccagctcgccctccccgtccggccgccccccctcgccgtaatgtcaaggtcctgcgagccacgaaaaccggactggggtttccagctgaacccacacgccgctcccttcgttccgtcctcgacgcccagcttcgcattcgcagctgcatccgagacgctcaaccagacgaccggctcccagaacaagaccggcagcacgaccgacgacgaggccactcctgacaagtccgccgacgccgagtaccatctcccggactcgctgtctctggatttccacgcggagagcctgctggcaaagcccagcgtgtccgccgagcctctgtctctctccagagcggaggccgccgccgccgctgctgctacggcgcccgactcgtcggtacgtttgggcggtggttcgggtgttcatcacctccccggcgccgtgtcgtgtctctcccacatgttccccgacgtgtccgtcgacttcatcgtccacgcgctcaggctccaggagttcgacttcgattttaccgtcgacatgctttctcacttgtgtgaagcctatggttatggccattctgctgaatgacaagcgccagtatcgaggcatccagaagccttctctaccaacttgcaagatagatgactgccgagatattggatgtagctcctctgaaagcaaaaagagactgtatgtgcccagtacccactagagtaagaaactgttgctgccgcacgaggactggtgttgtaaatataactagtgttggatgagtcgatgatgatatcctgactaaaaaattaatatgttgagatagttgatcgatcgaaaagaatgtcttagtaatgtcatactaataaattgtattttcttttcaaaa

SEQ ID NO: 127121 - DNA, 2547 bp, Zea Mays
aaaataaaaaaaataccgttttagttttcagccctaggagttcagaatggccacgggccaaaaatggtggagtttgctaatttgaattcagccaaaaaaggtgcctccaaaaacctgcacggagctccattaatagaagcagtccacccgtggcccgcgcccatctccggccgtccaggcgccgccgtggtggtttccctccgggcccaccgtcccacgcacgctttattacctgccctgccccgcggtcgatccccggctccccgtcctcctccccgacgaagcgaataggccggccccaacgcgccgccgcccaacccagctcgccctccccgtccggccgccccccctcgccgtaatgtcaaggtcctgcgagccacgaaaaccggactggggtttccagctgaacccacacgccgctcccttcgttccgtcctcgacgcccagcttcgcattcgcagctgcatccgagacgctcaaccagacgaccggctcccagaacaagaccggcagcacgaccgacgacgaggccactcctgacaagtccgccgacgccgagtaccatctcccggactcgctgtctctggatttccacgcggagagcctgctggcaaagcccagcgtgtccgccgagcctctgtctctctccagagcggaggccgccgccgccgctgctgctacggcgcccgactcgtcggtacgtttgggcggtggttcgggtgttcatcacctccccggcgccgtgtcgtgtctctcccacatgttccccgacgtgtccgtcgacttcatcgtccacgcgctcaggctccaggagttcgacttcgattttaccgtcgacatgctttctcacttgtgtgaagcctatggttatggccattctgctgaatgacaagcgccagtatcgaggcatccagaagccttctctaccaacttgcaagatagatgactgccgagatattggatgtagctcctctgaaagcaaaaagagactgtatgtgcccagtacccactagagtaagaaactgttgctgccgcacgaggactggtgttgtaaatataactagtgttggatgagtcgatgatgatatcctgactaaaaaattaatatgttgagatagttgatcgatcgaaaagaatgtcttagtaatgtcatactaataaattgtattttcttttcaaaagcatgtcttagtaatgttgagatagttgatcgatcgaaaagaaagtgcgggaatactctatgatatgagatggccgtccgggagttaacgggttattacagctaatattataaaaaaatgtatcttcgagagactgtgtagatggccctctaaattttaacacgcggatattcttagtacaaagacaaaaatcgacaggcaggtgaaacaaatcgccgtgacgaggatggcgctgctggcgctcaagcctaatccactgccgaacggcttccgcctctgccccaagcgcaccaacgcctctgcagccgccgccgccgcaaggtcccccagtgtccaccctctccccgacgagctccagctggtggcggacatccggtccccatacaaccacatccgcgtggccgacgtctccccgcgggccgcgggccacccgctggccggcgcccgcctcctgctcctggacggcccgggcaacatccactccctcaccttcccgcgccgcggcgaccggcccccgctcaccggcacctacctcgacgccttcgccaccctgccgccgctcctcccgcggccgtcgctcgcggtgctcggcttcggcgccggcgccgccgcccgcgcgctgctgcacttctacccggacatctccgtgcacggctgggagctggaccccgccgtggtcgccgtggcgcgcgacttcttcggcctcgcggacctggagaggcgccacgcggcgcgcctgtccgtgcacgtcggcgacgcgctggaggcccgcgcgccgcccggcggcttcggcggcgccgcggtcgacctgttcgcccgcggcagcgtgctgccggcgctccaggagccgggcacgtggcggcggctgggagcgctcgtggcgcccgggggcagggtgatggtgaactgcggcggcgcgggcgtggaggccgaggacgaggggcgggacggcgcggcggtcaaggacgccacgctgcgggccatggccgcggcgttcggggagggcgcggtgtcggtgctgcacgtggacgggagctgggtggcgatgacggggccgccggtgacggcggccgcgtggagggcgcggctgcctccagagctgcggcatttcgttgacgcgtggagaccgtacggcggcggcgcgagtggcgaatgaactcggctcagctgggacttcatcactggttgagtggttgtgtgtcttttaaatcaaccacatctcatcactcacagacacatatacgatgtgtttggtttgtggagtcactctatactttatgaggtgatgcatcataagtttatttcatagaatcaactcactcttaatgtatatactaatcattagcttatgaagaatgaggtggtg

SEQ ID NO: 127122 - DNA, 2760 bp, Zea Mays
aaaataaaaaaaataccgttttagttttcagccctaggagttcagaatggccacgggccaaaaatggtggagtttgctaatttgaattcagccaaaaaaggtgcctccaaaaacctgcacggagctccattaatagaagcagtccacccgtggcccgcgcccatctccggccgtccaggcgccgccgtggtggtttccctccgggcccaccgtcccacgcacgctttattacctgccctgccccgcggtcgatccccggctccccgtcctcctccccgacgaagcgaataggccggccccaacgcgccgccgcccaacccagctcgccctccccgtccggccgccccccctcgccgtaatgtcaaggtcctgcgagccacgaaaaccggactggggtttccagctgaacccacacgccgctcccttcgttccgtcctcgacgcccagcttcgcattcgcagctgcatccgagacgctcaaccagacgaccggctcccagaacaagaccggcagcacgaccgacgacgaggccactcctgacaagtccgccgacgccgagtaccatctcccggactcgctgtctctggatttccacgcggagagcctgctggcaaagcccagcgtgtccgccgagcctctgtctctctccagagcggaggccgccgccgccgctgctgctacggcgcccgactcgtcggtacgtttgggcggtggttcgggtgttcatcacctccccggcgccgtgtcgtgtctctcccacatgttccccgacgtgtccgtcgacttcatcgtccacgcgctcaggctccaggagttcgacttcgattttaccgtcgacatgctttctcacttggtacgtacgtgaactgttttaatttttttcccgccatctgcacactactctgttttccttcgccatagccatgccccgtgtggtaggagcattgttgcattgcatttgcctgccagttcgtgtctcaagaaacagatccgtttgatgaaatgtttcgtggcgatcttttcttttttttttcctgaacttgtgcgtacgtgtatgccatgccagtgtgaagcctatggttatggccattctgctgaatgacaagcgccagtatcgaggcatccagaagccttctctaccaacttgcaagatagatgactgccgagatattggatgtagctcctctgaaagcaaaaagagactgtatgtgcccagtacccactagagtaagaaactgttgctgccgcacgaggactggtgttgtaaatataactagtgttggatgagtcgatgatgatatcctgactaaaaaattaatatgttgagatagttgatcgatcgaaaagaatgtcttagtaatgtcatactaataaattgtattttcttttcaaaagcatgtcttagtaatgttgagatagttgatcgatcgaaaagaaagtgcgggaatactctatgatatgagatggccgtccgggagttaacgggttattacagctaatattataaaaaaatgtatcttcgagagactgtgtagatggccctctaaattttaacacgcggatattcttagtacaaagacaaaaatcgacaggcaggtgaaacaaatcgccgtgacgaggatggcgctgctggcgctcaagcctaatccactgccgaacggcttccgcctctgccccaagcgcaccaacgcctctgcagccgccgccgccgcaaggtcccccagtgtccaccctctccccgacgagctccagctggtggcggacatccggtccccatacaaccacatccgcgtggccgacgtctccccgcgggccgcgggccacccgctggccggcgcccgcctcctgctcctggacggcccgggcaacatccactccctcaccttcccgcgccgcggcgaccggcccccgctcaccggcacctacctcgacgccttcgccaccctgccgccgctcctcccgcggccgtcgctcgcggtgctcggcttcggcgccggcgccgccgcccgcgcgctgctgcacttctacccggacatctccgtgcacggctgggagctggaccccgccgtggtcgccgtggcgcgcgacttcttcggcctcgcggacctggagaggcgccacgcggcgcgcctgtccgtgcacgtcggcgacgcgctggaggcccgcgcgccgcccggcggcttcggcggcgccgcggtcgacctgttcgcccgcggcagcgtgctgccggcgctccaggagccgggcacgtggcggcggctgggagcgctcgtggcgcccgggggcagggtgatggtgaactgcggcggcgcgggcgtggaggccgaggacgaggggcgggacggcgcggcggtcaaggacgccacgctgcgggccatggccgcggcgttcggggagggcgcggtgtcggtgctgcacgtggacgggagctgggtggcgatgacggggccgccggtgacggcggccgcgtggagggcgcggctgcctccagagctgcggcatttcgttgacgcgtggagaccgtacggcggcggcgcgagtggcgaatgaactcggctcagctgggacttcatcactggttgagtggttgtgtgtcttttaaatcaaccacatctcatcactcacagacacatatacgatgtgtttggtttgtggagtcactctatactttatgaggtgatgcatcataagtttatttcatagaatcaactcactcttaatgtatatactaatcattagcttatgaagaatgaggtggtg

SEQ ID NO: 127123 - DNA, 948 bp, Zea Mays
atcgccgtgacgaggatggcgctgctggcgctcaagcctaatccactgccgaacggcttccgcctctgccccaagcgcaccaacgcctctgcagccgccgccgccgcaaggtcccccagtgtccaccctctccccgacgagctccagctggtggcggacatccggtccccatacaaccacatccgcgtggccgacgtctccccgcgggccgcgggccacccgctggccggcgcccgcctcctgctcctggacggcccgggcaacatccactccctcaccttcccgcgccgcggcgaccggcccccgctcaccggcacctacctcgacgccttcgccaccctgccgccgctcctcccgcggccgtcgctcgcggtgctcggcttcggcgccggcgccgccgcccgcgcgctgctgcacttctacccggacatctccgtgcacggctgggagctggaccccgccgtggtcgccgtggcgcgcgacttcttcggcctcgcggacctggagaggcgccacgcggcgcgcctgtccgtgcacgtcggcgacgcgctggaggcccgcgcgccgcccggcggcttcggcggcgccgcggtcgacctgttcgcccgcggcagcgtgctgccggcgctccaggagccgggcacgtggcggcggctgggagcgctcgtggcgcccgggggcagggtgatggtgaactgcggcggcgcgggcgtggaggccgaggacgaggggcgggacggcgcggcggtcaaggacgccacgctgcgggccatggccgcggcgttcggggagggcgcggtgtcggtgctgcacgtggacgggagctgggtggcgatgacggggccgccggtgacggcggccgcgtggagggcgcggctgcctccagagctgcggcatttcgttgacgcgtggagaccgtacggcggcggcgcgagtggcgaatgaact

SEQ ID NO: 127124 - DNA, 1029 bp, Zea Mays
ggatttttcagcgctcagcgtcttcctctgccgcacgccggcagcagttctcctccctccagctcgctggcgttatcctctgcgccgctttggcttacaaaaatcctggctgccggtgtttatctcctcacggcgccgcccctgggactcttcaaataccctgccgtgctctctctcttctctgttcctctcgttccctgacgagctgccatggcgtcctcgtctgtcgcggtatcccggctcctcgcccaggacggcactcggccctgcccctgccccagcttcctgcgcgccatggcgatttcttcaagctcgctccagcgccgcttcttttccccaaccgcgccacgcggcctgtctccctgtgcgctcgattcagttcgtttcctccctggacgcgcgctctgcagcttgtcggagcaccctgcgtcgcgcccaggtgctttgcttcttgctcgccgttccaacttctcctgccatggagctcgccgagccctccccagccgttcctcctcctgtagctcgcccctgcgcgtgcgtcttctcgcgtcgtccctgcgtcgcgcgcgcgttccttcctgtgcgcgccagcagccgcgtctctccggtgtttcctccctgcgtgcgcgaaatttccttgctcgctggggcgcttggtccgtgctccactgtgccgctgtttgtctgcacgcgtcaagctcccgtgctgaatctagccccatgttgacgcgttcctgttccagcttatcgtgttgcgtcgtcatcactttctgtcgcgagctcgattcccgttgtcatcgggctttatgtgtgctcgcgtttgccgtcgagtcgatgaacccgtcatcccctgctcaaccctaccccgcctgctcgctccagacacaatctcgtcatcgtcccgcgcgtcatcaagaatcccaagaatcgggtgaagacgaagctagcagcgcgatattccccaagcgctcgacaattgcctggatcggaaaatcactaccgatctcgcggattcgaatcggctattga

SEQ ID NO: 127125 - DNA, 1989 bp, Zea Mays
gacctccgaggtgcaggcctgcggggggagctgagccagacgcttggagacctcactgccgtcacagagctggacctgagcggcaaccggatcggcggcgcgctgccgcggagcttaccacctgcgctggcacggctagacgtttcttcgaacagtctcggcggagaactcccggactcgatggcgaagctgagctcgctgtcgacgctggacgtggagaacaatcagttctctggactaatcccagacaagctgctctcagttcccaagttcctaagagacggcaaccacttcaccatcccaactccggcggctcctccaagccgtgtggcaggcaccaccagcggcaccaggagagcctccagtcctttctggctcgcacccacctatatacgtgattccagctgctacacaggacgacgccccgccgagcggacacaggggcagggtgtccccggcgacggccgccgggttcagcgtcctcgccgccggttcgctgggcgccgccgtcgtcgcggtcctcctgttcacggcgtcgaggcggcgcagggagagggaaagggctcttcgtgtaggctgcctgagaggagctgagatgtgcgcgcccagcgcggtgagggaggctcgtctacgagcagctgccaaactggagaaagacacggggcgccattactcagctgcagaggagaagatcgagcggactccgagagattgcgtcgaggcagcaggatcatctctcaagcacagcagcaacggaggcatcgtcgtgggcggttcagaagcacagcaggagcagccactgcaactgcgatccgcctctttcacgctcttcaccgtcgcatcactgcagcaacacaccggcggtttcagccgccaggatctggtcagggagacctgcttcggcaagatctatgcagcagatcgtccaacgggaagcaagctttcggtactgaagctcgacagcgacgcggcgaggacgccggtgccagagttcctggaggccgtccgcggcgtcgcggggctccggcaccctaacgtggagcagctcgtgggctgctgcgtggagcacggccagaggctgctcgtctaccgccacttcagcgaccgcgctctggacggcgtgctgcgtctagagcacggggcgtcgacgtctggacctgatgagaatgagacccttcgctgggacgctcgggtcgctgtggcactcgaggccgcgaaggcgctggagtatcttcatgagggcgccgggaagcaggtggtccaccggcacttcaggccggagcacgtcctggtcgacggcgagctcagggtgtcggtctccggatgcggccttgctccgctcgtggctgagcggtcggattgctgcggcgtggcgacgagctacgagccgccggaagcgggcggcggcgcggcgtggacgcccaagggcgacgtctacagcttcggcgtcgtgatgctgcagctcctcaccgggcgcaggccgtacgacggcgcgcgggcgcggggcgagaggcgcctggtgccgtgggcgagcgcgcggctgtacgacctcgccgcgctgcggaagatggccgacccgcgcctcggcgcgccgccgccggtcaggtcgctgtcacgcttcgccgacgtcatcagccggtgcatacagccagaggcagagttccggcctgccatgtcgcaggtggcgcaggacctgcggcgcacgctggagaacgcgcgcgcggtgacggggacggggagcggcggctctgcacaagtttagctacttgcgctcgtgctcgccaatggacttgttgctcatcgtgctcaggtcggccgatgcagcaaagtccggcagttaactgacgcgatgcaactatatctacgtgcccgtaaacatccatatttcgttgtgtaattttctttctttcgtgtatagtacaaagaaaatgatgaagttacggaacatgtacagcagcaaaattgatcgtccagagtttgccgagcaaa

SEQ ID NO: 127126 - DNA, 4341 bp, Zea Mays
atggcgtcctccgcggcgccgccggcctccccgtcgtcgcgatcgcacggcaatgcggcgggcgccggcagcagcgccacggcgatgatgctcccgggccctccggggcgcggcaacggcggctgcatcgacctcagccccgcgggcctcctggcgcacggcgccgggagcagcgtcgttgtgtccgacccgcgctccatgcagctcctctgcgtgctccccatgccctcctcctcactcgcctccttcgtcaccgccgtccgctgggcgccccccgacacgccctccctcgacgacgacgacgacgaccgtcgcccgctccgcctcgccgcgggggaccgccacggccgcatcgccgtttgggacgcccgcgcgcgggctgtgctccactggctcaacctcgacgaggcgcgcggcgttgcgccgggctccgggggcggggtgcaggacctgtgctgggtccaccacggctccggctggcacctcgcctccatccacggcccctcgctgctctgcatctgggagacgtccaacagcccgcgcgtcctctggatgttcgacgcggcgcccgagtacctctcctgcctccgccgtgatcccttcgacgccaggcacctctgcgccattggccttcgcggcttcctcctctctgcgattcccaggcaggactccgacatctctctgcaggagcaccgggtgaactgcggtgcaggggatgtcgccgacctgcagaggctggagaaggagatttcagcacctgtacccgccccggcgctcgcggcgttcccgctcttttcctcgagaatttgcttctcccccctgtggaggcagatcctcttcgtcaccttccctcgggagctcatcgtctttgacctcagctacagcactgcgctttctgttactccattgcccagggggtttggcaagttctcggatgttatggccgatcctgatatcgacatgctctattgcacccatctcgacggcaagctgagcatctggaggcgcaaggagggtgaacaagtgcatttattatgtgctgtggaagagctcatgccttcaattggtactgttgttccttctccggctgttcttgcagctacaatatggcagtcagagtctattttccgaagcattgaaaaacaatgtcaggatttggcacagccacattctttcatgattgatacaaattcagaccagaatgcttgtcaagggactatgacatatctaacgtcgatatcagaagatggcaagatctggtcgtggcttttgaaatttgacaagtccgcacttcctagcaaagctaatctaggtgcgaatctatgtgatcattccagtgcaaatgaaagctttgctcatattcattacgccctgcagattaatttggtgggacaacttcatcttttgtcatctactgtgactacactagcagtgccatccccttcattgcttgccacagtagctcgtggtggaaacaatcctgctccagcagtgccacttgttgctctggggactcagaatggaactattgaagttgtagatgttgtggcaaatgcagtttcagccagtttttccgttcatagcagcacagtgagaggattgagatggcttggcaactcacgtcttgtttcattcacatataatcaggttaatgataaaactggtggatacaataataaacttgttattacatgcttaagaagtgggctaaatcgctcattccgtgtgctccaaaagcctgaacgtgcaccgattagagcattgagggcttcttcatctggacggtaccttctgattctgtttcgcgatgctcctgttgaagtgtgggctatgacaaagaaccccatgatgcttaggtccttggcgcttccttttacagtattagaatggacactgccagctgcacctcggccaggtcaaaatgcatcatctaaacagtcttcaacctccaaggagcgatcagcagaggcttctggtgcagaaagttctgatgaaacatgtgaaagttttgcttttgcattagtcaatggcgctcttggtgtgtttgaagtgcatgggcggcgaatacgagattttaggccaaagtggccctcgtcatcatttgcatcttcagatggtttggttactgctatggcttaccgccttccccatgttgtaatgggggatcgatcaggcaacattagatggtgggatgttacaagtggcctttcttcttcttttagcactcacagggaaggcatcaggaggataaagttttctcctgttgttcatggtgatcgaagcagagggcgcatcgctgtgcttttctatgataatacattttcgatatttgacttggatagtccagatcccttggcaaatgcccttcttcagccgcagtctcctggtacccttgtcttggagcttgattggttgtcaacccgaacaaggaaggatgaaccacttatgttatgcattgccggagctgatagtagcttccgactgattgaggttaacattgatgctaagggcagttctatttcgaagccagtagctacgaaagagaggtttaggccaatgccattttgtttgccagtattatttccaacggcccatgctttggctttgcgaatgatacttcaacttggggtgaagccttcttggtttgaatgcaatagtagtgataaattaactggggacagctttaaggtagcaccaacatttggagatcttcgtagttacatgattgagacaacactccctcctattggtgacgccgttgtggctgaattgctccttaaagtgttggaaccatacagaaaggagggttgcattcttgatgatggaagagccagcctatattcagctatagtgaacaagggagcttgtgcaagatttgcatttgctgctgcgatttttggtgatttccaagaagcacttttctggctacagctgcctcaagctcttcgccacttcctgggtaaatccacaagtagatcaagagagaagatctcacaatcaagtttacatcctgattctgaacaaagctccagatttaatcggatagcttcaagagagagatctgcttctgaaaaaagttcaatctttgtgcagaattatgggcaattaagctcaatggcatttaatcaagagcaactatggttcaatgcaagtgaaaggataccttggcatgacaagctcgatggtgaagatgctttgcaaaagcatgttcatgagcttgtctctctcgggaacttagaggctgcggtttcattgttactttcaacgccacctgaaggatcaaatttttacccaaatgcattaagagcagttgtgctgtcatctgcagtctcacaatccttgcatgaacttgcagtgaaggttgttgcagccaatatggttagaacggacaaatcgctatctggcacacatcttctatgtgctgttggaagatatcaggaagcatgttcacagcttcaagatgctgggtgttggaatgatgcagctactttggccgcaagccatttgcatggatctgactacgcaagggtgctgcagaggtgggccgattatgttcttcgtggtgagcacaatatgtggagagctcttatcctatacgttgctgctggagcactgccagaggctttggatacacttcgcaagagccagcgcccagataccgcagccatgttcttgctagcttgccacgagacctactcacaagccttatcagaatcagagcccgaggacgacacttccgtgttagcactgacgccgacgccggagcagacggagaagctccggttcccttccaagaatgtggccgacgaggacctgatcgcagtcagtgaggtcttcgggcagtaccagcagaagctggttcatctctgcatggacgccgaaccgacgtctgactgaatcgcacgccttgtcgcatggcagactgatgcgggcgtggattctccgtttttgaagcttattattatcaacaggttgcaaattccttccaagtttctgcgaagctttttgttctgtctgttggtaggtaccagacgtccagacatgacatcgggactgctgatgtggcagaatctgatggcaggaggcaggaacagacatgcagtgctgtatcgtaggtgccaatggttggcactgtttatacatacgtaagcatttgtatttggtacaagctatgttttttttttctttggtgcgcaaagagcgagtgcgcagcgaacttctcttgtggccgagatgagatgagaacagatgccatcgaggcagcagcagacgatatacttacacctgtacacccatgacagtttttgtctgaagattggttattatatgcttatctgcaaa

SEQ ID NO: 127127 - DNA, 1416 bp, Zea Mays
gtacttaaagcaataaaccctcattgaaaaactgttttacaggtccagaatctcattgaacgttgccttcagctatatatgaaccagaaagaagtggtggacaccctatctttccaggcaaaaatagaacctagtttcactgagcttgtctggcagaagctcgaggaagagaatcgtgatttttcaaggcatactatgtaaggctgatgcttatgaatcaaataacggccttcaataagctccttgagcagcagtatgagattatgactaaagatcatccttctgggatgccatctgtacctcctgctgctcctaatggctcaaactctaacacattgaaccaaaacatgccctttctgcctgacactatccccagtactgcactgcaagataactcgttgcgcaatggaggttctagtagtatagttaatggtgctccatccgatgaccaatttatgtatactggtaaagttgttcatggccttcctggtggcatggatgcttcatcaagcctgctaacagcacacaatcctgctgttgggcagtttaatggacacaatggagcaacaataaagacagaatttggctactcaagcaactcagattttggattcagcaatgaggccgtgttcctagagcagtcagttggagatgtatcagattcctcgtaatttcagcttttcagatttgacagaggatttcagccaaagcgcagaaatattagagaattatggtcgatcccctttcatcccttccgatgcaaataacttcccagaatctactgctggagaacatactggttaaccactgcccttccctcaacgttgctcttgatgcagtactgaaattctcaatttatctaatggtttccttattatcaatagaaataggaaataggcggctagatacaatatctgagggcattcattttgaagattttggaagtgattaatgaaacctttgatgacactgcacatggtaatttcgtaaacaacttgcatttacaaggaagtagatgttgtttgcttcaatttgcttcttcattctcctgggcacccctatcgatttgattgaggttgtagcaggtcatagcagtttctgtacgattgctaacttctttggtcgtatgttctttatgtgcaggttgaggagtgatccatttgtacagactattttgggcagctaaatatctacaattgtggtcgtggaactagctgatttggtggccactgtttcttcttccgtgttaggttttgtgctcttagagtagaagcatggatggcttattattatgatcaaataatccgtattgaagggtggcccaaacaatccgtcttctttgtatcttctctgagggtgatgtggtagcaaatgtattcgttcagttggctatagtggaagctttacgattatgtc

SEQ ID NO: 127128 - DNA, 1230 bp, Zea Mays
gtacttaaagcaataaaccctcattgaaaaactgttttacaggtccagaatctcattgaacgttgccttcagctatatatgaaccagaaagaagtggtggacaccctatctttccaggcaaaaatagaacctagtttcactgagcttgtctggcagaagctcgaggaagagaatcgtgatttttcaaggcatactatgtaaggctgatgcttatgaatcaaataacggccttcaataagctccttgagcagcagtatgagattatgactaaagatcatccttctgggatgccatctgtacctcctgctgctcctaatggctcaaactctaacacattgaaccaaaacatgccctttctgcctgacactatccccagtactgcactgcaagataactcgttgcgcaatggaggttctagtagtatagttaatggtgctccatccgatgaccaatttatgtatactggtaaagttgttcatggccttcctggtggcatggatgcttcatcaagcctgctaacagcacacaatcctgctgttgggcagtttaatggacacaatggagcaacaataaagacagaatttggctactcaagcaactcagattttggattcagcaatgaggccgtgttcctagagcagtcagttggagatgtatcagattcctcgtaatttcagcttttcagatttgacagaggatttcagccaaagcgcagaaatattagagaattatggtcgatcccctttcatcccttccgatgcaaataacttcccagaatctactgctggagaacatactgaaataggaaataggcggctagatacaatatctgagggcattcattttgaagattttggaagtgattaatgaaacctttgatgacactgcacatggttgaggagtgatccatttgtacagactattttgggcagctaaatatctacaattgtggtcgtggaactagctgatttggtggccactgtttcttcttccgtgttaggttttgtgctcttagagtagaagcatggatggcttattattatgatcaaataatccgtattgaagggtggcccaaacaatccgtcttctttgtatcttctctgagggtgatgtggtagcaaatgtattcgttcagttggctatagtggaagctttacgattatgtcaaagttctcctttctgcccccctgttgcacaaggttacgtctgcagtttttcttgtttgtcgca

SEQ ID NO: 127129 - DNA, 1449 bp, Zea Mays
gtacttaaagcaataaaccctcattgaaaaactgttttacaggtccagaatctcattgaacgttgccttcagctatatatgaaccagaaagaagtggtggacaccctatctttccaggcaaaaatagaacctagtttcactgagcttgtctggcagaagctcgaggaagagaatcgtgatttttcaaggcatactatgtaaggctgatgcttatgaatcaaataacggccttcaataagctccttgagcagcagtatgagattatgactaaagatcatccttctgggatgccatctgtacctcctgctgctcctaatggctcaaactctaacacattgaaccaaaacatgccctttctgcctgacactatccccagtactgcactgcaagataactcgttgcgcaatggaggttctagtagtatagttaatggtgctccatccgatgaccaatttatgtatactggtaaagttgttcatggccttcctggtggcatggatgcttcatcaagcctgctaacagcacacaatcctgctgttgggcagtttaatggacacaatggagcaacaataaagacagaatttggctactcaagcaactcagattttggattcagcaatgaggccgtgttcctagagcagtcagttggagatgtatcaggtgcatcctttagcagctctgagttgaatggacaaccactaggtggtccaattttggacacggattcatcttcatatggtttcttgagccagattcctcgtaatttcagcttttcagatttgacagaggatttcagccaaagcgcagaaatattagagaattatggtcgatcccctttcatcccttccgatgcaaataacttcccagaatctactgctggagaacatactgaaataggaaataggcggctagatacaatatctgagggcattcattttgaagattttggaagtgattaatgaaacctttgatgacactgcacatggttgaggagtgatccatttgtacagactattttgggcagctaaatatctacaattgtggtcgtggaactagctgatttggtggccactgtttcttcttccgtgttaggttttgtgctcttagagtagaagcatggatggcttattattatgatcaaataatccgtattgaagggtggcccaaacaatccgtcttctttgtatcttctctgagggtgatgtggtagcaaatgtattcgttcagttggctatagtggaagctttacgattatgtcaaagttctcctttctgcccccctgttgcacaaggttacgtctgcagtttttcttgtttgtcgcatttcctggttccgttttggttgcgtttcctgactcagatcagtacatatctgcatgatctgcgaccatttgtatttaactatttgtatgatctatggccatagaattaatcaactattgtttagcgg

SEQ ID NO: 127130 - DNA, 2831 bp, Zea Mays
gtacttaaagcaataaaccctcattgaaaaactgttttacaggtccagaatctcattgaacgttgccttcagctatatatgaaccagaaagaagtggtggacaccctatctttccaggcaaaaatagaacctagtttcactgagcttgtctggcagaagctcgaggaagagaatcgtgatttttcaaggcatactatgtaaggctgatgcttatgaatcaaataacggccttcaataagctccttgagcagcagtatgagattatgactaaagatcatccttctgggatgccatctgtacctcctgctgctcctaatggctcaaactctaacacattgaaccaaaacatgccctttctgcctgacactatccccagtactgcactgcaagataactcgttgcgcaatggaggttctagtagtatagttaatggtgctccatccgatgaccaatttatgtatactggtaaagttgttcatggccttcctggtggcatggatgcttcatcaagcctgctaacagcacacaatcctgctgttgggcagtttaatggacacaatggagcaacaataaagacagaatttggctactcaagcaactcagattttggattcagcaatgaggccgtgttcctagagcagtcagttggagatgtatcagattcctcgtaatttcagcttttcagatttgacagaggatttcagccaaagcgcagaaatattagagaattatggtcgatcccctttcatcccttccgatgcaaataacttcccagaatctactgctggagaacatactgaaataggaaataggcggctagatacaatatctgagggcattcattttgaagattttggaagtgattaatgaaacctttgatgacactgcacatggttgaggagtgatccatttgtacagactattttgggcagctaaatatctacaattgtggtcgtggaactagctgatttggtggccactgtttcttcttccgtgttaggttttgtgctcttagagtagaagcatggatggcttattattatgatcaaataatccgtattgaagggtggcccaaacaatccgtcttctttgtatcttctctgagggtgatgtggtagcaaatgtattcgttcagttggctatagtggaagctttacgattatgtcaaagttctcctttctgcccccctgttgcacaaggttacgtctgcagtttttcttgtttgtcgcatttcctggttccgttttggttgcgtttcctgactcagatcagtacatatctgcatgatctgcgaccatttgtatttaactatttgtatgatctatggccatagaattaatcaactattgtttagcggaattcaggaaccagaagtgcatcttgcattacctgcctattactctctcacccaagcatccaaattgtacaggttatagttttactaatctgaagttgcatgtgttcaaaaactggaaattggcaaaggattacatccagtttgtagcagggtaacaaacacaaacactcaacattcacccccctgaaaaaagaagtctagttcttggggatgttcttgccgacgatcttggccggcgttatgcggaggaggttcccgggcttccctggcacggcccccttgatcatgagcacccggaggttgttgtcgatcttgacgatcttgagcttcctgatcttggtcttggttcctcccatcctcccgggcatcttcttccccttgtacacgcggcccggcgtcgtcccggctccgatggaacccagctgccggtggctcttggaaccgtgcgtcatcagcccgcgcttgaagttgtgcctcttgatgccacctgcgcagtgccacaagtaaaaccgcgcgcgagcggatcaagaacgttgcaagctaggagattgcacaagtggcatagcaatcgcaaatgcaaacctttgaaactacagctacagcaaatgctgctaaaacttcactctccatgaaacggaacaatgacacatacaaccgaggctggcagatcattagcagaattgctgttgctggcaatgcaatcgcactattggatggaggcgcgagaatcggtgtactaccttggaaccccttgccgatggagttgccggagacgtcgatgaggtcgccctccttgaagaggtcggcgaagtcgaggggctggccgggctcgaaggcgtcgacggcggtgagccggaactcctgcaggtggcgcagcggcggggcgccggccttgcccaggtggcccagctccgggcgggtgagcttgtcctcgcgcacgccgtggtacccgacctggacggcgtcgtacccgtccgtggcggccgtcttcacctgcgtcaccacgttgccgccctcccggaacccgaccacggtcaccggcaccggcttccccgtctccggatcgaagtaggtcatcatccccaccttggtcgccatcacgcccaccccggcctcgtacgacgcgcgcaccgccacgggcgcccgccgccgcccgccgctccaggggacggcgccctggcggcgctgcgggaggaggaacgccactgcgccgcccacgcccacggccgccatggccatgcttgcttcgatttgactgggattagcagaggggagtggcgctctcgttcaatttgactgggatttatgcggatgcggataggccgctcttcctcgcgcctatccccttatccaaggaggacgtctgctcggaagcgactcaaatagatacgcctttctacaaagaaagcgtatatacagttgcttagaaatttgcatggcaagacctccatccattctcctattgtcacgtact

SEQ ID NO: 127131 - DNA, 1467 bp, Zea Mays
gaaccagaagtgcatcttgcattacctgcctattactctctcacccaagcatccaaattgtacaggttatagttttactaatctgaagttgcatgtgttcaaaaactggaaattggcaaaggattacatccagtttgtagcagggtaacaaacacaaacactcaacattcacccccctgaaaaaagaagtctagttcttggggatgttcttgccgacgatcttggccggcgttatgcggaggaggttcccgggcttccctggcacggcccccttgatcatgagcacccggaggttgttgtcgatcttgacgatcttgagcttcctgatcttggtcttggttcctcccatcctcccgggcatcttcttccccttgtacacgcggcccggcgtcgtcccggctccgatggaacccagctgccggtggctcttggaaccgtgcgtcatcagcccgcgcttgaagttgtgcctcttgatgccacctgcgcagtgccacaagtaaaaccgcgcgcgagcggatcaagaacgttgcaagctaggagattgcacaagtggcatagcaatcgcaaatgcaaacctttgaaactacagctacagcaaatgctgctaaaacttcactctccatgaaacggaacaatgacacatacaaccgaggctggcagatcattagcagaattgctgttgctggcaatgcaatcgcactattggatggaggcgcgagaatcggtgtactaccttggaaccccttgccgatggagttgccggagacgtcgatgaggtcgccctccttgaagaggtcggcgaagtcgaggggctggccgggctcgaaggcgtcgacggcggtgagccggaactcctgcaggtggcgcagcggcggggcgccggccttgcccaggtggcccagctccgggcgggtgagcttgtcctcgcgcacgccgtggtacccgacctggacggcgtcgtacccgtccgtggcggccgtcttcacctgcgtcaccacgttgccgccctcccggaacccgaccacggtcaccggcaccggcttccccgtctccggatcgaagtaggtcatcatccccaccttggtcgccatcacgcccaccccggcctcgtacgacgcgcgcaccgccacgggcgcccgccgccgcccgccgctccaggggacggcgccctggcggcgctgcgggaggaggaacgccactgcgccgcccacgcccacggccgccatggccatgcttgcttcgatttgactgggattagcagaggggagtggcgctctcgttcaatttgactgggatttatgcggatgcggataggccgctcttcctcgcgcctatccccttatccaaggaggacgtctgctcggaagcgactcaaatagatacgcctttctacaaagaaagcgtatatacagttgcttagaaatttgcatggcaagacctccatccattctcctattgtcacgtact

SEQ ID NO: 127132 - DNA, 1755 bp, Zea Mays
caagccgcaaacggacaaaaccaaagcaatccgtgcacaccgaactcctctcctccactcgcctcttccacgccacgcggatggcgtgcgcgcacgcaaggtccaaagaagcaggccatccgggacggcgcgagcgcgtcctgcgttccattccaccctcctccgtctccgatcctcgccttcaactccactccctcgctctctcgggccttcttccctagcggcgacgacggggtgatcactgattcactgccgcccgcgccaggtcggccaggtatgcgcgctcgttcccttgatcccttcccttccttcttctagcttcgatttttggccaaaaaaatatctggtatatatgtcttaccgcgcctgctttatagctgtatgatacaaattgccatatgacgaacggtcggattattggttccacttcggtctggcgaagtcatttacttccctttttgtctgcagaactagtgggcgccaaacatcatagcgatcatggaggtggtctcttgcagccactcctgctcggcattacatcaaacaccagcaagcacatggaggcttcggggcagtgctcttggccttggtcttgggcatgccaggccttcccggaccagaagatacacagttgcgtgtgtaggaaccacgagtggagcttcgaatccgggtggttccggcaaggtccatgcagcccagggattccatgtaagcgacgtggatgcagccctgcagggcattccttccatgaaagccggggaggccgagagggtgatgattcaaggccttccggaaggccctgacagctccccgatcagtactgggttctgggagtggaagccgaagctgactgtgtactacgagaggtccggcatgaagaacagcaaggcacctgcggtgctcttcctgccggggttcggagtcgggacgttccatttcgagaagcagctgagggatcttggtcgcgatcatcgggtgtggacgatggattttctcgggcaggggatgtcgctgcctggtgaagatcctgctcctagtagcatagcgagcgaagatgcgttttggggctttggacaagattcgcagccttgggcagaggagctggtgtattctgtggatttatggcaaaaccaagttcagcatttcattgaggaggttatccgtgaaccagtttatattgtggggaactctcttggaggttttgttgctctgtattttgctgcatccagtccacaccttgtaaaaggtgtcacactgcttaatgcaacaccgttttggggattctttcccaaccctgctacatctccccgattgtcaaagattttcccatgggctgggacatttccgcttccatcatttgtgaggaaaattactgaagcagtttggcaaaagataagtgacccaaaaagtattcaggacatactcaaacaagtatacgctgaccattcaacaaatgtggacaaagtattctctcgtattgtggagataacacaacacccagcagctgctgcatcgtttgcctccattatgtttgctccaaggggtcagatatccttccaagaggccatctctaggtgccaagaccaaggcattcctatatctctcatgtatggaagagaagatccttggattagacctatttggggccttaaagttaaacagcaagtgcccgaagcaccttattatgaaattagccccgctggtcattgtcctcatgatgaggtccctgaggtaaggattgttctttgcttataa

SEQ ID NO: 127133 - DNA, 2058 bp, Zea Mays
caagccgcaaacggacaaaaccaaagcaatccgtgcacaccgaactcctctcctccactcgcctcttccacgccacgcggatggcgtgcgcgcacgcaaggtccaaagaagcaggccatccgggacggcgcgagcgcgtcctgcgttccattccaccctcctccgtctccgatcctcgccttcaactccactccctcgctctctcgggccttcttccctagcggcgacgacggggtgatcactgattcactgccgcccgcgccaggtcggccagaactagtgggcgccaaacatcatagcgatcatggaggtggtctcttgcagccactcctgctcggcattacatcaaacaccagcaagcacatggaggcttcggggcagtgctcttggccttggtcttgggcatgccaggccttcccggaccagaagatacacagttgcgtgtgtaggaaccacgagtggagcttcgaatccgggtggttccggcaaggtccatgcagcccagggattccatgtaagcgacgtggatgcagccctgcagggcattccttccatgaaagccggggaggccgagagggtgatgattcaaggccttccggaaggccctgacagctccccgatcagtactgggttctgggagtggaagccgaagctgactgtgtactacgagaggtccggcatgaagaacagcaaggcacctgcggtgctcttcctgccggggttcggagtcgggacgttccatttcgagaagcagctgagggatcttggtcgcgatcatcgggtgtggacgatggattttctcgggcaggggatgtcgctgcctggtgaagatcctgctcctagtagcatagcgagcgaagatgcgttttggggctttggacaagattcgcagccttgggcagaggagctggtgtattctgtggatttatggcaaaaccaagttcagcatttcattgaggaggttatccgtgaaccagtttatattgtggggaactctcttggaggttttgttgctctgtattttgctgcatccagtccacaccttgtaaaaggtgtcacactgcttaatgcaacaccgttttggggattctttcccaaccctgctacatctccccgattgtcaaagattttcccatgggctgggacatttccgcttccatcatttgtgaggaaaattactgaagcagtttggcaaaagataagtgacccaaaaagtattcaggacatactcaaacaagtatacgctgaccattcaacaaatgtggacaaagtattctctcgtattgtggagataacacaacacccagcagctgctgcatcgtttgcctccattatgtttgctccaaggggtcagatatccttccaagaggccatctctaggtgccaagaccaaggcattcctatatctctcatgtatggaagagaagatccttggattagacctatttggggccttaaagttaaacagcaagtgcccgaagcaccttattatgaaattagccccgctggtcattgtcctcatgatgaggtccctgaggttataaactacttgctccgtgggtggctgaagaacctcgagtctgagggctcagtcgacctgccgtttctagaagaacgcagctatgctgagcgtggtgtatccagggagctggagtttgtcagagaaggatcaaggaagtcagttagtgtgcggctctatggtaccaagatttccctatggagccagctaagctcattcttgaacacacgtgtccccaagtcacggatagtcttgagataatccatcctcaactccaatagatctcaatcttagaagctttgattcagatattgtatttattactttattaaattggtcagcagacagtgtttccagaattcctagcgcatgtaaatattggcactacagtggtagtttcgaatttatcatgattcatatcatgtcaagatatgcttgaagttctgttcatagctacaagggaacatttcatctatgtatacgtactcagcaaaatgatacaaattgagcgtggataggcgtcagatcctacgagacga

SEQ ID NO: 127134 - DNA, 4281 bp, Zea Mays
ccgttctaaaaccctagatctctctcccctcacccccgtccctcgacccgccgccgagtcgccggaggaggcgggggcctcgccgcagaagccatgtacctctacagcctgacgctacagcgcgcgacgggcgcggtgtgcgccgtcatcggcagcttcagcgggcgggactcgaagaagtccgccgcctccgggtccggctccacgcaagagatcgccgtggcccggggcagcacgctcgacctcctccgcccggacccggagacgggccgcctccgcacgctcctctccgtcgacgtcttcggcgccatccgctcgctcgcgcagttccgcctcaccggcgccaacaaggattacctcgtcgtcggctccgactcgggccgcctcgtcatcctcgagtactcccccgaccgcaaccgcctcgacaaggtccaccaggagacctttggcaagtcgggctgccgccgtatcgtccccggccagctcctcgccgtcgacccaaagggccgcgcgctctgcatcgccgcgctcgagaagcagaagctcgtctacgtcctcaatcgcgacgccgccgcgcgcctcaccatctcgtccccgctcgaggcgcacaagtccaacactctcaccttcgccctcgccgcgctcgactgtgggttcgacaaccccgtcttcgccgccatcgagctcgagtacgccgagtctgaccgcgaccccacggggcaggccgccaaccaggcgcagaagctcctcaccttctacgagcttgacctggggctcaaccatgtctcccgcaaggtctctgagccgattgataatggtgccaatcttctcgtgactgtaccgggtggtggtgacggtcccagcggtgttctcgtgtgctgtgataacttcgtgctgtaccggaaccagggccacccagagattcgtgctgttattccacgccgtgctgacctccctgctgagcgtggcgtcctcattgtcgcagccgccacacacaaacaaaagagtatgttcttcttcctgctacagactgagtatggtgacatattcaaggttgacctcgatcataatggggatgctgttagtgagctcaggatcaagtactttgacaccataccagtgacatcggctgtctgtgtgctgcgctccggtttcctctttgctgcttctgagtttggcaaccatgcactttaccagttccgtgatattggtagagaagccgatgttgagtcatcttctgcaacactgatggagacagaggagggattccagccagttttctttcagccaagggcactgaagaacctcatgcgcatagatgagattgagagcctcatgccagtcatggacatgcgtgtcgcgaatttattcgatgaggaaacaccccagttgttcactgcctgtggccgtggtccacgctccacgttgcgcatcctgaggcctggccttgccatcagtgagatggcccgatcaatgctgcctgctgagcctattgctgtgtggactgtcaagaagaacatcaatgacatgtttgatgcttacattgtagtgtcctttactaatgtcacgcttgtgctctctattggtgagactattgaagaagtcagcgacagccagttcctggacacgactcactcccttgcagtcacgctccttggtgaggactctctaatgcaggtccatccaaatggcatcaggcacatcagggaagatggccgtgtcaatgagtggaggacgcctggaaagaaaactattacgaaggttggatcaaaccgtctccaggtggtaattgctcttagtggtggagagctcatctattttgagatggatatgactggtcagctcatggaggtagagaagcaggacatgtctggtgatgttgcgtgcctggccattgcaccggtccctgaggggaggcaaaggtccagatttcttgccgtaggatcctatgataacaccattcgtatcctctcattggatcctgatgattgcctgcagcctctaagcgtccagagtgtatcatcggcaccagagtcactcctattcttggaggtccaggcatcagttggtggtgaggatggtgcagattatccagccaaccttttcctcaatgctggtttgcagaatggtgttcttttccgtaccaacgtcgacatggttacgggtcagctatctgacacacgttctcgattcctaggcctgagacctccaaagctgttcccttgtatagttagccacaggcaagcaatgctctgcctgtccagccgtccttggctgggttacatacatcaaggccattttctcttgacaccactgtcctgtgatacactcgaatctgcagcatcattttcttctgatcagtgttcagaaggtgtagttgctgttgcgggagatgccttacgtattttcaccattgaacgcctgggagagactttcaatgagacggcaatccctctgcggtacaccccaaggaagtttgtgattctaccaaagaaaaaatacattgctgtcattgagagtgacaaaggtgcattcagcgcagaagagcgagaagctgctaagaaagagtgccttgatgcttctggtgcagcggagaatggaaatgcgaataatggcgatcctatggagaatggtgatggtcaagatggtgccgaggagggcaacacatttcctgatgaacaatatggttatccaaaagctgaatctgagaggtgggtttcctgcattaggatcttggatccaaggagtagggacacaacctgtctgctggaattgcaggacaatgaggctgctgtcagtatctgcactgtgaatttccatgataaggagcatggaactctactggctattggcactgccaagggtttgcagttctggccaaggaggacccttgctggtggattcatccacgtatataagtttgtggatgaagggaggtcacttgaacttctacacaagacacaggtggaggaagtacctcttgcattgtgccaattccaggggcgattacttgcaggtgttggttcagtgctcagactatatgatctgggtaaaagaaaattgctcagaaaatgtgaaaacaagctttttccgaggacattagtatctattcatacctaccgtgatagaatctatgttggcgatatgcaagagtcatttcactattgcaagtacagacgagatgaaaaccaactctatatatttgctgatgacagtgttcccaggtggcttacaacagcacaacacatagattttgacactatggctggagcagataagtttgggaatatatattttgctcgtcttcctcaggatatctcagatgagattgaagaagacccaactggaggcaagattaagtgggagcaagggaagttaaatggtgcccctaacaaagttgaggagattgtgcagtttcatgtgggtgatgttgtaacgtgtttgcagaaggcctctttgattcctggtggaggtgaatgtcttatttatgggactgtgatgggcagtgtgggagcactgcttgcatttacctccagggaagatgttgatttcttctctcacttggagatgcatctgcgtcaggagcatccaccattgtgtggaagagatcacatggcttacagatctgcctattttccagtgaaggatgtgatagatggtgatctctgcgagcagtatccctccctcccagctgatatgcagaggaagattgctgatgagctggacagaactccgggtgaaatcctgaagaagctagaagacatcaggaacaaaatcatctaaaacagcggcttagtgtgaagaaactaggcagggcagtgccggtgctctttgctttaagactgtatccagttcgagctgttgccgcacttcaagatgtgacagcagcgcatccaacaagtttggagcacgctgatctgtacgatctttcctgatgctatctggtccagtcggcgatttattgctgagatagagcatgtacggcaccagaatgagtttttttgtatctcgtagaagtgatttagctgatgtcgttgactgtttacttggcttgatgtaattgagtgaagttattcatgttggattattcgtgtagtacggggttaccttggtaatgtactaccacaagggcttggttgctaggaagggaattggagggttccaattaagccttcaatcctctctaatttcctcccaaacaagccctaacagatttttgaagcgcagatgcgttgctgtcattgccttttcagattgttcagctgatggaatcctcagttg

SEQ ID NO: 127135 - DNA, 1572 bp, Zea Mays
atatctgcccaggattcaagattgctgtcctctcttgaaatttggcttcggagacagcttaagcatcatattttaggtttgtcttcctttgagagaaccagagcaaggctgcgatctggtctgagatggctcaaagagggggatgccaatactgcttatttccagcaccatgccagatacaggaataagaaaaactttattgccagtttgaagaaagaggacatggtgttcactaatcagaaggataagattgaggtggtctgggattttttcagcaaattgttgggatctgtggaacagcgtaacttcactcttgatcttcagtcctttcatagatcagctgttgatcttactgagttagaccgaattattgatgaggaagaagtttggaacaccatcaagtccatgccttcagataaagctcccgggccagatggctttacaggtagattctacaagatggcttggcaaattatcaaagtagattttatggctgctgtgaatagactgtttcagggtgatgatagtagactttttctcctcaattctgcatatattaccctgctgcccaagaaagttgatgtggaggaggtaaaagattttcgccccataagtctgatccatagtttcgccaagatcatcactaagctgctggctaatcggttatcagggaaattatcgcagcttgtgtcacctaatcaaagtgcgttcgtgaaaggtagatacattttggataactttgttcttgtgcaacagatagcctgagttttgcacaggcaaaaggaaccgagagtgctcctaaagcttgacatcactaaggcatttgattcggtttcatggcctttccttttggaggtcttacaacatcttggttttggcacttggtggtataatttgttggcaaagtcgctacgctcttcatctactagatttttggttaacggtgaaccgggagagttgatttatcatcaaaggggtctccgtcagggagaccctttatctcctatgctctttgtgcgtattatggacgttctaaattctctaatcttgaaggctgagagctatggtttgttacacccgctgcttcgtcgaggaattgggcagagaatttccttatacgccgatgatgtggttctttttatgcatccggtgaggagtgacttggagacagtcaaacaagttttgaaggttttcggtgaagcctcaggacttgttactaatttaccaaagagctcgtttactccgatttgctgcaatgaccaggaggttttggcaatccaagagacgctatcttgtaatttggtgcaatttccttgcaagtactcgtgcctacctttgtctattagaaagctctccaagaggggccttctccctctatttgagaaggttgcggatcggttgcctggttggaaagctactcttatacacccgactaggagggctactcttgtcaaatctgtcctctcagctattccaatttatcaccttattgcacttcaatgccccaaatgggtcatcaaagccattgacaagattaggaggggtttcctctggaaaggccgcaaaggtatc

SEQ ID NO: 127136 - DNA, 6022 bp, Zea Mays
cctgagcctccgcctgccgccaagatgaatgtggggcaggctgcccacctgtccgggcagatgtctgggcagacagcgcagatgaatcaggtccctgccaccggtgtcggcattggcgttggcactgccgatgggctaccgcagcaccagccaatgcaggagatggcggcgttctcgggaacggaccagcagtttgtcatgtttcggaccacaatgcgcgaaaagatatttaactatataggaaggaaacagtcatcggctgagtggcggaagcggttgccagaactggcaaagcgacttgaggagatcttgtacagaaaattcccaaacaagactgactactacaatatgatgaagggaccagttgagccgcaattgcagtttgctattaagaccttgagcgctcagaaccaacacaatcaacaaaacccacaaatggcaaggcaaatagcatcatcctctagctatggtactatgattcctacccctggtatgacgcaaggcaccaatgcaagttctaggattccttatgtcacagaaaacaatggcctttcatcgtctggtgcaggcatggttcctcagaatgctaacatgggtgcctcgatgcaaggtccaatgtctaatggcttccaacatttaaatgccagcattccacaaaattctaccacaaataacatacaatctacaatgggttcagttggtgtccagcgacaactacctcatatgattccaactccaggatttagtaatcaacagaatgtaccttcaaatcctgactattcaaatggaactggatatttcaatggtgagccagctgtggcatcacatatgcagcaccagaaccaatttcctagcaaccaaattcagcatattgggggccacaataattctggaatacattcaagcatgctggacagctcatctgcatacggtttatcagatggacacatgaatggtggaataggagtgcatgggtcaaatatgcagctaacaaacaggaccacggcaccacaaacatatatgaacatatccccttacggcaattcgtccaaaccgatgcagcagcaattcaatcagcatcctcagcagagaataccaacatcagttgaaatgactggttctggcagcttctatgctactggctctacccctttaaccacagcaaatagtcagagcatgaatgttgcaaatttgcagtctagatcaagaatgaatcagatgttggtttccaatcagttaaacattcagtccattcagcaacagccccagataaaaaatgaggttttggatcaaacagaaaaggtgaattttcagtcaccacagttgactcatgatcaactactacgccaacacccaatgccgcaacatcaggtgcaacctaattcccagtttgttcaaaatcagtatcatataaatcaacagcagccaaattcacagcatcagcaggctatgctaaggaacaattcctttaaacagtctcaaatggcttccacccattcaatgcaactggcagaacaggggtcactgctacacactgaactggtatcttcacaaactagtgatcctgctgatcttccaagcttccagggtcaataccagcaaagaaatgctcttgacaatgttaaaggagggcagatgcttggtcatctatctagctctcaaaattttcatccttctgtctcacatggttctcagcaattgttgccctctaaccagcagcttgatgacggttctaatgctgtaagctatgtgctgaaaggatcgcaggcagagcaaatgctgcgtcctcaatggcagccacaaacaatggaaaaggctcctgttactactaattcaacactcgaaaagcaaatacaagaagatttttgtcaaagagcaatgtcgcaagatggagcacagcaaccattttcatcagattggcgtctttctaattgcactgcagcttctattgatcctgcattgccgaagcctgcagctggagggtttgaacaggtcaatggaaatatacattacctccgtcagataaagtggttgctgctactgtttcatgcaaaaacatgcacataccctgttggaagttgtaagttccatggttgtgttcaggtgcaggagcttttgaagcattttcagaactgccaaagtaaagattgttcatacaggagctgcagtaagtcaaaaatgatgtctcaccattataaaacttgtgtcgatgaacaatgtcctgtgtgcagcgttgtaaggaagtttttgcgccaatcaactgaacaggcatctaagcaaaaagctctcgagtctagaaaacttgctcaacaaaatgtgcctcagagaatcatgaacgggatagaaggtgatagaatggatgttgacccaatgtcagttgaagcatttgatgatcaaccattcgttccaaaacgcttgaagacgcatcctccatcacccagtggcctagagaatgatatctctgtagtctccaattatcatgtaaactcaggctttgcattgcaggaaacacagcctgagcagcttgaccacaataacaggacatcatatctgaaacgagaggtagatgcaaaggctgacatgcgagctcctcaaaagcccataaaaattagttatggtattgatggaaatgtgactgcatcaaggcataatgtgattcctggtgttcccagtgagattaattctcatatcaagcaagaaaacttgttggttgacaaagagacaagtgaaaccgcccttgaggttaagaatgaaacaaatgatccaactgatgcgactgtgtctaaatcaggaaaaccaaaaataaaaggtgtttcaatgacggaattattcactccagaacaaataatggaacatattgacagtctaaggctgtgggttggtcagagcaaggctaaagctgaaaagaatcaagctattggtcattctgagaacgagaactcttgccagctctgtagagtagagaaacttacttttgaacctccaccaatatattgttctccttgtggagctcggataaagcgaaacgcgccatactacactgtgggtactggtgatacacgtcattatttctgtatcccttgttacaatgagtctcgtggtgagactattgaggttgaaggtcaaacatttccgaaggcaaggttagagaaaaaaagaaatgatgaggaaacggaagaatggtgggttcaatgtgacaaatgtgaatgttggcaacatcaaatttgtgctttatttaatggaagaaggaacgatggaggacaagctgaatatacttgccccaattgctatgttgaggaggtcaaatgtgggctacgcaaacctttaccacagagtgctgttcttggggcaaaagatttgccgagaactgttcttagtgatcatatagaagatcggctatttaaacgacttaagcaggagaaacaggaccgtgcagctgctgctggcaaaaatattgatgagattcctggagcggaaggacttgttgtcagagttgtttcatcagtggataagaagctggaggttaaaccacgttttttagaaatttttcaagaagacaactaccctacagagttcccttacaagtccaaggctgttctcttgttccagaaaatagaaggtgtggaagtatgtctatttggaatgtatgttcaagaatttggtgctgaatgctctttcccgaaccagcgtcgtgtttatttgtcatacttggattctgttaagtacttcagacctgagattaaaacagtatctggagaagccttgcgtacatttgtgtatcatgaaattctgataggatatcttgaatactgtaaactgcggggattcacaagttgttacatatgggcttgtccacctttgaagggtgaagattacatcttatattgccatcctgagattcaaaagactccgaaatctgataaactgcgtgagtggtatctatctatgcttcggaaagcttctaaggaggaaattgttgttgagctcacaaatctatatgaccatttcttccttactatgggggaatgcaaggctaaggtgactgcttctcgcttgccatatttcgatggagattattggccaggagctgcagaagatatgatcaatcaactccgacaagaagaagacgaccgcaaactccagaaaaagagtaaaacaaagaagattattacaaaaagagctcttaaagctgctggccacaccgatctcagcgggaatgcttccaaggatgctatgttgatgcaaaagcttggtgaaaccatatatcctatgaaggaagatttcattatggtccatttacagtattcgtgtagtcactgttgtacccttatggtgtctggaagacgttgggtttgtcatcaatgcagaagcttttacatctgcgacaagtgttatgatgcagaacagcaacttgacgacagggagaggcacccgagtaataatagagacacacatatgctccatccggttgatattcttggggtgcccaaagataccaaagatagagatgacatcttggaaagtgagttctttgacaccagacaggcattccttagtctttgccaaggaaatcattatcagtatgacacacttcgacgcgcaaagcattcatcaatgatggtgttgtaccacctacacaatccaactgcaccagcatttgtcactacgtgcaatgtctgcagtcatgatattgaaactggtcaaggctggcggtgcgagatttgtccagattttgatgtgtgcaactcttgtttccaaaaaggagtggttactcatcctcacaagttaacgaaccatccatcagctgctgaccgtgatgctcaaaacgcagaagctcggcaaatgcgtgtccagcagctaagaaagatgcttgatcttctggtacatgcgtcgacatgccgctctggtagttgccagtatcccaactgccgaaaagtcaaggggctattccgtcatgggatgcagtgcaaaacgcgtgcttcaggagggtgtgtcctttgcaagaaaatgtggtacatgcttcaactccatgcccgagcttgcaaggattcagactgcaatgtgccgcggtgcagggatctgaaggagcatcttagaaggttgcaacagcagtctgattccaggaggagggctgctgtgaatgaaatgatgaggcaaagagcggcggaggtcgctgcaaacgaatagttgcctctgtacaggtatactttgtggaaagaggataggaagaagtatgcatgcagggttgcactcctcacccccacaccaaggagaaagcttgggatggttgataaattataggattggtaggtaaagatcagccgcttcacatggatttcttacgacgaagatctcggccatccttcgcctatggttaacaacatataggctcgctgaagcagcagggtgcgccaccgtaggctgtctgtaactgtcgcttgcaccccctccagtgctgaccagctacaccctgcgtgccgcaccgatgctgtcgtcgactggggcgcattgcaactcctgggtgtggtgaattctttgatttgacctgtactagctgaactgatcttctctgttgctgcttgctgatgatggtgtataataggtgtctctggacagttgtcagtcgtgcattgctgaagatttggtgtagctgttgtttgtcccccccctctccattgtcttcttgtctccaggccaggagaggggtataggttaaaaaagggtaaaaagggatgggcgttattggacaagtatttcttttatttctgccccccattttgtaggactcatctttgttaaagtataaagcaaagtaaatcctccatgtcttctcttgtagcactgttgctccatagattttctttctagtgcgggtggcacaggagggcgacaagttgtggtatgtatactcttctgctatcagtttttctggtttttttgacgaaacgaatggattttggttcggtcgtccggaggatggaggatgcagttgaaagggatgtgttgatcctgtttgtattag

SEQ ID NO: 127137 - DNA, 2128 bp, Zea Mays
ctgatatttttcttttgtgctaaacattttcaaaccacacattctgcagtgggttcaatgtgacaaatgtgaatgttggcaacatcaaatttgtgctttatttaatggaagaaggaacgatggaggacaagctgaatatacttgccccaattgctatgttgaggaggtcaaatgtgggctacgcaaacctttaccacagagtgctgttcttggggcaaaagatttgccgagaactgttcttagtgatcatatagaagatcggctatttaaacgacttaagcaggagaaacaggaccgtgcagctgctgctggcaaaaatattgatgagattcctggagcggaaggacttgttgtcagagttgtttcatcagtggataagaagctggaggttaaaccacgttttttagaaatttttcaagaagacaactaccctacagagttcccttacaagtccaaggctgttctcttgttccagaaaatagaaggtgtggaagtatgtctatttggaatgtatgttcaagaatttggtgctgaatgctctttcccgaaccagcgtcgtgtttatttgtcatacttggattctgttaagtacttcagacctgagattaaaacagtatctggagaagccttgcgtacatttgtgtatcatgaaattctgataggatatcttgaatactgtaaactgcggggattcacaagttgttacatatgggcttgtccacctttgaagggtgaagattacatcttatattgccatcctgagattcaaaagactccgaaatctgataaactgcgtgagtggtatctatctatgcttcggaaagcttctaaggaggaaattgttgttgagctcacaaatctatatgaccatttcttccttactatgggggaatgcaaggctaaggtgactgcttctcgcttgccatatttcgatggagattattggccaggagctgcagaagatatgatcaatcaactccgacaagaagaagacgaccgcaaactccagaaaaagagtaaaacaaagaagattattacaaaaagagctcttaaagctgctggccacaccgatctcagcgggaatgcttccaaggatgctatgttgatgcaaaagcttggtgaaaccatatatcctatgaaggaagatttcattatggtccatttacagtattcgtgtagtcactgttgtacccttatggtgtctggaagacgttgggtttgtcatcaatgcagaagcttttacatctgcgacaagtgttatgatgcagaacagcaacttgacgacagggagaggcacccgagtaataatagagacacacatatgctccatccggttgatattcttggggtgcccaaagataccaaagatagagatgacatcttggaaagtgagttctttgacaccagacaggcattccttagtctttgccaaggaaatcattatcagtatgacacacttcgacgcgcaaagcattcatcaatgatggtgttgtaccacctacacaatccaactgcaccagcatttgtcactacgtgcaatgtctgcagtcatgatattgaaactggtcaaggctggcggtgcgagatttgtccagattttgatgtgtgcaactcttgtttccaaaaaggagtggttactcatcctcacaagttaacgaaccatccatcagctgctgaccgtgatgctcaaaacgcagaagctcggcaaatgcgtgtccagcagctaagaaagatgcttgatcttctggtacatgcgtcgacatgccgctctggtagttgccagtatcccaactgccgaaaagtcaaggggctattccgtcatgggatgcagtgcaaaacgcgtgcttcaggagggtgtgtcctttgcaagaaaatgtggtacatgcttcaactccatgcccgagcttgcaaggattcagactgcaatgtgccgcggtgcagggatctgaaggagcatcttagaaggttgcaacagcagtctgattccaggaggagggctgctgtgaatgaaatgatgaggcaaagagcggcggaggtcgctgcaaacgaatagttgcctctgtacagcactgttgctccatagattttctttctagtgcgggtggcacaggagggcgacaagttgtgg

SEQ ID NO: 127138 - DNA, 2008 bp, Zea Mays
cagcgcacggccaccctgccgcgctcccggtccctgcgcgtgtttatccacgcctcacgccgcgctcgcttcggccacggcggtaatggcggcggcccgacgcctcttctccttccacctccaagcgcgtcctctcgccgccggtgttgccgtcgcgaccccgcactgccacggaaagcatgacgcggtctcgtgcaaggccacggggaaaaccaagcccaaggcgaaggcgggcaagggcggcgagcggcagcataggcgggcgctggaggagcatctcaagcggcgcacccgttccgcagctgccttcgatgccgacctgtacggtcggcgcgcccacgagcaccatatccccgtcttgcttggcgaggtcctcgccgccttccgcaggccccgcccgctccgctccttcgtcgactgcaccctcggcgccgcaggacactccctcgccatgatggaggcgcacccggagttggagttgtacattggcatggacgtcgacccctccgctctggggattggccatgggcacattgaggccttccttgctggtagggaaagggaagcgaatggaggggaagacgatgccttgcttgggacgctgcgtgcctacactcatgtcaagaacttcaagtacatcaagcaagttctcagtagcgtcgatgagagtctagtggttggatcttctggagttgatggtatcctcattgaccttggcatgtcatccatgcaggtgaataaatctaataggggattcagtgtactccaggatggtcctcttgatatgcgcatggaccctaaggcaactttaagagcagaggacattttgaattcttggccggagcttgaacttgggcgtatcctgcgtgaatatggggaggaaagcaactggcaatccgtccagaagcaaattgttaaagcccggtctgtgggcggtttacactctactggggatcttgtcaaactaatccaaaggatgtgtaccatatcaagcgggcggcagggctggatcaagacttcaacaagagtgtttcaggccctcaggattgcagtcaatgatgagctccgggttctagaagattcactccattcatgctttgactgtctggcgacaggtggtcggcttgctgtaatctcattccacagtctggaggatagaattgtgaagaaaactttcttggagctcatccatgggggtgaagcaaatgaagaagacgacaaagacgaccaggcactcactgatatcgaagacggagatgaaccatggtctggccagagagtgcaaggaaggaatggaaccgtcctcacaaaaagaccaataaccccctcgcaagaggaggaaaaactaaaccagaggtgcagaagcgcaaagcttagagtcattcagaagacctgaataatttcggataaattttgaaggattcctgggcacatcggcgtgtagttgtttatagccagagaaatgtgaatgggattctcacttgcgtgcacagccagctgcagtctggatcaccagaaattttacatcagccggatgtggtggtgctatttatcctcgacaagaaatctagaggcttaggttagtcgaaaaaaaactcactgtatctgcatcagtttctgaacttcgttcatgtatatcgcctcatgaactctgtaaacctttcacttgcaagacacgataatcagtttaggccctgtttgggaacaaagtttttgaaaactacagtttttgaaatactatactatactttagttatgacaataccgtagtttataataccgcagttttgaaaactgaggtccagagctaagtttagaatgccttaaaacaactatagtatttgcaatacttcagttttgaaaacagagattttacccagcttgccaaacaccattatgtatataatactgcagtatttgagaatactgcagtattcttccaaaactgcagaaaaactttgttcccaaacacccccttagggttttcgagccctccttcactcctggt

SEQ ID NO: 127139 - DNA, 725 bp, Zea Mays
cgcgcgccgtcggcgtcgccatcaccgtcgcaccgcgcgctgctcccagcctccctttcccttccctggctgcttggctgggttagttgattgactcccagtaaaacgggcagcactgcacggcacgacagaacccactcggccactcccgcctctctctactatacccagctactcgcacgcagatccacccacccacccatcgttccttccgttccgtccgtccacttgccgttgccgaccacaacccgctcccggaggacggcgggatgagggggcaagccaacggagtggaggaccgccggcagcggggcgacgaccacgaggcggacaacgacggcgaggaggcggaggaagaggagggcgacgacgagggccgccaccggggccagggcccgccgcagcagcggcggcaccaggcccagaggccgtactccggcccgcagcagcagcagcagccgcgcccgccgccgccgctcgccaggaacgtcggctacgtcggcaagcatcgcctctccgccgccatcgcccgcctcgaccaggagctccagtccctccaggttactactgcgctcagcttgctcccctcccctccccgccctcctctccctcgcacctttgctcgatcaacggcaaccgcggtcgactccttcctagctcgtccgtagtagagtcaacctgctgctgccacagccaggcgcgatccagatcttgcctgccgcgta

SEQ ID NO: 127140 - DNA, 1099 bp, Zea Mays
cgcgcgccgtcggcgtcgccatcaccgtcgcaccgcgcgctgctcccagcctccctttcccttccctggctgcttggctgggttagttgattgactcccagtaaaacgggcagcactgcacggcacgacagaacccactcggccactcccgcctctctctactatacccagctactcgcacgcagatccacccacccacccatcgttccttccgttccgtccgtccacttgccgttgccgaccacaacccgctcccggaggacggcgggatgagggggcaagccaacggagtggaggaccgccggcagcggggcgacgaccacgaggcggacaacgacggcgaggaggcggaggaagaggagggcgacgacgagggccgccaccggggccagggcccgccgcagcagcggcggcaccaggcccagaggccgtactccggcccgcagcagcagcagcagccgcgcccgccgccgccgctcgccaggaacgtcggctacgtcggcaagcatcgcctctccgccgccatcgcccgcctcgaccaggagctccagtccctccaggaggagctggacgagcttgagaccatggaatctgcgtccgcggcgtgccaggaagtggtcacgagtacggaagggaagcctgacccgcttcttcctgtcaccagtggcccggagaactcgtcttgggacaggtggttccagcgggtgcgctcccgcagcaacaaatggtgggcatcgaaaggccctgacttctcgtagctcctgcaaacaaagcggagaccatcctcaccagtcgtgtgcagattagaatgaaacacgttgagatgtatcgtccattggtgtcctggggaaacagaacaggcggcggcggcggcgagtgcggtgtggctctcgcaacgcttgatagttttttttttttttgagagaatcattgtgtatgtagtaatccctaacgaggccgaacatcgatgcatccacatcaaggcctggttgttgtgtttcctagagattctgactcactaggtcggattcctgatggtcatgcgatctcgctgttctttcttcaaacgtgaagaataacattgtctttgaaaagtttc

SEQ ID NO: 127141 - DNA, 621 bp, Zea Mays
atgtgcacgagccaacctgggagattacatatgtgcaagcctacattcctattccctagcggtactctactctacttgacgtacccaaattcctggaataagttagaggggtgcccacttgggaagaaccctgccattgccatacgccacgggcttccggacgctgcgcagctcgccgtccacctccaccacctcaggcccatcgagatcggcgtccgtgcagcgggggccgtgggcagagacagttcgcgtcttggccgcgcgcttcttggactgctggcccgtgcgttcgtcgaagtcatagtcgccgtaactcgctgcagagatggcggtggagccccttcgcttctttgccgcatcggagtgctcgttgccgccgccacctccgccgctgtttctccttggatttgggtgtttgctgaggaagtcctcgatggttgcaagcaagcggtccccgtacttcttgacctttgtcttgccgaggccgtttatatccaaaagctcttcttttgttctcggtactcggatactcatttccttcaacgtgtctgttttgaatatgtgatacgcattgaatccttcgttacactcctccattatctgttctctaaggctaagtaa

SEQ ID NO: 127142 - DNA, 2192 bp, Zea Mays
gctggcccccatgtgactgtgagcctgtgacaagccttcatcaatcacacacacacgccgctcccagctcccatccccatgtgcccgctctgaatgtcactgccactgccactgcccgctccacgctcctttccctctcagcctctctctagatcacaggaccaacccgccgttccgccggcactctctgtccgtctctcctccgcccggatcgccaccgcgcaagagcagcaggcagccatgatcctccgcagcgcggcggcggcgtcgttcgcgctgctgctgctgctcgtcatcccggcggcggcgcaggacggcggggacgcctcccgctttgcggcgccggcgtcgtgggctttcccgaacccgcggctgcgcgcgtcctacgccgcgctgcaggcgtggaagcgcaccgccatcttctccgacccgtccaacttcaccgccaactgggcggggcccaacgtctgcgcctacaacggcgtctactgcgcgcccctccccggcaccggcccccacgacggcgtcgtcctcgtggtcgccgggatcgacctcaaccacgccgacatcgcggggtacctcccggcgtcgctgccgctgggcgtccccgacctggcgctgttccacatcaactccaaccgcttctgcggcgtcgtcccgcccacgttcgcgcacctgcggctcctccacgagctcgacctcagcaacaaccgcttcgtgggcgggttccccgaggtggtgctgtcgctgccggcgctccggtacctggacctccgcttcaacgacttcgagggccccatcccgccggcgctcttcgaccgcccgctcgacgccatcctcctcaactccaaccgcctccgggacccgatcccggccaacctcggcaactcgccggcctccgtcgtcgtgctcgcgcacaacgcgctcggcggctgcatcccgcccagcatcgggcggatggccgacacgctcaacgagatcgtgctcatcgacgaccagctcacgggctgcgtcccgccgcagatcggcctactccggaagctcaccgtcttcgacgtcagcgacaaccgcctgcaggggcagctcccgagcgccatcgccaacatggccgcggtccaggagctcgacgtcgcccgcaaccgcctcgagggcgccgtgccggccggcgtctgcgcgctcgccagcctcaggaacttcacctacgccgacaacttcatcacctcgcgcccgccctgcgccaaggccaccgccgacggcgcctggaactgcatccccggcgcgcctgcgcagcgcccgccggcgcagtgcgcggccgccgcggcgcacccgttcgactgcagcaaggcgcaatgccaggccccggcctacgccccgacgccggaaggcggccgcggcggccgcggcaacggcaggcagccgcccacgccggggtcgtcgcctcccaaaggggccacccaccaccacgccgtcgtcaagccactcgccaccttcccatgggtcacccaccacgccaccctacccgacgccaccctcaagctccagcacgccatcctaccactcgccaccgcacggcacgccgaccccgtcacacccgtcaccgccgtccggctccacaactcctccagtaacaacaacacatacgccgccccctccgccgacgtccgcggacgagccagacgtgcggtacgcgccgcccccgagctcccacgggtcgccgtcgcctccctccacggggtacaagcccccgtcgtcctccggccaccccactcccaccacgccgtcgccgcccacggcggagcaccccggctacgccctgccgccgcacccgcacgccccggggaccgggaccccctcgggaccgactcagggcgggagccccggcaccggcgagcaccatccgggcggcggcggcaagctgccgttcccaccggtgtacggcgtggcgtacgcgtcgccgccgccgccggggaagccgtactagtaaaccacgccttggccgctcgctcgcgctgcctcgccgtcgccgtcgccggagtataatacttttccagccgccagtataatacttctccatgcatccatatccatctagtattttttttctcttggtttcgtttttttttctttctttctttgtatctcatgatgagtatttgatcaaattgaatcaaagagttgctatgtattgattc

SEQ ID NO: 127143 - DNA, 677 bp, Zea Mays
ccaaactcctacacgccatcttcttcctaggccgacggccttagcctccacgccggctgtccttgctctggtttctccccggctccagctcgccagccgcgccctccctgctcgcccagccatctcctcgcctccatggccgctgcaccagccgagtccctccccatgtcagctgcaagcacgccgtgcttccttcccatggccgtctgcagcttctcccatggtgagctccctccagtgccctaggtttccatggccgcccctccctcatcttcctccccaagctgagctcgcccagcccctctctgctccctggtttctccccacgccagcagccatggcacctccttcccctgctcgccctccctctgtgcccagcctcctctctgttcttccgtggagcagtagccctcctctaattctgcagcagcagcttcccctttttcttttgttctccatgaatgaaagcccaagcgccagccccctcccttttgtcaagtgattggaagagagttctagggaaaatcaatggagaagaaaccgtgtttcagttcgacgcgctctaggtgtttgatggaatggatgaaccgaagatccttgttgctcttgcgaaatctgagtctatttagtgttggtaagctaattcattattagtattgattgaattgttagatgaa

SEQ ID NO: 127144 - DNA, 677 bp, Zea Mays
ccaaactcctacacgccatcttcttcccaggccgacggccttagcctccacgccggctgtccttgctctggtttctccccggctccagctcgccagccgcgccctccctgctcgcccagccatctcctcgcctccatggccgctgcaccagccgagtccctccccatgtcagctgcaagcacgccgtgcttccttcccatggccgtctgcagcttcttccatggtgagctccctccactgccctaggtttccatggccgcccctccctcatcttcctccccaaactgagctcgcccagcccctctctgctccctggtttctccccacgccagcagccatggcacctccttcccctgctcgccctccctctgtgcccagcctcctctctgttcttccgtggagcagtagccctcctctaattctgcagcagcagcttcccctttttcttttgttctccatgaatgaaagcccaagcgccagccccctccctttcgtcaagtgattggaagagagttctagggaaaatcaatggagaagaaaccgtgtttcagttcgacgcgctctaggtgtttgatggaatggatgaaccgaagatccttgttgctcttgcgaaatctgagtctatttagtgttggtaagctaattcattattagtattgattgaattgttagatgaa

SEQ ID NO: 127145 - DNA, 572 bp, Zea Mays
gatgaaacagttgatgcattgccattccttggaatttgattatcctccttgatacctgttttacaaaaagaactaatgaggcttagccctgcctagagaattaaaacttgtttctttttaaaagaatgatgtgtgacactgggtatgggtttgttttatgaaaaaggacttgtaatggtgagcgcatcatctgcagtgatgaattcatcattcaagtatggtacctctgtcaggtacatggtttgggtgttaaataataagatgagactagacgttgagcaggaaaggtcgcccgtctgtgtcgcttaaggacagttctgattgttggcctgctgatctaggaccctttaactggccacatgcctcatcatgggtaagctttgcctcggtcggaccaataccagaacagctcgcacgcactgggagtggagagatggcgagagtagcttgtaccctccgtggcaagagactggaaggtggggtgctgtactctcagaaacatggcgggcaccatggcgagagtaacgtgtaccaaccaggccaatggctggatggtggagtgctgtgctctc

SEQ ID NO: 127146 - DNA, 829 bp, Zea Mays
ctcgaagacataaaaatcacaagcggccgaaaccatacatgagctaatgaccatgagattgagtatggacaggagtaggagggcagctagcaatttgcaggctgtggagaggccacgtcagcgcgcgcctcgtgaggctgtctcggcttcctcagcagcaggcagcagctcccatcttctccgctcctgccgcggcaacgtgcggccatccaaaagatgcggccgccgccgaagcccgccagcggcggcggggcgacccagctggccagcaggccaactagcaataggcccggcggcggcgtcctgaggctgcggctgcggctgctgcaggcgccggcggtggtcgcgctggcggcggcgctggcggtgtcgtccgccgctactcctcctcccgcgccggcgccggcgccgctgtgcaacctcccgccgacgctgtcgggctcggacggcggcgggcggcagggcgaggcgaaccggatccggcaccccaagtcggagcgcgcggcgcgctgcacgtccaagtgcgtcagcacctgcgtcctcggcggctacggcgcgccgggcgtcgccggccccttcaacatccggaggcccctggtggtgttcaaggacaccttccgaagccggcagtactgcttggtggagtgctcggacatctgcaatctactcaaggacggcgaagatgaccagtgatcgagaaggggtacagtgagtggacacaacgcacaatgcaagaagacgtacacggcatcgccgccttgacgacatgccatgcgagctataggcggcatggaggaacgtgtttgctctagcgctacacacaattagg

SEQ ID NO: 127147 - DNA, 1487 bp, Zea Mays
aaaatgtacctgctggctcacagagatggtattaggccgggacaagttcattctgataatcccaagctcctcgatcatagaaatatatggatataaggcgcgatttccatatggccgaaggggaaggtgaatggagctactccaagaactgtaggcgtcaacaaatagctgtccgcgagactaagccaatggtcgagactgctgtcaaacaggtgtacgcagctctcctccccagaaccatggtcgtggccgacctcggatgctctgcagggccgaacacgctgctcttcatctctagcgtcctgagcagcatcgctgctgcggctgctgctgaacggtgcaagccgccgagcggcggcggagacgatgacgaccatcacgtggagcttcagttcgtcctgaacgacctccccggcaacgacttcaaccacctgtttcggtcagtcgaggaggagttcagaagggcagcaggttgtgaaaggggtcctcctcctcctccctactatgtcatggggctaccggagtcctattacaacaggctgtttcctcgtcagagtgtgcatctgttccactcctcctactgcctccactggcgctcccaggaacctgagggactagaggcgtggagaaaaccttgtctaaacgaggacaacatctacatcgcaaggacgacggcaccttcggtggcgaaactgttccaggagcagttccagaaggacttctccctcttcctcaagctgcgccatgaagaactcgtgcatggagggcggatggtccttatatttctcggcaggaagaacgaggatgtgtacagtggcgacctcaaccagctcttcgcactggtcgcaacagcgttgcagtctcttgtttcgaagggcctcgtggagaaggaaaagctagagtctttcaacctgccgatctacgggccgtcggtgggagaagtgaaggatctggtcacgtagagcggtctgttcagcatggatctgatcaaacagttcgagacgaactgggaccctctcgacgactcggagggtggcgacgtcgtcgaggacagtgctcgcagtagcatgaatgtcgccaagttcatcagacccgcgctgaagtcttcaattgtctaccattttggagaagccataattgacgcatggtttgccgagttcaggcgccttgtcgctgagcaccttgagaaggagaagaccaagttcaccaccttcgccatgtgcttgaagaaagaataatatggttaagtatatatagatctatttggatgcgtgtgtgcgcatatggatcgtatatatgtgtattatattgctcacatggtatatgtgtattattattactcatagggtgtagctagctactcgcatgtgtattatatttctagctttagagtgtatatgggacaatagagtatatgcacgtatattcattatacgatcgatcatactaaaccagaatgcatactacgcataatatacaagtaatat

SEQ ID NO: 127148 - DNA, 1482 bp, Zea Mays
acagagatggtactggcatgggcagggacaagtaattcattctgatacatataatcccaagctcctctatcatagggatatatggatataagacgtgatttccatatggccgaaggggaaggagaatggagctactccaagaattgtaggcgccaacatgtagctgtccgcgagaccaggccaatggtcgagactgccgtcaagcaggtgtacgcagctctcctccccagaaccatggtcgtcgccgacctcggatgctctgcaggaccgaacacgctgctcttcatctctagcgtcctgagcagcatcgctgctgcggctggtgctgaacggtgcaagccgccgagcggcggcggagacgatgacgaccatcacgtggagcttcagttcgtcctgaacgacctccccggcaacgacttcaaccacctgtttcggtcagtcgaggaggagttcagaagggcagcaggttgtgaaaggggtcctcctcctcctccctactatgtcatggggctaccggagtcctattacaacaggctgtttcctcgtcagactgtgcatctgttccactcctcctactgcctccactggcgctcccaggaacctgagggactagaggcgtggagaaagccttgcctgaacgaggacaacatctacatcgcaaggagtaggaccacgacaccttctgtggcgaaactgttccaggagcagttccagaaggacttctccctcttcctcaagctgcgccacgaagagctcgtgcatggagggcgaatggtgcttgtatttctcggcaggaagaacgaggacgcgtacagtggcgacctcaaccagctcttcgcactggtcgcaacagcgttgcagtctcttgttttgaagggccttgtggagaaggaaaagctagagtctttcaacctaccgatctacgggccgtcggtgggagaagtggaggatctggtcacgcagagcggtctgttcagcatggatctgatcaagcagttcgagatgaactgggaccctctcgacgactcggagggtgacgacgtcgtcgaggacagcgctcgcagcagcatgaatgtcgccaagtacatcagatccgtgctgaagtctttaattgtccgccattttggagaagccataattgatgcatggtttgccgagttcaggcgccttgtcgctgagcacctcgagaaggagaagaccaagttcactaccttcgccatgtgcttgaagaaagagtgatatagatgtatcgatatacatatacgtatgtgtattgtatttcgtacggtgtagctaatatactcatatgtgatatatcatgtgtatttcatgggacacgtacaattgagtatatgtgtgcatgcattatacggtacggtcgtactaaaaccagttggcatgcatagtatgtgtactgcagtatacgtatactggtatacaattattatacatggattacgtggttatgtttattttatatat

SEQ ID NO: 127149 - DNA, 693 bp, Zea Mays
cgatgtccgtgttttagaagtatgacgacatgggttctaggaagttacccgttcaatttgctccaggccgctttgattaagcaggcattaaaaaaaataccaaatggaagctttgaattatatatattcaaggtctccagagctgcatcgtccaatacactcctgtcgaggcctaagcttgcttcttcttccaattcattatcaagatgtatactttctacctctccgagttcatcattgtcagggtctcctcttgccgcctcttcacttttactatcaaggtaaactctaattctaatgcgcttgcctttgatgtatcgatattcccatttcggtggtgggtatttcttttttaacttttcgtatttgtccatcatctctaacttttgaaatacatcacctagcatcctgataatagaaccatctggtcttacgcctagttcctccatatcagcaaaaatctggaaaatttaggtgtaagacatcataagaatgcttggataattatccccaactaatgtttctttgagcaaagctttcctatcatggggaaaacggtatgaaatcaaatcctatcttttagttaaaacagcacgcaaactggtgaaatgagggaaaaaagaaattccatttcctacctcgaacatcttatcatgatctccagcactgtaataaaaagaaataattctcatg

SEQ ID NO: 127150 - DNA, 405 bp, Zea Mays
gagcattctgtaataaaatgttccagctaccaaacgataattttgaccatcacaacttcgacttgtccagctctgcctctattagtcggttcagctctgcctctataatttttttggtccactgtacaatgggctcctttattacctccttgagaatccttttcagtttggtccactgtctcatcatccatcgaatcacgacccaagcacacaatcacgccatcattagtagcaagtgacccttctgaatctgaatcagccttattttctgagccctcaacaaggttctctttctgggaatcatggcatcatctttgaagatgactgacgaggaattacttcattggagctttcaatttctcgaatagagttctgacccagtgagcttcctttccatggccttac

SEQ ID NO: 127151 - DNA, 260 bp, Zea Mays
gaaaatttgacgaccactgacatgaagacatgtaaagcttcgcatgttgatgaccaagaaaataaatgtcaaaagcaggaacttggaacttatcgagtcaagtaaataatttcttcatgaaatgcttgtgtacatagactgtaaaaaaaatcatacgaaacactcatctcggattcatacgccaattaattcatacaaactggttgtgaccttgtggttatatgctacaaaatataatgggaatgtgcagataataaaaa

SEQ ID NO: 127152 - DNA, 1650 bp, Zea Mays
tggcattgagccgggacaagtaattcattttgatacatataatcccaagctcctctatcatagggatatatggatataagacgtgatttccatatggccgaaggggaaggagaatggagctactccaagaattgtaggcgccagcaagtagctgtccgcgagaccaggccaatggtcgagactgccgtcaagcaggtgtacgcagctcctccccagaaccatggtcgtcgccgacctcggatgctctgcagggccgaacacgctgctcttcatctctagcgtcctgagcagcatcgctgctgcggctgctgctgaacggtgcaagccgccgagcggcggcggagacgatgacgaccatcacgtggagcttcagttcgtcctgaacgacctccccggcaacgacttcaaccacctgtttcggtcagtcgaggaggagttcagaagggcagcaggttgtgaaagggctcctcatcctccctactatgtcatggggctaccggagtcctattacaacaggctgtttcctcgtcagagtgtgcatctgttccactcctcctactgcctccaatggcgctcccaggaacctgagggactagaggcgtggagaaagccttgcctgaacgaggacaacatctacatcgcaaggaccacgacaccttctgtggcgaaactgttccaggagcagttccagaaggacttctccctcttcctcaagctgcgccatgaagaactcgtgcatggaggacggatggtccttatatttctcggcaggaagaacgaggatgtgtacagtggcgacctcaaccagctcttcgcactggtcgcaacagcgttgcagtctcttgttttgaagggccttgtggagaaggaaaagctagagtctttcaacctaccggtgtacgggccgtcggtgggagaagtggaggagctggtgacgcgtagcggcctgcagttcagcatggatctgatcaagcagttcgagatgaactgggacccgttcgacgactcagagggtgacaacgacgtcgcgtcgtcgtcgaggacagcgctcgcagtagcgtgaatgtcgctaagctcatcagatccgtgctgaaggctctggttgtccgccattttggagaagccgtgctcgacgcgtgcttcgccgagttcaggcgcctcgtcgctgagcaccttgggaaggagaagaccaagttcaccaccatcgccatgtgcttgaagaaagagtgatatatatacgtatatgtgtattgtatttcgtacggtagttaatagcctaatactcatatgtgttatcatgtgtatttcatgggacgacgtacaataattgagtatatgtgtgcatgcattatacggtacggtcgtactaaaaccagttggcatgcatagtagtatgtgtactgcagtatacgtatactggtatacaattattatacatggattacgtggttatgtttattttatatatactactgtgatggcctaggtacccaacgctattaggtagagaagattatctgtggcgcattgacaattaataaagggtacgtagtttcagctatgggtcactaggattatattagcactatttattaggaacatgatgacgaacattgttattatcaaactaaaatttgacaccaaaacaag

SEQ ID NO: 127153 - DNA, 2668 bp, Zea Mays
catcactgttcggcagtgctgtcaccgctagcaactgcagtgtgtgagttcacagctcagtgagcagctcctgaggctctcggagttgaaaggtgacgatttcactagtatgctagagtagatcaagcacccttttgttcaatccttcgctcaaatcggatccttttcctgctatccttttcacccttccaaatcgaccaagaaagctcatccagttttgggggggatcacctattttggagtcaccttgccgtcgtcatcagccaatttactcacacacctgacggcctgcatgccatcaatgctcgctcccctcccctgatgactgaggtgtttatcatgtgagagcctctccgttttggcgtcacaggaaacccgctctcatggtccactgctggtggagttcggctggagttcatttattcccaatatttcagcttcggcttttggaggtccacaaattctcgagttgttgggaaaatcgggctggcctcttattagagcccttttggcccttgctcctctttccagcagaggtttcaacttctctttcccccctgaggtttcgtgagcgcagcagtaaggtttctgaaactgttcttggaggtttgctctcgccggtttccactgtccctgctttatctgcctgggacggctccaagatctgagcttgggggcgttcttggtgcaaagcggagcaatccaccaaaccgccccgggatttggagctggaataatccttccatgggttcccggtccggctgtggagcggcgatggcggcggccgcggccgcggtgttggtttcttggctgtgcttcgcggcggccggcgtcggcgcgataggggcgaactggggcacgcaggcgagccacccgctgccgccggagacggtggtgcggatgctcaaggacaatgggttccagaaggtcaagctgttcgacgccgaggagggcaccatgagcgccctcaggaagagcgggctggaggtgatggtcggcatccccaacgacttgctgtccacgatggccaccagcatgaaggccgcggagaagtgggtcgacaccaacgtctccagctacctcaacgacggcgtcagcatcaggtatgttgcagtcgggaatgagcctttcttggagacatacaacggaagcttcctgcagtccactttccccgccatcaggaacatacaaggcgcgctcataaaagccggcctgggcaaccaagtcaaggtgacatgccctctcaacgccgatgtctactcctcgacgacctccaagccttccgacggggacttccgcacggacatccacgacctgatgctcaccatagtgaagttcctgagcgacaacggcggtgccttcaccgtcaacatctacccgttcataagcctctacatcgacccgaacttccccgtggactacgccttcttcgagggggcctcgtcgccgattgtggacggctccttcacctacagcaacatgttcgacgcgaaccacgacacgctgatatgggcgctgaagaagaacgggttcgggaacctgcccgtgatcgtcggcgagatcgggtggccgacggacggcgaccggaacgccaacgcccagatggcgcagcgcttcaaccagggcttcatgacccacatcgcctccgggcggggcacgccgatgcggcccggacccgtcgacgcctacctgttcagcctgatcgacgaggacgacaagagcatccagccagggaacttcgagcggcactggggcatcttcacctacgacggcctgcccaagtaccagctgaacctggggacgtcgaacgcgggcggcggtctcgtgagagccaagggcgtgaagtacctcgagaggaagtggtgcgtgctgaagccttctgtgaacctcaacgacccgaagctcgccgacaacgtgggatacgcgtgctccatggcggactgcaccagccttggctacaagacgtcgtgcgggatgctggacatccgcggcaacgtctcgtacgcgttcaacaactacttccagaagaacgaccaggacgacgtggcctgcgggttccagggcctcgcgacgaccacgggccaggaccccagcaccgggacctgcaggttcggggtcatgatcgaggtcgactccgccttctcgtggaggctgcaggggcttgggagcaacctcctcctgttcctcctgcttggggttctccagctatccctgtccttctcttagacgcagaggttctgcgagggatgggtggggtggcagtgagcgcataaacagtctgacaacagcttgaggatattagatgtgtgttgtcagtgccattcatttagaaactctttcctctatgacccctccgcccctcttttccttttcttctctttggcgaggaaaccgcagaccgcggtttcaggcgttcttgattgattgttgctgttagctttgatccgtcagttccgttgcggcgacagcgacgaatgatgcattgagattgagccgtccactgggcctctgcaacttgggcgagctctgctcaggtttctcagcaaatatctgggcctctagggatgctgcgccttgactgaccaggaacaggggggcacctagatctcatctcatggtgtagaaacagacagccctttgctgaatcattcattagcaacgaaaaaaa

SEQ ID NO: 127154 - DNA, 75 bp, Zea Mays
aggaaggagaagaagaaggactcctccaaacggaaggagaaaagatcttcttcctcacaccgtgaagagaagaag

SEQ ID NO: 127155 - DNA, 1839 bp, Zea Mays
gggcttgtggctagccgtgcagaatacagagcgaaagagagagatggctaatattgggaatcttgttatctgttctccttttcaagctgctctccctaggcttttgggtttgtgaggcgttggctcccttccccactgcttcctcccccactgccggtcgctgtgcaagagctgccacgagacagcagattccccatcatccaaagcgaggctgagggggaggagaggaagcaggaatagcctaacaggggtatagatctcaggaagctccatgcgggtgagcttgtgcccaagcctgtgtcccggtgcgcgaggctgagcttcttgcccgttgcccgtggcgcccccgagctcaccgatgcgccgccgccgccacggcttgagctccatggctgtccagcgcgctggtgcggattgacaggcaggttgtcctgcccgttcttttttctgcgaggtagctgcttgggcagacaagtaggagcagcggctcaaacttcggatctcggcatgggctcctttgggatggactggaaccagaaggcctccgtgttgtgggactgggagaacttgccgcccgtagccgtaggcgcgagcgggagcgagaaccccaggatggctgctgcgcctcaggctttgcattctgcctgtggcaccatctcttccagctcagagatggggtatggctcatccaagagctccgtatccgcgtcggctgatgattcttcacccaaggccaaggggaaaagcatggagctcaacttcgcacctgacaaagtgcctgacaagaacactgattcagggaaggttgacgacgccaggacctctccgtcgtcgccggtgattgccatcagcagtgcagagcccgtgcttagcctgaagcttggcaagagaacgtatttcgaagatgtctgtggagggcagagcgtcaagagtttgccgtcggatacgagtgcagtgactcctcctcctgcttctccgaagaagacgaaggtgactccaaacaagaaatcttactgtcaggttgaaggctgcaaggttgatctctcttctgctaaagagtaccatcggaagcacagagtctgtgaacctcattctaaggctcccaaggtggttgttgctggtctggagcggcgcttttgtcaacagtgtagccggttccatggattagctgagtttgaccagaagaagaaaagctgccgcaggcgcctcaatgatcacaatgcccgcagacggaaaccacaacctgaagcactttcttttgggtcatcaaggctgtcggcaatgttctatgagacaaaaggtccctggttaagagctggtggtgttgatgggttgcatcaaccaagtcagcaggtgtggaacaactttatgccacatggtgtccatcaagattttgatgggttcacagctttcaaaggaaccaatgcaaaggtccttcatcaaggcgttgaagcttctgcggtcgcctccaaccagaacggcgccccacaaccggaccttcatcgtgctctctctcttctgtcaaacagctgggctggtggtggtaccggtaccggtaccgaccagcacccgacggcccagctgcgccacgctgccctgagcagcagcctcgccgccagctccgtctccgtggcgcaggcctcgccagcagggctgtggcaggacggcggcgcggccctgggccaccacgactacgcccacgcgttccaggctatcaacacgccgggcggcggcggcgccgccgctcccattgcagtgggtcaggagctgcttcagctcccgcgtccgccgtccctgtacgacgacggctcctcgtcccgctacgacctgatgcgctga

SEQ ID NO: 127156 - DNA, 1944 bp, Zea Mays
gggcttgtggctagccgtgcagaatacagagcgaaagagagagatggctaatattgggaatcttgttatctgttctccttttcaagctgctctccctaggcttttgggtttgtgaggcgttggctcccttccccactgcttcctcccccactgccggtcgctgtgcaagagctgccacgagacagcagattccccatcatccaaagcgagcgaggtagctgcttgggcagacaagtaggagcagcggctcaaacttcggatctcggcatgggctcctttgggatggactggaaccagaaggcctccgtgttgtgggactgggagaacttgccgcccgtagccgtaggcgcgagcgggagcgagaaccccaggatggctgctgcgcctcaggctttgcattctgcctgtggcaccatctcttccagctcagagatggggtatggctcatccaagagctccgtatccgcgtcggctgatgattcttcacccaaggccaaggggaaaagcatggagctcaacttcgcacctgacaaagtgcctgacaagaacactgattcagggaaggttgacgacgccaggacctctccgtcgtcgccggtgattgccatcagcagtgcagagcccgtgcttagcctgaagcttggcaagagaacgtatttcgaagatgtctgtggagggcagagcgtcaagagtttgccgtcggatacgagtgcagtgactcctcctcctgcttctccgaagaagacgaaggtgactccaaacaagaaatcttactgtcaggttgaaggctgcaaggttgatctctcttctgctaaagagtaccatcggaagcacagagtctgtgaacctcattctaaggctcccaaggtggttgttgctggtctggagcggcgcttttgtcaacagtgtagccggttccatggattagctgagtttgaccagaagaagaaaagctgccgcaggcgcctcaatgatcacaatgcccgcagacggaaaccacaacctgaagcactttcttttgggtcatcaaggctgtcggcaatgttctatgacacaagacaacacacaagccttctgtttggtcaaggtccttatggtcaaatgagaagttgtgcaagttcttcatgggataaccctggaggtggcttcaaatttgcagagacaaaaggtccctggttaagagctggtggtgttgatgggttgcatcaaccaagtcagcaggtgtggaacaactttatgccacatggtgtccatcaagattttgatgggttcacagctttcaaaggaaccaatgcaaaggtccttcatcaaggcgttgaagcttctgcggtcgcctccaaccagaacggcgccccacaaccggaccttcatcgtgctctctctcttctgtcaaacagctgggctggtggtggtaccggtaccggtaccgaccagcacccgacggcccagctgcgccacgctgccctgagcagcagcctcgccgccagctccgtctccgtggcgcaggcctcgccagcagggctgtggcaggacggcggcgcggccctgggccaccacgactacgcccacgcgttccaggctatcaacacgccgggcggcggcggcgccgccgctcccattgcagtgggtcaggagctgcttcagctcccgcgtccgccgtccctgtacgacgacggctcctcgtcccgctacgacctgatgcgctgaaccttggggcttctggtggagcgcggggtttcgatttttgaacgaactctggatggaactcggagttttgaacgaactgctgtatgcttgctatcaaggtctgctggctcgggctcggacgctcgtgggatcgccagcagctccgtgtgcttgaataaatccacagtttttttttgtgtgacgctagctatttatttatttcacttgtgtaatgtgatgcgagtatgcgactccctc

SEQ ID NO: 127157 - DNA, 688 bp, Zea Mays
ccccctgttgaagtcgtagtcgaggcgtacgacaccgcgcgtgctgctgccgcaactgcagcagaggctcgttcgacaaccatcattacggaggaggcaatcgctgctgtgcagtataaaaccattgcccggacaaggttgaaggagacgtcgattcagtgaagaactcaactgtgtgggtttgtttaccataacagaatggtatcacagagtgttaaagtgttgctagtgtttcctttttttgtttagcataacaatctattttgtataggacaatgttgatttcaagtatcatgttagcatcaagagatgaggagacaatcaacactgttgcataccattaattctatgtgttctagtatcctagaagttgagggggcaagataggaaaggttgttggccacctggaccatgtctgcaagatgctcgagaagacttctattgtttgccaacaagattcggatattaagtgtcctaattgggaccttttttttatcccccttcagatgttgatgagcaccctgatgatgttgatgacctaatggaagcatacaactcagaagattcagagctgtgggaaatggcgtttgaggactggaagtgggaggagaataaagtggttgtctccttggctaagcattgttgtatcatgggttacaattacgaagagatttatgatcgtactgtt

SEQ ID NO: 127158 - DNA, 1782 bp, Zea Mays
gccgccgctgcacactgttcatcttcctcaaaccgccactccctcacgtcttgcgcgcagccgccgcaccacatcctcgcctcgcggcatctcgcctcaccttgctgcatctcgcgctcgcctcgccctctctgcgctcgtcgtcctgcagagaagccccacgtgcatgtcctctggccgagctcccagcaccctccgcaaaagccccatggaggcgtgcgattagagccctcgcccatcccctacgtgttgctgtgcccggacgccgccgcagccgcgtagccatggccgtcgtcatgccctgcgcacacgtcacttccgccatacgcccactgctccgacgatcttgttggcatgtgtggtcgctacatctcgcgttgccaaggtaaggccatgctatgctatttcccctctccttctctattgccgcgatgccacgctgccgtgccatgagcaccaccgacccaccatggccactgcacgccctggccggcgagcggccacgcccgctccgaccggtgggctccttccccttgcagctcgtccatggaagaactgtcgggggccgctaccctgctccactggccgcatcaccgtcgcctggccatggccgccgacaccgacgtggtccatctcctggccagcaactaactcgcttgaatgccccgtggtggtagggagagaaaaatcaaccgtacacgtcatgcatgggaaaaaggcatgcaagtagaaatgaccgtgagccccacgttgcatgtcgtattcctctcctgcctgcatgagatcaagggaaacagtcctccaaggatccgaggtggatgcaaaatccatgaccatccctgggatttggctcggaccaatcacaacgcaccatatcactttaaatttgcagtttattaaatacatgttagagtttatgttataaatccattttatattgttcagattgcgttagcttcgtaataatgtcgtgcacacgttaaaaatattgttttgtcaagatccatgttttatttatttagttaattgttagttcgttcgttggttattaaaaataactgttagttaaaaataacttatcgttttaagctccccttttattaatacatgttaatgtgattatgccaattcaaatgtttttaatttattcttgcttagtataaacacgaaattagttagtcattcgcgtgtgtcgcgcgcgtcgtcgcgtgtcgtccgcgcgtgttgttcgcccgcgttgtcgcgcgtcgttcgcgtgtgtcacacgcctcgccgcgtgcgagattaaaccatttgtttataattactcatgtgaattaattagttacttatttgatcatcaactattaaaagggtaagttagactagaactaagtagcagtgttagtttacatttaattaatatcaattaatatagagatatcggattaaatattccatttaatacttgcttagcgtaaacccgttgacttctcgaccatagctccaactatcgcgtttctttgtcctcgtgtgaccatagtagcacactctattttattttgcgtattttactatgctttacttgaatgatgtaatgttcctatgcatatatatggttgtttgtttgttcctgtttgtattcgctgtgcgtcgcgaatagactgcgatccaactccgaacttcgaggaatcgacgatcaagcttcggcgaccaaatgacccagctcttcgagttccacgaagttaaagaccctgagcatctgtttggtgaagattaccttttgggctactatggttagat

SEQ ID NO: 127159 - DNA, 2794 bp, Zea Mays
gcactagtcgctactagctagatagccatatcaccagcatgtggaggctgacggtggccgagggcggcggcccgtggctgcgctcgacgaacggcttcgtggggcgggcggtgtgggagttcgaccctgacctcggtacgccggaggagcgcgacgaggtagagagggtacgccaggagttctccgaccaccgcttccagaggagagagtcggccgacctcctcatgcgcatgcagtgcgcaaagcagaacagatctcaacgtcgtgatctgccacgcatcaagcttggggaggatgagcacgtcactgaagaaattgtactgagctccttgaggtcggctctggaccagttctcttcactgcaagccagcgatgggcactggcctggtgatttcagcgggattatgttcatcatgcctggtttgatatttgccttgtatgtcactggatcactgaatgttgtcatatcaccagaacatcggcatgagatttgccgctacatctacaaccaccagaacgaagatggtggatggggcacacttatcctgggttcgagcaccatgtttggcacatgctcaaactacatcaccttgaggcttctcggtgaggagccatacgccaacaacagtgtgttggctaaagggcgtgcttggattctatcccatggtggtgcaaccttgattcctcagtggggaaaaatatggctttcggtacttggattgtttgattggtcaggaaataatccaattttccctgaactatggtccattccccagtttcttccatttcatccagggaaattctggtgctttgcccgtatggtatatctaccaatggcttatctttatggcaagaaatttgttggaccaattacaccaactatattggcactaagagaggaaatctatgacactccttatggaaagattgactggagtgatgctcgtagtaaatgcgcaaaggaggacctcatctgtccacgcacactgttgcagaatgttatttggacttcactttataggtgtgtggaaccagtattgagcagttggcctatcaacaagctgagagagagagctctgggaaacatcatggagcatatccattatgaagatgagaacacacaatacctatgcatatgtcctgtgaataaggctctaaacatggtctgctgctgggtagaagatccaaattcagatgcattcaagcgtcaccttgcaaggataccagacttcttgtggatttcagaagatggcatgaaggcacaggtatatgatggctgccagagctgggagacatcattcataattcaagcattttgcgctacagatcttgttaatgactatggttcaactcttcagagagcctatgagtttatgaaaaattcacaggtcatgaggaaccatcctggtgaccaacgttattggcatcgccatagatcgaagggttcatggacactttcatctgcagacaatggatgggctgtatctgacactacaggagaagcacttaaggctgtactgttgctgtcaaagatctcaaacaaaaacaaccttgttggggatccaatagaaagagaaaggttgcatgacgctattgattgccttctatcttttgcgaacaaagatggcaccttttctacatatgagtgcaaaagaacttattcttggttagagattctaagtccttgtgagactttcccaaacattgttgtcgattacccttacccagaatgcacttcatcagtgctccaagctctgatattgttcaaagacttatatcctggttaccgcacagaagagatagaagcattagttagaagtgcagcaacgtttattgagaccaaacaacaagaagacggttcatggttaggtaattggggtatatgtttcacctacggggccttcttttcgattaaaggtttagtcgcttctggaagaacgtacaagaacagcccttgcatacggaaagcatgccacttcatattgtcgaagcagctcagtactggtggatggggagaaagtcatatcgctattgaaactcaggtgtatgtaaatctcaaaggtgaccgtgctcacgctgtgaataccgcctgggcaatgctcgctttaatttatgctggacagtttgaacgagatccaacgccattacatcgtgctgcaaaggaattgatcaacatgcaactggagacaggagagtttcctcagcaagagcatgtaggatgcttcaactgcagcctctacttcaattacccaagctaccgcaacttgttccccatctgggctctcggtgagtaccatcgtggccttcgtgcaaagaaagacaattgagtccgtgtgtgtatatatatagtacgtatagcattgtgaggaataaaacaggttgcgtcggtggtgagtgcgcaaaaacaagatgtgcttttatgtaggtgtaccacagtgtacaatgttggtcgttgttagactgtaaggctatcatgacgtgtatattgtaatatatatactacgtgattggtgtcctgtatggtcacggccatactcgctgcgtgcgtagagcgcatgattggcttcctgcgcgcgtagaagctaggctgccacgcgccggtgcgatgtaggatattttttcattcatttgctgcatccatggagaagccagggagggacgtttcccacgggccaggatggcgcgcgcctggcgacggtgagcgcgcgaaccaatcacacgttatagtgttccatatgtttcaaattatataagacgttttatcttctctaatgaacgagcagtctcctttccc

SEQ ID NO: 127160 - DNA, 719 bp, Zea Mays
acggcagcctgtcgctgtcaccgtcgtcatcttcctcctgtgatcgccccgctccgcttctgcaggccacggctgggcgacaccctgatggcgtcgcctcctcccgtggcgaccgcggggcctcacagcgtcttcgtgtacggcacgctgatggaagaggaggtggtgcgtgtgctcctgggccgcgccccgccctcctcctcccccgcgctcctccccgaccaccgcaggttcagcctcaggggccgcgtctacccggccatcctccccgcccgcgcccacgcggtgagcggaaaggttatccaggggctcaccgacagggaactccatgtgttcgacatgttcgaggacgaggagtatgtgaagacaaccgtcgaggtctcactgactgatgcatcggagaaatcactcgcctacgcctacatatggggtaaccagggtgatcctgacctctacggggaatgggattttgaggagtggaggaaggtgcatttgaagtactaccttgagatgactcgggaattcatgctggaactcgggcaattttaaacacttctctggtttgtaactacacaggagtcagaggatccttgcaaaactaccatagaataatttgtgtcttgtgctcgacgagttcttgctactatgctgctttgggaacatacacatgttatttgagccatttagtcatttggatgtgaacaaatcgattcttctct

SEQ ID NO: 127161 - DNA, 206 bp, Zea Mays
atggctttcggccactggccaccctgctggctgctgctcgcgctgcagcagagcagtgcaggatatgggtgcattaatgtcactaaaacaatcatacttgattggttgctgcagcagctccaaggcattctagactggaggtctaagttcgattcctcttaaatgcatctttttttgtgcaattactaggggcaacaacgtccaaa

SEQ ID NO: 127162 - DNA, 1813 bp, Zea Mays
gcgtagccgacgacgccgacgacgaggcagccatggccgcccccgccgcccggagaatagttggcgctgaggttcccatacccggctcggacaagctgcggtggatcgacctcaccatcccctcgtcctccgccgctgcgccggcgagcccctccgatcccttcgtctgcgtgcccccgcgtgctgcctcggggtgccacatcatcccttcgggcgattctcagtattacctctcgtggaggattcacgaggaacacccaaatgtgctggaggtcattgaacttagtccctccaaggagttccctagctttggactgcgtcttgccttccaggaggcgctatctccattcgcctttctatgtgaacgagagggtcgcaggcaaggggagcttgtatatatgctatatgtgcttaccgtttctggagttgctcttttgtgccacctacgcagcccattttcctacgtatctggttcagtgctgcatcaggatgatatagctgagtttaatctccaaactcaagctcagagcgcaaaggttacagcggtaacagcgaagccaggatgtattgtgattggtcggcaagatgggtccatctgttcttacagtcttggcaaattagccccaaactcaccaggtttctcgaatgaactacgagatgatgctgggattggacgtttatggactctcatgtcaagaacaaagactgtgggtcctgtgcaggacatagtagcaactgttgtaaatgaaagggacctgttatttgttcttcatttggatggacacttgcgcatatgggataatcacatgaaacttctcaactataatgtccactcaaatgacattgaaggccatccgtccaggctatgggttggtaaggctgatgatgatcaggagttgatatctttggcgattctgcatcaaaacactgtggttcaaggttgtgattatgttgctgtatatggcttcggtttttctgctgcggaaaggttcatgttctcttctgaaccttcaatttctactatacctttgctagaggggaagcttgcggacttgaaaatagccacatataagctttggatacttaaagaatttggctccatgctctatgaaatattacagtatgacattgacaccgaaactgcaaaatgttgtagtgagaaggtttgctgttatgtgctacaagaagatgctatcagtgaacagttgtttcaaagttctgacaatgcattggatgatttggtttggacagctgattcaatgttctcctccttgaaggaacaggcttttactttgatttcatccatgtttctgcggaggctacttcaaccaggagtaaaccactgttctgccctacgtgaaaccttactagagcataaaaggttcctatcagattctgagttccagtcacttacagcaaatgggctacgaaaagagatattatctattatagaacaagagggaagttcacagacagcaagtgctacagcttatcactggaaacaattctctgcacggtacctccacaattggtgctggcacaataagccctatggattgtttcttgatactacaaatgaagtgtttggtttagtaagaaagggttcattttctctattccgttgtttggagggtctggagatgcttatttatggttatgaccatggggtgaacttactcgacgatgtgtctgattttgaactcctcaatgaggtcctcagatgcatgggcaatatacaccatttgctggggagatcttccacagcagcatattatgaatccttaattagttctattatatcatctgatgaaat

SEQ ID NO: 127163 - DNA, 204 bp, Zea Mays
tttaacttatattctaaccatttgtttttttcaggggaatctagatctatttctttgtggagacttaactactatgagtgggcaatgcaaatttttgagcaacactccatgagcgagggggcgtaccaatttgctcttgctgcactagaactagttcttctcgacgggatagataatggaattgaagctgagggtctccagaga

SEQ ID NO: 127164 - DNA, 1840 bp, Zea Mays
atgctgtttgtgttatccagttgtttttctcatcattttatgcaagggatgctcactattagattggagcttaaatttgcctcttacctgtggaaataggttctttgtgacggagagattccattcactggcttggtagagaaagtggagcaagagctcttctggaaggctgagcgctcagatctgtcgtctagaccaaatctctataaggttctttattcatttgaagcacataggaacaaatggaggaaagcagctgcatacatgtacaggtactttgttagattgaatagagaaggtaatgcaggcggcagccaccaacttcctcacgtgttgcaagagaggttgcatgctttatctgctgctatcaacgcattgcagcttgttgatccctcatttgcatggctcgattctatttgtgaagccgatgataaaatttctccaagtaaaagaccccggaatcttttgatggagaactcggcttttggcacaaactcagaactttctagattgcaattttgtgttgacattgaaatccttgaaaaagaatacatattaacagaagcacagtatatgctcagcactttgaaatcaagttttgatttttcagaaagccaatctattgagtccctgatggatattcttataaatgagaaattgtatgatatagccttcacaattgtgctaaaattttggaaggagtcagaaataaaaaagcaattggaccgtgtattttcagtcattgcgcagcaatgctgctcgaacagatcagacaacaaatcaagtaaacaagtgccacttctgccttcttctgagaatgatgcatgggagatcaacaataggagtattgctgtgacccaacaattgcaggggagcaaccactgggaaacccttgaactatatttggataaatacaaagacctgcatcctaggttgccagtcattgttgctgagacgcttctttatactgatcctgagattgagctaccactttggttggttcagatgttcaaggctaataaggcagggaacaagatctcatggggcatgtctggaaaagaggcagatcctgctgctttattcagattgtacataaactacggacgccacgcagaagccaccaacctgctggtggagtatctagagtcgttcgcatcgtcgaggccagtggacgtcctccaccgcaagaagatgtccgccgtttggttcccctacaccgccgtcgagaggctctggtgccagcttggtgagatgcaacgggcagggcacagcgtggatcagtgcgaccggctcaagaagctgctgcacggagccctgatgagccacctgcagcaggtcgtggtcgactcggatgatgtgctgtcgtcagttggagatgggcaggggatggaggaccagagcagctgaagtcctgaagatcgtgttgttggcatgtgtagaaaacgatgtgccaccgctggatactgtatgtgattgtttgtgtggtcagctgaccaagagttacgcctgtgtcttttatatagaattattattagatgaaaacaaagacggagcgatggctccatttgtaacgtgagcatggaactgtcgctgatgacgagctgttcacttcccatgtgtagatgtagaaggtggattgacgcatccattacagcactgctgcactggtattgtatcggttctgccttcggggtgtgtaatggggttgttgcgatcgggttcagattagtgttgagcgtcgtggcattagggcatgtacaataccattcaatatatggtcttttaaggggtttctaaagagttaattaaaaaaatacaagagattacctctttatgaaaa

SEQ ID NO: 127165 - DNA, 3258 bp, Zea Mays
ccaaatacgcgctctcgtgctcgtgcgcgcgcgtcgcctcccaccccttcgtccgccgttgccgcccgcactctcccttccgccgtcgtgggcgcgcggcgacggggagagaggcaggtgaggtcggaagcggcggcggaggcgggcccccctccgtctactcttactcacgcacaccacggcgcccgcgagctagcgccctagcggagcggaggtcgaggcgggagaaaggcggttggggctccccggtgggcaggggggggggggggggggtcggaggcggggatggggctcgacggcacggtctcgggggtggtgtcgaggaaggtgctgccggcgtgtggtgggctctgctgcctctgcccttcgctgcgtccccgctccaggcagcccgtcaagcgctacaagaagatcctcatcgacatctttcccgcggagcaggaagacggaccaaatgtgaggaggattgggaggctttgcgagtatgttgctagaaatcctcatcgcgtgccaaagatcacagcttacttggagaggaggtgttacagggagttgagaaatgagcagtatgacattgtgaaagttgttgtgctaatataccgcaggctattggtctcttgtaatgaacaaatgccgttactggcaaatagtttattaagcatcatacaaacacttttggatcaatcaaggcaggatgacatgtgcatcattggctgtgaaaccttgtttgatttcatagtcactcaggtggatggtacatatcagttcaatttggaagagtttattccaagactctgcaaactttctcaaatagtaagggacaaagagaaggctaatgcactccgtgcagcagctctgcaatcactctctgctatgatctggtttatgggtgagctctctcatatctcctcagagtttgatagcgttgtccaagtagtattggaaagctatgagcctcgacaggtgcaaagtgacaatagtgccactgaaaatccaggttgtcagttggttgaagaggtccttaaacccgagggtcatgcctctccatcgacatttatattttctgtgataccttcttgggacagcatagttagtgactatggaggaattcaactgcttatggatgatgccaaggatccttatttttggtcaagggtctgtgtgcataacatggccaagctgtccagggaagcaactacattccgccgtgttatggagtccctattttgccacttcgataatactaattcatggtcatccaaaaatggtcttgcactttgtgttctattggacatgcaaatgttcatggaaaagtcagggacaaacattaatttgatgatatcagtactagttaagcatctcgaacacaaggccatactgaaacaacctgagatgcaactcagcattgtcgaagtgataactgctcttgcagaacaatcaagagctcaggcttcagcagcaaccatagttgctataagtgaccttgtgaggcatatgaaaaagacactgcatttagctcttggcagcaacgatttggaggtggtaaagtggaatgacaaactccgcatggcttttgatgaatgcatagtccagctgtcaaagaaggtaggtgatgctggaccagttcttgacatgatgtctgtgatgctagagaacatatcacacactcctcttattgctatagcaactacttctgctgtttatcgcacagctcaaataattgcttcaataccaaatttgtcatataagaacaaggtatttccagaagcactttttcatcaattgctgttagcgatggttcaccctgatcatgaaacacgtgttggtgcacaccgcatattttctgttgtccttgtcccatcttctgtttctccttttcccaatttgaaatccctagatcagtgtagaaagcatgatgtccagaggacactctcgagggttgtatctgtcttctcatcttcagctgctttatttgataagctgagaagggacagaaactcctttagagaatatttacatgaaggaagcatgaacagaattttgcatggtattgatgatgaaattgctacccctaatgacttgccaggctcgcaaagcttgagacaaagcctcagactttcttcagtgtctcacaaacattcttatacttctttaaaggaaggtcaaagtcccttgacagagtcaatcaacgaaatggaaacaattgtgttaagactaagcagccagcaggccactcttctgctctcatctatttggcgtcaagcactttctccaaaaaatgctcctcaaaactacgaagctattgctcatacatatagtttgcttctattgtttttgggatcaaagacaccaatttttgaggttcttgctcccagctttcagattgcattttctttaatgagccattcacttggaggaacagattcattgccaccatctcgccgccggtcattatttactctggctacatctatgattgtttttgcctcaagagctttcaatgtggcacctcttctcccaatttgtaaattaatgctcaatgatggaacgatggatccattccttcatctggtacatgagaacaaacttcaggctgtgaaggactatacggaagatccatcaacatcctatggctcacccgaggacaatcagaatgccttgaaatctctttcagtggtggaactaacaaatagttgctcccgagaatccatgattttaaccattatgaactccataagagatttaccagacttggagttagagaatataaggagtcaactgctgcgtgatttctcccctgatgacgtgtgcccaagtagcgctcactttcttgaatcacctggcaagattgcaccgccatgttctgatgatgacaccgactacgactatcaagaggctgaacttatcgatctgagaaatgacaacaatacttatttggaagcctctgcaactacactggcggctatagctattcctgtgcccacaacaaatcttctcagtatcgatgaacttctagaaacagtcgtgaatgatgtgtcatctcagaccggagggcaatgtttggtgtcaatggccggagacatcccattccaggagatgactagccactgtgaggccttttcgatgggaaagcaccacaagatgtccctgctcatgagcttcaagcaaaacaagcaagcggccatggtcgtcgtgcctgacaatcaggttagccacgctgaagcagcacatacctccgacaagcaggtgcatggacca

SEQ ID NO: 127166 - DNA, 3620 bp, Zea Mays
cctgcacgatgcaggtcgaggcgggagaaaggcggttggggctccccggtgggcaggggggggggggggggggtcggaggcggggatggggctcgacggcacggtctcgggggtggtgtcgaggaaggtgctgccggcgtgtggtgggctctgctgcctctgcccttcgctgcgtccccgctccaggcagcccgtcaagcgctacaagaagatcctcatcgacatctttcccgcggagcaggaagacggaccaaatgtgaggaggattgggaggctttgcgagtatgttgctagaaatcctcatcgcgtgccaaaggcgggctgtgcttctcacctcaagcgtcctacaaattgcatctaatctgttacttccacttcacttgttttctcatgcgtattggtgtctgtgcagatcacagcttacttggagaggaggtgttacagggagttgagaaatgagcagtatgacattgtgaaagttgttgtgctaatataccgcaggctattggtctcttgtaatgaacaaatgccgttactggcaaatagtttattaagcatcatacaaacacttttggatcaatcaaggcaggatgacatgtgcatcattggctgtgaaaccttgtttgatttcatagtcactcaggtggatggtacatatcagttcaatttggaagagtttattccaagactctgcaaactttctcaaatagtaagggacaaagagaaggctaatgcactccgtgcagcagctctgcaatcactctctgctatgatctggtttatgggtgagctctctcatatctcctcagagtttgatagcgttgtccaagtagtattggaaagctatgagcctcgacaggtgcaaagtgacaatagtgccactgaaaatccaggttgtcagttggttgaagaggtccttaaacccgagggtcatgcctctccatcgacatttatattttctgtgataccttcttgggacagcatagttagtgactatggaggaattcaactgcttatggatgatgccaaggatccttatttttggtcaagggtctgtgtgcataacatggccaagctgtccagggaagcaactacattccgccgtgttatggagtccctattttgccacttcgataatactaattcatggtcatccaaaaatggtcttgcactttgtgttctattggacatgcaaatgttcatggaaaagtcagggacaaacattaatttgatgatatcagtactagttaagcatctcgaacacaaggccatactgaaacaacctgagatgcaactcagcattgtcgaagtgataactgctcttgcagaacaatcaagagctcaggcttcagcagcaaccatagttgctataagtgaccttgtgaggcatatgaaaaagacactgcatttagctcttggcagcaacgatttggaggtggtaaagtggaatgacaaactccgcatggcttttgatgaatgcatagtccagctgtcaaagaaggtaggtgatgctggaccagttcttgacatgatgtctgtgatgctagagaacatatcacacactcctcttattgctatagcaactacttctgctgtttatcgcacagctcaaataattgcttcaataccaaatttgtcatataagaacaaggtatttccagaagcactttttcatcaattgctgttagcgatggttcaccctgatcatgaaacacgtgttggtgcacaccgcatattttctgttgtccttgtcccatcttctgtttctccttttcccaatttgaaatccctagatcagtgtagaaagcatgatgtccagaggacactctcgagggttgtatctgtcttctcatcttcagctgctttatttgataagctgagaagggacagaaactcctttagagaatatttacatgaaggaagcatgaacagaattttgcatggtattgatgatgaaattgctacccctaatgacttgccaggctcgcaaagcttgagacaaagcctcagactttcttcagtgtctcacaaacattcttatacttctttaaaggaaggtcaaagtcccttgacagagtcaatcaacgaaatggaaacaattgtgttaagactaagcagccagcaggccactcttctgctctcatctatttggcgtcaagcactttctccaaaaaatgctcctcaaaactacgaagctattgctcatacatatagtttgcttctattgtttttgggatcaaagacaccaatttttgaggttcttgctcccagctttcagattgcattttctttaatgagccattcacttggaggaacagattcattgccaccatctcgccgccggtcattatttactctggctacatctatgattgtttttgcctcaagagctttcaatgtggcacctcttctcccaatttgtaaattaatgctcaatgatggaacgatggatccattccttcatctggtacatgagaacaaacttcaggctgtgaaggactatacggaagatccatcaacatcctatggctcacccgaggacaatcagaatgccttgaaatctctttcagtggtggaactaacaaatagttgctcccgagaatccatgattttaaccattatgaactccataagagatttaccagacttggagttagagaatataaggagtcaactgctgcgtgatttctcccctgatgacgtgtgcccaagtagcgctcactttcttgaatcacctggcaagattgcaccgccatgttctgatgatgacaccgactacgactatcaagaggtacacggaaattttgagcaggctgaacttatcgatctgagaaatgacaacaatacttatttggaagcctctgcaactacactggcggctatagctattcctgtgcccacaacaaatcttctcagtatcgatgaacttctagaaacagtcgtgaatgatgtgtcatctcagaccggagggcaatgtttggtgtcaatggccggagacatcccattccaggagatgactagccactgtgaggccttttcgatgggaaagcaccacaagatgtccctgctcatgagcttcaagcaaaacaagcaagcggccatggtcgtcgtgcctgacaatcaggttagccacgctgaagcagcacatacctccgacaagcagagcacaaacccgttcctcctgcagagcatcagtgccggcgaggcacaggttgctggcgacgtccagcagccgttcctgaggctgccaccgtcgagcccctacgacaacttcctcaaggctgctggctgctgatttccacttgcagaaaccctgccgtgtaaccaaccgaatgtatcgtgtgtgtacagtggccgtctgcctcaatcttattacaaactaaacaagggtttggatattacatgctgacttgttttcggatcatgccagggtcaatccaaaattcatttaattgtaggattccaaagcaaagggaatgatagatatataaggagaaaatgttgaaatctaacttagatcgtctccaacggcttatctatatggccgtactaacactgttttacattgtatactgtatcgttggtagagtgaaggttaaatataagaataaagaagatag

SEQ ID NO: 127167 - DNA, 3581 bp, Zea Mays
cctgcacgatgcaggtcgaggcgggagaaaggcggttggggctccccggtgggcaggggggggggggggggggtcggaggcggggatggggctcgacggcacggtctcgggggtggtgtcgaggaaggtgctgccggcgtgtggtgggctctgctgcctctgcccttcgctgcgtccccgctccaggcagcccgtcaagcgctacaagaagatcctcatcgacatctttcccgcggagcaggaagacggaccaaatgtgaggaggattgggaggctttgcgagtatgttgctagaaatcctcatcgcgtgccaaaggcgggctgtgcttctcacctcaagcgtcctacaaattgcatctaatctgttacttccacttcacttgttttctcatgcgtattggtgtctgtgcagatcacagcttacttggagaggaggtgttacagggagttgagaaatgagcagtatgacattgtgaaagttgttgtgctaatataccgcaggctattggtctcttgtaatgaacaaatgccgttactggcaaatagtttattaagcatcatacaaacacttttggatcaatcaaggcaggatgacatgtgcatcattggctgtgaaaccttgtttgatttcatagtcactcaggtggatggtacatatcagttcaatttggaagagtttattccaagactctgcaaactttctcaaatagtaagggacaaagagaaggctaatgcactccgtgcagcagctctgcaatcactctctgctatgatctggtttatgggtgagctctctcatatctcctcagagtttgatagcgttgtccaagtagtattggaaagctatgagcctcgacaggtgcaaagtgacaatagtgccactgaaaatccaggttgtcagttggttgaagaggtccttaaacccgagggtcatgcctctccatcgacatttatattttctgtgataccttcttgggacagcatagttagtgactatggaggaattcaactgcttatggatgatgccaaggatccttatttttggtcaagggtctgtgtgcataacatggccaagctgtccagggaagcaactacattccgccgtgttatggagtccctattttgccacttcgataatactaattcatggtcatccaaaaatggtcttgcactttgtgttctattggacatgcaaatgttcatggaaaagtcagggacaaacattaatttgatgatatcagtactagttaagcatctcgaacacaaggccatactgaaacaacctgagatgcaactcagcattgtcgaagtgataactgctcttgcagaacaatcaagagctcaggcttcagcagcaaccatagttgctataagtgaccttgtgaggcatatgaaaaagacactgcatttagctcttggcagcaacgatttggaggtggtaaagtggaatgacaaactccgcatggcttttgatgaatgcatagtccagctgtcaaagaaggtaggtgatgctggaccagttcttgacatgatgtctgtgatgctagagaacatatcacacactcctcttattgctatagcaactacttctgctgtttatcgcacagctcaaataattgcttcaataccaaatttgtcatataagaacaaggtatttccagaagcactttttcatcaattgctgttagcgatggttcaccctgatcatgaaacacgtgttggtgcacaccgcatattttctgttgtccttgtcccatcttctgtttctccttttcccaatttgaaatccctagatcagtgtagaaagcatgatgtccagaggacactctcgagggttgtatctgtcttctcatcttcagctgctttatttgataagctgagaagggacagaaactcctttagagaatatttacatgaaggaagcatgaacagaattttgcatggtattgatgatgaaattgctacccctaatgacttgccaggctcgcaaagcttgagacaaagcctcagactttcttcagtgtctcacaaacattcttatacttctttaaaggaaggtcaaagtcccttgacagagtcaatcaacgaaatggaaacaattgtgttaagactaagcagccagcaggccactcttctgctctcatctatttggcgtcaagcactttctccaaaaaatgctcctcaaaactacgaagctattgctcatacatatagtttgcttctattgtttttgggatcaaagacaccaatttttgaggttcttgctcccagctttcagattgcattttctttaatgagccattcacttggaggaacagattcattgccaccatctcgccgccggtcattatttactctggctacatctatgattgtttttgcctcaagagctttcaatgtggcacctcttctcccaatttgtaaattaatgctcaatgatggaacgatggatccattccttcatctggtacatgagaacaaacttcaggctgtgaaggactatacggaagatccatcaacatcctatggctcacccgaggacaatcagaatgccttgaaatctctttcagtggtggaactaacaaatagttgctcccgagaatccatgattttaaccattatgaactccataagagatttaccagacttggagttagagaatataaggagtcaactgctgcgtgatttctcccctgatgacgtgtgcccaagtagcgctcactttcttgaatcacctggcaagattgcaccgccatgttctgatgatgacaccgactacgactatcaagaggtacacggaaattttgagcaggctgaacttatcgatctgagaaatgacaacaatacttatttggaagcctctgcaactacactggcggctatagctattcctgtgcccacaacaaatcttctcagtatcgatgaacttctagaaacagtcgtgaatgatgtgtcatctcagaccggagggcaatgtttggtgtcaatggccggagacatcccattccaggagatgactagccactgtgaggccttttcgatgggaaagcaccacaagatgtccctgctcatgagcttcaagcaaaacaagcaagcggccatggtcgtcgtgcctgacaatcagagcacaaacccgttcctcctgcagagcatcagtgccggcgaggcacaggttgctggcgacgtccagcagccgttcctgaggctgccaccgtcgagcccctacgacaacttcctcaaggctgctggctgctgatttccacttgcagaaaccctgccgtgtaaccaaccgaatgtatcgtgtgtgtacagtggccgtctgcctcaatcttattacaaactaaacaagggtttggatattacatgctgacttgttttcggatcatgccagggtcaatccaaaattcatttaattgtaggattccaaagcaaagggaatgatagatatataaggagaaaatgttgaaatctaacttagatcgtctccaacggcttatctatatggccgtactaacactgttttacattgtatactgtatcgttggtagagtgaaggttaaatataagaataaagaagatag

SEQ ID NO: 127168 - DNA, 553 bp, Zea Mays
cagccttctctctttgtttgtttataccgccatctgtgtgcacattacaggtcgtgaatgatgtgtcatctcagaccggagggcaatgtttggtgtcaatggccggagacatcccattccaggagatgactagccactgtgaggccttttcgatgggaaagcaccacaagatgtccctgctcatgagcttcaagcaaaacaagcaagcggccatggtcgtcgtgcctgacaatcaggttagccacgctgaagcagcacatacctccgacaagcaggtgcatggaccagcttagtttcgagctcgtaatctgcattttcacaaacgcttaactgcaaatcggggcggaaatatctgggtgatgagatgggttggggaatttcagatgggtgagatgatgaggctgactgttgccgatttgttttcagagcacaaacccgttcctcctgcagagcatcagtgccggcgaggcacaggttgctggcgacgtccagcagccgttcctgaggctgccaccgtcgagcccctacgacaacttcctcaaggctgctggct

SEQ ID NO: 127169 - DNA, 99 bp, Zea Mays
tatcaactcatgatgataaggtaggggtattggatgcatccaagatgaaaacatgctctactttatattttttaggggaagatggccacttccaagaat

SEQ ID NO: 127170 - DNA, 6466 bp, Zea Mays
taacaacatccaaaaatatgataacatatcaaaataattgattggcaaataatgctgaaactcatcaatacggttattctggtctagtaacaagcaaacataaatgagagcattttctcacagatagcctttcagcagttaccgcgaactagaaacatcaagatatcaaacactgcttcaacagaagatattccagcacaaacaataacaagcacagaaactattaagaatctaatcgacagagctagtacactagatcgtatagcttgtttgcttcagtgatgatccaggaaaatggaatgaatcacgttgtatatcatgaggatatcttgcaaatgtcctcgtattcgacagccctgagaaccttcccatcatagaggcctttctcaacctgcacttttgcacagaatttctcagtgtccactgaaagcaacctggcatttgacccccgataagccccattgacaatccgcacaagtccaccaatctgagggatcacggtctcaagctcatcttggtcgaccctgagaacatgcttgctctccaacatctcaatctccccaacatatttatcaataactttcttcaccacccctttctgcttgtagtaccccttctctgccaatgacttgctcatcactttgaccacaatcccagggcacagccagtagtccttcctattgctcctctccttggccttctcctcctccttcatcagctcgtccaatgctgacctctttgcctctgctgccttcacatcctttcccatcttcttggtcaactcattcttctcctggtctcgggtgcctgagccatcctcctcatcaaaaccaaatttcatcttcggcttatcgtcaaaaggattaaccttgggccccggcacagccttctgaagcgcaatcgcaatcttacctgttgccttatctgcctctttcgagtcatcctccggctcctgctcatcatcatccgaacctgaatactctccttcactgccagactcaggctcgccctcggcagcaccaccaccattgggtttagctaaggacttgtgcgcacgctcaatctggcgggcaatcatgcgctcctggcgctcgtcgtcagccatgtctgacttgatcctcttgcgcttgaggcgttccttgacggcctgctccgagtcacggtcgatgtaggtcatgaaccaccccttgggcgtgtcctcgaccttacagtacccctcgcgccccaggaacttgacgaactcggtgagcgtggcccaccgcgtggagttcatgtggacgtggtgccggtcggcgatgtactcgttgtagacgacggtggcggcgacgcgggagtggcggtgcgcgcggcggatgagggagaggaaggactcgaggaactcctcggagaagccctcgacgacgcggtcgggggccatgccgaacacctgcatctgcctctggtgcgactccgacatgcagtggcacttgaacccgttctcgtcgcggcactgcttctgacacatctgacagtaccaccgcagcttctgcagccccttcgccttgatccggtttgcgatcgccttcggcgtcaggaactcgtgcttccccatcgtgcgggagaggcccttgccgcacaagcaggatgggaattacaggtagaagaaggggggagcacgttggtcaaggagacggacgcgaggcgacgaggagtggattattattgtggagagaggcagcggcggaggccggagaggaggccggcgacggcgagattggggagtgcgtgaacggattggggatcgattggattggggcgagggctttgtttttttttgttgctttttttgtttttttattagacaggcgagggctttgttgggacttgggaataagtccaaggctagcaccacaaatgaacgatccggatcgcgtaaacgatcaatcaacggacgagatccagccaccgtgccagatttttcaacccaacgcatgtgaagggcgcgcatcgtatcttatcttcactctccgtccaccaaagcaaaccctacccgctcccttcccgcgccgccgccgccatggactcgatcgacgcagatctcgcgcgcacgcaagaggagcggcgcaggatggaggaggcgctggcggctggcgcgcccatggccgtgtcctccgtcaccttcgacaccgacctctacggcggcgggggcgccgaccccaaccgcttcgcgggctacgacacctccatcccggcctccgaggacgacgccgcggaggacgacgcggaggccgccaaccctgcgccgcgccgcctcgcggcctacacgggccacgccatcgccgccgccgacatcccgcggtcggccgacgacgacgacgggctgcccaagaggtcccagcgcatcatcgaccgcgaggacgactaccgccgccgccgcctcaaccagatcatctcgccggagcgccatgacccgttcgccgctggggaggccaccccggacccctcggtgcggacctacgctgacgtcatgcgcgacgcggcgctgcagaagaagaaggaggacctgctgagggagattgccaagaagaagaaggaagaggaagagaaggagaaggagaggaaggctgccgctcctgagcagcctgccgccacaacaaagcggcgcaacaggtgggatcagtcgcaggacggcgacgctggtgccggtgccaagaaggtgaagacatcctcggactgggatgcccctgatgcgactcctgggattggccgttgggatgccacccccggacgtgttggagacgccacaccctccgtgagaaggaacagatgggatgagacaccgactccagggaggatggccgatgctgatgctacgcctgcagctggcggtgccacccctggggctactccttctggggcttgggacgcgactccaaagctgcctggtggtgtcacgccaacccctggtaagaagcagagatcaaggtgggatgagacaccagcaagtatggggagtgcaacccctggtagtcttggtgctgcaacacctgctggttatactcctggtccaacgccatttggtgcagagaaccttgccacaccaactcctagccagattgctcgtggaccgatcactccggagcagtaccagctcatgcggtgggagcgggacattgaggagaggaacaggcctctcactgacgaggagcttgatgccatgttcccgcaggagggctacaagattcttgagcccccggcttcctaccagcccatcaggaccccggcaaggaagctccttgcgacaccgacacctctggggacaccactttatgctattccagaggagaatcgtgggcagcattttgatgtgcccaaggagctgcctggtgggttgccactcatgaagcccgaggattaccagtactttggaactttgctgaacgaggaagaggaggagcagctatcgccagaggagcagaaggagaggaaaatcatgaaactgttactcaaagtgaagaatggcacacccccacagcgtaaaacagcacttcggcaactgacagacaaagcccgtgaatttggtgcaggaccgttgttcaacaaaatactgcccttactcatgcagccaacactggaggaccaggagaggcatcttttggtgaaggtcattgacagagtactttataagctcgatgagctggtccgtccttttgtgcacaagattcttgtggttattgaaccactgttgattgatgaggactattatgctcgtgttgaaggcagggagatcatctcaaaccttagcaaagcagctgggcttgctactatgattgctgctatgcgacccgacatcgataacattgatgagtatgtgagaaacaccactgctagggcgttcagtgtggtggcttctgctttgggtatccctgcccttttaccattcttgaaggctgtctgtcagagtaagaagtcttggcaggctaggcacactggtatcaaaatcgtccaacagattgctattctcatgggctgtgctgttttgccacacctcaagtcactagttgagatcattgagcatgggctgagcgatgaaaaccagaaagttcgtacaattactgccctttctcttgctgcacttgctgaggctgctgcaccatatggtatagaaagttttgatactgtattgaaacctctgtggaagggtatcagatctcaccgtgggaaggtccttgctgccttcctaaaggccattggtttcatcatccctcttatggatgctctgtatgctagctactacacaaaggaggtgatgcaggtcctcattagggagttccagtctccagatgaagaaatgaagaaaattgttctcaaggtggtgaaacagtgtgtcagtacagagggtgtggaggctgattatatccggaatgacatccttccagatttcttcaagcacttctgggtgaggagaatggctctagatcgcaggaactataagcagcttgtggaaactacagttgagatggcaaacaaggttggagttgctgatattgttgggagggttgttgaggatctgaaagatgaaagtgagccctacagaagaatggtgatggaaacaatcgagaaggtggtagccaacttgggtgcatcagatattgatgctcgtctggaggagctgcttattgatggtatcttgtatgctttccaagagcagactagtgatgacgcaaatgttatgctaaatggttttggagctgtggttaatgcacttggacagagagttaagccctaccttcctcagatttgtggtactatcaagtggcgattgaacaacaagagtgcaaaagttaggcagcaagctgctgatctgatctccaggatagccatagtaatgaagcagtgccaggaggagcagcttatgggtcacttgggtgttgtgctgtatgagtacttaggagaggagtatcctgaggtgcttggttcaattcttggagccttgaaggctatcgtcaatgtcattggtatgactaaaatgactccaccaatcaaggatcttcttcctcgtctgacccccattcttaagaacaggcatgagaaggtccaagagaactgcattgatcttgttggtaggattgctgatcgtggagcagaatttgtgccagcaagggaatggatgaggatttgttttgagctgctcgaaatgttgaaggctcataagaagggtattaggagagcaactgtgaacacatttggttatatcgcaaaggctatagggccacaggatgtgttggccaccctgttgaataacttgaaggtgcaagaacgacagaaccgggtctgtacaactgtagctattgctatagttgctgaaacttgctcacctttcacagttttacctgcccttatgaatgagtaccgggtcccagagctcaatgtccaaaatggtgttctgaagtcactctctttcctctttgagtatattggtgagatgggcaaagattacatatatgccgtcacccccttacttgaagatgctttaatggatagagatctggttcaccggcagactgctgcatctgctgttaagcacatggctctaggtgttgctggcttgggttgtgaggatgctcttgttcatctgcttaactatgtttggcccaacatatttgagacatctccccacgttataaatgctgtcatggaggcaattgaggggatgagggtcgcactaggtgcggctgtgattttaaattattgcctgcaaggtctcttccatccagcaaggaaagtacgagaagtgtattggaagatatacaactctttgtacatcggcgcgcaggatgcacttgttgcttcttatcctgccctggaagacgatggggataacatctttagtcgtccagagttggcaatgtttgtctgattaacgctggatgtgcatgtccatgtgtcttcatccatattcttatgaagcttgaactgggtggtactctgagttagagctttgtattttacttggtgacacctcttgtgatgcatgtaattgaagttgcatctatttttttgtatttgcaggattgttccttctgaagggggtgcaatgtttaggaattttttttcctggtttactataatgcaactcaaaatctctatcatagtctggtcttactaacgatttgggaactgttttgttttcagggtacctcatgttgcagctgctgaagcgttacactggatttaggaccaatcctaaggctgcagcatgccaattaatccatcaagatcctatattgtgaaggacaaatgacaatcctagcgcgctgtcatctttttatgaatattaggcgttgggcatttaccgtgttttaaaactttgtattacacatggatgttgtattatgtggtgtggacaatggaacgttgcaagctgacctgaacctgattccttactgtattactgagatgttgatatgcatgtcatgttagtgta

SEQ ID NO: 127171 - DNA, 6307 bp, Zea Mays
taacaacatccaaaaatatgataacatatcaaaataattgattggcaaataatgctgaaactcatcaatacggttattctggtctagtaacaagcaaacataaatgagagcattttctcacagatagcctttcagcagttaccgcgaactagaaacatcaagatatcaaacactgcttcaacagaagatattccagcacaaacaataacaagcacagaaactattaagaatctaatcgacagagctagtacactagatcgtatagcttgtttgcttcagtgatgatccaggaaaatggaatgaatcacgttgtatatcatgaggatatcttgcaaatgtcctcgtattcgacagccctgagaaccttcccatcatagaggcctttctcaacctgcacttttgcacagaatttctcagtgtccactgaaagcaacctggcatttgacccccgataagccccattgacaatccgcacaagtccaccaatctgagggatcacggtctcaagctcatcttggtcgaccctgagaacatgcttgctctccaacatctcaatctccccaacatatttatcaataactttcttcaccacccctttctgcttgtagtaccccttctctgccaatgacttgctcatcactttgaccacaatcccagggcacagccagtagtccttcctattgctcctctccttggccttctcctcctccttcatcagctcgtccaatgctgacctctttgcctctgctgccttcacatcctttcccatcttcttggtcaactcattcttctcctggtctcgggtgcctgagccatcctcctcatcaaaaccaaatttcatcttcggcttatcgtcaaaaggattaaccttgggccccggcacagccttctgaagcgcaatcgcaatcttacctgttgccttatctgcctctttcgagtcatcctccggctcctgctcatcatcatccgaacctgaatactctccttcactgccagactcaggctcgccctcggcagcaccaccaccattgggtttagctaaggacttgtgcgcacgctcaatctggcgggcaatcatgcgctcctggcgctcgtcgtcagccatgtctgacttgatcctcttgcgcttgaggcgttccttgacggcctgctccgagtcacggtcgatgtaggtcatgaaccaccccttgggcgtgtcctcgaccttacagtacccctcgcgccccaggaacttgacgaactcggtgagcgtggcccaccgcgtggagttcatgtggacgtggtgccggtcggcgatgtactcgttgtagacgacggtggcggcgacgcgggagtggcggtgcgcgcggcggatgagggagaggaaggactcgaggaactcctcggagaagccctcgacgacgcggtcgggggccatgccgaacacctgcatctgcctctggtgcgactccgacatgcagtggcacttgaacccgttctcgtcgcggcactgcttctgacacatctgacagtaccaccgcagcttctgcagccccttcgccttgatccggtttgcgatcgccttcggcgtcaggaactcgtgcttccccatcgtgcgggagaggcccttgccgcacaagcaggatgggaattacaggtagaagaaggggggagcacgttggtcaaggagacggacgcgaggcgacgaggagtggattattattgtggagagaggcagcggcggaggccggagaggaggccggcgacggcgagattggggagtgcgtgaacggattggggatcgattggattggggcgagggctttgtttttttttgttgctttttttgtttttttattagacaggcgagggctttgttgggacttgggaataagtccaaggctagcaccacaaatgaacgatccggatcgcgtaaacgatcaatcaacggacgagatccagccaccgtgccagatttttcaacccaacgcatgtgaagggcgcgcatcgtatcttatcttcactctccgtccaccaaagcaaaccctacccgctcccttcccgcgccgccgccgccatggactcgatcgacgcagatctcgcgcgcacgcaagaggagcggcgcaggatggaggaggcgctggcggctggcgcgcccatggccgtgtcctccgtcaccttcgacaccgacctctacggcggcgggggcgccgaccccaaccgcttcgcgggctacgacacctccatcccggcctccgaggacgacgccgcggaggacgacgcggaggccgccaaccctgcgccgcgccgcctcgcggcctacacgggccacgccatcgccgccgccgacatcccgcggtcggccgacgacgacgacgggctgcccaagaggtcccagcgcatcatcgaccgcgaggacgactaccgccgccgccgcctcaaccagatcatctcgccggagcgccatgacccgttcgccgctggggaggccaccccggacccctcggtgcggacctacgctgacgtcatgcgcgacgcggcgctgcagaagaagaaggaggacctgctgagggagattgccaagaagaagaaggaagaggaagagaaggagaaggagaggaaggctgccgctcctgagcagcctgccgccacaacaaagcggcgcaacaggtgggatcagtcgcaggacggcgacgctggtgccggtgccaagaaggtgaagacatcctcggactgggatgcccctgatgcgactcctgggattggccgttgggatgccacccccggacgtgttggagacgccacaccctccgtgagaaggaacagatgggatgagacaccgactccagggaggatggccgatgctgatgctacgcctgcagctggcggtgccacccctggggctactccttctggggcttgggacgcgactccaaagctgcctggtggtgtcacgccaacccctggtaagaagcagagatcaaggtgggatgagacaccagcaagtatggggagtgcaacccctggtagtcttggtgctgcaacacctgctggttatactcctggtccaacgccatttggtgcagagaaccttgccacaccaactcctagccagattgctcgtggaccgatcactccggagcagtaccagctcatgcggtgggagcgggacattgaggagaggaacaggcctctcactgacgaggagcttgatgccatgttcccgcaggagggctacaagattcttgagcccccggcttcctaccagcccatcaggaccccggcaaggaagctccttgcgacaccgacacctctggggacaccactttatgctattccagaggagaatcgtgggcagcattttgatgtgcccaaggagctgcctggtgggttgccactcatgaagcccgaggattaccagtactttggaactttgctgaacgaggaagaggaggagcagctatcgccagaggagcagaaggagaggaaaatcatgaaactgttactcaaagtgaagaatggcacacccccacagcgtaaaacagcacttcggcaactgacagacaaagcccgtgaatttggtgcaggaccgttgttcaacaaaatactgcccttactcatgcagccaacactggaggaccaggagaggcatcttttggtgaaggtcattgacagagtactttataagctcgatgagctggtccgtccttttgtgcacaagattcttgtggttattgaaccactgttgattgatgaggactattatgctcgtgttgaaggcagggagatcatctcaaaccttagcaaagcagctgggcttgctactatgattgctgctatgcgacccgacatcgataacattgatgagtatgtgagaaacaccactgctagggcgttcagtgtggtggcttctgctttgggtatccctgcccttttaccattcttgaaggctgtctgtcagagtaagaagtcttggcaggctaggcacactggtatcaaaatcgtccaacagattgctattctcatgggctgtgctgttttgccacacctcaagtcactagttgagatcattgagcatgggctgagcgatgaaaaccagaaagttcgtacaattactgccctttctcttgctgcacttgctgaggctgctgcaccatatggtatagaaagttttgatactgtattgaaacctctgtggaagggtatcagatctcaccgtgggaaggtccttgctgccttcctaaaggccattggtttcatcatccctcttatggatgctctgtatgctagctactacacaaaggaggtgatgcaggtcctcattagggagttccagtctccagatgaagaaatgaagaaaattgttctcaaggtggtgaaacagtgtgtcagtacagagggtgtggaggctgattatatccggaatgacatccttccagatttcttcaagcacttctgggtgaggagaatggctctagatcgcaggaactataagcagcttgtggaaactacagttgagatggcaaacaaggttggagttgctgatattgttgggagggttgttgaggatctgaaagatgaaagtgagccctacagaagaatggtgatggaaacaatcgagaaggtggtagccaacttgggtgcatcagatattgatgctcgtctggaggagctgcttattgatggtatcttgtatgctttccaagagcagactagtgatgacgcaaatgttatgctaaatggttttggagctgtggttaatgcacttggacagagagttaagccctaccttcctcagatttgtggtactatcaagtggcgattgaacaacaagagtgcaaaagttaggcagcaagctgctgatctgatctccaggatagccatagtaatgaagcagtgccaggaggagcagcttatgggtcacttgggtgttgtgctgtatgagtacttaggagaggagtatcctgaggtgcttggttcaattcttggagccttgaaggctatcgtcaatgtcattggtatgactaaaatgactccaccaatcaaggatcttcttcctcgtctgacccccattcttaagaacaggcatgagaaggtccaagagaactgcattgatcttgttggtaggattgctgatcgtggagcagaatttgtgccagcaagggaatggatgaggatttgttttgagctgctcgaaatgttgaaggctcataagaagggtattaggagagcaactgtgaacacatttggttatatcgcaaaggctatagggccacaggatgtgttggccaccctgttgaataacttgaaggtgcaagaacgacagaaccgggtctgtacaactgtagctattgctatagttgctgaaacttgctcacctttcacagttttacctgcccttatgaatgagtaccgggtcccagagctcaatgtccaaaatggtgttctgaagtcactctctttcctctttgagtatattggtgagatgggcaaagattacatatatgccgtcacccccttacttgaagatgctttaatggatagagatctggttcaccggcagactgctgcatctgctgttaagcacatggctctaggtgttgctggcttgggttgtgaggatgctcttgttcatctgcttaactatgtttggcccaacatatttgagacatctccccacgttataaatgctgtcatggaggcaattgaggggatgagggtcgcactaggtgcggctgtgattttaaattattgcctgcaaggtctcttccatccagcaaggaaagtacgagaagtgtattggaagatatacaactctttgtacatcggcgcgcaggatgcacttgttgcttcttatcctgccctggaagacgatggggataacatctttagtcgtccagagttggcaatgtttgtctgattaacgctggatgtgcatgtccatgtgtcttcatccatattcttatgaagcttgaactgggtggtactctgagttagagctttgtattttacttggtgacacctcttgtgatgcatggtacctcatgttgcagctgctgaagcgttacactggatttaggaccaatcctaaggctgcagcatgccaattaatccatcaagatcctatattgtgaaggacaaatgacaatcctagcgcgctgtcatctttttatgaatattaggcgttgggcatttaccgtgttttaaaactttgtattacacatggatgttgtattatgtggtgtggacaatggaacgttgcaagctgacctgaacctgattccttactgtattactgagatgttgatatgcatgtcatgttagtgta

SEQ ID NO: 127172 - DNA, 6251 bp, Zea Mays
taacaacatccaaaaatatgataacatatcaaaataattgattggcaaataatgctgaaactcatcaatacggttattctggtctagtaacaagcaaacataaatgagagcattttctcacagatagcctttcagcagttaccgcgaactagaaacatcaagatatcaaacactgcttcaacagaagatattccagcacaaacaataacaagcacagaaactattaagaatctaatcgacagagctagtacactagatcgtatagcttgtttgcttcagtgatgatccaggaaaatggaatgaatcacgttgtatatcatgaggatatcttgcaaatgtcctcgtattcgacagccctgagaaccttcccatcatagaggcctttctcaacctgcacttttgcacagaatttctcagtgtccactgaaagcaacctggcatttgacccccgataagccccattgacaatccgcacaagtccaccaatctgagggatcacggtctcaagctcatcttggtcgaccctgagaacatgcttgctctccaacatctcaatctccccaacatatttatcaataactttcttcaccacccctttctgcttgtagtaccccttctctgccaatgacttgctcatcactttgaccacaatcccagggcacagccagtagtccttcctattgctcctctccttggccttctcctcctccttcatcagctcgtccaatgctgacctctttgcctctgctgccttcacatcctttcccatcttcttggtcaactcattcttctcctggtctcgggtgcctgagccatcctcctcatcaaaaccaaatttcatcttcggcttatcgtcaaaaggattaaccttgggccccggcacagccttctgaagcgcaatcgcaatcttacctgttgccttatctgcctctttcgagtcatcctccggctcctgctcatcatcatccgaacctgaatactctccttcactgccagactcaggctcgccctcggcagcaccaccaccattgggtttagctaaggacttgtgcgcacgctcaatctggcgggcaatcatgcgctcctggcgctcgtcgtcagccatgtctgacttgatcctcttgcgcttgaggcgttccttgacggcctgctccgagtcacggtcgatgtaggtcatgaaccaccccttgggcgtgtcctcgaccttacagtacccctcgcgccccaggaacttgacgaactcggtgagcgtggcccaccgcgtggagttcatgtggacgtggtgccggtcggcgatgtactcgttgtagacgacggtggcggcgacgcgggagtggcggtgcgcgcggcggatgagggagaggaaggactcgaggaactcctcggagaagccctcgacgacgcggtcgggggccatgccgaacacctgcatctgcctctggtgcgactccgacatgcagtggcacttgaacccgttctcgtcgcggcactgcttctgacacatctgacagtaccaccgcagcttctgcagccccttcgccttgatccggtttgcgatcgccttcggcgtcaggaactcgtgcttccccatcgtgcgggagaggcccttgccgcacaagcaggatgggaattacaggtagaagaaggggggagcacgttggtcaaggagacggacgcgaggcgacgaggagtggattattattgtggagagaggcagcggcggaggccggagaggaggccggcgacggcgagattggggagtgcgtgaacggattggggatcgattggattggggcgagggctttgtttttttttgttgctttttttgtttttttattagacaggcgagggctttgttgggacttgggaataagtccaaggctagcaccacaaatgaacgatccggatcgcgtaaacgatcaatcaacggacgagatccagccaccgtgccagatttttcaacccaacgcatgtgaagggcgcgcatcgtatcttatcttcactctccgtccaccaaagcaaaccctacccgctcccttcccgcgccgccgccgccatggactcgatcgacgcagatctcgcgcgcacgcaagaggagcggcgcaggatggaggaggcgctggcggctggcgcgcccatggccgtgtcctccgtcaccttcgacaccgacctctacggcggcgggggcgccgaccccaaccgcttcgcgggctacgacacctccatcccggcctccgaggacgacgccgcggaggacgacgcggaggccgccaaccctgcgccgcgccgcctcgcggcctacacgggccacgccatcgccgccgccgacatcccgcggtcggccgacgacgacgacgggctgcccaagaggtcccagcgcatcatcgaccgcgaggacgactaccgccgccgccgcctcaaccagatcatctcgccggagcgccatgacccgttcgccgctggggaggccaccccggacccctcggtgcggacctacgctgacgtcatgcgcgacgcggcgctgcagaagaagaaggaggacctgctgagggagattgccaagaagaagaaggaagaggaagagaaggagaaggagaggaaggctgccgctcctgagcagcctgccgccacaacaaagcggcgcaacaggtgggatcagtcgcaggacggcgacgctggtgccggtgccaagaaggtgaagacatcctcggactgggatgcccctgatgcgactcctgggattggccgttgggatgccacccccggacgtgttggagacgccacaccctccgtgagaaggaacagatgggatgagacaccgactccagggaggatggccgatgctgatgctacgcctgcagctggcggtgccacccctggggctactccttctggggcttgggacgcgactccaaagctgcctggtggtgtcacgccaacccctggtaagaagcagagatcaaggtgggatgagacaccagcaagtatggggagtgcaacccctggtagtcttggtgctgcaacacctgctggttatactcctggtccaacgccatttggtgcagagaaccttgccacaccaactcctagccagattgctcgtggaccgatcactccggagcagtaccagctcatgcggtgggagcgggacattgaggagaggaacaggcctctcactgacgaggagcttgatgccatgttcccgcaggagggctacaagattcttgagcccccggcttcctaccagcccatcaggaccccggcaaggaagctccttgcgacaccgacacctctggggacaccactttatgctattccagaggagaatcgtgggcagcattttgatgtgcccaaggagctgcctggtgggttgccactcatgaagcccgaggattaccagtactttggaactttgctgaacgaggaagaggaggagcagctatcgccagaggagcagaaggagaggaaaatcatgaaactgttactcaaagtgaagaatggcacacccccacagcgtaaaacagcacttcggcaactgacagacaaagcccgtgaatttggtgcaggaccgttgttcaacaaaatactgcccttactcatgcagccaacactggaggaccaggagaggcatcttttggtgaaggtcattgacagagtactttataagctcgatgagctggtccgtccttttgtgcacaagattcttgtggttattgaaccactgttgattgatgaggactattatgctcgtgttgaaggcagggagatcatctcaaaccttagcaaagcagctgggcttgctactatgattgctgctatgcgacccgacatcgataacattgatgagtatgtgagaaacaccactgctagggcgttcagtgtggtggcttctgctttgggtatccctgcccttttaccattcttgaaggctgtctgtcagagtaagaagtcttggcaggctaggcacactggtatcaaaatcgtccaacagattgctattctcatgggctgtgctgttttgccacacctcaagtcactagttgagatcattgagcatgggctgagcgatgaaaaccagaaagttcgtacaattactgccctttctcttgctgcacttgctgaggctgctgcaccatatggtatagaaagttttgatactgtattgaaacctctgtggaagggtatcagatctcaccgtgggaaggtccttgctgccttcctaaaggccattggtttcatcatccctcttatggatgctctgtatgctagctactacacaaaggaggtgatgcaggtcctcattagggagttccagtctccagatgaagaaatgaagaaaattgttctcaaggtggtgaaacagtgtgtcagtacagagggtgtggaggctgattatatccggaatgacatccttccagatttcttcaagcacttctgggtgaggagaatggctctagatcgcaggaactataagcagcttgtggaaactacagttgagatggcaaacaaggttggagttgctgatattgttgggagggttgttgaggatctgaaagatgaaagtgagccctacagaagaatggtgatggaaacaatcgagaaggtggtagccaacttgggtgcatcagatattgatgctcgtctggaggagctgcttattgatggtatcttgtatgctttccaagagcagactagtgatgacgcaaatgttatgctaaatggttttggagctgtggttaatgcacttggacagagagttaagccctaccttcctcagatttgtggtactatcaagtggcgattgaacaacaagagtgcaaaagttaggcagcaagctgctgatctgatctccaggatagccatagtaatgaagcagtgccaggaggagcagcttatgggtcacttgggtgttgtgctgtatgagtacttaggagaggagtatcctgaggtgcttggttcaattcttggagccttgaaggctatcgtcaatgtcattggtatgactaaaatgactccaccaatcaaggatcttcttcctcgtctgacccccattcttaagaacaggcatgagaaggtccaagagaactgcattgatcttgttggtaggattgctgatcgtggagcagaatttgtgccagcaagggaatggatgaggatttgttttgagctgctcgaaatgttgaaggctcataagaagggtattaggagagcaactgtgaacacatttggttatatcgcaaaggctatagggccacaggatgtgttggccaccctgttgaataacttgaaggtgcaagaacgacagaaccgggtctgtacaactgtagctattgctatagttgctgaaacttgctcacctttcacagttttacctgcccttatgaatgagtaccgggtcccagagctcaatgtccaaaatggtgttctgaagtcactctctttcctctttgagtatattggtgagatgggcaaagattacatatatgccgtcacccccttacttgaagatgctttaatggatagagatctggttcaccggcagactgctgcatctgctgttaagcacatggctctaggtgttgctggcttgggttgtgaggatgctcttgttcatctgcttaactatgtttggcccaacatatttgagacatctccccacgttataaatgctgtcatggaggcaattgaggggatgagggtcgcactaggtgcggctgtgattttaaattattgcctgcaaggtctcttccatccagcaaggaaagtacgagaagtgtattggaagatatacaactctttgtacatcggcgcgcaggatgcacttgttgcttcttatcctgccctggaagacgatggggataacatctttagtcgtccagagttggcaatgtttgtctgattaacgctggatgtgcatgtccatgtgtcttcatccatattcttatgaagcttgaactggggtacctcatgttgcagctgctgaagcgttacactggatttaggaccaatcctaaggctgcagcatgccaattaatccatcaagatcctatattgtgaaggacaaatgacaatcctagcgcgctgtcatctttttatgaatattaggcgttgggcatttaccgtgttttaaaactttgtattacacatggatgttgtattatgtggtgtggacaatggaacgttgcaagctgacctgaacctgattccttactgtattactgagatgttgatatgcatgtcatgttagtgta

SEQ ID NO: 127173 - DNA, 6280 bp, Zea Mays
taacaacatccaaaaatatgataacatatcaaaataattgattggcaaataatgctgaaactcatcaatacggttattctggtctagtaacaagcaaacataaatgagagcattttctcacagatagcctttcagcagttaccgcgaactagaaacatcaagatatcaaacactgcttcaacagaagatattccagcacaaacaataacaagcacagaaactattaagaatctaatcgacagagctagtacactagatcgtatagcttgtttgcttcagtgatgatccaggaaaatggaatgaatcacgttgtatatcatgaggatatcttgcaaatgtcctcgtattcgacagccctgagaaccttcccatcatagaggcctttctcaacctgcacttttgcacagaatttctcagtgtccactgaaagcaacctggcatttgacccccgataagccccattgacaatccgcacaagtccaccaatctgagggatcacggtctcaagctcatcttggtcgaccctgagaacatgcttgctctccaacatctcaatctccccaacatatttatcaataactttcttcaccacccctttctgcttgtagtaccccttctctgccaatgacttgctcatcactttgaccacaatcccagggcacagccagtagtccttcctattgctcctctccttggccttctcctcctccttcatcagctcgtccaatgctgacctctttgcctctgctgccttcacatcctttcccatcttcttggtcaactcattcttctcctggtctcgggtgcctgagccatcctcctcatcaaaaccaaatttcatcttcggcttatcgtcaaaaggattaaccttgggccccggcacagccttctgaagcgcaatcgcaatcttacctgttgccttatctgcctctttcgagtcatcctccggctcctgctcatcatcatccgaacctgaatactctccttcactgccagactcaggctcgccctcggcagcaccaccaccattgggtttagctaaggacttgtgcgcacgctcaatctggcgggcaatcatgcgctcctggcgctcgtcgtcagccatgtctgacttgatcctcttgcgcttgaggcgttccttgacggcctgctccgagtcacggtcgatgtaggtcatgaaccaccccttgggcgtgtcctcgaccttacagtacccctcgcgccccaggaacttgacgaactcggtgagcgtggcccaccgcgtggagttcatgtggacgtggtgccggtcggcgatgtactcgttgtagacgacggtggcggcgacgcgggagtggcggtgcgcgcggcggatgagggagaggaaggactcgaggaactcctcggagaagccctcgacgacgcggtcgggggccatgccgaacacctgcatctgcctctggtgcgactccgacatgcagtggcacttgaacccgttctcgtcgcggcactgcttctgacacatctgacagtaccaccgcagcttctgcagccccttcgccttgatccggtttgcgatcgccttcggcgtcaggaactcgtgcttccccatcgtgcgggagaggcccttgccgcacaagcaggatgggaattacaggtagaagaaggggggagcacgttggtcaaggagacggacgcgaggcgacgaggagtggattattattgtggagagaggcagcggcggaggccggagaggaggccggcgacggcgagattggggagtgcgtgaacggattggggatcgattggattggggcgagggctttgtttttttttgttgctttttttgtttttttattagacaggcgagggctttgttgggacttgggaataagtccaaggctagcaccacaaatgaacgatccggatcgcgtaaacgatcaatcaacggacgagatccagccaccgtgccagatttttcaacccaacgcatgtgaagggcgcgcatcgtatcttatcttcactctccgtccaccaaagcaaaccctacccgctcccttcccgcgccgccgccgccatggactcgatcgacgcagatctcgcgcgcacgcaagaggagcggcgcaggatggaggaggcgctggcggctggcgcgcccatggccgtgtcctccgtcaccttcgacaccgacctctacggcggcgggggcgccgaccccaaccgcttcgcgggctacgacacctccatcccggcctccgaggacgacgccgcggaggacgacgcggaggccgccaaccctgcgccgcgccgcctcgcggcctacacgggccacgccatcgccgccgccgacatcccgcggtcggccgacgacgacgacgggctgcccaagaggtcccagcgcatcatcgaccgcgaggacgactaccgccgccgccgcctcaaccagatcatctcgccggagcgccatgacccgttcgccgctggggaggccaccccggacccctcggtgcggacctacgctgacgtcatgcgcgacgcggcgctgcagaagaagaaggaggacctgctgagggagattgccaagaagaagaaggaagaggaagagaaggagaaggagaggaaggctgccgctcctgagcagcctgccgccacaacaaagcggcgcaacaggtgggatcagtcgcaggacggcgacgctggtgccggtgccaagaaggtgaagacatcctcggactgggatgcccctgatgcgactcctgggattggccgttgggatgccacccccggacgtgttggagacgccacaccctccgtgagaaggaacagatgggatgagacaccgactccagggaggatggccgatgctgatgctacgcctgcagctggcggtgccacccctggggctactccttctggggcttgggacgcgactccaaagctgcctggtggtgtcacgccaacccctggtaagaagcagagatcaaggtgggatgagacaccagcaagtatggggagtgcaacccctggtagtcttggtgctgcaacacctgctggttatactcctggtccaacgccatttggtgcagagaaccttgccacaccaactcctagccagattgctcgtggaccgatcactccggagcagtaccagctcatgcggtgggagcgggacattgaggagaggaacaggcctctcactgacgaggagcttgatgccatgttcccgcaggagggctacaagattcttgagcccccggcttcctaccagcccatcaggaccccggcaaggaagctccttgcgacaccgacacctctggggacaccactttatgctattccagaggagaatcgtgggcagcattttgatgtgcccaaggagctgcctggtgggttgccactcatgaagcccgaggattaccagtactttggaactttgctgaacgaggaagaggaggagcagctatcgccagaggagcagaaggagaggaaaatcatgaaactgttactcaaagtgaagaatggcacacccccacagcgtaaaacagcacttcggcaactgacagacaaagcccgtgaatttggtgcaggaccgttgttcaacaaaatactgcccttactcatgcagccaacactggaggaccaggagaggcatcttttggtgaaggtcattgacagagtactttataagctcgatgagctggtccgtccttttgtgcacaagattcttgtggttattgaaccactgttgattgatgaggactattatgctcgtgttgaaggcagggagatcatctcaaaccttagcaaagcagctgggcttgctactatgattgctgctatgcgacccgacatcgataacattgatgagtatgtgagaaacaccactgctagggcgttcagtgtggtggcttctgctttgggtatccctgcccttttaccattcttgaaggctgtctgtcagagtaagaagtcttggcaggctaggcacactggtatcaaaatcgtccaacagattgctattctcatgggctgtgctgttttgccacacctcaagtcactagttgagatcattgagcatgggctgagcgatgaaaaccagaaagttcgtacaattactgccctttctcttgctgcacttgctgaggctgctgcaccatatggtatagaaagttttgatactgtattgaaacctctgtggaagggtatcagatctcaccgtgggaaggtccttgctgccttcctaaaggccattggtttcatcatccctcttatggatgctctgtatgctagctactacacaaaggaggtgatgcaggtcctcattagggagttccagtctccagatgaagaaatgaagaaaattgttctcaaggtggtgaaacagtgtgtcagtacagagggtgtggaggctgattatatccggaatgacatccttccagatttcttcaagcacttctgggtgaggagaatggctctagatcgcaggaactataagcagcttgtggaaactacagttgagatggcaaacaaggttggagttgctgatattgttgggagggttgttgaggatctgaaagatgaaagtgagccctacagaagaatggtgatggaaacaatcgagaaggtggtagccaacttgggtgcatcagatattgatgctcgtctggaggagctgcttattgatggtatcttgtatgctttccaagagcagactagtgatgacgcaaatgttatgctaaatggttttggagctgtggttaatgcacttggacagagagttaagccctaccttcctcagatttgtggtactatcaagtggcgattgaacaacaagagtgcaaaagttaggcagcaagctgctgatctgatctccaggatagccatagtaatgaagcagtgccaggaggagcagcttatgggtcacttgggtgttgtgctgtatgagtacttaggagaggagtatcctgaggtgcttggttcaattcttggagccttgaaggctatcgtcaatgtcattggtatgactaaaatgactccaccaatcaaggatcttcttcctcgtctgacccccattcttaagaacaggcatgagaaggtccaagagaactgcattgatcttgttggtaggattgctgatcgtggagcagaatttgtgccagcaagggaatggatgaggatttgttttgagctgctcgaaatgttgaaggctcataagaagggtattaggagagcaactgtgaacacatttggttatatcgcaaaggctatagggccacaggatgtgttggccaccctgttgaataacttgaaggtgcaagaacgacagaaccgggtctgtacaactgtagctattgctatagttgctgaaacttgctcacctttcacagttttacctgcccttatgaatgagtaccgggtcccagagctcaatgtccaaaatggtgttctgaagtcactctctttcctctttgagtatattggtgagatgggcaaagattacatatatgccgtcacccccttacttgaagatgctttaatggatagagatctggttcaccggcagactgctgcatctgctgttaagcacatggctctaggtgttgctggcttgggttgtgaggatgctcttgttcatctgcttaactatgtttggcccaacatatttgagacatctccccacgttataaatgctgtcatggaggcaattgaggggatgagggtcgcactaggtgcggctgtgattttaaattattgcctgcaaggtctcttccatccagcaaggaaagtacgagaagtgtattggaagatatacaactctttgtacatcggcgcgcaggatgcacttgttgcttcttatcctgccctggaagacgatggggataacatctttagtcgtccagagttggcaatgtttgtctgattaacggtacctcatgttgcagctgctgaagcgttacactggatttaggaccaatcctaaggctgcagcatgccaattaatccatcaagatcctatattgtgaaggacaaatgacaatcctagcgcgctgtcatctttttatgaatattaggcgttgggcatttaccgtgttttaaaactttgtattacacatggatgttgtattatgtggtgtggacaatggaacgttgcaagctgacctgaacctgattccttactgtattactgagatgttgatatgcatgtcatgttagtgtacgttgtgttctccttgtcattttgtttgtgatatcgacatgctatgtttgttgctgaagttgagcacaaatgatttgttggtca

SEQ ID NO: 127174 - DNA, 2141 bp, Zea Mays
cggtccaaccaatggccgggttcgcgcgcgccaccgcccccgcgtccccgtcaccggcggcggcgctgctcaccggcgagcgcctcgtggtcttcctcttcgcggcccgcgtggcactcgcggccccggtgcacctcgccgcggcgctcgcggtcctcgtggcggccgccctcgccgtcgagctcgccgtggacggctccggctccgccccgcttcgccgcttcaggaccaggccaggtgcttcgtcaggcatacttcttggcgccactactctgcccagcgtcatgctttctcggttaattcaactgtcaaggctcctaccagctgatcctaatggacctaaagaatttgcatacctggaaatgcagtactgggcagcatcaatcagctgtctcagtgtgctagctttattcctttggcatctacagaagtctcccagcaatgggatctctaaacatttggagtacggctcattgtttatagttttatatctcatgacattctttttgtcctttctactgaagactgatgaaggcttgatggtaacgaccaatatggcgtatatgctctgtcatggagtggctgctgtgatcttaatcaagcatatcctagagaagtttccctcatgcgcatcttttggggaggcgcttttggtgtcaggtggtcttgttctctactttggtgatatgttggcacatacactttcaaagatggagttctccatgtcatcaaaagcattcattcacacacctcaaactagaagcgatatgaccgcaattattcaggggattttacttgtcctttttctacttccgttactatacaagagttctcttaaagtttggtattgctggacaaaggagagaaagcaacaaacacaaacacctgaggaacataagcgaataagaattgattctgccatattctatatctcgttggcggtggtgttaatatttttactgccatcatggacacaccttgtccaaggcctcaaagtgcatccttttgtttggattgttaactatatgttcactgattcacatgagcgacttgttttatgtgcatactggatatgtgtaatatatgtatcagttagaaggttctacagtatatcaaagcaaagcaagacagagaggattcttttgcgcaagtattatcatcttgtcgctgttctcattttctctcctgcagttatatttcagcctgctttcttggacttggcatttggtgcagcatttgcagttttcttgatattggagatgttacgaatttgggaaatataccctcttggacgtgttgtgcatcagtttatgaacgcctttactgatcatcgtgattctgagattcttattgtcagccatttttcactcttactgggctgtgcacttccgaaatggatgtcatctggattaaatgaccgaccacttgccccttttgccggaattctcagcttggggataggtgataccatggcatcaatgatagggtacaagtatggcgtgttaagatggagcaagacaggaaagaaaacaatcgagggcacggcagcgggcataacatcggtgctagcagcctgctcgatcctggtgtcactcttggcttccagtgggtacattctttcgcagaattggctatcgctcctgatagctgtcacattgagcgggttattggaggcatacactgcacagctggacaatgccttcatccccctcgtgttctatagtcttctgtgtctataagggtagcatcctgtacatctaactgaccttgatatcctctttttgtttacacgctattagtatatacgtagtgcaatatgttatttcgacattactcacttggtctcctcggcgcatcaactgcctggtgattcagttcaacagatcacattctgtgtaaccctgcctttcggaagttgagaggacgtgctcatggttgagacagtcggtacaggcatatgaccagaagtagaaaaataaaatgttctccagtcgttcagtagagggtgtttttggcggagctgggcagttggatgctgtacataaagttttttttatatgaacctgttgactgttgttgggacgaacagtattgaaacatgctgtgatgctgatcaatttgatcactctatttgctctttc

SEQ ID NO: 127175 - DNA, 219 bp, Zea Mays
acctgtttgaatattcccattgaaacttgtatatgtgtctcatctaccttccggaaaagaggttaaaagagtatatcatgttttatgttagtctgaaaagacgtttcaacgttcgtttaaacgtttaaacgttgaaaagttggttcataacattttaacattttaccactttaataaccatgatcgtaacatttccagcacagcactacagcaaaaaat

SEQ ID NO: 127176 - DNA, 489 bp, Zea Mays
aaaggctaactggaaacatatacaactcccattacatatggatggaaagccatgacataccaaccaaccaaacagggtgacctgaaggacggaacaatgattccacaacttaatggacaagattgacaatcgcagaacagagacgacaccacgcgcagttaagcacacaataaccgaaatgccttggtcatttgatgcccctaactttctcagcaccagcaacaaacaaacagtaccacaagcacgcacatctggtggaatgagaggctcgaagcacgtacaaggatatgttgcggagccgaaacttaccgatcacccaaaaacagaagaaaaagacacaatcctgcgaacccgtgctgattagagtagggcaacaacaaaattcgaccgagaaacgtctctcccacacgcccaggcatagcaaaccgcgaccttcgtcgcgcctccacgttgggaacaaccggctcctcgcccgaaccggcctagatc

SEQ ID NO: 127177 - DNA, 537 bp, Zea Mays
gcagcatgaatatactaaatctatatgcccattgcaagttctggtttttacttcaatggtaggtcaaaccgattaagaagtccaattgggtatgttggccctaacgatgattcaggatcaatactgagttcaatgtgtggggtatgggaatctgaactacataggcaaccatacaaacatcacttcttttgctcaacctagaagtgctgtggtattcctagtgatgatattagttggggaagatcaggaaaccttggccgtggaaccggagataacaactttggcttgccttctggaaactatgcgaggagcgactcaactggtacaattggcgagccatttcctgctgtgtgtccgtacttgtttgtggatgagcagccaccagggaaaacaaaccaacaggagagttgggagagagaaggaaacaattaattatgcaaacacggaggagacacaatttgaagactgttggtacacctacggagcacgatgagggagcataccaagctcggaccgtcagacacgcggaggacggac

SEQ ID NO: 127178 - DNA, 2625 bp, Zea Mays
ccgcacgcgcccgtggctagctgccagccgcgcgcccgccgccaccccgcgcccaccccactgcgcgccggctggcgcgccgccacccagcgcggcccgccctcgccaccctgtggccccgccaccgccccgctgccccaccgttaaggcaggtgatgcggccgacaagggggcggcgtccaggaacccacaaaatcacgtcgtggtggggaggcacgggattcggatccggccgtggccacacccggaccccatcgaggtgatgcgggcgcaacggatcatggagcgtgtgcaggaggaacagcgccgctggtacggcgtcaaggagccggggcaggtgctcgccgtcaccccgacctactcacgcgcgttccaggcgctccacctcaccggcctcctccactcactccgtcggaatccttgcgcatactggcaaggcagaccaactgctgctcagcgaggaggacaagcagaatatgcctcttccagtccatggccctgcttgcaagtcctcagggcatctgattggatggcacacgttcaactcattgcccttctctaggaagacggccacagttgttggtgaagcagcccctattctgcccagggatttctagtgggctagttttgtgttgaactcgaggatgctgtggaaggaggctgacggcaagcctgactgggtgaaggatcttgatgctgtgggcgagaactttgaggagcgctggttaaaggcatcaaagcgcagtgccgctaagaaactgtcaaaattgtcgaggtcgcataatgattcgctgctgtggatcaacaagatacctgatattatttctattgacgacgaaatctattcaaatgacgatgatccagagagatgggacatgcagattttccgatcaattgattcgaattctgtcaagggttttccaaaagatccacgggaggccactagtaagaatcttgtttgtgggaaaatgtactgattgatatgagcgtgcatacaacatatgtgaatgccatccgaggtgctcaacatttcatctatattgagaaccagtacttccttggctcttcatttaactgggattcacatagagatgttgaaaatgacaatgcaaattatgtatgagataatctataaggccatgaaagaagtaggactagatggtacatatgagccacaggattacctgaatttcttctgccttggtaaccgtgaagccgaggacactacttgcacatctagtggaccattctcaaccagtaacccacagaaaaatacaattatgctgcagcttggatatccaatcaggaccaagctcggaataataggagattcatggtgtatgtgcactcgaaaggcatgattgtggatgatgaatatgtgataattggatccgctaacatcaaccagagatccatggaaggaactagagatacagagattgcaatggctgcataccaaccccagcatacattggcaaatatgctttctgctcctcgtggatagattttcgggtacaggaaaatacagtgtacgtgttgaaactgttatcctgccccaggttgggatagacggtggtacattcgtgttggtagaactgtgagaagaaaagatgggaaaactttgctttcttggctgtgatgattatctgctcaaacaagacatgcaaattgcaaaactcttaaaggatagtattagttctatttgttcatatagttctacagctagttgtttcttgctttgttcatggattgcaatactggataagatcatgatggatgttgtgtgtgttttaatcaccatttctaaaatttattctattggtaagacgattctaagatataggtcggagatggattccttgcatatacataaatagataaagaagcaaccggtttataacaaaaatatgtcttctattttgcctgttgcccaattctcttttagtgtagcctacttacaataattaaaagaagagttggtgtctgtttgagtagacaactaagtgcatatataagtacgtgcatgattttgattactaattgtgattttgatgatctttcttttgaagacggtctaacatataagcgcatgatttagatgaacggaattactattgtgccatttctgaagaatcttactgatttctcttgccttcttagaacaacatgggaagaagtgatgatgacagtccatcgccgccaagaggtcacaagagaagaacttgcagcccaagtcctcgtggtagttatggaggccatggcaagcgccccacaactaatcttatggtgacgaatcttggtccggattgtaggattctaactctcatcaagtgactcctcccctcacgatgactttgcggacagatgtctcaattatagtggtggagctacgaacaacaatccgatgtcctgatcgagagcgatggagctaatgtttgaacttgtgtgtttgaacttgtgaactaaaaatgtgaactatggatgtgaatttatgtgaatttgtgaaattatgtatttgaacttatgtgaatttgtgaacttatgtatttggacttgtgtgaatttgtgatatgaatatatatccatgtgtttgaaatttgtattgtatgtgatattctgtgttgc

SEQ ID NO: 127179 - DNA, 1309 bp, Zea Mays
acgcttctctctccctcatccgcctgggatttttttttcagccgtgcgccctggagctcccacggtcgcgccctgctcggctctcacgccgtcgatttggagctccggcgcgagctcctttgctggccgctgcagctcgccttctttggtgcgtgcgcccctggtctcggccccagctcggcctctgctcctcccatccatggctctccagctcgcccgaccgcgacctcgccttgctgctacgctcgcccagcccctctctctggcgagcttgaccggcgtcgagctctagcggtcctcctccgctgccactcgttggaccttgcccctgctgcgccgtcggcagctccccacaccctctcctcctcaagcttgttcccatggtgccccagcccccaacgccgagctcggtcctgccctctgccatgacgcctggccgccgctgctccatctcagatcgcactcgcccagctctgttggccgcacccctatcccttatcccagctccctcgctggcgtcgatttgcttgcaggtggctgtgagttcttcggttcttccctgtgcgcacgcgagctcctttgcttggcccgttgtcgttcttaccgcgctcggctgttcgtcgtcgtcacccgatcgcgcaacgagctgatagccccggcattcgtcctttgtccgtgtcatgtgccccacgacctatgtccttgccgtcgcgtcgagcccgtcaaaccccgtcctctcctactcgacctcgtctttgcccttctgggggtcgccgtcgtgtctgggattttagcatgtctccctgctcgccgttgaacctgggttccctgctcagccttcatagctagcgcgtcgtctttcgtctgtggtcgagcgtctgctccatcccagcaccctgcattagtgctcgacaaaaagcccaaacgaatcgtcatgccatcgtcttcgtcgaatggaaatcgtcgtgctgacacgccgatgtcgtcgatcgccatcctcgtctatgccaactctgtgtagctcgttaccacaccctgtagtcgcttccatgacgttgtcgtggggacttctgtgcgtcacatgtgcttcggtcacactaaatcaccctgcttccatttgtgtcgacagcaagccgtgaagacgctcttgtgctagccacgcgccacctgctcgacaaaacggatcccctgagtatctggtcaagaaatgagattgtgtgcatcgcttgccaggtgtgtgcggtcaaaggcgtcaagcaataaccatcgttgttcttccgactattgtgttggattggtcagggtaagc

SEQ ID NO: 127180 - DNA, 1856 bp, Zea Mays
atgtcgcccctacacccaccccgcgatgcaatccccaagccagcagcgctccctccgccgagcaagagaataccctccaccaccatcagcgctcgcccgcgcagatcccgctctcagcgctcgcccgccatccgctcttcatgcttagggtccgccatcatcgctcgcctggctgctcgacgcattcgccagcgccaccttcgaccagatcgactccgcctattgcgagctccccctcgcgctttcgtcgtcgccgtggaccgctcgctggcgctgacctcccccaagcgtggcacggtggtgcgggtgccgtacaaggtctccatcccgctgggcagggtgaagacggccacgccgggtgggaacaaggaccggccggagcagaagtaccaggtgtccctgcacgaactggagaatgccatcgagcaggcgaacgttcagggccggatccaccgactcccgttcggcggcctcgcgttgtgcttttgtgtggctattcgttcactggagaaggccattgaactattgaataagaggaaagttcaggggagaattcttttgtgtggctattcgttcaattacatttctgggacagcttcaataaagaaagtatctcagacggccaggaatcttagagcagttggctttgttgttgctgtggagaatatttacccaggaacaaaatttgaccctgtaccagtgagcatccctggaattctcatcacagatgtcagcaaaacggaggatgactgggcagaaagactactacaattcttccaccataatagattggactggaagggctacaaccttcaaagcaacaacagctttcaagatgttgatgtccttaaacttaaaccagacatacttgctcctggcaatctcatatgggctgcatgggcgcctaatggaacggatgaatcaaactatgctggtgaaggatttgcaatggtttctggaactagcatggccacaccgcatatcgctggcattgcagcactaataaagcagaagaacccaaagtggagcccctcagcaataaaatttgccatgatgacaacggccaatacactggacaaagggagccatcctctcagagcacagcagtacactgcatcggaaatgatgacactttctcgggccacaccgtttgattgtggtagtggcgctgttaacccaaaagctgccctttaacagttataattacccagaggttagtgatgctaagaagagtcctgggtgacaatttttgttccagcattttgaaaaatactcaaagaatttttttattaataatttgactaaaattcaaaagatgaaatatacttccttcttggcactatgattatcttggcccaactttactacccctaatgcattttggatgctattacagacactgtgccggatgtatataattaatgctggccaaggcttcaagatgttatggagcacaataaaatcattcctcggtccaaaaactgcttccaagatccatgttcttgggaataagtagcaacataagttgctcgaaataattgacgagtgtgaactgccagaatttcttggtggcaaatgcaattgtattgaaggttgccaaagatctgacaaaggtccttggaaggatcccaacataataaagagtcctcaatgacgaggcaaactacgacagacaaattgtgaccatatccagcattgatggaaaaataatacgttatgctaggccagatcactcaactagaaaagtgagtgatgcatctgccgagtctggatctgaagtggaagatgtaacatctcctactgcatcaaggaacctgattacacatcctattttgacccatgttcacgaggaggca

SEQ ID NO: 127181 - DNA, 761 bp, Zea Mays
cgggaggcgtggctctacgctagcacgctccacctcggacgtctcttctacctctccgtaacaaaggcgcacgggcaaagcggatcccctcttccactccgctgcctcacttccgccgcacgcgaccggaggcggctcaccgcgtagccgcgagcccaacccttgccccgcccgcccgtccttcattccttccggtggactagccgccgtacgcctcaggcagccatgtctccccccgagaatcccagccccgcggcgccggccgagccgtcgcagccgccgccaccggctgccgcggccaaggggaagcggaagaaggacgagaagaaggatgacgatctgtcggaggaggatctggcgctgaaggagcagctggagctctacgtcgtgcgggcgcaggatgcggatccgggcgtgcagaagctcgcgctcgagagcatgaggcaggagattcgctctgccacgagctcaatgacttcagttccaaagccgctgaaattcctccgcccacactttggaactctcaagtcctatttcgaaacaatgccagagtccgagctcaagaagtacatggctgacatactgtcagtgttagctttaacaatgtccgttgaaggagaaagagagagtctgaaataccgtttgctgggttctgaaggtgatattggttcatggggtcatgaatatgtgagaaatttggccggtgagattgcacaagaattccaaaagcgtcaggttgcactctcactcatgctagaatt

SEQ ID NO: 127182 - DNA, 565 bp, Zea Mays
gtttgtaccttactagttcatccaaatttctccctgcccctgatgatagtttagcacttgacatagcgtataccatctatatgaagtttggagaccttgcaagtgctttgagaatttctctgcaacttgagaaatctgtgcagtatgtgaagcaagtctacacagcaactgatgatcttctgctgaagaaacagttctcttatctcattgcgcgccatggtttggctatggagattgatgacgagatctctactgatgataatgataaggaggctttacaagaaatagtaaataatactaagttgagtgagggatatcttactcttgctcgcgatattgaggtcatggagcctaaatccccagaggatatatacaaggtccatttgattgatggccgtggtgccagctccagtcttgattccgcaagacagaatttagctgcaacatttgtaaatgcatttgtgaatgctgggtttggcaaggacaagttgatgaccgctccatctgattcacccagcagcgggtcttccggaaattggttatttaagaacaaggaacatggaaa

SEQ ID NO: 127183 - DNA, 1909 bp, Zea Mays
tacttgcatagtaatgatactcatgttgtagctggagccttgctaggtattggaattgtcacttgcggggtgaagagtgattgtgatcctgcgtttgctattctcatggagtatattggcaaagatgactcaaacattcgtattggagcaatattgggtcttggaattgcatatgctggttcccagaaagaagagcttaaaatgcatctatctgctgtgctgggagactctcaatcacctcttgaagtattggtcttctcagccattgccttggggttggtgtttgttggttcttgcaatgaagagattgcacagtctattatatttgccttgatggagcgtagtgaggctgagttggcagagcccattatacggttgcttcctgttgcgcttggccttctataccttggaaaacaggatagtgtggaggctaccgcagaggtctctaaaacatttgatgaaaagatagggaagtactgtgatgtaacacttatgtcgctggcatatgccgggacaggaaatgtgcttaaggttcagaaacttcttggcatttgttcacagcatcttgagaaaggtgaaacacaccaagggccagctgtccttggaattgctcttattgctatggctgaagaattaggagctgaaatggctgtacgttcacttgagcgtcttctgcagtatggcgagcagaatataagacgagcagttcctcttgctcttggtatactctgcatatctaatcccaaggtgaatgttatggacacactgagtagattgagtcatgatgccgatgccgatgtgtcaatggctgcaattatctcattgggtttgattggtgctggcacaaacaatgccagaatagctgccatgcttcgcaatctttcaagttattactacaaagaagcagctcatctgttttgtgttagaattgctcagggccttgttcacctcggaaagggcttgttgaccctttctccgtaccattctgatagatttcttctttccccgatggcacttggagggcttgtaactgttctgcatgcgtgtcttgatatgaagtccactatcctagggaaatatcactacatactttacattattgtcctggcaatgcagcccaggatgcttttaactgtcgatgaggatctgaagcccctctcagtacctgtccgcgttgggcaagctgtggacgtggttggtcaggcaggaaggcctaagacaattaccggctttcagacacactccacaccagtcttgcttgcagcaggggagagagctgaactagcaactgaaaaatacatcccactgactccggtattagagggctttgtgattttgaagaagaacccggagtaccatgaagagtgaaacgctttagcatgccaaatagcatggtgtttcggaggctcgtgcacatggcagtcttcaagccctggcgcacccctcgtcgagaaatcgctcgccctttgctcaacccttcgcctggagttcatgttgaattcttaccagagttgtggctaactgaaagctgtcttcggttgtgctgatatacgattgtatctgtacgattgtagcaattactgggacagcttactctgtatggtgtggtgataacgtggcatagcatttttggcgctggtctaggttagtccttgtgttgacatggtgcaccatcattataagttttctgtattttatggatccgttctgttcgtgtgtactggaaacattgtacacatgatatgtaagtgtgcctccatgtgtatgtgtgccttcgtgtgtgttttggttttgtctttagcatggcttttgtccccttaaaaccaaaagacaaatcaaagcgctcgaagcaactttttccaaatatatatggaagaacttttagggctgatttggtgatgggtttttt

SEQ ID NO: 127184 - DNA, 1696 bp, Zea Mays
cttcaaagcctgtatcatgctgcatcttccttccctggggccagcctcgtcaactccgcttccggttctggcccattggcgttgcttcacatcgacgcgcctgcgccgccggtccgccgcgccttcccctcccttctcccccgcgtgccctcctattccttctctgcggcggcgtggggagctgcatctgccttcgtctggaggagtgggaagaagcgctgccgaaggggtgatttacgaagccagagagcggctgggagcaagagtgcctgggactgggagttgaagctagagaggctagttgcttgtttggtgcgctgccaaaccgccctcaacatctgacccgtctctccctcacttccacggttccagcgagcggcgcaaccgcgcaactgagcagctagcatgggggacgaagaagatgatcctgactggctccgcgcgtttcagaggggtcaactatggatgaaaaacaagctaatactcctagacgcttgactccaaagaaggatatggtaacactttcatctggttctgatgcttcaccgggaaacagcctttcgagggcccatgaagataaccatgaagagggctcacttagcactgccaagagaaagaatgctcaacaaactaagactaaaaaaacaaaggatgctggaacaaaaactggtgcagaccaagcagggaatggagatgctgaggatgatgtgcaagataaactcacagggaactctgtaaagtgccaactcacccatctctccattttattctttttgctccttcaaatttggatgtgaaactctaggcctttagctattttcagttgtatatctgcagctctttgatggagtttatgctcctctaaatgccaggtctcccagaggttaccattaatatttccagataaagttcaacgttcaaaggcattgattgaatgtgatggtgactcgatagatttaagtggagatattggtgcggttgggaggatagtagtttcaaatggtcctactgcaaaacaggatttgttgttggacctgaaaggaacaatatacaaaacaactatagttccatccaggacattttgtgttgtgagtgtgggacaatcagaagcaaagatagaggctataatgaatgacttcattcaactggaaccacaatccaatttatttgaagcagagactatggtggaaggtacccttgatggattcacatttgattcagatgaggagggtgacaaactctatgaaccacaggctaatcaaaacgatctgaataataacgaagatgaaggtcaacctaaggcaaagaccaaaaggaaagcagagaaaacaacggggaaggcaccgaagaaggcgaaggttgcaggaaagggccctaaaaagggcacgaggaaaacccaacctgcgaagagaggtaggaaggctaagaaatgatgacatgttgatttcctcggataagaagaaaaagtctattgagaacctggatagctggcaacaaagatgtgaatttttcaacgcatagtcatggctgtgaggcgcgtcgtcagttcaacatcatgcagtacttgttttagagagagagaacatgtaaagctgtaaacgttgttgtgtactctatgagcgttcagctttggatcattgaaaagaccgagatgttcacgtggaggcgaactgacttctctattttttttcacaaa

SEQ ID NO: 127185 - DNA, 1799 bp, Zea Mays
cttcaaagcctgtatcatgctgcatcttccttccctggggccagcctcgtcaactccgcttccggttctggcccattggcgttgcttcacatcgacgcgcctgcgccgccggtccgccgcgccttcccctcccttctcccccgcgtgccctcctattccttctctgcggcggcgtggggagctgcatctgccttcgtctggaggagtgggaagaagcgctgccgaaggggtgatttacgaagccagagagcggctgggagcaagagtgcctgggactgggagttgaagctagagaggctagttgcttgtttggtgcgctgccaaaccgccctcaacatctgacccgtctctccctcacttccacggttccagcgagcggcgcaaccgcgcaactgagcagctagcatgggggacgaagaagatgatcctgactggctccgcgcgtttcaggcaccaactgtggcacctgtgatgctttcttctggttcagatacctcccctgaagctagtcctacaagaaccagtacatctagaaaacaaaacaagggagagaagcacgctagtccagatcatgcacgtgatagagatggtgcttcacaaaataaaaacaaaatctcagcagctactagaagaaaaaaccttgtcagtaaaaaagaggggtcaactatggatgaaaaacaagctaatactcctagacgcttgactccaaagaaggatatggtaacactttcatctggttctgatgcttcaccgggaaacagcctttcgagggcccatgaagataaccatgaagagggctcacttagcactgccaagagaaagaatgctcaacaaactaagactaaaaaaacaaaggatgctggaacaaaaactggtgcagaccaagcagggaatggagatgctgaggatgatgtgcaagataaactcacagggaactctgtctcccagaggttaccattaatatttccagataaagttcaacgttcaaaggcattgattgaatgtgatggtgactcgatagatttaagtggagatattggtgcggttgggaggatagtagtttcaaatggtcctactgcaaaacaggatttgttgttggacctgaaaggaacaatatacaaaacaactatagttccatccaggacattttgtgttgtgagtgtgggacaatcagaagcaaagatagaggctataatgaatgacttcattcaactggaaccacaatccaatttatttgaagcagagactatggtggaaggtacccttgatggattcacatttgattcagatgaggagggtgacaaactctatgaaccacaggctaatcaaaacgatctgaataataacgaagatgaaggtcaacctaaggcaaagaccaaaaggaaagcagagaaaacaacggggaaggcaccgaagaaggcgaaggttgcaggaaagggccctaaaaagggcacgaggaaaacccaacctgcgaagagaggtaggaaggctaagaaatgatgacatgttgatttcctcggataagaagaaaaagtctattgagaacctggatagctggcaacaaagatgtgaatttttcaacgcatagtcatggctgtgaggcgcgtcgtcagttcaacatcatgcagtacttgttttagagagagagaacatgtaaagctgtaaacgttgttgtgtactctatgagcgttcagctttggatcattgaaaagaccgagatgttcacgtggaggcgaactgacttctctattttttttcacaaattaaaatctatcagtaaggctttgttcgtttatgcc

SEQ ID NO: 127186 - DNA, 1769 bp, Zea Mays
cttcaaagcctgtatcatgctgcatcttccttccctggggccagcctcgtcaactccgcttccggttctggcccattggcgttgcttcacatcgacgcgcctgcgccgccggtccgccgcgccttcccctcccttctcccccgcgtgccctcctattccttctctgcggcggcgtggggagctgcatctgccttcgtctggaggagtgggaagaagcgctgccgaaggggtgatttacgaagccagagagcggctgggagcaagagtgcctgggactgggagttgaagctagagaggctagttgcttgtttggtgcgctgccaaaccgccctcaacatctgacccgtctctccctcacttccacggttccagcgagcggcgcaaccgcgcaactgagcagctagcatgggggacgaagaagatgatcctgactggctccgcgcgtttcaggcaccaactgtggcacctgtgatgctttcttctggttcagatacctcccctgaagctagtcctacaagaaccagtacatctagaaaacaaaacaagggagagaagcacgctagtccagatcatgcacgtgatagagatggtgcttcacaaaataaaaacaaaatctcagcagctactagaagaaaaaaccttgtcagtaaaaaagaggggtcaactatggatgaaaaacaagctaatactcctagacgcttgactccaaagaaggatatggtaacactttcatctggttctgatgcttcaccgggaaacagcctttcgagggcccatgaagataaccatgaagagggctcacttagcactgccaagagaaagaatgctcaacaaactaagactaaaaaaacaaaggatgctggaacaaaaactggtgcagaccaagcagggaatggagatgctgaggatgatgtgcaagataaactcacagggaactctgtctcccagaggttaccattaatatttccagataaagttcaacgttcaaaggcattgattgaatgtgatggtgactcgatagatttaagtggagatattggtgcggttgggaggatagtagtttcaaatggtcctactgcaaaacaggatttgttgttggacctgaaaggaacaatatacaaaacaactatagttccatccaggacattttgtgttgtgagtgtgggacaatcagaagcaaagatagaggctataatgaatgacttcattcaactggaaccacaatccaatttatttgaagcagagactatggtggaagatgaggagggtgacaaactctatgaaccacaggctaatcaaaacgatctgaataataacgaagatgaaggtcaacctaaggcaaagaccaaaaggaaagcagagaaaacaacggggaaggcaccgaagaaggcgaaggttgcaggaaagggccctaaaaagggcacgaggaaaacccaacctgcgaagagaggtaggaaggctaagaaatgatgacatgttgatttcctcggataagaagaaaaagtctattgagaacctggatagctggcaacaaagatgtgaatttttcaacgcatagtcatggctgtgaggcgcgtcgtcagttcaacatcatgcagtacttgttttagagagagagaacatgtaaagctgtaaacgttgttgtgtactctatgagcgttcagctttggatcattgaaaagaccgagatgttcacgtggaggcgaactgacttctctattttttttcacaaattaaaatctatcagtaaggctttgttcgtttatgcc

SEQ ID NO: 127187 - DNA, 1840 bp, Zea Mays
tccctggggccagcctcgtcaactccgcttccggttctggcccattggcgttgcttcacatcgacgcgcctgcgccgccggtccgccgcgccttcccctcccttctcccccgcgtgccctcctattccttctctgcggcggcgtggggagctgcatctgccttcgtctggaggagtgggaagaagcgctgccgaaggggtgatttacgaagccagagagcggctgggagcaagagtgcctgggactgggagttgaagctagagaggctagttgcttgtttggtgcgctgccaaaccgccctcaacatctgacccgtctctccctcacttccacggttccagcgagcggcgcaaccgcgcaactgagcagctagcatgggggacgaagaagatgatcctgactggctccgcgcgtttcaggcaccaactgtggcacctgtgatgctttcttctggttcagatacctcccctgaagctagtcctacaagaaccagtacatctagaaaacaaaacaagggagagaagcacgctagtccagatcatgcacgtgatagagatggtgcttcacaaaataaaaacaaaatctcagcagctactagaagaaaaaaccttgtcagtaaaaaagaggggtcaactatggatgaaaaacaagctaatactcctagacgcttgactccaaagaaggatatggtaacactttcatctggttctgatgcttcaccgggaaacagcctttcgagggcccatgaagataaccatgaagagggctcacttagcactgccaagagaaagaatgctcaacaaactaagactaaaaaaacaaaggatgctggaacaaaaactggtgcagaccaagcagggaatggagatgctgaggatgatgtgcaagataaactcacagggaactctgtaaagtgccaactcacccatctctccattttattctttttgctccttcaaatttggatgtgaaactctaggcctttagctattttcagttgtatatctgcagctctttgatggagtttatgctcctctaaatgccaggtctcccagaggttaccattaatatttccagataaagttcaacgttcaaaggcattgattgaatgtgatggtgactcgatagatttaagtggagatattggtgcggttgggaggatagtagtttcaaatggtcctactgcaaaacaggatttgttgttggacctgaaaggaacaatatacaaaacaactatagttccatccaggacattttgtgttgtgagtgtgggacaatcagaagcaaagatagaggctataatgaatgacttcattcaactggaaccacaatccaatttatttgaagcagagactatggtggaagatgaggagggtgacaaactctatgaaccacaggctaatcaaaacgatctgaataataacgaagatgaaggtcaacctaaggcaaagaccaaaaggaaagcagagaaaacaacggggaaggcaccgaagaaggcgaaggttgcaggaaagggccctaaaaagggcacgaggaaaacccaacctgcgaagagaggtaggaaggctaagaaatgatgacatgttgatttcctcggataagaagaaaaagtctattgagaacctggatagctggcaacaaagatgtgaatttttcaacgcatagtcatggctgtgaggcgcgtcgtcagttcaacatcatgcagtacttgttttagagagagagaacatgtaaagctgtaaacgttgttgtgtactctatgagcgttcagctttggatcattgaaaagaccgagatgttcacgtggaggcgaactgacttctctattttttttcacaaa

SEQ ID NO: 127188 - DNA, 2345 bp, Zea Mays
tccctggggccagcctcgtcaactccgcttccggttctggcccattggcgttgcttcacatcgacgcgcctgcgccgccggtccgccgcgccttcccctcccttctcccccgcgtgccctcctattccttctctgcggcggcgtggggagctgcatctgccttcgtctggaggagtgggaagaagcgctgccgaaggggtgatttacgaagccagagagcggctgggagcaagagtgcctgggactgggagttgaagctagagaggctagttgcttgtttggtgcgctgccaaaccgccctcaacatctgacccgtctctccctcacttccacggttccagcgagcggcgcaaccgcgcaactgagcagctagcatgggggacgaagaagatgatcctgactggctccgcgcgtttcagatacctcccctgaagctagtcctacaagaaccagtacatctagaaaacaaaacaagggagagaagcacgctagtccagatcatgcacgtgatagagatggtgcttcacaaaataaaaacaaaatctcagcagctactagaagaaaaaaccttgtcagtaaaaaagaggggtcaactatggatgaaaaacaagctaatactcctagacgcttgactccaaagaaggatatggtaacactttcatctggttctgatgcttcaccgggaaacagcctttcgagggcccatgaagataaccatgaagagggctcacttagcactgccaagagaaagaatgctcaacaaactaagactaaaaaaacaaaggatgctggaacaaaaactggtgcagaccaagcagggaatggagatgctgaggatgatgtgcaagataaactcacagggaactctgtaaagtgccaactcacccatctctccattttattctttttgctccttcaaatttggatgtgaaactctaggcctttagctattttcagttgtatatctgcagctctttgatggagtttatgctcctctaaatgccaggtctcccagaggttaccattaatatttccagataaagttcaacgttcaaaggcattgattgaatgtgatggtgactcgatagatttaagtggagatattggtgcggttgggaggatagtagtttcaaatggtcctactgcaaaacaggatttgttgttggacctgaaaggaacaatatacaaaacaactatagttccatccaggacattttgtgttgtaagttatgttccaaacccaagtagagatttattgttttgtgatggtgttttaaccctcgatgtattttcctttcaggtgagtgtgggacaatcagaagcaaaggttagctatccactgtcgatttacacatagcatttagtgtactatttctgcttgttaattgggttacgtgttcaatttctcaattccacttccattccaaggcaattattcgccacaacccacccactgttttttctgtgcagatagaggctataatgaatgacttcattcaactggaaccacaatccaatttatttgaagcagagactatggtggaaggtacatacttccgacagttactgcagggtgccggctaatatgacttcgtttttctccagagtgtctctaatgtataaaattggcatgcataaagcaaatttgtaaatagtagcatggtcgtatcgtttttttatcgagctatttctttgtgcatcgacatttgtggctgtagcttcattcttgcactatgaggaagtaaccaggcttcatgaagatgtggttccattatttatatgataatagcctgtgctacaatttttctgctctaatattaaagatctatcattcgtttaggtacccttgatggattcacatttgattcagatgaggagggtgacaaactctatgaaccacaggctaatcaaaacgatctgaataataacgaagatgaaggtcaacctaaggcaaagaccaaaaggaaagcagagaaaacaacggggaaggcaccgaagaaggcgaaggttgcaggaaagggccctaaaaagggcacgaggaaaacccaacctgcgaagagaggtaggaaggctaagaaatgatgacatgttgatttcctcggataagaagaaaaagtctattgagaacctggatagctggcaacaaagatgtgaatttttcaacgcatagtcatggctgtgaggcgcgtcgtcagttcaacatcatgcagtacttgttttagagagagagaacatgtaaagctgtaaacgttgttgtgtactctatgagcgttcagctttggatcattgaaaagaccgagatgttcacgtggaggcgaactgacttctctattttttttcacaaa

SEQ ID NO: 127189 - DNA, 1866 bp, Zea Mays
tccctggggccagcctcgtcaactccgcttccggttctggcccattggcgttgcttcacatcgacgcgcctgcgccgccggtccgccgcgccttcccctcccttctcccccgcgtgccctcctattccttctctgcggcggcgtggggagctgcatctgccttcgtctggaggagtgggaagaagcgctgccgaaggggtgatttacgaagccagagagcggctgggagcaagagtgcctgggactgggagttgaagctagagaggctagttgcttgtttggtgcgctgccaaaccgccctcaacatctgacccgtctctccctcacttccacggttccagcgagcggcgcaaccgcgcaactgagcagctagcatgggggacgaagaagatgatcctgactggctccgcgcgtttcagatacctcccctgaagctagtcctacaagaaccagtacatctagaaaacaaaacaagggagagaagcacgctagtccagatcatgcacgtgatagagatggtgcttcacaaaataaaaacaaaatctcagcagctactagaagaaaaaaccttgtcagtaaaaaagaggggtcaactatggatgaaaaacaagctaatactcctagacgcttgactccaaagaaggatatggtaacactttcatctggttctgatgcttcaccgggaaacagcctttcgagggcccatgaagataaccatgaagagggctcacttagcactgccaagagaaagaatgctcaacaaactaagactaaaaaaacaaaggatgctggaacaaaaactggtgcagaccaagcagggaatggagatgctgaggatgatgtgcaagataaactcacagggaactctgtaaagtgccaactcacccatctctccattttattctttttgctccttcaaatttggatgtgaaactctaggcctttagctattttcagttgtatatctgcagctctttgatggagtttatgctcctctaaatgccaggtctcccagaggttaccattaatatttccagataaagttcaacgttcaaaggcattgattgaatgtgatggtgactcgatagatttaagtggagatattggtgcggttgggaggatagtagtttcaaatggtcctactgcaaaacaggatttgttgttggacctgaaaggaacaatatacaaaacaactatagttccatccaggacattttgtgttgtgagtgtgggacaatcagaagcaaagatagaggctataatgaatgacttcattcaactggaaccacaatccaatttatttgaagcagagactatggtggaaggtacccttgatggattcacatttgattcagatgaggagggtgacaaactctatgaaccacaggctaatcaaaacgatctgaataataacgaagatgaaggtcaacctaaggcaaagaccaaaaggaaagcagagaaaacaacggggaaggcaccgaagaaggcgaaggttgcaggaaagggccctaaaaagggcacgaggaaaacccaacctgcgaagagaggtaggaaggctaagaaatgatgacatgttgatttcctcggataagaagaaaaagtctattgagaacctggatagctggcaacaaagatgtgaatttttcaacgcatagtcatggctgtgaggcgcgtcgtcagttcaacatcatgcagtacttgttttagagagagagaacatgtaaagctgtaaacgttgttgtgtactctatgagcgttcagctttggatcattgaaaagaccgagatgttcacgtggaggcgaactgacttctctattttttttcacaaattaaaatctatcagtaaggctttgttcgtttatgcc

SEQ ID NO: 127190 - DNA, 485 bp, Zea Mays
gatttatttacttggaacaatgcttgtcgcaacatcatagtgcacctgcctgatggaggattctaatctgtttcccgtgacctgcaggggaaggcaccgaagaaggcgaaggttgcaggaaagggccctaaaaagggcacgaggaaaacccaacctgcgaagagaggtaggaaggctaagaaatgatgacatgttgatttcctcggataagaagaaaaagtctattgagaacctggatagctggcaacaaagatgtgaatttttcaacgcatagtcatggctgtgaggcgcgtcgtcagttcaacatcatgcagtacttgttttagagagagagaacatgtaaagctgtaaacgttgttgtgtactctatgagcgttcagctttggatcattgaaaagaccgagatgttcacgtggaggcgaactgacttctctattttttttcacaaattaaaatctatcagtaaggctttgttcgtttatgcc

SEQ ID NO: 127191 - DNA, 102 bp, Zea Mays
atttcatgtcagatctgtttgatatttgaacagaaaaaattctatcctaacaggaatcgtgatgtcaattgtcaacaacaagaggtaaccagaacttatgtg

SEQ ID NO: 127192 - DNA, 842 bp, Zea Mays
gcagcaacaccgcccccggcctcgctttgcagccccctccctccaccgcctcctccacgccctagcgctccggcccccgccccgagctcgtcgtggccggctgcgctgcggtgcccgcacctgtgggggcgtgcgggccggtggtgaaacgacccgcgacctcggtgcctctcgacgtctgcccgcttcctcgccggcgccattttgttcgtctaaatcccctgtgataagcaccactgctcgtgatgcattcttcggaaaataaactgggttggaatgagacctctatggggttggttcctgtaccaaaaagaccagctagacctgatgcttcccaccaatgcaaatctgattcctttatgaagcgatcaccaaggaaagttagaaatgctactctggcaaaaagcataaagagcaaataccactatagtcccctcaaacagcggaagggttcagattctgttcctgggaaaatcgtaacaggactaaccgcaaggaaaaagaagaaaaggaaaatccaaattacagacgaggcaactcgtttggaacgaagagcgagatattttctaatcaagataaaactggagcagaatttgctagatgcttactctggagatggatggaatgggcaaaggtgcattccctgctctttctgctgtaatctgctggtgtaaagaaagttttcaaatctatatacatccttgtagagtcaatgcattcttttgaactttggaacctgaaaaatgctgtcttatcttgtcacgatgaatagaggaaagttcacggaaagtgtaatgtagcttttaaggcttgcaacaagatgcttattattttgaaactta

SEQ ID NO: 127193 - DNA, 2802 bp, Zea Mays
gcagcaacaccgcccccggcctcgctttgcagccccctccctccaccgcctcctccacgccctagcgctccggcccccgccccgagctcgtcgtggccggctgcgctgcggtgcccgcacctgtgggggcgtgcgggccggtggtgaaacgacccgcgacctcggtgcctctcgacgtctgcccgcttcctcgccggcgccattttgttcgtctaaatcccctgtgataagcaccactgctcgtgatgcattcttcggaaaataaactgggttggaatgagacctctatggggttggttcctgtaccaaaaagaccagctagacctgatgcttcccaccaatgcaaatctgattcctttatgaagcgatcaccaaggaaagttagaaatgctactctggcaaaaagcataaagagcaaataccactatagtcccctcaaacagcggaagggttcagattctgttcctgggaaaatcgtaacaggactaaccgcaaggaaaaagaagaaaaggaaaatccaaattacagacgaggcaactcgtttggaacgaagagcgagatattttctaatcaagataaaactggagcagaatttgctagatgcttactctggagatggatggaatgggcaaagccgagagaaaataaagccagagaaggaactgcaacgtgccaggaaacaaatcataaaatgcaaaattgctatacgtgatatcatccgccaacttgatttgtatacttctactgggagtgttgatgacccactaatgcctacagatcagtccaccaatcccgaacataccatgtgctcaacatgcaagtctcatgaatcatttcccagcaataaaattatcttctgcaaagggccctgcaaaagggcatgtcatgagaaatgtttggaacctcccttaaacaaaagcgtacttccaacaagtagccatgggtggctttgcaaattctgtttgtgcaaggtgaggattttagaaactattaatgcacatctagggacgagttttacagtgaagtgccactttgaagatatattcaaggaaactactgaactaatagactctgaggatgcactagatgaagattggctttctgagtattcaggtgatgaggactatgatcctgatgaaaatgaggccagtggcgactgtatggacagcggggagaagattatgtctgatgattccaatggttcaggaagccccctttattctccaaatgacgatattcctgacttcatatcagcagacttaaatgttgtggaagggttttgtcataccaatttagatttaggcattgatgccgttgaagatgattttgcacagatcctcacctaccaaaggccaagaagagatgttgattatagaaggcttaacgaggaaatgtttgggaaaataaccgggaatgaagaacagagcgaggacgaagattggggccatgaaaggagaaagaaaaggacacattcaggtgttgctggggataattctgttggtttcttgaacgttatatctgatgaaaagagccagaagaaggggagaaaacttttcaggattcctcctgcagctgttgaggtacttcgcagagcttttgctgaaaatgagcttccaccccgggatgttaaagaaaatctctcaagagaattgggaatttcttttgaaaagattgataaatggttcaaaaatacacggtgtgctgctctcagagatcggaaggctgaaggaaacagtcataatacagctcccagcaaaagctcaaaaaataaaggaaaagctggaatctcaggcaagactggaaggaatggtcatgttactggtccctgcaataatttgagaacaaatgaagaaaaaacaggtatatcggggaagtttgattcaggagacaactcttgtttggttcccttctctgaagtcatcaatgtgcctacgcgattgccacacaactttgagatgaggaagatggaatcaactagaagtcctgcgaggctacacaataaaggagggttcctgtctgcaacagtccaaattaaggagagtacgttgttacccacaggcaagccttgttggcagtcagaaatgagccatccaacaactaatgaagtgagcacttcagcgcaagctactacttggatcgacgcgggggcgtgtgccgaggagcaagaacctactccttgggtggacatcggggtctcagactaccagcctttcctggatgtgatcgacgacatgtgcggacttgagtggaggctgcagagactgaaggagaacatgctctcatctagcatagacggccaaaccgccgccagtgagagtgacaaaagaaaccagaccgtggtgctagtgccaaccgccgagctcaaggaaaagctgccgcatgacggtttattcgggcattattgcccataggtcttatatacatagcggataaactgtacagagaaccaagaagaagaagaaaacaaaagggaaacagcaaacagacaggtgcccgcttacataccggtccatactgtcaggcactactctcctttcttgggcctcgacacgactaatactgtgctagtccagaacagatgagccatagccattacctgtgtgcctcccaggttcagttcatatgttgtatgtattaatgtatatcagaagagtcgtgcttagtagtagcaagaacctagtcctgatccagaccgtgaatctggatcatcttgtcctgtggttgtaccgtgcagaacagacagatgtcggctagtcgtttggttctgaagtaagaaactataagcatgcgtgattttggccc

SEQ ID NO: 127194 - DNA, 2797 bp, Zea Mays
gcagcaacaccgcccccggcctcgctttgcagccccctccctccaccgcctcctccacgccctagcgctccggcccccgccccgagctcgtcgtggccggctgcgctgcggtgcccgcacctgtgggggcgtgcgggccggtggtgaaacgacccgcgacctcggtgcctctcgacgtctgcccgcttcctcgccggcgccattttgttcgtctaaatcccctgtgataagcaccactgctcgtgatgcattcttcggaaaataaactgggttggaatgagacctctatggggttggttcctgtaccaaaaagaccagctagacctgatgcttcccaccaatgcaaatctgattcctttatgaagcgatcaccaaggaaagttagaaatgctactctggcaaaaagcataaagagcaaataccactatagtcccctcaaacagcggaagggttcagattctgttcctgggaaaatcgtaacaggactaaccgcaaggaaaaagaagaaaaggaaaatccaaattacagacgaggcaactcgtttggaacgaagagcgagatattttctaatcaagataaaactggagcagaatttgctagatgcttactctggagatggatggaatgggcaaagccgagagaaaataaagccagagaaggaactgcaacgtgccaggaaacaaatcataaaatgcaaaattgctatacgtgatatcatccgccaacttgatttgtatacttctactgggagtgttgatgacccactaatgcctacagatcagtccaccaatcccgaacataccatgtgctcaacatgcaagtctcatgaatcatttcccagcaataaaattatcttctgcaaagggccctgcaaaagggcatgtcatgagaaatgtttggaacctcccttaaacaaaagcgtacttccaacaagtagccatgggtggctttgcaaattctgtttgtgcaaggtgaggattttagaaactattaatgcacatctagggacgagttttacagtgaagtgccactttgaagatatattcaaggaaactactgaactaatagactctgaggatgcactagatgaagattggctttctgagtattcaggtgatgaggactatgatcctgatgaaaatgaggccagtggcgactgtatggacagcggggagaagattatgtctgatgattccaatggttcaggaagccccctttattctccaaatgacgatattcctgacttcatatcagcagacttaaatgttgtggaagggttttgtcataccaatttagatttaggcattgatgccgttgaagatgattttgcacagatcctcacctaccaaaggccaagaagagatgttgattatagaaggcttaacgaggaaatgtttgggaaaataaccgggaatgaagaacagagcgaggacgaagattggggccatgaaaggagaaagaaaaggacacattcaggtgttgctggggataattctgttggtttcttgaacgttatatctgatgaaaagagccagaagaaggggagaaaacttttcaggattcctcctgcagctgttgaggtacttcgcagagcttttgctgaaaatgagcttccaccccgggatgttaaagaaaatctctcaagagaattgggaatttcttttgaaaagattgataaatggttcaaaaatacacggtgtgctgctctcagagatcggaaggctgaaggaaacagtcataatacagctcccagcaaaagctcaaaaaataaaggaaaagctggaatctcagactggaaggaatggtcatgttactggtccctgcaataatttgagaacaaatgaagaaaaaacaggtatatcggggaagtttgattcaggagacaactcttgtttggttcccttctctgaagtcatcaatgtgcctacgcgattgccacacaactttgagatgaggaagatggaatcaactagaagtcctgcgaggctacacaataaaggagggttcctgtctgcaacagtccaaattaaggagagtacgttgttacccacaggcaagccttgttggcagtcagaaatgagccatccaacaactaatgaagtgagcacttcagcgcaagctactacttggatcgacgcgggggcgtgtgccgaggagcaagaacctactccttgggtggacatcggggtctcagactaccagcctttcctggatgtgatcgacgacatgtgcggacttgagtggaggctgcagagactgaaggagaacatgctctcatctagcatagacggccaaaccgccgccagtgagagtgacaaaagaaaccagaccgtggtgctagtgccaaccgccgagctcaaggaaaagctgccgcatgacggtttattcgggcattattgcccataggtcttatatacatagcggataaactgtacagagaaccaagaagaagaagaaaacaaaagggaaacagcaaacagacaggtgcccgcttacataccggtccatactgtcaggcactactctcctttcttgggcctcgacacgactaatactgtgctagtccagaacagatgagccatagccattacctgtgtgcctcccaggttcagttcatatgttgtatgtattaatgtatatcagaagagtcgtgcttagtagtagcaagaacctagtcctgatccagaccgtgaatctggatcatcttgtcctgtggttgtaccgtgcagaacagacagatgtcggctagtcgtttggttctgaagtaagaaactataagcatgcgtgattttggccc

SEQ ID NO: 127195 - DNA, 2537 bp, Zea Mays
gaaccctttcttcctcctcatcccccaagccccaaccagctccaattccccccccccccccccccccccatacaatatcttttctctctcatcctccaaaggaccaagaagtaccatttctgctctctccattcgtctccaatcccaacacagcttctcaattcagttcagggaattctcccttttcttttgttttgctctagtgctcttggctgtttactccgcttcttatcctcttctctccacagaagaggagtgcatgtgcagcagctgtaaagacagtatttttttttcacctcatcttctcccaaggtgttgttggtgccccaggtggaggcaactgccaaagtgtttgggtttcttgaatgttaggcttttttggggaggaggaaagggcttgatcgattaggttgttcagccattcttgccccagtgttcttggattcatggtcgtggaattaatccaagggtagctggaggctggagctgctccatttcccttccgagaaaacgaaggcgaaggcgatcgtttgaacggttacagctgttgccgttgagccggtgcaatgtcgtcttcctgcatgccgacgggcctgcggctggacctggacatggtgaaggcggcggcgtcgccgggcgcgcactcgtcgccgctgcgcccggtgcactcgtcgccgtcgtcgacgctgtcggaggcgtccaacgcgtcgtcgtcggcgacgtccgtgtcgctgaagcgggcgcgcgcgccgcggaagcggccgaaccaggcgtacaacgaggccgccgcgctgctggcgtccatccacccctccgtcttccccgtcaagaagagccccaagacggcgccgccgcgcccgccgtcgtcgcggcagctctccgggctcgcggcggcgctcgacgcctcctcctccgacctcctcccgccgctccccgtcctcgccgactccgcattcctgctccgagacatacccgcgccgtcgccgctgccgcagccgcagagcccgtccgccgccaagaactgctcgtcgccggcccccgtgagcagcgcgttccgggacttccgcgacccggcgccgtcgccggcgagccccgacaccgtcgacgtcaacgagctcggcgagatcgacttcgacgacgacggcttcgacgccgagtccatcctcgacgtcgaggaggccgcggccgcggccgagggcctcgacggcatcatgggcagcctcaccgtcgagagcaacagcaccgccgccaccacgtccgatgactccatcctgtccagctccggcatccacccctacctcaggagcctcatggtggtcggcctcgccggcaggttcgagctcggcctcgggtcccggcacggcgctcggcccaacctcaaccgcgcactgaagcggcgggacgacgatggcgcctggtggatgtggccggcagtgccggtaaaggacctaacggttgcaccaccgacaccgccggcgtcaaacgccgcagtgtcacagccacagcccgccgccgctccggagaagaacaaaagcaagaagaagaaggtggtgaaggtggagaaggtcatgatgggggcgaagggaaaagaggagctgcttcccagcgcgaaatgcaaggaggaggaagctgatggcgacggcgacgctgaaagcgcgccggtgaaggcgccaaagaccgggctggggctgaagctggacgccgacgaggtgctcaaggcgtggtccgacagagggtccatgtttgccgagggaagcgcgccggagtcgccgacatcggtcgccgaagcgcgggccaagctctcagacatggacctgtttccggagaacgaagccggcgccggcgccggcggcgtcagggaggccagcgtgctgcggtacaaggagaagaggcgcacccggctcttctccaagaagatccggtaccaggtgcgcaaggtgaacgccgactgccggcctcggatgaaggggaggtttgttaggagcccgtctcttcttcggcaagccctggaggaagagagctagctagacagacacaggcagtggtcctcgctagccttttcttttcttttagttttttttttcaaagcaactttttgttcctctagttcctcgttagctaagactaagagatgtgagtgagaaattttcccagttttttttttgtttcatcggagttttgctctggagaggataggtgaggatggctttagcgtgggttgtcatggcatggtggtcacatagtttgtctcaggtttacaatgtgagaggtaaaggaaggaaataaagcggtgttagaagaacataccgtcatacagcaagcagctccagatgatgggttctgttgtgcttttactgctccagaatatcaatcgcgttgctctgtaacatccattgcgaagaagaaaacgacgagtacaaattagcacggattgttatgcgctagtaagtagcgcgtaagtatttttcttctttaatcagctgacagcatctgctgttcagcggtaaaagtatctgcagtgcggtcactgccaaaat

SEQ ID NO: 127196 - DNA, 295 bp, Zea Mays
gaaattgtgtgcatcgctcgccaaacgtgtgtgatcaaagacgtcaaccggaaaccgtcgtcgtgcttccgactatctcgtcaaattagtcagggtaagcaaatttgttattcgtgctagtggattgatgaatggtctgactaggtatactatttattaggatgcccaagtcatctactgtgatttggtcaatgtcgtgtggagaaagaggtcgcaataggtctcagtgcttgcaggattgtgggtgttaaaaatgtgatgttttattaatatatgtgatacacaggttaacctg

SEQ ID NO: 127197 - DNA, 2687 bp, Zea Mays
cggttcaccctttcgattcgatccattcccaagttcccaatcccaaccaacccccctcgaacctccgtcagtctcagtttctccttgctctttcggtcgcaagcaatccacagcgcttccagcgagacgaagagaggagagagaggggaggaagggcccgagagggaggctccaggggccctgcattgcgtagggcgcagccgccgggatggatcacggcggcgagggccgcgttgcggcggctcggcgcacgctgcgtgccggtgtggacaagtcgcgcgctctgggccactcgctggcccgcgcggggccccgtctagaggagatccaggcggcgctgctggcgctggaggccgcggtgcgcccaatccgcgcgccgcatgccgagctcgccgccgcggggccccacatcgaccgcgccgtaagccccgccgccgccgtgctcaaggtgttcgacgccgtgcacggcctcgagccgccgctcctggcgccaggcgccgcgggctcgggcgcggccggggacctgccggggtatctcgccgtcctggcgcagctcgaggaggcgcacaggttcctcgccgataactgcgggctcgccgcgcagtggctcgccgacatcgtcgagtacctcggcgaccgcgacctcgccgaccagcgcttcctcgccgacctcggggtcacgctcgacgagctcaggacaccccccgccggcgacctcgacggcgggctcctggcagccgccctcagtatgctcgaggccgagttccgccgcctcctcgccgaccactccgcgccgctcgcgatgccgcagaccggcgccgccgctggatcggccacgccttcccgcgtgcctgccgtcgccgtccacaagctcaccctcatcctcgatcgcctcgtggccaacggcaggcaagacagctgcgtggcctcttatatcgatgcgcgcgggggtgtggtcagtgcaagtcttcgtgctctcggcctcgactacctgcgcgacccttctcaggacgcgcaggcattgggacctgctcttgatttgtggaggcggcatttggagtttgtggtgcgccgtctcctcgactcggagcggcagctctgtgccaaggtgtttgggcagcataaggatgtcgcgtccgcgtgctttgcagaggtggcggcacaagccggggttcttgacttcttgaggtttggccgcgcggttgctgatgccaagaaggaccccatcaagctccagcgtctgctggaggtgtttgattctctgaataagctgagactggacttcaacaggttgttcggtggcaaagcgtgcgcggagattcagagccagacaagggaccttgtcaagttgttgatagacggcgccgtcgagatctttgaggagttgattgtgcaggtggagctgcagcggcacatgcctcccccagttgatggaggcgtgccgcgcttagttacctttgtcgttgagtactgcaaccgactgcttggtgagcaatacaggcctgtgcttgggcaggcgctaactatccatcgcagctggcgcaaggaggcgttcaatgacaggatgcttgttgacgcggtgctaaacatcgtcaaggcccttgaagctaacttcgatgtttggtccaaggcatatgacaacgctacgctgtcgtatctcttcatgatgaatacccattggcatttcttcaggcatctgaaggctactaagctaggagaggtcttgggtgatgtgtggctgcgagagcatgaacaatacaaggaatactatttgtcaatgttcatcagggagagctggggagcactttcagcgctactgaaccgggagggattaatattgttctccaagggccgggccactgcaagggacctggtgaagcagcgcctcaaaacattcaattcgagctttgatgagatgcatcgcaggcaatcgtcgtgggttataccagacaaggatctgcgggagaggacatgtaatcttgtggtgcagactatcgtccctacctaccggagctacatgcagaactatgggccacttgtggagcaagagggaaatgccagcaagtatgtaaggtacactgtcgatggtttggagaagatgctcagtgccctctacatgccccggcccaggagggctgggagcttccagatcaagcactcgagcggtaagattgccagtgcaatgactggcttgcatcggagtgcttctgcagtgaaatagcctatgttaaagaacccaaagattggatcaatatgatagtatgtggcaattggcaaatgattcatttggcccagtcaagcaaagagtcccgcactggataggtgaccgaataatggacccatggtcggagcagtggtgtcaagtgtcatatgaacataagttactctttagttagcatggagaatagaggctggtgatcagttccgtagctcctgttagtgtccctgaacataagttacccatggtctgagatgttaccattctcctgagctattttctcttgttgtgtacttctgctggtgtccctggcaccataatcattcatctggagatattcaatcagctgtgtagttatgtaaaatcgatttgtaattttagttttaggtgacctgtgggcattaccttttaatgtaccaagaatcgagcttaatagatgcaatggattatatggggggggggaaaaaac

SEQ ID NO: 127198 - DNA, 1698 bp, Zea Mays
ctgcgcgacccttctcaggacgcgcaggcattgggacctgctcttgatttgtggaggcggcatttggagtttgtggtgcgccgtctcctcgactcggagcggcagctctgtgccaaggtgtttgggcagcataaggatgtcgcgtccgcgtgctttgcagaggtggcggcacaagccggggttcttgacttcttgaggttgttcggtggcaaagcgtgcgcggagattcagagccagacaagggaccttgtcaagttgttgatagacggcgccgtcgagatctttgaggagttgattgtgcaggtggagctgcagcggcacatgcctcccccagttgatggaggcgtgccgcgcttagttacctttgtcgttgagtactgcaaccgactgcttggtgagcaatacaggcctgtgcttgggcaggcgctaactatccatcgcagctggcgcaaggaggcgttcaatgacaggatgcttgttgacgcggtgctaaacatcgtcaaggcccttgaagctaacttcgatgtttggtccaaggcatatgacaacgctacgctgtcgtatctcttcatgatgaatacccattggcatttcttcaggcatctgaaggctactaagctaggagaggtcttgggtgatgtgtggctgcgagagcatgaacaatacaaggaatactatttgtcaatgttcatcagggagagctggggagcactttcagcgctactgaaccgggagggattaatattgttctccaagggccgggccactgcaagggacctggtgaagcagcgcctcaaaacattcaattcgagctttgatgagatgcatcgcaggcaatcgtcgtgggttataccagacaaggatctgcgggagaggacatgtaatcttgtggtgcagactatcgtccctacctaccggagctacatgcagaactatgggccacttgtggagcaagagggaaatgccagcaagtatgtaaggtacactgtcgatggtttggagaagatgctcagtgccctctacatgccccggcccaggagggctgggagcttccagatcaagcactcgagcggtaagattgccagtgcaatgactggcttgcatcggagtgcttctgcagtgaaatagcctatgttaaagaacccaaagattggatcaatatgatagtatgtggcaattggcaaatgattcatttggcccagtcaagcaaagagtcccgcactggataggtgaccgaataatggacccatggtcggagcagtggtgtcaagtgtcatatgaacataagttactctttagttagcatggagaatagaggctggtgatcagttccgtagctcctgttagtgtccctgaacataagttacccatggtctgagatgttaccattctcctgagctattttctcttgttgtgtacttctgctggtgtccctggcaccataatcattcatctggagatattcaatcagctgtgtagttatgtaaaatcgatttgtaattttagttttaggtgacctgtgggcattaccttttaatgtaccaagaatcgagcttaatagatgcaatggattatatggggggggggaaaaaactagacccctcgagcgagtgaggatgtgctatttgtttggtaaactagagcagatatgtacccccaatacaattgcattacatttactgaaagtacaacttgatc

SEQ ID NO: 127199 - DNA, 281 bp, Zea Mays
gtggttcatattttgtgttcccttttcagaactgaaaggcaagcccatggaacgctacttaataagcatgttggggatacgaatcatgtttttgttttcctgtttgaattggttcatgacgtctgctgtttgcagaaactcatcttcttttttttttcagttcaccaattcagctcgaacatacactcgttttccacattctgaagcttcctgtgaatgtcctttttctcctcttgttcaacagaaaccacatccctcaaatcctggatctcatttttatc

SEQ ID NO: 127200 - DNA, 519 bp, Zea Mays
atgctccgaaatcccctgctcactaggaccgacatgatgtgcatcggagacatcatccgtctcctgctcttgcaccgtctcctgttcttgcaccgcattggaactctccacagagctggactccgcggtaccaggcccctcaccgttgcactgctccgcctgagacctctccgcttcctcaaatggagtgctcccgccgccgccctccccggcgaggagcttcaacccaacaggcgatttcggctcgggcacagactcctccgccgccttgggcgccccctccccggcctccgcgtcagcatcggcgtcggccttattgccgggaccccgcttccccttcttcttccggaactgctgcagcttcttccgccctgcagcgaggagatcggtgcggttcttgtttccgccaccgccgccgccgcccctgtgatccatgcggagatctccggtccagccctcgggcagcggtcacgcgaggcggggaggcatcaaccaatcccgcccgcggagacctactag

SEQ ID NO: 127201 - DNA, 1349 bp, Zea Mays
cagtaataatgaaaatgggcggttcatttatggagttgcgagttctcctggtaaaagagcatcgatggaggacttctatgaggcaagaatagacgacgttgatggagagaaaattggaatgttcggtgtatatgatggtcatggaggagtccgagcagctgagtatgttaagcagcaccttttcagcaatttaatcaaacacccaaagttcatcactgataccaaggctgctatcgccgaaacttacaacctcacagattcagaatttctgaaagctgatagctgtcaaactcgagatgctggctcaactgcctcaacagctattattgtaggtgaccgtttgcttgttgcaaatgttggagattctagagccgttatttctaaaggaggacaagcgattgcggtttcaagggatcacaaacctgatcagacagatgagagacaaagaattgaggacgcagggggctttgttatgtgggctgggacatggcgagtgggtggtgttcttgctgtctctcgcgcatttggtgataaactcttgaagcagtatgttgtcgctgaccctgaaatcaaggaggaggtggtcgacagctcccttgaattcctcatccttgctagtgatggactctgggatgttgtcactaatgaggaagctgttgccatggtcaagcctattcaggacccccaggaagcagcaaacaagcttctcgaagaagcgtcccgaaggggaagctctgataacatcaccgttgtcatcgtccgcttcctatatggaactaccggtgataaatcaggcgcagacaaagagaccaccaatgaccaaaactcctaattacctcctgtagggatccctcatgcgtgtgttttcttctggctgttgtatctgatgctcaaagtagatgctccgtgtgtcttccgctgctgttccgcaaggaaactgactcccccgaccgtcgtcgtgatgctgcccgctcatgctcctagacgggaatgactgccgcagaatgacgaatagggctggtgtgtgttacagtatggtcctttacccctcctttccattaagctctgtgatgtagctgtccgtgctgttgattcatgagatcatgctagagatttttcctggcagtgcgtgtaaaactgtcgaactatttgaacgaaagttgtacactgcagtatgtaacaatctcctagatccgccttttgtggcgtcctgctgtcatgcacctgaatgctaccaagccgggacggaggtgagctatcggtttactcggtgtacagaaacgggaaggtcgaatttttacagagcaagtgcgtggattatcatattaatgtgcaaataaactgttaca

SEQ ID NO: 127202 - DNA, 1562 bp, Zea Mays
cagtaataatgaaaatgggcggttcatttatggagttgcgagttctcctggtaaaagagcatcgatggaggacttctatgaggcaagaatagacgacgttgatggagagaaaattggaatgttcggtgtatatgatggtcatggaggagtccgagcagctgagtatgttaagcagcaccttttcagcaatttaatcaaacacccaaagttcatcactgataccaaggctgctatcgccgaaacttacaacctcacagattcagaatttctgaaagctgatagctgtcaaactcgagatgctggctcaactgcctcaacagctattattgtaggtgaccgtttgcttgttgcaaatgttggagattctagagccgttatttctaaaggaggacaaggtaagtttctcgttggtaacatgacatatctcaatgtcttttcctatacttccacatgtatcggaaactttcaaattattatatgctgtgtattttcctggacgagtatttccttgtgacgaatggataaactgaatatcaggattccaagctaaccacgttccacttgtattcgatattttttgttatgttttccccatctcggagctgcagcgattgcggtttcaagggatcacaaacctgatcagacagatgagagacaaagaattgaggacgcagggggctttgttatgtgggctgggacatggcgagtgggtggtgttcttgctgtctctcgcgcatttggtgataaactcttgaagcagtatgttgtcgctgaccctgaaatcaaggaggaggtggtcgacagctcccttgaattcctcatccttgctagtgatggactctgggatgttgtcactaatgaggaagctgttgccatggtcaagcctattcaggacccccaggaagcagcaaacaagcttctcgaagaagcgtcccgaaggggaagctctgataacatcaccgttgtcatcgtccgcttcctatatggaactaccggtgataaatcaggcgcagacaaagagaccaccaatgaccaaaactcctaattacctcctgtagggatccctcatgcgtgtgttttcttctggctgttgtatctgatgctcaaagtagatgctccgtgtgtcttccgctgctgttccgcaaggaaactgactcccccgaccgtcgtcgtgatgctgcccgctcatgctcctagacgggaatgactgccgcagaatgacgaatagggctggtgtgtgttacagtatggtcctttacccctcctttccattaagctctgtgatgtagctgtccgtgctgttgattcatgagatcatgctagagatttttcctggcagtgcgtgtaaaactgtcgaactatttgaacgaaagttgtacactgcagtatgtaacaatctcctagatccgccttttgtggcgtcctgctgtcatgcacctgaatgctaccaagccgggacggaggtgagctatcggtttactcggtgtacagaaacgggaaggtcgaatttttacagagcaagtgcgtggattatcatattaatgtgcaaataaactgttaca

SEQ ID NO: 127203 - DNA, 917 bp, Zea Mays
atatgtgccattactgttgcttctactgcttgatttttcgaaatttgtagggacatggcgagtgggtggtgttcttgctgtctctcgcgcatttggtgataaactcttgaagcagtatgttgtcgctgaccctgaaatcaaggaggaggtggtcgacagctcccttgaattcctcatccttgctagtgatggactctgggatgttgtcactaatgaggaagctgttgccatggtcaagcctattcaggacccccaggaagcagcaaacaagcttctcgaagaagcgtcccgaaggggaagctctgataacatcaccgttgtcatcgtccgcttcctatatggaactaccggtgataaatcaggcgcagacaaagagaccaccaatgaccaaaactcctaattacctcctgtagggatccctcatgcgtgtgttttcttctggctgttgtatctgatgctcaaagtagatgctccgtgtgtcttccgctgctgttccgcaaggaaactgactcccccgaccgtcgtcgtgatgctgcccgctcatgctcctagacgggaatgactgccgcagaatgacgaatagggctggtgtgtgttacagtatggtcctttacccctcctttccattaagctctgtgatgtagctgtccgtgctgttgattcatgagatcatgctagagatttttcctggcagtgcgtgtaaaactgtcgaactatttgaacgaaagttgtacactgcagtatgtaacaatctcctagatccgccttttgtggcgtcctgctgtcatgcacctgaatgctaccaagccgggacggaggtgagctatcggtttactcggtgtacagaaacgggaaggtcgaatttttacagagcaagtgcgtggattatcatattaatgtgcaaataaactgttaca

SEQ ID NO: 127204 - DNA, 575 bp, Zea Mays
gtcattcgtgggcattggtaatatcaccacacgctctcggagtcccgctgtgatcccgcccgctggctcgactttgtccctgggtgcatgtgattcatgaatatcctgcatgtctgttcagttcatctccgtacgagacacgaattgctgagtgcaggtctgttcatgccaaaatcgtacaggaatgagagggtagagctgataagcataatacatgtacggatttatgctcggatgtggagacaagagaaagtggtttggggagcattgagctatcttcatgagattcagcctattcaggtcatgtactcatgtggcacagcctagaggaccaactgaccaagaatactaaagcacataggatgtttagttttctgattttaatttttgattttctatccaaatatagactctttagtatgacacccttgcattggtttctttgataacatactagacatggatgactactgaatatgttattatagtgcggagaatctaactgtatgatcattatgaaacctatgagtgatcatcttacaaagaacaagatatttaagcatcatgtttccatc

SEQ ID NO: 127205 - DNA, 225 bp, Zea Mays
atggcttcgtgggtacgattgatcggggtctgcttacaacgggccggaggaacatacaacaaagacgttgtggatggcggcgtggatggagccacacgtgatggactcgtggaagaggaattttgcatcgtcgacgagaggcgcgtcctatccgaaggactcatggaagaggaatttagcatcgtcgacgagaggcgcggtcccgtccgaaggagacagagatga

SEQ ID NO: 127206 - DNA, 709 bp, Zea Mays
aagactgctcttcgtaccgacggctagatcccacgctcggtgagatgagcttgctggggatggggacctgctcggcctcgacctggatctctcccctatcttgttccccaactctggtgagcaggatgaccgccctcccgtggttgctgattccctgtaccaggcacttggtattcctcccacgttctttgcgacagggacttctctggagtaggcaaggctaagtgcaagggcagtgctccaggacgaaggggggtgcggatggtgtcactgctgtgaagtccgtaccggagcgtggagctagcgttggccaccatcgtcgccttgtgctgcaggttcattcacaaccacagaagaagcctcgcttcgtggaaaggccatctaattggagaaaaaacgtattcactttcatgatttcatgttgaatgtacatagtcgtcttcaaatgcacaaaggtgtttcagatccccttgatgttgtagcagctgagatttcatatgaggccatcatattatgtcttgatgagtttatggtaactgatattgctgatgctatgattctgaatcgtctgttcagacaattgttcagcaaaggcgttattcttgttttgacttctaactgtgctccagataagctttatgaaggtggcttacaacgagaccttttcttgccatttattgacaccttgaaagtacgagttgttttacat

SEQ ID NO: 127207 - DNA, 471 bp, Zea Mays
tcattgatttccttcagagctgaaattcgaattcagtttcgccatgcccctagtaatatctaccgtgaacgctttggccatgacatagatctcgacacaaacgagctggttctacgcgatcaacctgaataagcaatcctattgaaagtcaacaacaaggtcccagggcttgggctccaattggatgcttcagaactgaacctgctttaccgggatagatacaacaccgaggtaccagattcgtatgaacatcttctactggatgtgctagatggagatagtcatttattcatgcgcagcgacgagctggttgccgcatggaacgtgctgactccgataatccatgagatcgatcagaacggagtagttcctgagctctatgaggctggggacagagggtctatcaatgcttaccatctcgctgctaaacatggggttaggggttaggctgtgtttcgtttggggatagga

SEQ ID NO: 127208 - DNA, 1395 bp, Zea Mays
atggcctcggatccaaccagggaaggaaggaatccaagccaccccagtccgctgcttccattccatctcccttctctcgccttctgcggcactgcagtgctctgctgcctcggcgtctccacctcctcccggcgacggcagggcatccgatacgacgccgcgcttccttccgaatcccaagccgcaccccgcaccctcccggtcgccattcccgatgctggtgttctcgagcgacgacgactgctgcggctcctcgtactaggggggcaggatcgatcggcaggtgacgtttcgttcgttctgctgttcggttcgaacgggagagtttgcttgggggttggtgcatcggtttcagaacgaccagttcattagttttggggattggggctatttcttgttttttttaaggcaggagagttgcttttcattctacgtattcgagagatgaaaaaaaagtgttttttgggctagttttgttccaatgatttggtagcaattaccatggcagttgcacgaaagggattcatgtactgggtctgaacggtttcatggcgatgcagtttccatcaccaaattcaccgtgagatgtctggtactcgttgtgactaactcagtaggcagtctgtcagttaagccaggtaaactagttactagtacttgacattgccactgtattttttgtaattactagtaccatttgatgagaagtggtactgagttttatgtgggtagacgaacgatgtcatcgcactcccttctcagtgtcaacgatcatgggtggcatgacctgtgggctgtggagggcggtcccggtccccttcgtttggcttatctggaaaatgctggttgcgcgtcaaggccatcttgaaccttggaaaaacgctgctgtgtctatctttcctgccttcctggttccgtccgtgctgtgctgacatgcgtgtcgaattctcgctcatttggttaccggtagtggggtcatgtcggatattgatgtggaagggggagttggtagtggcaccccctccgcctcggacctggcttcttctgataccggctctggagctgggtaatagagcgcagactttgggtctggaaagcgattgtggttatcgttacgacaagtatgctaggtcaaaactgtttttgtatgtagttggttcacagatgccaagggccgatttatttgtttgtttgttgctcatgttgatgttctgagcataccatttttcagatgtttatatttcatatctgataaagtttataagtttattgtcgtcattaagatgggttaagaaggatgcctgctgtgttttaggatgaggctccatttggaagtcaatagtgcaacactgctcattccaatgatatacccccactacaaacagacacttggtc

SEQ ID NO: 127209 - DNA, 2659 bp, Zea Mays
atggcctcggatccaaccagggaaggaaggaatccaagccaccccagtccgctgcttccattccatctcccttctctcgccttctgcggcactgcagtgctctgctgcctcggcgtctccacctcctcccggcgacggcagggcatccgatacgacgccgcgcttccttccgaatcccaagccgcaccccgcaccctcccggtcgccattcccgatgctggtgttctcgagcgacgacgactgctgcggctcctcgtactaggggggcaggatcgatcggcagactcgcagaactataggatatcacagaacagttcttgaggtacttattgcagcctaatagtacatggagcgatattcagatatgagaccaaaggcagaagtttcatatctcggaaggggttccagattctcttctagaaatcaaagttcagaagagaggactaaccatagcagcgataaaccgggaagcagcacaagattcaatcctacgaaagcgagaattggcggtaatcaagggaggccaagatatgtatgcgattcatttaaatctccaagctcaaaggtgtcgcctgcaggctcttccaaatttccacttagcaagtttgaggagaggcgaagacagccttttgtgccagggtttgacattgctgaaagtagtagaagaaaggctgatgccaagcagctacagggtagtaagaaaattgctgcagagaacgacagttcagacaatctgcgaggtgaatcagaaggttttactactgaacaagtagtaaaaccagaaggctctcatgttgtcggtcattcaggtgtttctgcgtatacagtcgggtccctggtccaaactgcttcactaggttctaggacacacagacagaaacacaaagaagtgaatttgggtactccaggagcatcgtcttcaactctgactaacaggtctactatacctggaaattctaccatgggtgtgaggccagcttatggtcatgttaatggagggcagatacatggtcttaaaaaccttggttgttcttcggtacctgatgctcagccatcaggttgcccatctgagtctgttattagtaggaggaggtttgagttcatgagaaagagggcctttgaccaggaaagctcttccagatcagtgaacttaagcttaggtcattcaactcctacagatattcgcagaatcagaatgaatgaacaatcactttgtcaacaaataccacgaagcagcagcagaagccatcaggaatcggcaggttcagttaggacaagacgaccttctcctcatgccactaggatgagtgttcctgatggaagagcagatggcgtgctttctctgcacgagtcatccacaaaggatgtacagccagctcaggaacatctttcattggaagaagtctccactgagagttcaataaggccattctttgtggaatttgataataacattttctcgtctagtcatcttcgtcgctcgagtactcgagctgaaaggggaagaccaagctccctttttgaagaaagtcctcgacaaatgttccatagtctcatgggggagagggacagacatagacacataaccatggaaggaattacagaggttttggctgcattggagaggattgaacagcaagcagagctgacctatgatcaattgctaatgctggaggctaatctattttttggcgcctttgcctcctatgatcggcatagagacatgcggatggatattgatgatatgtcctatgaggaattattggccctggaggagagaataggctctgtgagcacagctctttcagaggagcagttcacaaaatgcctcaaaagaagcatatatagtcaggtcgctctagaagtgaacaaatcaaccgttgatgacatgaaatgcatcatctgtcaggaagagtacgcggagggcgaagaggttgggaggctgccatgcgagcaccggtaccatgtgtgctgcataggccagtggcttgggcagaagaactggtgtccagtatgcaaagcgtctgccgtgccttccaagggctgaagcattggggatgctggaaaccccgttccggattacaaaccatccttgcttttgtctacgtacattgttcttttccctatatgcattagatatagatcatgtctagatgtatgacgctagaacagcttgcgatttgggaggaagctaagagagtaatagttagctggttaataatagttcatagctaatatttgctagataactattacttggctacctattagctgtgcctttcacattgtggtacaggacaaatgcttgtcagatcgtgaacaaccttataacttgatgaatggcctaagtcaaagaggaatatgttgtgccaatctcaaccctatgctctcttcgtgtagtctgggtgtgtttggttgcgggacagtcaagaaagggacgttccctgacgttctctctcgtctttctgattttgagggataactggggataacactgtaatagttctgtttcaacccttgatcttgaactaaacaaccttatttgagggatcatctcatcttatctcgtcctgtcattacaaccaatcttgttagaaaataaaaaatgcggtagagatggtatcatagtagttgtacataagacagttcaatctattgt

SEQ ID NO: 127210 - DNA, 2709 bp, Zea Mays
catctccccaaagtcccaaacgcctcgcctcgccgtcgtcgtccactcgttcgtcgctgctccctcctccaccaccttccagtcctgtccagtgccgccgccttgccctgccctcccctcccttcccccgattaccctcgcggttgacctcgccaatccggtcccgcctccgtataaatccgcccttctcgcccccgctccgaccacaaaccctagcggcgcgccccggcatgggctagggttcccgcggcgatggagtgggacagcgattctgacggcggcgatgacgaggaggaagaagaggtccgccccgggggtggggacgcgggcccggggttctcgctggccatcgagggcgtgctgggcgcgtgcggcatggtggtctccgacgcgctcgagcccgacttccccatcatctacgtcaaccgcgggttcgagagctccactggatacagcgccgaggaggtgcttgggaggaactgccggttcctacaatgcagaggaccatttgctcagaggaggcatccccttgttgatgcagcagttgttactaggattcggagatgtttagatgaagggactgaatttcatggtgatctgttaaattttagaaaagattgttctccatacatggccaggctgcaattaacacccatatacggagacgatgaagtaataacacactatatgggcattcagtttttcaatgattctaatgttgacttggggccatcttctggctctgtgacaaaggaacttgcaagatctacatggattgcacctggcaacactgactcaccaactccagtaggcaagggtaatttgtgggaacattctagtctctttctgctgagtgatgaggtaatttgccagaagatcttgtccaaactgtcgcccagggatatagcatcagtaaactctgtttgcaagcgacttcatcacatgacaaggaatgaagacctttggaggatggtttgtcagaatgcatggggcactgaagctactcgggcccttgagactgtggcaggatcaagaagtttggcatggggccggctagcacgagagttaaccacccttgaagctgttgcctggaggaaattgacagtcggtggtgcagttgagccatctcgctgcaacttcagtgcctgtgccgtagggaaccgtgttgttctatttggtggagagggtgttaacatgcagccgatgaatgatacatttgtgctggacttgagtgccagcaagccagaatggaggcacatcaacgtgagcgcagctcctcctggtcgctggggccataccctgtcatgcctgaatggatcacggctgattctgtttggtggctgtggggggcagggtctgcttaatgacgtcttcattttggatcttgatgcacagcatccaacttggcgtgagattcctggccttgcaccccctgtaccacggtcatggcatagctcctgcactgttgatggaaccaagctggtggtttctggtggatgtgcggactctggtgttcttctcagcgatacctacctcctagatgtgacaatggaaagacctgtttggagggagatacctgcatcttggtctccaccttcaaggctggggcactcgctatctgtctatgatggcaggaaaatcctgatgtttggtggccttgctaaaagtggtcctctacgacttagatctagtgatgtgttcactctagatttaagtgaagacaagccttgctggcggtgcataactggcagcaggatgccaggagctggtaatcctgctggggtcggcccaccacctcgcctcgaccatgttgtcgtgagccttcctggtgggagagttctgatatttggtggttctgtggcgggtcttcactctgcttcaaaactttacctcctggatccaacggaagataagccaacctggaggcttctgaatgttccagggcatcctccacggttcgcctggggccacagtacttgtgttgtcggagggacaaaggcaatagttcttggaggacaaactggagaagagtggacgctaactgaaatacacgagctttctctagcaagctcattagtctgaagatgggaaggtcccagcaagctttccagcttccttgaagcaatgtctctggagacagctacctgttcatatgacttgaggcagattttttttccaacagtggtgtgcaagcacaagcacaaaagggttggtgaagtggacaaccagacctgattacttgtgccatgcctgggagtcagctggtctaaaagtaggaataagttacctctgctgctgctgttcgtatgatctgaaatgatggaatagctggcatccataagctaatctcagttcttatcatgtttcaaatgggacactggcattatgtcgctggagcccctgatgcaacaggtaccctgccttctggttgcgcctgccttcggtgacaactgatgctgtggtcttctgttttttgacccatcaactgctgtgaagcttctttgttatgcttttgcgccacttcgtgcttactcaattgctgctttctggagaagctgtaacacagacacacctgctgtatttaattttgcctttcgtatcactttgtgcttacctcagctgttagtgatacctataacattttctttttaatctgattatcaaaggatgaattatgaatatcaacagttccatcttaccgcgacattt

SEQ ID NO: 127211 - DNA, 1095 bp, Zea Mays
ggtgggtgtcggcgaattcgaacagctgctgcgcgtggtggagcagcaggtgcgcgtagtgcgcgtccccggcgcggcggaacacggcggacgcggcggccatggcggcggcggtctcggcggcgacctcggagcccgggtgctccgcgtccaccttgtacgcgcggcgcgacgtggtcatgtcctcgggccgctgccagcagtagtggtccgagtcgccgtccccgacctgcgcccacagctcggcgggcgccgtgtgcgccttcacgaagtagtcggtgccccacttgatggcctgcagcgcgtgcgccagctcccccgcgccggccacgccgccgccgtactccaggacgccccaggacagcagcgtcaccgtgaacgccatgggcaggccgaacttcacgtggtctccggcgtcgtagtacccgcccaccaggtccaccccttgctccagcccgtccgtcagccccgagtggccccgccaccgcacccgctggttgtacggcagccgccccgaccgctgcgcctcgaagtagagcaggctcttgcgcagcgcatcgccgtagtcgtgcgcggcggcggcggcggcggcgagcgagatggcggccagggccagggccacgaagcggacggacacgtcgctcattgcacgagccagccgccggcgacgacgacgtccgactaagcagccggccgatcaatcaatcatgcgcgtgcgtacgtgtccgaatcaaacggaaaccaccggcgccaaacaccgacagccaattcgccaagacgacgtacgcccggccggtttcgaagaacggccggcgcggcggcctggatgtgtggtgggctggtggctagctagcttctcctgcgatgatgtccggtcggcggcgaaatggaaatggaaacgcccctaactgcagtgggtgggtgttgagtgctgagtaatggctgcctgggtacggtgctgcctaacaatagtagtgcgctgccagatttaggatgtcttgcctgcctcgcggcggcggtgggatgcagaaggcgaagcgaggacggcacaaggggaagcgcctcctgcagcctccagcccaggggtggagatgg

SEQ ID NO: 127212 - DNA, 1243 bp, Zea Mays
ggtgggtgtcggcgaattcgaacagctgctgcgcgtggtggagcagcaggtgcgcgtagtgcgcgtccccggcgcggcggaacacggcggacgcggcggccatggcggcggcggtctcggcggcgacctcggagcccgggtgctccgcgtccaccttgtacgcgcggcgcgacgtggtcatgtcctcgggccgctgccagcagtagtggtccgagtcgccgtccccgacctgcgcccacagctcggcgggcgccgtgtgcgccttcacgaagtagtcggtgccccacttgatggcctgcagcgcgtgcgccagctcccccgcgccggccacgccgccgccgtactccaggacgccccaggacagcagcgtcaccgtgaacgccatgggcaggccgaacttcacgtggtctccggcgtcgtagtacccgcccaccaggtccaccccttgctccagcccgtccgtcagccccgagtggccccgccaccgcacccgctggttgtacggcagccgccccgaccgctgcgcctcgaagtagagcaggctcttgcgcagcgcatcgccgtagtcgtgcgcggcggcggcggcggcggcgagcgagatggcggccagggccagggccacgaagcggacggacacgtcgctcattgcacgagccagccgccggcgacgacgacgtccgactaagcagccggccgatcaatcaatcatgcgcgtgcgtacgtgtccgaatcaaacggaaaccaccggcgccaaacaccgacagccaattcgccaagacgacgtacgcccggccggtttcgaagaacggccggcgcggcggcctggatgtgtggtgggctggtggctagctagcttctcctgcgatgatgtccggtcggcggcgaaatggaaatggaaacgcccctaactgcagtgggtgggtgttgagtgctgagtaatggctgcctgggtacggtgctgcctaacaatagtagtgcgctgccagatttaggatgtcttgcctgcctcgcggcggcggtgggatgcagaaggcgaagcgaggacggcacaaggggaagcgcctcctgcagcctccagcccaggggtggagatggatacggcgcgcggcagcagtagcggcagggcgcgacgcatttatagtacacatggctgcggcggagggcccgggtcgggaacagacaagcggggcgggggcggtaggaaggaaggcagcgcgggcgtgccacgtgtgtgcggtgcgcg

SEQ ID NO: 127213 - DNA, 579 bp, Zea Mays
tttgcatgggtctgtaatgcattggagaggcatttggagaaaagataatttgtgctccttctggagtgatgcatgggaaaagctctccagtttattacgatgaggaattaggaaaggcattgttcaatggcttgccaaacccttttactgtcgcgaggtccacaacttggtcattgagcaagaaaccttcccacatgatgctttggaggctactgcatggactgcagatggacttatcatggttgcttgccacaagaagtacaaacacatccagggtgtccaattccacccggagagcatcatcacccctgaaggcaagaaaatcatcctcaacttcatcatattcattgaggaactggagaagcagcgttcataggggaggtagacgcgacaggtggtttcattttatagatcagacgaaagcggaggcaaggcacttaaagctgcgccaagttccggctggcagttgaagcatagctagcaaacatttgttccctctcttaattcgtcgtgtttgtggtgacataatctgtgtgcgaatcgaatttagaataaagtataggcgtccgtctgatcaaa

SEQ ID NO: 127214 - DNA, 468 bp, Zea Mays
atggggaaggacgccggcgaggcgcatcagacgccggacggggcgggcggcggcgcaggcgaaggcgcaggaggaagcaggggcgaccgcttctgctgctggtgcggaagagaaggaggagcggcgagggtgattcggctgcaatgcgttgcgacactcgtgctcggggtggccgtgctgctgtcggcgctcttctggctcccgcccttcgcggggcggggtggtggcaaggagggcccggatctgggcgacgagttcggaggtgagctccttcccccgcattgcgagatctcggttccattcgcccgtggtcgccgagtgcaggttctatgctcgatctgcgttccctccgcgctcgcggatggggcggtttgtgcgggcgagggaacagggtgcgtgcgagcgcggaggggagacgggggcatagccgtagtctacactatcatcttaatagatagtagagattag

SEQ ID NO: 127215 - DNA, 1933 bp, Zea Mays
gtcaagagcagccgtcagccccgtcaccagcaagactcgccccccactactcttcctcctccaacctcccctcctgtctctccctccctccctggcagcgactactccccaacccgcacgcacgccgtgagcataaagccgtcgcgcgcccacacgcccgttttcatttccatcggttccctttccaaactcaacggccgcggcagggagcaggcacagtcacctccctgacccgttgagccgtcaattttatcccgccccgcgatttcctacagctgccgatcgaggaggaggcgcattgcccgcattcttctccgcttccaccgagagggcctcgcctgatcggcgccgccttggcccccatgacgtgtgtgcgcgccgaggacgccgtctcgcccgccgccgccgacgacgtggcggctgccctggtttccaggggcggcttgatccagaaggtggctgccggcggcgggcggagaccggcaggctcggcgcgctcgctgcagcgctcagcacatctggccaccggggacggcaacgctccggcgccggcggtggaggccagttgctcctggtccggggatgggataggtaagagcaacggtggtgggaagagagatgatagacacaggatgcggcagtacaggtcgcagctcgaacaggaggtcaagaaattgcagaggcagcttgaagaagaggttgatctgcacgtggcgttggcggatgctgttacacaaaatgttgcgcctatactgaagtcttctatgaagcttccacacaaggcacaggagctactgattaacatcgcctccttggagattaccgtttcaaaccttgaaaagaagctaaatgatctgtactaccagctttgtcacgaaaggaacgaaaggttacttgctgaaaataatcagggatgcttgccatctacatcctccgatgagcaccagtcattgtcaacttgcacgtgtacgtgggaagagcacatatcatcgttgagagatttgaagtttgggggatctgaatcaatgagatcaatgagacaggacttattccccgagcttgaagatgaccaggatatgggagaagatcctgagggtcaacagatagtttctttaaacaggctgctagaaaagcaccgagattcttctttgaatagacttcttgaaaagcatcgagatgaagagatgcaagaatctggctccatggaaaatgaaggcaatgaaaatgagcagcctgacacgttatcctttgaacagtctattctaaagataactagcataaaaggagggaatctttggagcaacccaaatgagctctctgaggagatggttcgctgcatgagaaacattttcctacgcttgtctgaatccttgaagatatcgccgaagacatcttctgattgttcatcttcctccgtggagcgtctatcaggctccacgttagcatctttctcagattcatccataatgccctcaatgctacggagtccttcagttgattctaatcacaatgacgagacgatgaaggaagtcaggaactttgatccgtataaagttaatggaaaggaaacccgaagagatatcggaaactatcgttcagcagctgaagtatcttggatgtctgttggaaaggatcaactagaatatgcatctgaagctttaaagaagttcaggtttgctgctacagccttggctaaacctatgagtcctcatagatatatcacatgtctacaaactgtacaaaccttagtgcatatatacaaaaattttagcatatgatgtatacttttaaattttgttcagccttgttaatgttctaaaagaatatgcagacaatcgaaccagtctagggatttggattgggggaacaaatggatgctctattcttgttcgcttgcagtaaagcaatcagtttcaaaattggtttgcgtata

SEQ ID NO: 127216 - DNA, 2842 bp, Zea Mays
gtcaagagcagccgtcagccccgtcaccagcaagactcgccccccactactcttcctcctccaacctcccctcctgtctctccctccctccctggcagcgactactccccaacccgcacgcacgccgtgagcataaagccgtcgcgcgcccacacgcccgttttcatttccatcggttccctttccaaactcaacggccgcggcagggagcaggcacagtcacctccctgacccgttgagccgtcaattttatcccgccccgcgatttcctacagctgccgatcgaggaggaggcgcattgcccgcattcttctccgcttccaccgagagggcctcgcctgatcggcgccgccttggcccccatgacgtgtgtgcgcgccgaggacgccgtctcgcccgccgccgccgacgacgtggcggctgccctggtttccaggggcggcttgatccagaaggtggctgccggcggcgggcggagaccggcaggctcggcgcgctcgctgcagcgctcagcacatctggccaccggggacggcaacgctccggcgccggcggtggaggccagttgctcctggtccggggatgggataggtaagagcaacggtggtgggaagagagatgatagacacaggatgcggcagtacaggtcgcagctcgaacaggaggtcaagaaattgcagaggcagcttgaagaagaggttgatctgcacgtggcgttggcggatgctgttacacaaaatgttgcgcctatactgaagtcttctatgaagcttccacacaaggcacaggagctactgattaacatcgcctccttggagattaccgtttcaaaccttgaaaagaagctaaatgatctgtactaccagctttgtcacgaaaggaacgaaaggttacttgctgaaaataatcagggatgcttgccatctacatcctccgatgagcaccagtcattgtcaacttgcacgtgtacgtgggaagagcacatatcatcgttgagagatttgaagtttgggggatctgaatcaatgagatcaatgagacaggacttattccccgagcttgaagatgaccaggatatgggagaagatcctgagggtcaacagatagtttctttaaacaggctgctagaaaagcaccgagattcttctttgaatagacttcttgaaaagcatcgagatgaagagatgcaagaatctggctccatggaaaatgaaggcaatgaaaatgagcagcctgacacgttatcctttgaacagtctattctaaagataactagcataaaaggagggaatctttggagcaacccaaatgagctctctgaggagatggttcgctgcatgagaaacattttcctacgcttgtctgaatccttgaagatatcgccgaagacatcttctgattgttcatcttcctccgtggagcgtctatcaggctccacgttagcatctttctcagattcatccataatgccctcaatgctacggagtccttcagttgattctaatcacaatgacgagacgatgaaggaagtcaggaactttgatccgtataaagttaatggaaaggaaacccgaagagatatcggaaactatcgttcagcagctgaagtatcttggatgtctgttggaaaggatcaactagaatatgcatctgaagctttaaagaagttcagatttctagtggaacaattgtcaaaggttaatcctagctgtatggatcgcgatcagcggctagccttttggattaacttatacaatgctttgataatgcatgcgtatttggcatacggagtacctcgaaatgacatcaagcttttttctctgatgcaaaaggcttgttacacagttggcggccagtccttcagcgcagcagaaatagagtttgtgattctaaagatgaagactccagttcatcggccccaactttctttgatgttgactctgaataagttcaagattactgaggatcacaagaagtactcaatcgatgaattcgaaccccttcttttgttcggacttagctgtggaatgttctcttctcctgctgtacgcatattctccgctgcaaatgttaggcaggagctccaggaatctctgagagactatattcaggcgactgtcggtacaaatggcaaagggaagctgctgatcccgaagctagtgcagagctacgccaagggagctgtcgaggactctctgctcgcagactggatctgccaccaccttgcacctgatcaagccacggtcatccgggactcttcctcgcagtggaagcagcggctactcggagctcgaagcttcaccgttctcgccttcgactccaagttccggtacctcttcttgccagacagctgtggctcccagagccagaagccagaggcaaagcaatcttacaaacttcctgagccgtgttcagaatcagaatagataataagagctcagtttggtatatttggaccatcatacattcttttgcatagcgggccatgtgattggcagttgtatatgatgtaaattttgaggaagcttgaattgctgtgtttgcaaaaccggatcctctccacggagttggtggcaatttgggggtcgtattggttttcttttgtattcacttgtcttccatactgaagataacattcttttgttgtttttgttttatctgcataccttttcctttttttcccctctccttttctgtaaacctgtatggtcaatttgatctgtaacttctgcacaaataaaggtggtgagcagtctttacttaggtttttctgcacaactgattagggacgaagccagtcggtggggcgagcggggctcgacccccctacctcctatactaa

SEQ ID NO: 127217 - DNA, 2301 bp, Zea Mays
aacctccctggtccctacttcccattgagtaccacagtctgatgggataggtaagagcaacggtggtgggaagagagatgatagacacaggatgcggcagtacaggtcgcagctcgaacaggaggtcaagaaattgcagaggcagcttgaagaagaggttgatctgcacgtggcgttggcggatgctgttacacaaaatgttgcgcctatactgaagtcttctatgaagcttccacacaaggcacaggagctactgattaacatcgcctccttggagattaccgtttcaaaccttgaaaagaagctaaatgatctgtactaccagctttgtcacgaaaggaacgaaaggttacttgctgaaaataatcagggatgcttgccatctacatcctccgatgagcaccagtcattgtcaacttgcacgtgtacgtgggaagagcacatatcatcgttgagagatttgaagtttgggggatctgaatcaatgagatcaatgagacaggacttattccccgagcttgaagatgaccaggatatgggagaagatcctgagggtcaacagatagtttctttaaacaggctgctagaaaagcaccgagattcttctttgaatagacttcttgaaaagcatcgagatgaagagatgcaagaatctggctccatggaaaatgaaggcaatgaaaatgagcagcctgacacgttatcctttgaacagtctattctaaagataactagcataaaaggagggaatctttggagcaacccaaatgagctctctgaggagatggttcgctgcatgagaaacattttcctacgcttgtctgaatccttgaagatatcgccgaagacatcttctgattgttcatcttcctccgtggagcgtctatcaggctccacgttagcatctttctcagattcatccataatgccctcaatgctacggagtccttcagttgattctaatcacaatgacgagacgatgaaggaagtcaggaactttgatccgtataaagttaatggaaaggaaacccgaagagatatcggaaactatcgttcagcagctgaagtatcttggatgtctgttggaaaggatcaactagaatatgcatctgaagctttaaagaagttcagatttctagtggaacaattgtcaaaggttaatcctagctgtatggatcgcgatcagcggctagccttttggattaacttatacaatgctttgataatgcatgcgtatttggcatacggagtacctcgaaatgacatcaagcttttttctctgatgcaaaaggcttgttacacagttggcggccagtccttcagcgcagcagaaatagagtttgtgattctaaagatgaagactccagttcatcggccccaactttctttgatgttgactctgaataagttcaagattactgaggatcacaagaagtactcaatcgatgaattcgaaccccttcttttgttcggacttagctgtggaatgttctcttctcctgctgtacgcatattctccgctgcaaatgttaggcaggagctccaggaatctctgagagactatattcaggcgactgtcggtacaaatggcaaagggaagctgctgatcccgaagctagtgcagagctacgccaagggagctgtcgaggactctctgctcgcagactggatctgccaccaccttgcacctgatcaagccacggtcatccgggactcttcctcgcagtggaagcagcggctactcggagctcgaagcttcaccgttctcgccttcgactccaagttccggtacctcttcttgccagacagctgtggctcccagagccagaagccagaggcaaagcaatcttacaaacttcctgagccgtgttcagaatcagaatagataataagagctcagtttggtatatttggaccatcatacattcttttgcatagcgggccatgtgattggcagttgtatatgatgtaaattttgaggaagcttgaattgctgtgtttgcaaaaccggatcctctccacggagttggtggcaatttgggggtcgtattggttttcttttgtattcacttgtcttccatactgaagataacattcttttgttgtttttgttttatctgcataccttttcctttttttcccctctccttttctgtaaacctgtatggtcaatttgatctgtaacttctgcacaaataaaggtggtgagcagtctttacttaggtttttctgcacaactgattagggacgaagccagtcggtggggcgagcggggctcgacccccctacctcctatactaa

SEQ ID NO: 127218 - DNA, 1773 bp, Zea Mays
atggaggtggcgcgcaccttccatccccgcggcgcgcaccgcttcctgtgggcttcctgtgggcagcagatccatagacctcaagcctgcaaattggtggtttcttggttcttatcagtggagctggctttggaatttgcatgcaccgttctgagctgcgttgctgctcctggaaaggtgctggtgccttcattcgggcaaaggcaaagcgcaaggcaaataaacttagttgtttctcatccaaataccagtggagacaaagatgtgacttcagataacaaatctcagcatggatcttcagaattacctcctagagctgaattgattggaccaacttcttttgcacctcttatttatgcagcgatttatgttgttgaaaacagtaattggcagtaccatgtcctcgtgatcatagctgatgggcaggtgtttgtacaacacagtgaaaggtcattccatacctcagatgtaacaagcaagaataaccagtgggagatgtactcagaaacggtcccaaagtatcgtgatactaaagtcaggacaaaggaacccctggagcaatataaccaaaccaaggacgatactgactacttatggtacaccacaagctttcgcttggagtcggatgatttgccctttagaaatgacatccggcctgtgcttcaggtcaaaagtagtgcacacgcaatgatgggatttgctaatgatgctttcgtaggatgtgcacgcagaaacaagcaggtgaagggtttcatgtttgaaaaaccggttgatctgaaagtaggtgtgaaccatgtcgtattgctgtcatcaactatgggaatgaaggatagtggtggtgaacttgctgaagtaaagggcggcattcaggagtgcctaatccaaggtctcaacactgggacgttggatttacaagtcaatggctggggccataaagctgcactagaaggtgagtacaaggagatctactcagaaaaggtttgggcaaagttcagtggaaaccggccgagaacgaccgggcagccacttggtataaggtctcataccgaactcttgctggaactccttctcaaggagtgtaagtctgtggagttaaccttattgaggcaggtcgtatactgttcttggccaacaagcttgacaacaaaaggtcttttcatttgccatcgtggcatctgtggagcgggtgtggagcgggtgttcgcggacaaggcggtgccgtcgtggcgggagcagctcacgctgcgggcattcgtcatcaacgcgctgctggccgtcatgttcagcgtcatagtcatgaagctcaaccttaccacggggatcatcccctccctcaatgtctctgttgggctgctcggcttcttcttcgtctgcatgtggactgccgccgccgagaggatgggcttcctccgccagcccttcaccaggcaggagaacactgtcatccagacctgcgttgtctctgcctacgacatctccttcagcggtggctttggcagttatctatttggaatgagtgaaaaaatagctaaacaagcaacaacggtggcacacatctttgagttgcctgaagaaaagctatgcctctctttcctttccaataataacacgggcgaagacgaaacagtgatcttccgaggggataagcactatgtggctagccgttctgtctccattatttggggttaccgaggagagtgtgatcgatattatccatgcttgataaatgatgacaatggtgatggccatgatatatggtcaatattgtattga

SEQ ID NO: 127219 - DNA, 784 bp, Zea Mays
gtggttgctctgccagaatggcttcggcagtctgcacaaatggttccctgcaagctctgcaaacgggtccctcttctctctcgggctcccacgaggccacaagtccataacgcctgcacggagcggagccggagccggcgacgacgacgaacggcggcgcctcggtttctccgcggagcattcggccgcagccgctgcaacggcttgcagctactctgttgtggccgatttgggtccccaagcagcaatgcagcagcacgatagacttgtctacttgtcgttccatcttcatcagctgttctgttgaccaagatgtggcgctcacgtctgcacgaaccggatccaattcttttgccctcggtctccctcctgctttagttgacctcagatgtcggctgccactttgcagtgtactgtaacctgtatatctacctattgtatttcaaaaaggaataccgcagatcgaagccatgtatttcaaaagtttcttttgtggcatgtatttcaaaagtttataacttgcatatgtgaactccagattgcatatgttaataatttcagttgttaccggacatgtatttcaaaagtttatctttgccatgcttgcttgaaccaagaatacatgtatgtatgtatatatgcatgcgtatgtgaactccagattgcagcacgaagaaagcgtctggtgtgggggtccgcaccactcgccgacacgcgtatcgcgtacggccaggcctgctacgtatgaaatagttcgtaaaaaaacatttccaggttctggttc

SEQ ID NO: 127220 - DNA, 725 bp, Zea Mays
acacgaaaccccagcacctcccatataatttgtctctcgtgcctcgttgcgtctttgtcgagtctaaccctagcgcgcgccgccacacctgccgttgctaccgccccgtacctcgcttgctttcccgtcgccgaaatgaatgcctatgcagacgaagcgcaccaagaaggctggaattgttggcaaatatggaaccaggtatggcgctagcttgcgtaagcaaatcaagaagatggaggtatctcagcactccaagtacttctgcgagttttgtgggaagtttgctgtgaagaggaaagcagttggaatttggggatgcaaggactgtgggaaggtcaaggctggcggtgcttacaccatgaacactgctagtgcagtcactgtcaggagcacgattcgtcgcttgagagagcagactgaagcatgatttagcttgctacatcagggttctcctagttgctgttgtcgggaatgttgagctcctctagttggatcacgagactggctaaaagttgggtgctaagatttgtagttggttaccgttgtgaatttctcaagtgatattatcctatgcttgtctcaatgactcaaatttggttgtggtttctatgcttttggctgtgtcaatggtttgccattgttgaaattcaacccttaatgctgcctcttataataaaaagtttttttattggtctggttcagaaagcaagattatatacgcttct

SEQ ID NO: 127221 - DNA, 712 bp, Zea Mays
acacgaaaccccagcacctcccatataatttgtctctcgtgcctcgttgcgtctttgtcgagtctaaccctagcgcgcgccgccacacctgccgttgctaccgccccgtacctcgcttgctttcccgtcgccgaaatgacgaagcgcaccaagaaggctggaattgttggcaaatatggaaccaggtatggcgctagcttgcgtaagcaaatcaagaagatggaggtatctcagcactccaagtacttctgcgagttttgtgggaagtttgctgtgaagaggaaagcagttggaatttggggatgcaaggactgtgggaaggtcaaggctggcggtgcttacaccatgaacactgctagtgcagtcactgtcaggagcacgattcgtcgcttgagagagcagactgaagcatgatttagcttgctacatcagggttctcctagttgctgttgtcgggaatgttgagctcctctagttggatcacgagactggctaaaagttgggtgctaagatttgtagttggttaccgttgtgaatttctcaagtgatattatcctatgcttgtctcaatgactcaaatttggttgtggtttctatgcttttggctgtgtcaatggtttgccattgttgaaattcaacccttaatgctgcctcttataataaaaagtttttttattggtctggttcagaaagcaagattatatacgcttct

SEQ ID NO: 127222 - DNA, 1709 bp, Zea Mays
ccgcttcacgccttcacctcttcctcccattcttcgtgtgaccttgtttgtcgtacagccgatgcccagttctgtctggccgcttgttcgcgcgagatctagagtgcttgacttcgcagtccagctcctgttcgatatgtattcggccaggctcaatagtttagttttcgggattaggatcatgtacaacaatcatactttggatcagtcgttgtgttcctgtgttttcatgtaaatctaagcccgttggtcgtaacactgttagtctggaatagctcgcgctttaaagtgcaatatattgctagcctgctgctagggtcatgcgggtatttggaatgtgctagccttgaatatgcaatttagggtggcacgctgccttttgtgcattatatgtttggagaagttgctatctcaggtttcctagggtgaggcacaaactgtgtaaagctaaagggtaaaggccacaagacatcatccaaaaactgctacagtaagggcaggaagctaactatatgtttctactccacatttaagccctaaagtgttcttggtgatcttgttaattgacaacatgttgaatgtaaattccacacagtattttatgagtcctttgaggtatgctgtatgtgtggttttcgtccttagtgtttgtgcaagttctagcaaattggaaaaattcattgttagtttagtgcacaaaggcaaactagcctgacacctttgccatgccatcagtagccactccactgcaccaggcagcatgcaacatgaaagtagtatccaatgcaaagcttagcctttgaacacctaatgtataaatcagtggcttataatacttttctcctttgttgattttagttattatgcctttgcttgtcaaatgtatatcgggtaaattctctcttgctgctagtggagagttaatagcaactaactgaccttaatgttttttagtggtctacatatctattgtttaagaaactatatttttctcttgttgattgttaaggtacctgagtgtgtgcaatcttttatattgatactaactttattcttgaaaagttgcagctttacacttaccagttatattgcattgaataattttagtgagcagttgtgatttattttgtttttataatgcctatgcagacgaagcgcaccaagaaggctggaattgttggcaaatatggaaccaggtatggcgctagcttgcgtaagcaaatcaagaagatggaggtatctcagcactccaagtacttctgcgagttttgtgggaagtttgctgtgaagaggaaagcagttggaatttggggatgcaaggactgtgggaaggtcaaggctggcggtgcttacaccatgaacactgctagtgcagtcactgtcaggagcacgattcgtcgcttgagagagcagactgaagcatgatttagcttgctacatcagggttctcctagttgctgttgtcgggaatgttgagctcctctagttggatcacgagactggctaaaagttgggtgctaagatttgtagttggttaccgttgtgaatttctcaagtgatattatcctatgcttgtctcaatgactcaaatttggttgtggtttctatgcttttggctgtgtcaatggtttgccattgttgaaattcaacccttaatgctgcctcttataataaaaagtttttttattggtctggttcagaaagcaaga

SEQ ID NO: 127223 - DNA, 1182 bp, Zea Mays
atggccaagacagcaaggcaacatgccaacagcccacatgtatgtacacgtgatgtttctattactcaaactgatcttgctgcaagtacatctaactcaatttgtataaatactgacattgacgagtttatatatgaagataatgatgcagccaaaggtgaaataaatgaattggatgtgtacatgaaagataaaccaattcggtgggttgatcctactgatcgcaatgataaggtaccgtcaattgttgaggagttcatggcagatgaaaatgaatatagctcgacaattgaagaggacaggaggaggccgcggcaggcagaggcagccggccgaccgaccgaccgaccctgggacgtggacgtggtgacgcggtcggggaaatcaagactcaacagaccgacgcggcgcccgggtcgtggcgggccccggtgcttcagcctccgcggggccgtgccgaccaaacaggagcagccgcgggcgggactgcgggaggaaaggaaaagaaaggccactcggggcggggcggggcggggccgggccaagccaaacgcggagtcgccgaggaggaggacaaggcagggcagagagggagggaggaagaggaggaggagcgggatgcggcgggcaaggccgccgccggtcccggtcccgatgacgccgggggacgctgggccggaggtgaagtaccgcggggtgaggcggcgcccgtcggggcggtacgcggccgagatccgggacccggccaggaagaccccgatctggctcggcaccttcgagtcggccgaggccgcggcccacgcctacgacgcggccgccaggaccatccgcggcgccgccgccaggaccaacttcccctccgcctccatctcagccacggtggcgccgccagccgcccccgccgcgacgtctagccacagcagcaccgtcgagtcctggagcggcggcagcggcggcggcgcgcccgtcgggatcctccgcgccccggccgccgaggaggactgccgcagctactgcggctcctcctcgtcggcgctctgcgaggacggcgcgtcgggcccgggctgtggcgacgagaccgccgcgccgccgcggtgctccccgcttccgttcgacctgaacgtgccggaccccgcggccgacgagatggactggcgctgcgacacgctgctgcacctgtag

SEQ ID NO: 127224 - DNA, 1400 bp, Zea Mays
aagttggtagactattgtctgatccgcaccgttggctgcgtcacattctctacgcctcgtgctccttcccttctaccgttcggctgcgtacccgcgtctccccagatccgctgccccgccctctcgacgcggcaattcctcgaacgccccgcgcgagccacgccctcgccgcccatgggctcgctcccggcgccggcctcggcggaattcgccccgcggccgcgggggcgcgccacggtggtggcgtcggacctggcgccgctcttctccgcgcagcgccggcacctggaccacttcttcgaccgcctcgacatggcgcaggcggcggcgttcgcgcaggcgctgctcgacgcgccgggcgccgtcttcttcacgggcgtcggcaagtcgggcatcgtggcgcgcaagaccgcgcagacgctggcgtcgctgggcctcgcgcgggccggcttcctcgcccccgtcgacgcgctccacggcgacatcggcgcgctcttccccggggacgtcctcgtgatcctctccaagtccggggcctccgacgagctgctcgcgctcgcgccctgcgcgcgcgccaagggcgcctacctcgtctcgctcacctccgcggcctcgggggatgactgcccgctcgccgcggcctgcgacctcaacgtccacctgccgctgcagggggaggtgtgcccctttggcctcgcgcccgtcacctccaccgccatccagatggtgtttggggacaccgtcatcgccgccatcatggaggcaaggcgactctccagggaccagtacgcttccaaccatcccgctggcaagatcggcaagaccctcatcttcaaggttaaggatgttatgaagaaacagaatgagcttcctctgtgcaaggagggagatatgataatggaccaactcaccgagctcaccagtaaaggttgtggttgtctgcttgtggttgatgaagagcatcatttgattgggaccttcactgatggtgatctccggcggacactgaaggcaagcgggccagctatcttcagtctcacagttggagagatgtgcaacaggaacccaaggacaatcactgcggaggcaatggcagttgaagccatggagaagatggaggcaccaccttcacccgtgcagttcttgcctgttgtcaacgagaacaacgtcgtgtgtggaatcatcacattgcatggattggtctctgccggattgtagacttgtgtggcaccattacctgttagctagctgttaccgctggagtatttatgtggagcctgaactcttcagtgtacccttatgtacagtatagtggtcgctaagaggaacatggtacactgcttataatgcttgtgtttttgtacttaattttaaatgccgattgccttggtttctcttga

SEQ ID NO: 127225 - DNA, 1278 bp, Zea Mays
cggttgatcacagtcgcgagcggcgagagtgacagtgcgaacaggctcgtcagccaacaggaagcaagtgcacactcccaccccactcccgcgcgccgcgcccgcgaccggggcggcggggccggtggtggtggaggcggcggccatggcggagctgcggcactcgatggcggtgcgctcgtccaactcccccgccaagcgcgattccgacacctccgcggcgtcgtcccccttcctcctgtccccctccacccgcggcagccgcggcggcggcggcggggacgacgacggcaaggacgcccaccgctcgtcccctctcctctcgcatcaccaccacaagcgtgtccacctgctgacgtccccgttccgctccctcctcgcactcgaggaccccaggtcctccgccgcctcgacctcctacaggatcctgcttgttctcctcgcgctccttctcgccgctgtgattttctgcgcgcccttgttctggtcccgcctcaacactccgttcttgtgccacaaggaggggatcacgctccactgccctgagacgaaggaacccccatctctatgggaaaatccacgtgctgccacgatgtcctggaagccctgtgcagagcgatgcagcaatgagccctcagatgtcccatcagtgaatgaaacctctgggtatatttttatccatgccgagggaggactaaaccagcaacgcatagctatatgtaatgctgttgcgattgctaaaataatgagagcaacacttattctacctgttctgaagcaggaccaaatttggaaagaccagtcaaaattcgaagacatctttgatgttgatcattttataaattatttgaaggatgatgtacggattgtccgagatatccctgactggttcacagagaaggatgagctgtttactagtataaagcgtactgtgaagaacatcccaaagtatgcttcagcacagttttatattgataatgtacttccaaggatcaaagagaaaaggataatgtctatcaagccatttgtggacagattggggtatgataatgtaccaacagagattaaccggctgagatgcagagttaactatcatgcattaaagttcctacctgatattgaggaaatggctgttaagcttgctgcaagaatgaggaacaaaactggcagcataaatccatacatggctcttcacctgagatttgaaaaagggatggtggggctttctttctgtgattttgccggcacacgggaggagaaggcaatgatggcggctta

SEQ ID NO: 127226 - DNA, 759 bp, Zea Mays
gaagagaaaagaagggcggtgccctcttgagcccggtgagatcgctgtgatcctgcgggcactggggtacacgagcggcacacagatatacgtcgcgtccgggcaagtgtacggcggcaagaaccggatggctcccctcaggaacatgttccccaacctggtgacgaaggaggagctagcgagcgcggaggagctggcgccgttccggcggcacgtgacgagcctggcggcgctggacttcctggtgtgcctgcggtcggacgcgttcgtgatgacgcacggcggcaacttcgccaaactcatcatcggggcgcgccgctacgcggggcaccgcctcaagtcggtgaagcccgacaagggcctcatgtccaagtccctgggcgaccccgacatgggctgggcctccttcacggaggacgtcgtcgtcacgcaccgcacgaggacgggcctccccgagcccaccttccccggctacgatctctgggagaacccgctgacaccctgcatgtgcagggcatgagacgggccatccctcagatcagagtggccgtctggccgagtcctcgtcttcgctaggctacgactacgagtagtctcgtgctcacttccatcagcgcgcatttcagcgagcatatgcttctactagttaaacacctagatttgtatgtatttggctggcctaatctgtagtttcacatagatcacttcatgctgaaaatgtcttggacaaggcagtgaatgaagataacatcagtaacg

SEQ ID NO: 127227 - DNA, 1566 bp, Zea Mays
gttcgctaaacctcgcgcacagaaacacaagcgagtaccagagcagctaggagtggtcagcaatggcgcagcttaaagcagccgccgacgagcagcaggaggcggcgctgcacggcgtcgcctccggcggcgggaacgagagcaacaagaaggcgcgcgcggggctctgcggcctgctccgcgagcgcaaggtggtggacctggcgcgggccaagcggcggctggtggaggttccctacaccgcgacgctggcgcacacggccaacgcgctcctggcagcgcgcgtctctgccgtggccgtggctgcgccaccgggccactggatcggcgccggcggctccatgatcctcgagtccgacccggccaccggcgccgtccgcaagcactacatcggcatggtgaacatgctcgacatccttgcccacatcgccgaggccagcgacgacgacgaggcggccgacctcgaccgccggatggccgtgccggtgtcctccgtcatcggacactccctcgagggcctcactctgtggacgctccacccgagcaccagcgtgctggactgcatggagacgttcagcaagggtgtgcaccgcgcgctggtgccgctggagagctcggcggacaacgtggtggcgctggagctggtggagtcggcgccggggtaccggatgctcacccagatggacgtggtgaggttcctcagggcgcacggcgcggagctcaggggcgtgctgttgcgcaccgtgcgcgagctcggcgccgtgaacgacaccgtgttcgccgtctctggcgttaccaaggtgatcgacgtcatcaaggcgatgcgggcggcgtcgctgaccgccgtgcccgtcgtggacgccgtcggtagcggtacagagacccttcaatacgggagcgggcaaagggcggtcgagacgttctcggcgacggacctgcgggactgcccggtggcgcggctgcaggcttggctggggatcagcgtgatggagttcaagaggaaggtggctgagtaccgcgccagcaccaggcttgtggtccccggcgccgacgccacggacactggcacccctgtcgccgggtacgccgacacccccgcggctgccgccgccactgacgaagagcagagcgagcagcaggagtcggcgctggtgacgtgctcccaggagagcaccctcggcgaggcgatcgaggcggcgacatcgaggcacgtgcaccggctgtgggtggtcgacgaggaagggctcttgcgtggggtcgtgtcgctcaccgacatcctccgggcagtgcgggaggccgcgctcggcgaggacctggagctgcacagcatcgtgccgtgagcccgtgggccgtgagtcgtgacgtccaagaacaagctcgtagctgtttctgcccatagtgtccgtccacctgtcgtgctcctgcagaggagggggaaaagggcgatcgagacgtgttggcgacggccgaccggcgaccgccgccgagctcgttttgccttgttgctttgtttgttatatggccctggctccgatccgggcttcgtatttcgttgacaggccttca

SEQ ID NO: 127228 - DNA, 285 bp, Zea Mays
aagaatctgactcggtgctagacgaatcgaacggaaggaagacgagaaggccccaaggtgagcgggggaacaaagaagaagatgaaggtccatgcggcggtgaagcgcctatgccggttctgcaaggtggtgaagcgccggggaatcgtcttcgccaaatgcacggccaacgccaagcacaagcagcgccagggcttctccaccatcgccgaagcagccgctgtctcgtgcgttcacctgcctccgcctccgccacagctttcgcagacgagtaagcagttctag

SEQ ID NO: 127229 - DNA, 586 bp, Zea Mays
atgtcccagatttagcatcaatatggacaagaaaactgtaatagtttttgacctggaggttgggatatgcaagaatgaggggttgtgcaatctgaagagcagggactaggacctttccttcaggcttcagcacccacgtgttgcacattatattttagggccagctaatcgagggataagtaggttctgctaatcaaggaaaaaactacttttgaatttgatggctcctatgtattgaatttatcacttttgtggactcctcaatagtttcataattctacagctggatattttagtggttgagctatccaaaagagaatacgagttgcttaggcaaaaaacagaggtaacaaaaattgtagacacgctgaaactggtgagttcaaattcctagcatcaactctggacgttcaagctatgtttttttgctggtatgagatgtgaccattatgataccagtaagctagagggtgattgctttgaagatccagggccaagtgatctttacacctactaatcatggtttcgaggttggtgacattgcattgtatgcctacactgagttaatataagacatcgtgattat

SEQ ID NO: 127230 - DNA, 549 bp, Zea Mays
atgtcttctcgaaatgaggctccatcttctgtggctggtgagtacgacccgaagagcgatcctacccggaagccacggaagtctactgatccagggtggaagtatggattttggccagatcttcaaaataaagataaggtggaatgcaccctatgtggtcaggttgttagtggagggataaagaggttaaagcaacatttggcaggggcatatggagtacctttgaatttaaagatgaaagctaggttccaaaaactacgccagaagaaggggaaaaactttgatccattggttcatgaggacttcaactgggacaatgagtgggctgattctttgcatgtagtccctgaaggtgggcgtgggctgaagaggaagatgaagatgaagaagatgttccacatgacgatgcagaaatcacagattgtgaagatgaatctaatggtggcaatgatggtgaagaaggggaggcacccaatatcccaggagagtttgatgatgatttttgagcgacgggagacggggagagtagctattgctagattgcattag

SEQ ID NO: 127231 - DNA, 1821 bp, Zea Mays
ggcggcgagcgagacacctccacacgtctctcccccttccgtttcctcccgtccctgctcacacctctgtagctgcgcccgaccgaacccctcctaccccggaatcctccccccgatgcggcgccgataagggggcgagaccggcggaagagcggggaatggcggggcgcggcgagaagcggcgccggacaggaggggcccacgaggagcccgaggaggaggaccgcatctcggaccttcccgacgtgctgcgcctgcagattctgagcctgctgccgctcaaatcggccatccgcaccggcgcgctctcctcgcgctggcgccgcctctgggcgtaccgctggccggagccgtcctcggtgagcatccgcctcccgccgggcggcggcgccgccgccgccgcggcgaccgcggccgcgctcgcggtgatcgaccgccgcgggcggcgccgcgtcgacggcttctcgctcgccttccacggcgggcagctcgcgcaggcggacctcaagcgctgcgtcgactacgcggcggcgtgcgaggccgaggacctgcacctccgcgtagacggcggcgcgggcgccggcggccgcggctcgcgcggcggcacgcgccgcccgggcatgctcaccctgcagttccccatggggtccccgctgctcgtgcgcctgtcggtgcgcgggctcaacctcacggccgtcaacaacgccatggtcgccacgctcgaggtcgtccacctccactccgtcttcctcaccgacgccgcgctgcgccggatggtcgccgcctgtccccgcctccgggaccttgacctccgctactgccgccgcctgcgccgcgtcgacttcaccaacgtcggcgtgcccaacctcaggagcttcaccgtcgtcgactgctcccgtaccaccgagctgcgggtccccgtggctccccgcctccggtccttccgcttcagcggcgccttcctctccagcaacatcctatccggcgccaaggcctctctcgagcatctctacctctgctccggcgggccagagaccggccttccagtcaccaacttgccctacgcagttcctcgcctgtcgaacctcactgtcctcaccctctgcagcattgctctccagtatgtttcttctttcacagccaaggatgtaatggagagcaacctacatggcttgagggagcttcatttgctcatgttcgggatggccaactccaaccttgctgacatctatagcttcctcaagacctgcccgtgtcctcagttagagcgcctctttgtgcagctcccgacaaacaccggtgatgcattcacggagaacttcttgaaggtggaggaggaggacccgccaaaaggtggattagaaaaccttcgcttagccaagctgacaaatttcaaggggcaccgtaatgagatgcagctagtagcatttctgcttagacagtctagtagtctgaagaaactatttttgattgctcccaaggaggatcaccctcaaggactgcgcaaggttcattcagatatgctgcctgattttcttaaaaaagaaatatcgcatctggaaagagcttcagcaaatacccagatatttttcggcgagcctgatgctcagacccacccgttgcattcggaggtctttgtcaggttttagcttgaaatgagcaaaagctgttgtagcccaattcctgctcatatagatttagatttctcgttgttagataacggacatggggaaaaaagtatctgcaaggcatacagagtttgatatatgtttcctcttttgcaattcatattactaaagaagtcctgcatagcagttgaaa

SEQ ID NO: 127232 - DNA, 2637 bp, Zea Mays
caagtgatgaggggtttaggattcgtgttgctgttggtggcagctgcagcattgatcaggccatcagaagtagtaggggcagaggaggaggactgggagcttttcttgttgcagtggaggcagcataattctcttccatccccacttctcaatggggatctggtggatagaatatggtcaatttgcttaccagacatggccggtgcacaggaaatattgggcaatccactgcaatttgcttcagatcagctattgagtcagccatcagaaaatgctttgaaggcaatgctgtttctggagtttctgtctcttctttcccctgaaaaattatccagtacctatggttgcatccatgcaaactacttcggtttgggcattccacaagaactcagtgtttcactggcaacctaccttgagagccatcagctgttgcttggttcgaacttctatgcgagacggcatttggctgacaactcaattggagatgctccttccatggctccagattttgcgccgtccatgtcctctggcgatgacgtgaagcttcctcagtctgttacagaaacaccgtatgcaccttccagctcttacaacaatgaaaatccaaaccgacctcatcacagtaaacctgcacagaagcatcggggagtacctccaatttcacttctggagaagcataaagactatgttagattagtcttgatcgtggttctaccaacagcggcattctcgttcattgctgcttttctaattttctactgctgcggatgcaacaagaacaaggtctctgtcggtgagcaacgagatgatcatcctcttcttcacatgcagttggctaatgtacctggttcatcacccgatgcccgtgtttctgccagtcaccttaacaaggataatcgaagtcattctggagtcagcatgagtcggtgcttttcatgctgttttaaaagatccactgatgccacaccatcttcagaagtgattggaggaacaccagagaataatgtcacaagtgatgctcctaaaccgatgtcgcctccagctcctccacctttgccacctccgatcaagaaggctcctcctcccccacctggacctcccagaggttctaaagcaagacttgctcagctgtcacctgttgagtcaagtcgttctgaaggatcatctgccagcgagcagaccagcgaatcatctgaagcagaagttaatgctccaagaaccaagcttcgacctttctattgggacaaagttcttgctaatcctgatcagtcaatggcatggcatgatatcaaattcggttcttttcatgtgaatgaagatatgatagaggaattgtttggttatagtggtggaagcagaaataaccttaaggataaggaactcccctctgcggatcctgcatctcagcacatttctcttctcaatgttaagaaatcatgcaacctggcagttgttttaaaggcaatgaatatcagggtacaagacattcatgacgctcttattgaagggaacgaacttccaagggtgcttcttgagacaatcttgagaatgaaaccaactgacgaggaggaacagaatctcaggctttataacggggatttctcgcagctaggccttgcagaacaagtgatgaaggcattaattgacacgccttttgctttcaagagggttgacatgttgcttttcatgtcctccttgcaagaagatgcttcaagtctcagggattcgttccaccaattggaggccgcttgtggggaactgaagcaccgcctttttctcaagttactagaagccgtgctcaaaactggaaaccgtttgaatgatggaaccttccgtggtggtgctaatgcattcaagcttgacactctcctgaagctatcagatgtcaagggtgctgatggaaagaccacattgctgcactttgttgtgcaggagattgttcggtccgaaggtgtccgcgaagcaaggctagccatggaaaacggaagaagtccagctcatagtgcttcagatgacacttccaatggatctcttgaagaggacggtgatcactactccaaccgcggacttagcattgtgtcaggacttagcagtgagatggacaacgtcaagagggtagccgcactggatgctgagcctctgtttgccactgtggtgaccctcagacaagagttgctgaaatcaagggagttcctgaatgaaattgcgacagtagaagagacgagtggattcagacgttcgttggaaagctttgtggaacacgcggataatgagacggggtttttgttgaaagaagagaagaggttgagatcgttggtgaagaaaacaatccggtatttccatggaaacgactctaaagacgacggtttccggttgtttgtggttgtgagagatttcttggtgatgctagataaggcgtgcaaggaggtcggggcatcacagaagggtacgaataaatcacgaagcagtggcagtggcagtggcaatggcaatggcaaccctacgttcccgtcaatcctacaggagcaacagttccctgctgttattgatggccattcagatagttcacatactagcaattgacgatgagatactaacctttttttgtaaagaaaaaaaaatccgttttggagagga

SEQ ID NO: 127233 - DNA, 993 bp, Zea Mays
atcactcaaataaataatatgaatctgagctatactacgagaacttctggattcagcaagaactagcagcaatcagaacccaatagcatagcaacaaaccgaacaatcaaccatatattaggagacggtagatagaaccacgttaacattaagggggtgtttgaatgcactgaaactaattgttagttggctaaaaattgttagttgaattagctagctaacaaataactacctcactattaactaattttccaaaaatagctaatagttcaactattagctatggtgtttggatgttttaactaattttagccactaactattagttttagtgcattcaaacacctcctaagtaagaaacggtagatagccagtacctgcaggcaaatattaggagacaactgaaagacagaacataatgagcacaggctttaatttcaaacatcaaacttattcatgatttgtcatagttctgggtagtacgcacacacaacacaaccggtccattattaaaccaacactgacacgactcatgacacgaacagcagatactttgacaacctccatatggagagagggcaccagacgacgcaggcacatcggcagcttaaacgacccatgacttactgaccaccacggagacggagcacaaggtggagggtgctctccttttggatgttgtagtctgctagggtgcggccatcctccagctgtttgccggcgaagatcagacgctgctggtccggggggatgccctccttgtcctggatcttggccttgacgttgtcaatggtgtcagaggactccacctcgagggtgatagtcttgccggtcagggttttcacaaagatctgcatgcctcccctgagacggagcacaaggtggagggtgctctccttctggatgttgtagtcagcaagcgtgcgcccgtcctcaagctgtttgccagcaaagatgagccgctgctggtctggggggatgccctccttgtcc

SEQ ID NO: 127234 - DNA, 1836 bp, Zea Mays
atcactcaaataaataatatgaatctgagctatactacgagaacttctggattcagcaagaactagcagcaatcagaacccaatagcatagcaacaaaccgaacaatcaaccatatattaggagacggtagatagaaccacgttaacattaagggggtgtttgaatgcactgaaactaattgttagttggctaaaaattgttagttgaattagctagctaacaaataactacctcactattaactaattttccaaaaatagctaatagttcaactattagctatggtgtttggatgttttaactaattttagccactaactattagttttagtgcattcaaacacctcctaagtaagaaacggtagatagccagtacctgcaggcaaatattaggagacaactgaaagacagaacataatgagcacaggctttaatttcaaacatcaaacttattcatgatttgtcatagttctgggtagtacgcacacacaacacaaccggtccattattaaaccaacactgacacgactcatgacacgaacagcagatactttgacaacctccatatggagagagggcaccagacgacgcaggcacatcggcagcttaaacgacccatgacttactgaccaccacggagacggagcacaaggtgatggtcttgccagtcaatgtcttcacaaaaatctgcatgccacccctgaggcggagcaccaggtggagagtgctctccttctggatgttgtaatccgccagggtgcggccatcctccagctgcttgccggcgaagatgaggcgctgctggtcgggtgggatgccctccttgtcctggatcttggccttgacattgtcaatggtatccgaagactccacctcaagggtgattgtcttgccagtgagtgtcttcacaaagatctgcataccacccctgagacggagcaccaggtggagggtgctctccttctggatgttgtaatccgcaagggtgcggccatcctccagctgcttgccagcgaagatcaaacgctgctggtccggtgggatgccctccttgtcctggatcttggccttgacattgtcgatggtgtctgaagactccacctcgagggtgatagtcttgccggtcagggtcttcacgaagatctgcatgcctcccctgaggcgcagcaccaagtggagggtgctctccttctggatgttgtagtcggcaagcgtgcgcccgtcctcaagctgctttccagcaaagatgagccgctgctggtctgggggaatgccctccttgtcctggatcttggccttgacgttgtcgatggtgtctgaagactccacctcgagggtgatagtcttgccggtcagggtcttcacgaagatctgcatgcctcccctgaggcgcagcaccaagtggagggtgctctccttctggatgttgtagtcggcaagcgtgcgcccgtcctcaagctgcttcccagcaaagatgagccgctgctggtctggagggatgccctccttgtcctggatcttggccttgacgttgtcaatggtgtcagaggactccacctcgagggtgatagtcttgccggtcagggttttcacaaagatctgcatgcctcccctgagacggagcacaaggtggagggtgctctccttctggatgttgtagtcagcaagcgtgcgcccgtcctcaagctgtttgccagcaaagatgagccgctgctggtctggggggatgccctccttgtcctggatcttggccttaacgttgtcaatggtgtcagacgactccacctcgagggtgatagtcttgccagtcagggttttcacaaagatctgcatct

SEQ ID NO: 127235 - DNA, 2344 bp, Zea Mays
atcactcaaataaataatatgaatctgagctatactacgagaacttctggattcagcaagaactagcagcaatcagaacccaatagcatagcaacaaaccgaacaatcaaccatatattaggagacggtagatagaaccacgttaacattaagggggtgtttgaatgcactgaaactaattgttagttggctaaaaattgttagttgaattagctagctaacaaataactacctcactattaactaattttccaaaaatagctaatagttcaactattagctatggtgtttggatgttttaactaattttagccactaactattagttttagtgcattcaaacacctcctaagtaagaaacggtagatagccagtacctgcaggcaaatattaggagacaactgaaagacagaacataatgagcacaggctttaatttcaaacatcaaacttattcatgatttgtcatagttctgggtagtacgcacacacaacacaaccggtccattattaaaccaacactgacacgactcatgacacgaacagcagatactttgacaacctccatatggagagagggcaccagacgacgcaggcacatcggcagcttaaacgacccatgacttactgaccaccacggagacggagcacaaggtggagggtgctctccttttggatgttgtagtctgctagggtgcggccatcctccagctgtttgccggcgaagatcagacgctgctggtccggggggatgccctccttgtcctggatcttcgccttcacattgtcgatggtgtccgagctctcaacctccagggttatggtttttccagtcagggtctttacaaagatctgcataccacctctgaggcggagaacaaggtgaagggtgctctccttctggatgttgtagtccgcgagagtgcggccatcctccagctgcttgcccgcaaagatcagacgctgctggtctgggggaatgccctccttgtcctggatcttggccttcacattgtcaatggtgtcagagctctccacctccaaggtgatggtcttgccagtcaatgtcttcacaaaaatctgcatgccacccctgaggcggagcaccaggtggagagtgctctccttctggatgttgtaatccgccagggtgcggccatcctccagctgcttgccggcgaagatgaggcgctgctggtcgggtgggatgccctccttgtcctggatcttggccttgacattgtcaatggtatccgaagactccacctcaagggtgattgtcttgccagtgagtgtcttcacaaagatctgcataccacccctgagacggagcaccaggtggagggtgctctccttctggatgttgtaatccgcaagggtgcggccatcctccagctgcttgccagcgaagatcaaacgctgctggtccggtgggatgccctccttgtcctggatcttggccttgacattgtcgatggtgtctgaagactccacctcgagggtgatagtcttgccggtcagggtcttcacgaagatctgcatgcctcccctgaggcgcagcaccaagtggagggtgctctccttctggatgttgtagtcggcaagcgtgcgcccgtcctcaagctgctttccagcaaagatgagccgctgctggtctgggggaatgccctccttgtcctggatcttggccttgacgttgtcgatggtgtctgaagactccacctcgagggtgatagtcttgccggtcagggtcttcacgaagatctgcatgcctcccctgaggcgcagcaccaagtggagggtgctctccttctggatgttgtagtcggcaagcgtgcgcccgtcctcaagctgcttcccagcaaagatgagccgctgctggtctggagggatgccctccttgtcctggatcttggccttgacgttgtcaatggtgtcagaggactccacctcgagggtgatagtcttgccggtcagggttttcacaaagatctgcatgcctcccctgagacggagcacaaggtggagggtgctctccttctggatgttgtagtcagcaagcgtgcgcccgtcctcaagctgtttgccagcaaagatgagccgctgctggtctggggggatgccctccttgtcctggatcttggccttaacgttgtcaatggtgtcagacgactccacctcgagggtgatagtcttgccagtcagggttttcacaaagatctgcatctgcagaagtaacaccaaacaacagggtgagcatcgacaaaagaaacagtaccaagcaaataaatagcgtatgaaggcagggctaaaaaaatccacatatagctgctgcatatgccatc

SEQ ID NO: 127236 - DNA, 945 bp, Zea Mays
atcactcaaataaataatatgaatctgagctatactacgagaacttctggattcagcaagaactagcagcaatcagaacccaatagcatagcaacaaaccgaacaatcaaccatatattaggagacggtagatagaaccacgttaacattaagggggtgtttgaatgcactgaaactaattgttagttggctaaaaattgttagttgaattagctagctaacaaataactacctcactattaactaattttccaaaaatagctaatagttcaactattagctatggtgtttggatgttttaactaattttagccactaactattagttttagtgcattcaaacacctcctaagtaagaaacggtagatagccagtacctgcaggcaaatattaggagacaactgaaagacagaacataatgagcacaggctttaatttcaaacatcaaacttattcatgatttgtcatagttctgggtagtacgcacacacaacacaaccggtccattattaaaccaacactgacacgactcatgacacgaacagcagatactttgacaacctccatatggagagagggcaccagacgacgcaggcacatcggcagcttaaacgacccatgacttactgaccaccacggagacggagcacaaggtggagggtgctctccttttggatgttgtagtctgctagggtgcggccatcctccagctgtttgccggcgaagatcagacgctgctggtctggggggatgccctccttgtcctggatcttggccttaacgttgtcaatggtgtcagacgactccacctcgagggtgatagtcttgccagtcagggttttcacaaagatctgcatcttgaagcggaggtgccgacgggtggatttgggggagatctggttgtgtgtgtgtgcgctccgaacaacacgaggttggggaaagagg

SEQ ID NO: 127237 - DNA, 322 bp, Zea Mays
aaaaaatgcagaaacaaaataagaatatagaaggatggatggatgggggctgttaccaaacatttgagaaattatcttcagccctttgaagatccccttcatctttatcgccatcggtggaaccctttgacggaagagaaagagctcctgcaagaatgtggaataagctcaaatgttcttggagcacaaagaaaaggtcttggctttcatgctacaaaaagatacactaaaacgtggggaagggaaaaggagacaacagggatacaatttgcatgaatgacaaggatacacatatctcctgaatgttcatactgaagaaaag

SEQ ID NO: 127238 - DNA, 1377 bp, Zea Mays
atgcagctaataaacagagtatcttcgtggtggcgtgacgacgctggggatgagaggagtggagcggctgttcttggtctgggtctcgctgtcgaatccgaacccgaaccagctgctgccgtcggagtcggacgcccagaagtaggagaaccagtagatctggagctgcgacaccagggacaggggcccgcggctgaagccgaagacgccggacgcgctggagtagtcgccggcgctggcggagctgcacccgaacaaaaggccgggcacctgaaccgtaccgaacgtgaacgtttcggtggcgaggtagccggtggtgttggtgtctccgccgtaggaagctatgtaatcgcaggtgtcctcgtcgcaggggcaggtctcgctgagcagcttgcacttctggcttggctgaccatcactgatccagacagtggggtagctgtccattctgtgaggtcggttggcatcaaacatggcctgctctacaaggtgcttatccacatggagggccgaggtgctttcatgcccaactccaagctggtgtggcgccccaagcgtctctctaacaagaaggtctcctttgtcgagcccttggtgcactttattgaggagaaggctgcagcacacccttctgctattagcaagcaaggttctgtttctgatttttgtatgccttctcttggggatgctgtttttaatgtttcagactgggctgacccaatgattgatgaagtctcttgtggtttggatgctgcagattctcaagcagctagggtggccaagctcgtgcaggtgctgcagtccacccaacccatggaggacgtggcgtctcctactgtaccttccatccctagccttgatgaatttcttatgtcaatcactaggccgctcccagatccagtcctagcagctgaggagtcttctccctatccctttcataaccttcctaccgaagatcaaacttgcaataatagtgtgcagaatttacctctgaccctgcaaactgtagatccctcttgcagtagacagtctagtggtgcttttgctggaaacccgcagctttcgagtcccattcaacgcaaaagcagcaggctagcaaaaaaggctaggaatagagtcggcaaaggagcactacaaatagctaaagatcttttggtcaaaaaattaaattcgacatctgatcgcaatgaactatctgtattatctgaacttgaggttgttgaacaactttcgcagcactttgatcgcccactgaccaaaggcaaggcggaggcaattatttcactggccaacctcggcacgaaggagacgaacaagatgaagaaatctaccagggcgacggtggcaccagtcgatgcagtggaatttgcggcgtaa

SEQ ID NO: 127239 - DNA, 540 bp, Zea Mays
aagattttatgctggaatgtgcgtgggttgaatggtgctgcaagacgtgccagtgtgcgtaatcttatttcttccttcggggcatctgtggtgtgtttgcaagaaacaaaaatctcacaatggaatgacttccttctgaaggaaacccttggtcaagctcttgcctctcagacagtgtgccttccggccaacgggactgctgggggcgtcctgattgcagcctctgaccagcacttctcacttaatcacctgtacactacagaaaacactattactgcaaatattttctccttagcagataatacaaaatggtccatcacgggcgtgtatggcctccaatccaacgaggacaaagtgaattttcttgcagaatttgcttccatcaagctgcttaccaacccctcgtggattgccttaggggattttaatttgatttgctcagtaggtgataagaatatggggaggataaatcataggatgatccaacggtttaatcgcactctggatgatctacaattaattgaactttcactcaatggg

SEQ ID NO: 127240 - DNA, 1890 bp, Zea Mays
ataccgcacgcacctgtccctgtcgcctccttacgtttcatcgcctcgcgaacccacccacccaaacagccaagtacagtgcgctgtctgcaataagcatccgcccttggatgcgcctcgccgcagccggccatggcctccgccgtcgctagcaacgtgcacgcgggacccgccgccgcggccatgtcgttcggctggctcggcccgggcctgccgttcggcgcccgggacgccgctgcggaggcggaggagcccgccgcggcggccaaggcggagccggcggcgatctgcaaggacttaatcgacttcgagttcagcctcggcgggtccgccaccatgctccccgcggacgagctcttcgcggacgggaagctgctcccgctccgcccgcaggctaccgcagggaaggcggaggccgagcgggagcgggagagagtgctgcggcgggacaccgcgcttgtggcggaggccacgccgggccctgtccgggcgctgcaccccgccgcggccgaggcggcgctggacccgtacgtgttctctcccaaggcgcccacgtgctccagccgctggcgggagctgctccggctgaggaaggtccagacgccgcacaagccgaccccgtccccgtcgccgtccgcgtccgcgtcgcccgcggtgaccccgtcgagggcgtccagctcctcggcggccaggtcgctgaagctgctcctcctccagcggaacggcggccgcgcgtcggacctccccgccgcgccgctcctgcgcgacagctccgactccgagacgtcgctgtccctcgcgtcctcccgcttctcgctctcgtcgtcgtcgtcctcgtccggccacgaccacgacgacttcccgcgccactccctcgactccgtcgacctcaccccacgcccccgcatccgcctcgtccgctcccaccaccaccagccgccgcagccgcagccgcagccacacccgcccgccgccgcctccgctccagtgcgcgcagcccacagccccgcccgccgccgccagtctcagtctccgtcgcccccgccgccgccgagcgtggtctccgtggactccccccgcatgaacgcgtcaggcaagatcgtgttccagggcctggagcgcagctccagctcccccgccggcagcgcgcactcgtccatgcggtcccggtcgcggtcccgcgtcatggaccggtcctactcggccggcgtccgcgccacgcccgtcgtgctcaacgtcccggtgtgctcgcgcccggtgttcgggttcttcaaggagaagaaagaggccgcggccagggacgccgcctcggcgcgggcgcggtcggcgctgggccggaagacggctgcgcgcaccgccccgccagccggcgtagcgagcgccagagatcttggcagtggtaactgacatccgtcattttggtggaccaagcggtctagtatcattagcactagaagtagacggcatttggagttcttcagtccgaaaaaaaagaaaatagatcgaaaaaacagtttgggaggtatcctgcgtttggagtttgggacacgattgggtgggaggatagtttggtgagctgattttcgcttcgtgaggccagagagtttttttgcgatcaacaaacccgtccgctttggtcctgtaaattctgtccgccgcgtggttttttttttgctccgtattaatccactgtactggcacatttgttgatctcatgctctcagtcgttcagatcccgactcccgagtgagaagaaaaggtgctgtaaaagctttgggtgcatgcttcgcctgttcttttatcatggcagattgatgctctgcgattacctgttcttccgtggcttgcgaactgaaaagcgaaataaagaggaagttgatggtgttaatc

SEQ ID NO: 127241 - DNA, 524 bp, Zea Mays
gtaagggcccgtttggcacagctccagctcctgattctaagcgaggatctggaggagccgtgccaaacgggtatttttttaaactgattctcgtgtggagccgaaagatcgggagtcgtttttgtgaagaaaggtgggatctaaaaaaacctgctccaccctcccttaaaacagctcctcaaccaaccaaatatggacctccccttaaagtttgatcgaaattacccgcaattgccattggacaaaaacataacgagccaatttatggattaaacatttgagaccattttatgcactactaggatgggaataatctatatgttattgtttcatatctttttcccgtatatgcatcctacttattggtttgtaataaagttgaactgcaaagagtaaaacagaccatcgccacagaccaccaactctcagaagacaagaatcagtttacttgccaaacggttttaaaaatgattctgattttctaggagaatcaggaggatcagctcctcacgaggatcaggatc

SEQ ID NO: 127242 - DNA, 471 bp, Zea Mays
gacgacagcggaggcgttcccatggcgacgtggcaggtcatcgtcgccgtggtcgaaggaacgcggctggcgccagacaccgctgacttggaggctattagcagctcagcagccacactccggttactgcagaccagcagcagcaccgcagccacgcagcagacggactccacggagaagacggcgctggccgtggccgcaacagccgccgtcgacctgaccaacctgttcttcctcctccgcggcgacaccgacaccgacgccgagcggcgacggcgctggggctggaccgggggaatctgcgtgctgttcgcgttcgcggctctcctttccgccgccggcaccgtgctcgctccgcacgtcgtgtccgcggcgcgccggcgggtcctcttggtggcttccgcggcggcgctgttcgtggcgtcggccggcacagtcctcgtcctgctgttggtggagctggacgcgtaa

SEQ ID NO: 127243 - DNA, 168 bp, Zea Mays
atgggcccgcggctcctgccgctctccctctcgctgctcgtcgccgcctccctttgcgtcaacgtcgtcgtcgtcgtcggcaccggagggagcgtgccgtggcccgtcgccctcgccgcgttctgcgcctggatcgccgcgtccaccgcggtcgcgtacatagaataa

SEQ ID NO: 127244 - DNA, 676 bp, Zea Mays
gagaagaacaggtggttcaggaggagcctcaaagcgagaagtatgatctgatctaggtggcgtttccccagttgacttttgcgccaaggatgattcttagttcgttttataatttatttttcatggacatcctcgctccaaggagtagaaagtaaacagggatgtacatgtcgaaggtagggaggaagactccaaggtgaactactcagacggaagcgtactcgacgataaggcaccggacgctcgcaagactcaaccccctcatggtctgatcaaacatgacaaaatggaggcacacatggtaacatatcagaaagcaccacacttccaagggtggaaatggtgtactccatcaaatctttatgtaattagtgaccactcgttcaattcctccgactatataaagggatgagggttgagctataggagtagggaaacttagttgataacattgttgtaaactatggtgacgtctaagagggggtgaattcggacttctaaaaatttcgctctaaattaggccacaaataaatccctagaacaaaacatattcaaatatgtaaactagattgtgcaaactaggtgttgactaaatgttgctatctctattgcaaaaggagtttcgcaacaagttacaatcattaatattctaactacaaatgagagattgaaactt

SEQ ID NO: 127245 - DNA, 641 bp, Zea Mays
cctctaaccctctcactcttccctcccgcgtgtatttccgctaacatactctactctgtagcaggcaccaccaccgcgcgctcatggaccctgacccacgaccgccggcagcggcagcggcagcgcaggtgcggctcctcctcatggccatcgcggccgtcgcctgcatcaacgccgccgagccccacctcgccttggcagccttcgtcctttggctcgtcgccatctttcccccgctccaccgccacgactgaggcagccgcagttggtcgtgcacagcgtgaaggaggaccacacacaggaggttgcgcggcggcggcggcgacgctgccctggcgggggtggtggtttggaggcagcaggtgcccgcgtgtagggaggggggtgttgcctcggcgggtctcgcatctcaacgtcgtggtttgtggagatttacggaggcgagatttgcggaggcggctgaggcccggctggacgggtgcgagggagaggctgtcgcgggtggtggcaggggcatgcaagatttgtgaaggcggggcatgtatactaatgtggatgtctatgttgtgttcttgtagagtagtatatatataaatagatattaatatatttattaaaatataattattgtttatttatga

SEQ ID NO: 127246 - DNA, 477 bp, Zea Mays
atgggagagggagccgtctcactgcgggtgtccgtgaggacaccgataggtgctaagggcaggaagaagaggggaaagaggaagtacctatgggagcagccacggtcgtcggcatcgaagtgggtcacaagagagggagccgctccgccgctggtgtttgcgaggatgagcgcgactacttgctgtcaaggcagcaccgcaactatgaagcaggatgtggatttggcgctcgcactcctcttttggctccgtcaaggatcggttcttctcaacgccagtaacttctccatcggtggcgtcctcgtgggacgtgtatttggccatggggatctgggcgccggggagagatggcggttgggccccccgcgagccccaccgcccagaacgttgtacgacaccactgcgcagggagatctagggagaggaagacagggggtggggaggggtgggcgtgggttagggttttgtcctgcgtaa

SEQ ID NO: 127247 - DNA, 1709 bp, Zea Mays
ctctccctctccctcctttcttctcagcttgctggccatgagaccgctctcctcaacccaccatatttatctgcctcctctcgccacatgctctcctcctctgccggctcagtcgtgggacgagttccgatcccgacccctagcttccgctcccgatccgtcgtctcatcctctcctacttgctggcatgcgtcgtgcagatctggtcgagctcgtgttcgcgcttcgcggagatcgtcaggtgaccgagcgagccatggaggtagccggcgtcgtcgcgtccgcggccgacagccctggcgccgcggcggcgcggccgagccggtacgagtcgcagaagcggcgggactggcacacgttcgggcagtacctgcgcaaccaccggccgccgctggagctggcccggtgcagcggcgcgcacgtgctggagttcctgcgctacctggaccagttcggcaagaccaaggtgcacgcggcgcggtgccccttcttcggccacccgtccccgccggcgccctgcccgtgcccgctcaagcaggcgtggggcagcctggacgcgctcgtcggccgcctgcgcgccgcgttcgaggagcacgggggccggcccgaggccaaccccttcggcgcgcgcgccgtcaggctttacctccgcgaggtccgcgacagccaggccaaggcgcgcggcatcgcctacgagaagaagcgccgcaagcgccacccgccggcgcaccgccagcccaagcagcagcagcagcaggacggccagcaccagcacccgtcgcacgccgcgccgggcacggtggccgagccgccggcgccgcacttcttgatcccgcacgcgcacttcctccatggccatttcctggcgccggcgaccgagcccatcgacccggccgcgggcggaggtggcggcactggggatgatattgcgctggcaatggcagccgccgccgaggcgcacgcggccgggttcttgatgccgctgtccgtgttcaactagctagcttgcttgcttgcaccagtacttcttccaccgttccatcggcttaattagcagaaatgcaagagtgattaggcacgtaagtaaacttgcaggttctgctaatggcgaccgatttggtctcggcgtgcgcgcgcgatctaagtatgagatgacactggctgtgtgccccatcatcaaccgctgctactgcctgtctgcctgccagccttttggttgtactagtgattttgcatggtcttgtgtatgcagtgatccatagaatggcaggattagatggcttgttcattctccctggcgacgttcttcttggggatttcatgtggtgtaaggctatctccagaaaaccgtatatatatgaacatgcaaagtaatgctttgcattgaaatagagagtaagatatggcgcaagtagagcacaagcacaacacacaaacgatttatctaatggttcagtttgtgactaaggcttgtaccaccacattgttgagaaagccaccaaggctagagttgtgggagattacaaacggcttaaagtaactacaagagcatggtgcttcaatgagatacaactagttggctagcagctcttgctccaagagtaatagatagaaaccactagcctgagcacaatccaagtgctccacgaggagttatatctcaggatgaacaactctctaatgaagatttgcatgccaagatttctcgg

SEQ ID NO: 127248 - DNA, 1692 bp, Zea Mays
ctccctctccctcctttcttctcagcttgctggccatgagaccgctctcctcaacccaccatatttatctgcctcctctcgccacatgctctcctcctctgccggctcagtcgtgggacgagttccgatcccgacccctagcttccgctcccgatccgtcgtctcatcctctcctacttgctgatctggtcgagctcgtgttcgcgcttcgcggagatcgtcaggtgaccgagcgagccatggaggtagccggcgtcgtcgcgtccgcggccgacagccctggcgccgcggcggcgcggccgagccggtacgagtcgcagaagcggcgggactggcacacgttcgggcagtacctgcgcaaccaccggccgccgctggagctggcccggtgcagcggcgcgcacgtgctggagttcctgcgctacctggaccagttcggcaagaccaaggtgcacgcggcgcggtgccccttcttcggccacccgtccccgccggcgccctgcccgtgcccgctcaagcaggcgtggggcagcctggacgcgctcgtcggccgcctgcgcgccgcgttcgaggagcacgggggccggcccgaggccaaccccttcggcgcgcgcgccgtcaggctttacctccgcgaggtccgcgacagccaggccaaggcgcgcggcatcgcctacgagaagaagcgccgcaagcgccacccgccggcgcaccgccagcccaagcagcagcagcagcaggacggccagcaccagcacccgtcgcacgccgcgccgggcacggtggccgagccgccggcgccgcacttcttgatcccgcacgcgcacttcctccatggccatttcctggcgccggcgaccgagcccatcgacccggccgcgggcggaggtggcggcactggggatgatattgcgctggcaatggcagccgccgccgaggcgcacgcggccgggttcttgatgccgctgtccgtgttcaactagctagcttgcttgcttgcaccagtacttcttccaccgttccatcggcttaattagcagaaatgcaagagtgattaggcacgtaagtaaacttgcaggttctgctaatggcgaccgatttggtctcggcgtgcgcgcgcgatctaagtatgagatgacactggctgtgtgccccatcatcaaccgctgctactgcctgtctgcctgccagccttttggttgtactagtgattttgcatggtcttgtgtatgcagtgatccatagaatggcaggattagatggcttgttcattctccctggcgacgttcttcttggggatttcatgtggtgtaaggctatctccagaaaaccgtatatatatgaacatgcaaagtaatgctttgcattgaaatagagagtaagatatggcgcaagtagagcacaagcacaacacacaaacgatttatctaatggttcagtttgtgactaaggcttgtaccaccacattgttgagaaagccaccaaggctagagttgtgggagattacaaacggcttaaagtaactacaagagcatggtgcttcaatgagatacaactagttggctagcagctcttgctccaagagtaatagatagaaaccactagcctgagcacaatccaagtgctccacgaggagttatatctcaggatgaacaactctctaatgaagatttgcatgccaagatttctcgg

SEQ ID NO: 127249 - DNA, 1597 bp, Zea Mays
cttctgtagctcggctcactagtgattgagtcgattaaagtttgcagttttgctttgcttccttccgttctccgcattttccttgtgcgttttttctttaacttcaatgtgcgtcagttcgttcttgcatgtctgctgtctgctacggatcagctctagatcatcaaactgtgctagtcaattccagatagagagagtaggagtaggtatatcgctacagagtgcaggcatacaggttggtgtggcagctagctgagtctagcctgaaaccctagctagttcatcgaggattctgaattcctggtccgtcccagctccgtcgccccggccggccaagaatagatgaagcgactgatccgaccagctctttgctccttgcattattcgtcctttttattatacgtatagtataaccatagccaaatcgtttcactatccaaccaggcatgcgtcgtgcagatctggtcgagctcgtgttcgcgcttcgcggagatcgtcaggtgaccgagcgagccatggaggtagccggcgtcgtcgcgtccgcggccgacagccctggcgccgcggcggcgcggccgagccggtacgagtcgcagaagcggcgggactggcacacgttcgggcagtacctgcgcaaccaccggccgccgctggagctggcccggtgcagcggcgcgcacgtgctggagttcctgcgctacctggaccagttcggcaagaccaaggtgcacgcggcgcggtgccccttcttcggccacccgtccccgccggcgccctgcccgtgcccgctcaagcaggcgtggggcagcctggacgcgctcgtcggccgcctgcgcgccgcgttcgaggagcacgggggccggcccgaggccaaccccttcggcgcgcgcgccgtcaggctttacctccgcgaggtccgcgacagccaggccaaggcgcgcggcatcgcctacgagaagaagcgccgcaagcgccacccgccggcgcaccgccagcccaagcagcagcagcagcaggacggccagcaccagcacccgtcgcacgccgcgccgggcacggtggccgagccgccggcgccgcacttcttgatcccgcacgcgcacttcctccatggccatttcctggcgccggcgaccgagcccatcgacccggccgcgggcggaggtggcggcactggggatgatattgcgctggcaatggcagccgccgccgaggcgcacgcggccgggttcttgatgccgctgtccgtgttcaactagctagcttgcttgcttgcaccagtacttcttccaccgttccatcggcttaattagcagaaatgcaagagtgattaggcacgtaagtaaacttgcaggttctgctaatggcgaccgatttggtctcggcgtgcgcgcgcgatctaagtatgagatgacactggctgtgtgccccatcatcaaccgctgctactgcctgtctgcctgccagccttttggttgtactagtgattttgcatggtcttgtgtatgcagtgatccatagaatggcaggattagatggcttgttcattctccctggcgacgttcttcttggggatttcatgtggtgtaaggctatc

SEQ ID NO: 127250 - DNA, 1710 bp, Zea Mays
aaagcacacgcacaccaaactaccaaaccaacagagcaacatcaatgcgccttccgccgccatcaaccaccgcggccgcagccgctgccaccgtcggggccgtactcgccgcagtcgccctccgccgctacctgtccgcttctcgccaccgcgaacccgcccgcgtgcccatgtccgcggccgccggagccaccacgcttgtggtgtacggcaaatcggcgcaggagcaggagctgctggcctccgcggccggttccgtcgtcctcggtgagggcgatccgtccggtgatgtcgccatcgcgctcgcctacgagagcgcgggcttcgacgccgccgcgtacatgagcgcgctccgggcgcgccggttcgggaggtggatgctctggacgcccaggattggttccacgcaggatctcatcacgcggaactttgcaaagctaccggtgggcgttgtgtgcgttgccgacgtgcagttcaaagggagaggccgttcaaagaatgtgtgggaatcgccaccaggctgtctcatgttctctttcacatcacagatgcaggatgcacggaagttgccccttatgcaatatgttgtctgcctttcgataactgaagctatcaaggagctgtgccgtgccaagggactaccagaacttgatgtgagaataaaatggcctaatgatctctatctgaaaggattaaaagttggtggcattctatgtacctcatcttatgaacccaaagtgtacaatatttgtactggtgttggtttgaatgttgacaatgagaagcctaccacatgcttgaatgctgcacttcaagaggcaaatcatacatcacccatattgaaacgagaagacatattggcatacttcttcaataaatttgaaaaccttttcgagatcttcatgaaccatggatttcaggttcttgaggagcaatactataactcatggcttcatagtggccagagagttgtcgtacatgatgcacatgaaaacaagtcaggcagtgtcgtcaccatccaggggttaacaccaactgggtacttacatgctattggtgaggataacaaaagctatgagttgcacccagatggcaacagctttgatttcttcactggattggtgaggaggaagatggaagcttagggtatcaatacaatgggatacatggatagattcaacagactgtacaaatgaatggaatgagaacatgatttaagcatcagccccctccatctgtattcaaaccttgtgcttggaataaatagaaggaatgctcttatcacaatcctgaacggccgctttgagacctcaaaccttaacaagtgccccaccctcgcaattccatttgcgacagctcagcataaacaattaagaagacaatcaaccgtgactgaagcccaggcatgagttcagatctcaggtgaagaaatcgcagtgactgaagaccgtttacttgaatgattcatatttcataggaagaatgcatgaaaattatgaagcacatctgctccattgatgggcggacagcttcttcggcagtgtttggggctcatgtttgcatcaggttctgtataactgcagtgttttttctattagtgaactaagttggaaatctgctgcaactgcaagatttgtagcggtgatgtatgagttggtaacttgtatttgcacagatgcttaactgaaaggacatgttatatattatcca

SEQ ID NO: 127251 - DNA, 111 bp, Zea Mays
agttgttaaaataaatatttttggagtatgcattttgatttgtaggtacttattaaaatttcattttattgattttcttttcgtgcaacccaatctatttgaataatagac

SEQ ID NO: 127252 - DNA, 733 bp, Zea Mays
aggacgagagggagaacagcggattcatcaccgccaggcgtcaggtcaggtgcgtgcgcatacatccatccaccgcccttcacccgctcttcttctgctggcggttccctccacccactcttctgccagtggttgcgagagtgtgttaagacaagatggtggcgaatggcgacgcacctgctagagggagtgtggcggcagctgcaagcctgcgcaagcataggaccacaagcgctgctgctgctggcggaggtggtgccagctgatgctccagttctataccgatgaggctgcgggtcgcaaaatgtcaccaaacaccgttctgatcatgggcattgggttcatagctgttgtcgctatgctccatgtttttgggaagctgtaccgcacctccaactaggttggtactaccataaccaagaaaacagaggccaccaagagaggagccttatagagccatttcaatggatagcaagtgactatcaaagaggaaccttgtagagcgatttcaatggatagcaagtgactatcagattgtgaagtgttatagaagtttatctatacaacttgcaatgctgagggctatgataaatctctgcgagtcttgtttatgcttcatattttttgcatgtgcttgcatatgctactttctatttatgttgttctgatcttgccgttcgatccttgttgcttacctttggcaatctgcctaatgggcaaacactatttctca

SEQ ID NO: 127253 - DNA, 1335 bp, Zea Mays
atgagggagatcctgcacatccagggcgggcagtgcgggaaccagatcggtgccaagttctgggaggtgatctgcgacgagcacggcatcgaccacacgggcaagtacgccggcgactccgacctccagctcgagcgcatcaacgtctactacaatgaggccggcgggggccggttcgtcccgcgcgccgtgctcatggacctcgagcccggcaccatggactccgtgcgctccggcccctacggccagatcttccgccccgacaacttcgtcttcggccagtccggcgccggcaacaactgggccaagggccactacaccgagggcgccgagctcatcgactccgtgcttgacgtcgtccgcaaggaggccgagaactgcgactgcctccaaggatttcaggtttgccattcattgggtggaggtactggctcagggatgggcaccctgctcatctccaaaatcagggaagagtacccagataggatgatgctgacgttctcagtttttccatcacccaaggtgtctgatactgtggtagaaccttacaatgccacgctctcagttcatcaacttgttgagaatgctgatgagtgtatggtcctcgacaacgaagctctctacgacatctgcttccgcactctgaagcttgctacacccactttcggtgacctgaaccatctcatctctgcaaccatgagtggtgttacctgctgcctgcggttcccaggccagctgaactcggacctccggaagcttgcggtcaacctgatccccttcccccgcctccatttcttcatggtcggcttcgcgccgctgacgtcaagggggtcccagcagtaccgcgccctgaccgtcccggagctgacccagcagatgtgggacgcgaagaacatgatgtgcgcggctgacccgcggcacgggcgctacctgacggcgtcggccatgttccgcgggaagatgagcaccaaggaggtggacgagcagatgctgaacgtgcagaacaagaactcgtcctacttcgtggagtggatcccgaacaacgtgaagtcgagcgtgtgcgacatcccccccacgggcctggcgatggcgtccacgttcgtcggcaactccacctcgatccaggagatgttccggcgcgtcagcgagcagttcacggccatgttccggcgcaaggccttcctgcactggtacaccggggagggcatggacgagatggagttcaccgaggccgagagcaacatgaacgacctggtggccgagtaccagcagtaccaggacgcgacggcggaagaggaggaggagtacaaggagggagatgaggtggctgcctga

SEQ ID NO: 127254 - DNA, 149 bp, Zea Mays
gcattacatatttaatacatgcctaatgggataggaataatatgaataagtcgaattacatgctggatttctttgttgttgcatccacatttgaatttgtaactcatttaaagttcaaaatatttaaaaccaatagaaaacagaattat

SEQ ID NO: 127255 - DNA, 1748 bp, Zea Mays
accaacaagtgcagtcacccgagccgcaaactgcagctctgcaagctacagaggccaccacgagtccacgacgccacgccctccgagagaaagagaaagagaaaaccaaagcacgataatgcccccgacccccacagccgccgcagccggcgccgccgtggcggcggcatcagcagcggagcaggcggcgttccgcctcgtgggccaccgcaacttcgtccgcttcaacccgcgctccgaccgcttccacacgctcgcgttccaccacgtggagctctggtgcgccgacgcggcctccgccgcgggccgcttctccttcggcctgggcgcgccgctcgccgcacgctccgacctctccacgggcaactccgcgcacgcgtccctgctgctccgctccggctccctctccttcctcttcacggcgccctacgcgcacggcgccgacgctgccaccgccgcgctgccctccttctccgccgccgccgcgcggcgcttcgcagccgaccacggcctcgcggtgcgcgccgtcgcgctccgcgtcgccgacgccgaggacgccttccgcgccagcgtcgcggccggggcgcgcccggcgttcggccccgtcgacctcggccgcggcttccgcctcgccgaggtcgagctctacggcgacgtcgtgctccggtacgtgagctacccggacggcgccgcgggcgagcccttcctgccggggttcgagggcgtggccagccccggggcggccgactacgggctgagcaggttcgaccacatcgtcggcaacgtgccggagctggcgcccgccgccgcctacttcgccggcttcacggggttccacgagttcgccgagttcacgacggaggacgtgggcaccgcggagagcggcctcaactccatggtgctcgccaacaactcggagaacgtgctgctcccgctcaacgagccggtgcacggcaccaagcgccgcagccagatacaaacgttcctggaccaccacggcggccccggcgtgcagcacatggcgctggccagcgacgacgtgctcaggacgctgagggagatgcaggcgcgctcggccatgggcggcttcgagttcatggcgcctcccacatccgactactatgacggcgtgaggcggcgcgccggggacgtgctcacggaagcacagattaaggagtgccaggagctaggggtgctggtggacagggatgaccagggcgtgctgctccaaatcttcaccaagccagtgggggacaggccaacgctgttcttggaaatcatccaaaggatcgggtgcatggagaaggatgagaaggggcaagaataccaaaagggtggctgcggcgggttcggcaagggaaacttctcgcagctgttcaagtccatcgaggattatgagaagtcccttgaagccaagcaagctgctgcagcagctgcagctcagggatcctaggacagtgcttggagacgagcaactgctgtggcactttgtatcatggaacagaaataatgaagcgtgttctttgtgacacttgacatgcaaatgtttgtgttctgtaaccgttgaatatatgggacgatgctatgatggtgtaatagatggtagagagggtacaaccctgatactaatgatgcactattgcatctctgttgtacaagtttgcatgaaaataacgacgagggtcagtatgaggcataatgaatctgttcctgggattcttgtactcacctggtgctttttttttatg

SEQ ID NO: 127256 - DNA, 3311 bp, Zea Mays
atgttgccgccgccgccaccaccgtcctccttgcgcgaccttctctcgcgggagcgcgtcgacgaggacgaggcgccgcatctgtcgccgcgacgcgcctccgggcggtcacccccgcgccgcggggcgtcgtcgaggtcgtccaggcacacgtcgtcgccgccgctggccacgaccacgacaacgaccagggaggcggagggggaggccgccgccgccgacgcggtggtcgccgtgctgtccgcgtacgccgggaggctgctcagggacgcggaattcaggcgggcgctccgcgacaagtgcgccgcgtgcctcgcgcccgccgcgggcgcgggcgaggacgacgacgcggcggcaggccgccccgtgctggccaacctcgagctgggcatcgagagcatagagcgcctggccgcggacggctccgccgcgcagccacaggcgccgcgcgacgccaagatccggtcgctccgcaactccatccgcctcctcagcgtcgtcgcgtcgctccactcgccaccgccgccgccgcgccccggcgccgccgcgggggacggcggcggccgcacctgcggggtgcccaactcgcacctcgcagcctgcgcgcagctctacctcgccgtggtgtacaagatggagcgcaacgaccgcgtcgcggcgcgccacctcatgcaggtgttcgccgacgcgccgggcctcgcgcgcagggagctgctgccggacctctgggaccacgtgttcctgccccacctgctccacctcaaggtctggttcgccagggaggccgacgacctcgtcgctggccgggacgccgacgaccggcgcacgaggatgaaggccctgcagaggctctacagcgaccacatggacagcggcacggctcagttcgctgtgtactacaaggagtggctccagtcaggcgccgccgcgccgcctcccgtcccctcggtgccgttgccttcgacgcccaggagtttcgacgggcgcgagaagagctcggcttcggtgcacagaacctccatcaacagagacctgtataatgcggttttcgggacagctctcgctctcgggcaggaagacgtcaaggatacaaagctggacgatgggactggactagctctggatttggatgtcgaattggatcacgatgctgcgggcttcaagacacagaagcttgctcatagtaaaatggggctccaggaaaagcactcccgctctcggaaagaaggcgccgctctagcagaaacagcacctgcgcagcggaaatcatactcctttcgactgttctcgtgccaaggcgatataagcaggaacgtgatcagccatcccaaagcagcgaagaaggaacccgtggtgtctgtcgagaaagagctggacagcagcgagctagctcctgctgtcgtgcctctgctggaacgagcggtttccgtggtatccagttcggacagcctgagtcagtgcgaggacgccgtgcacgaggtcgccagagcatgctcggcctgggacccgagcctcgtgaacctgctgtcgtgcgcctctttcatccaaggccttctcgaggtcacgctgacctccaaagacgacgccgtgctggagtcggccatgtcgatcatggggaagctggttctggggaacgaggtgatcagacagctcgtgctcaacgcggacccgcagctggaggttttcctgaggctcctgaggagcagcgagctgttcctcaaggcggccgtggtgctctacatgatgaagcctaaggccaagcagatgctgtccctggactgggtgccgctcgtgctgcacgtactggagtgcggcgacgaggtgcagtctctgttctccgtaagatgcgcccccaagatcgccgcgttctatttcctggaccagctgctcatggggttcgacgttgacagaaacgtcgagaacgcgaagcagatgatcgctctcggtgggctggacctcctgatcggcaggcttggcgctggcgacgctcgcgagagcaggcactgcatcgctctcctgaccacgtgcgttcaggccgatggcagctgcaggcactacttggctgatagtctcaagaaggagcctctcgttcagcttcttgctggaaatcagaggaaagccagtgccgcgtcccttaacctgatgagtgaactcgtctgccttaacagaacaagcaaaatcgtggagttcgtcaaggagctgaagaacagcgggtgcttgaacacgatgcacgttctgctggtctacctccagcaggctcctctcgtccagcacccgttagcagctaccatgctactccagctcgatctcctgggtgatccttcgcagtacagcgtgtacagggaggaggcgatcgaggccatcgtagccgctctggagcacagctcgcagagcaggaaggtccaggaacagtgcgcccgagctctcctaatcttggcagggcggttctcgtcttcaggagagcccgtagcagaagcgtggctgctaaagagagcgggcctagacgattccctctctgagtccttcaggagatcagaagtattcaaagataagagtgttcgagcggaggaagagaagctagtggaagaacggcagaagaacctcgccttgatgctactgaagagcgggggcagaaggttcctcacggcgctgtcgagctgcatatccgatggaaccccgagcctcagccggtcgtgcctcgtcagcgtggcatggatgagcagctccctctcgccgctgcgcggatgcaacgacttccagcccctggcatgctccgtcctcgcgtctaagcttttggacagcttgagctacgacagagtcctggaggagagggtgctcgcttcgctgtcgcttctgaacgtcgtgagacacccagaatgcatggagaaggtcttcccgctgaagaaagaaaccatcgagtcactccaagatctcgcggaggtgacgtggactgcgaaggagctcctctttgcctgctgcagatgagatgcaagaccagatcgtcctcagcgatgaagaactagacaccagcatgtaattggaagtgattgttttgggagaagagtgatcgccactgctgtacacagattgtttcgtacttccgttgatatgtgaagccccacagatcctttccctcgtcatggactttggctttcgctgttgaattgaagcctgcacatggcttcctttcttcttcttctttagggcttgtttagattgccaggtatccatatcaatacacatccatgtgttgtacgttaacacacaacatactatattgagttggataatgatcatccaaataagtcctt

SEQ ID NO: 127257 - DNA, 2819 bp, Zea Mays
acgactcacgaattccgtcccattcccatccgcgcggacgtctcctcacgcaacctgtagccgagaccctctcacacgcttgcgatctccacctccgcggttgccggccgacctcttccccgccgcctccgccgcgcctcggggcaccggacccgtctccaacccctagatctcgcgccccctccgccccgccggccggtggtcacgccccgcctctcccgccgccggacgagctcgccgtggggcggagaggtcgccgccggcgacaggagccacgcgatgtccagggaatcctgccctttctcctcgcctcagtccttggggatccatccgtgctaatttccaccgttggcttgcagccttttgtatcgagcatgtgctaaattgggcacgcagaaatatcatcaagtatgctgatattaccgttccgaaacatcccaacttgccagcattggtcggggtaaatttgtcaagttatcaattgaagtgtgcttggttattgatttccattaaattgcagcatagcttgctcttcatctgaaagttttcgagggtagatgtttatcgtgcaccatggtcgttggtaatgacatagttgacatggttgggtgctaaaaggacgagaagggtttgaataaacggtccgatgaacattctacttgagcttaagcatctcaagctctttagcatgcccgcaagacctgtcatctgtaaaggccttctgatagtgattgcccttattttgttgagagcaattgtatctccttttcttgctatagattcatctgagaagaaagaattttacgagtccacagcccctgacttgcttcctagaattagacgagacaagtttcttgaggtcccacagatcatatgggggttgaacaatcagaagattgcattcgccagagcatgcttgactgcaagattcctgaacagatcccttctcatgccaagcttgagtgcttctctcttctacaaagaggttgacttgctgcagcctgtcagttttgacaaagtgtttgactttaacaagttcaatgcgcgttgccatggcttcgtaaggttagctcagtattcagaagtttcaaatcggacagagcccttcaaactccaaaaggggaccggtagaaggtggacggcagacagagatttggatcaactacagcaatccataggcagcaatgtggatgactctgaagtcattgaaatcgttgggaaaaatccatttctgtggcctgaccactggccagtcaaagactatgccaaaatcttcgattgccttgtcttagttcctgagatagaaaccgaagtggtcaaggtgatatccaagattagagaggcaggccaaagagcaagacatgaagctgggggttctcatagtaagcagaggagagatagctcaacgaatccgcctgtaccgtatgttgctgttcacatgagaatagaaaaagattggatgatacattgcaagaagtgggagcagcggtccaagtcacatgaaatctgcagtagtaaagaagagatcattcataaggtctcacagatcactgacctacgtcggccggttgttgtttatcttgcggtagctgacagccttcttgaagacgattcaataaccagtgggtggagagtgggtatggttgcttacgagaagaagaagcttggtgttactgacatctacgatcgtcagccatatcttataaagtctgccatcgacttcgaggtgtgctcgagagcagacgtgtttgtcggcaacagcttctcaacattctccaacctcgtagtgctgtccaggacagaaaggctgtacaacctgggaaaggcgagctcgtgtggcgagaacatcgggctttcgtcgtatgcgtacaatgtcatgggcgacgatggtggaccacagagatggatgacagatatgtcggacacaagcctgcagaggttaagttacggaacaaataacgtctcatgccactgactttgacgcatagcaaacttgactgaacatgatgtatacctgaggaagagtccttgcccgacttcgctttttatcggcaaaggaagcaagtatgtgcagctaatttgacgtgcttctgtgttcgaagctagagcccacatgtcgcacttgtgaaggactatggccaagagtttagatgtgcttaaaagtgttgacagtgttgggcagtttgtagtttgtataacgctgaatgctgcgcgatggcttttacctgggacccttttgtttttttatggtttcagaatcagacctacacattcaagtgtattttgttcacatgcagcgtgtgtgtttttaagatggtttgctgtgttctgactttttttatttcaatcgccctcaatgcagtaaacctccttgcaaaaaggaccagatgcttgctatttctccaggtttggaactgtgtgagaaataggggttggtgggaagattatttggcgatttttttttctcttccatccgatttttatataatatgaggatagcctgtgtagcagtgagagctatctttattgagtaaccagatcatgcagtcttttcgtatttgcgggatgaagacaatgcggggtgaacacaatgcaaagtgaagattttgtttgctttatgaccattagagtttatattagagcctctggcacttctgtttttctttaaaactagaatcttgataaatgtaactgaatttctatctcctggttcaaatgtaaatgcaatgggcatcttgccctgtttaatcatttttgaagtgcgtgtagatttagctaaagtttttgacagaattgaatggaacttaattatgtctgct

SEQ ID NO: 127258 - DNA, 188 bp, Zea Mays
gggggggggggggggatgagcgaagaggaagctagcagtagctacgaggtgtgatgaggggaggcgacgccattgatgcgcccaactcctcgctggtggcatttaaaatcgccataaattggagcgggagcaaggcaacaaaagcaagcagccgccgcgggcgccccctcggcctgcctctgcctcac

SEQ ID NO: 127259 - DNA, 1362 bp, Zea Mays
cgctgtggttggccaatcctgacacattatcttctcatccaagccgagagcgtgaccagctcacccagatcagaatccagacctcgtcagagagcattcccttgtgcatctcggcctctccttcctcccttcctcgcccgcccagtcctctaaccatcttctccaaacgcccggagatggtctcgctgcgatgcaccaccgcgcaccactccctcctcggctcgccgacctgcctcgcgcgcccgcggcggcggccgtgccccgtcgtgcgcgctgccgtcgccgtggaggccggcgctcaggccaaggtctcactcatccggattgggacgcgtgggagtcctctggctcttgcacaagcccatgaaactcgggaaaaactgaaagccgcacactctgagttagctgaggagggggctattgagatcgtcatcataaagaccacaggagacatgatcttggacaaaccccttgcagatattggaggcaagggtttattcaccaaggagatagatgatgcactcttgcagggaaggattgatatagctgtgcactctatgaaagatgttccaacatatctacctgaaggcacaatattgccctgtaacctcccacgagaagatgtaagagatgcattcatatgcttgactgcaaattcgctcgcggagcttcctgctggcagtgttgttggaagtgcttccttgcggagacaatctcagattctctacagatatccatcactgaaagtagttaacttcagaggaaatgttcagacacggttaaggaaactcaaggaaggagatgtgtctgctacattgttggcgctggctggattaaggcggctaaaaatggcagaaaatgcaacagctgtactatcagtggaagaaatgcttccggcagttgcccaaggtgctattggaatcgcttgccgaagcaacgatgacaaaatgatggagtatctgtcctcgttgaaccacgaggataccagactagctgtcacatgcgaaagagaattcttggcagttcttgatggcaactgccgaactccaattgcggcctatgcttaccgtgacaaggacgggaactgctcattccggggcctactgtcttcaccagacggatctaaagtatttgagacggcaagaagtggaccgtactctttcgacgacatggtcgagatgggcaaagacgctggccacgagctgaaggcgaaggctgggcctggcttcttcgatagccttcaatgaacagaatgtgcggccatgcgcgatttcagttggcaccctttcggttgaaaacgagggccaaagtaggttgttgaggggtttgtttttgtttcttctttttttctcctactactag

SEQ ID NO: 127260 - DNA, 1907 bp, Zea Mays
cgctgtggttggccaatcctgacacattatcttctcatccaagccgagagcgtgaccagctcacccagatcagaatccagacctcgtcagagagcattcccttgtgcatctcggcctctccttcctcccttcctcgcccgcccagtcctctaaccatcttctccaaacgcccggagatggtctcgctgcgatgcaccaccgcgcaccactccctcctcggctcgccgacctgcctcgcgcgcccgcggcggcggccgtgccccgtcgtgcgcgctgccgtcgccgtggaggccggcgctcaggccaaggtctcactcatccggattgggacgcgtgggagtcctctggctcttgcacaagcccatgaaactcgggaaaaactgaaagccgcacactctgagttagctgaggagggggctattgagatcgtcatcataaagaccacaggagacatgatcttggacaaaccccttgcagatattggaggcaagggtttattcaccaaggagatagatgatgcactcttgcagggaaggattgatatagctgtgcactctatgaaagatgttccaacatatctacctgaaggcacaatattgccctgtaacctcccacgagaagatgtaagagatgcattcatatgcttgactgcaaattcgctcgcggagcttcctgctggcagtgttgttggaagtgcttccttgcggagacaatctcagattctctacagatatccatcactgaaagtagttaacttcagaggaaatgttcagacacggttaaggaaactcaaggaaggagatgtgtctgctacattgttggcgctggctggattaaggcggctaaaaatggcagaaaatgcaacagctgtactatcagtggaagaaatgcttccggcagttgcccaaggtgctattggaatcgcttgccgaagcaacgatgacaaaatgatggagtatctgtcctcgttgaaccacgaggataccagactagctgtcacatgcgaaagagaattcttggcagttcttgatggcaactgccgaactccaattgcggcctatgcttaccgtgacaaggacgggaactgctcattccggggcctactgtcttcaccagacggatctaaagtatttgagacggcaagaagtggaccgtactctttcgacgacatggtcgagatgggcaaagacgctggccacgagctgaaggcgaaggctgggcctggcttcttcgatagccttcaatgaacagaatgtgcggccatgcgcgatttcagttggcaccctttcggttgaaaacgagggccaaagtaggttgttgaggggtttgtttttgtttcttctttttttctcctactactagttcctgctagagccttgtactaccactcatgttgagcagccccattcagcttttgttgtttctcatgttcttttagcactctgggttagagagagccggtatctgcacagctatgttgtgtcgaagttgatgtgactctgcagatagttgttgtttcaagaatatttgagcgagctcatgataaccatgggagtaagattcgatgttcctattcttcggaaaattagccttgttgattgattctcagatgaacctgatgaatgtcacatccctctttgggggaaatgagaatggagaaacctgcctctttcatgaatgtcacatacacccctaaatgttccagtttttttttttaaaaaaattaaacaaatatgattcctttttattattattttctgcaatcacatagaggcaagatgaacacaaaggcaacaccggcactctttcacaatattggagataactgatagtctgatacaggtcccaatctaaattacccagacattttcagatgctactgaacaaggatctcctgaagcatctta

SEQ ID NO: 127261 - DNA, 1908 bp, Zea Mays
gtggttggccaatcctgacacattatcttctcatccaagccgagagcgtgaccagctcacccagatcagaatccagacctcgtcagagagcattcccttgtgcatctcggcctctccttcctcccttcctcgcccgcccagtcctctaaccatcttctccaaacgcccggagatggtctcgctgcgatgcaccaccgcgcaccactccctcctcggctcgccgacctgcctcgcgcgcccgcggcggcggccgtgccccgtcgtgcgcgctgccgtcgccgtggaggccggcgctcaggccaaggtctcactcatccggattgggacgcgtgggaggacagtcctctggctcttgcacaagcccatgaaactcgggaaaaactgaaagccgcacactctgagttagctgaggagggggctattgagatcgtcatcataaagaccacaggagacatgatcttggacaaaccccttgcagatattggaggcaagggtttattcaccaaggagatagatgatgcactcttgcagggaaggattgatatagctgtgcactctatgaaagatgttccaacatatctacctgaaggcacaatattgccctgtaacctcccacgagaagatgtaagagatgcattcatatgcttgactgcaaattcgctcgcggagcttcctgctggcagtgttgttggaagtgcttccttgcggagacaatctcagattctctacagatatccatcactgaaagtagttaacttcagaggaaatgttcagacacggttaaggaaactcaaggaaggagatgtgtctgctacattgttggcgctggctggattaaggcggctaaaaatggcagaaaatgcaacagctgtactatcagtggaagaaatgcttccggcagttgcccaaggtgctattggaatcgcttgccgaagcaacgatgacaaaatgatggagtatctgtcctcgttgaaccacgaggataccagactagctgtcacatgcgaaagagaattcttggcagttcttgatggcaactgccgaactccaattgcggcctatgcttaccgtgacaaggacgggaactgctcattccggggcctactgtcttcaccagacggatctaaagtatttgagacggcaagaagtggaccgtactctttcgacgacatggtcgagatgggcaaagacgctggccacgagctgaaggcgaaggctgggcctggcttcttcgatagccttcaatgaacagaatgtgcggccatgcgcgatttcagttggcaccctttcggttgaaaacgagggccaaagtaggttgttgaggggtttgtttttgtttcttctttttttctcctactactagttcctgctagagccttgtactaccactcatgttgagcagccccattcagcttttgttgtttctcatgttcttttagcactctgggttagagagagccggtatctgcacagctatgttgtgtcgaagttgatgtgactctgcagatagttgttgtttcaagaatatttgagcgagctcatgataaccatgggagtaagattcgatgttcctattcttcggaaaattagccttgttgattgattctcagatgaacctgatgaatgtcacatccctctttgggggaaatgagaatggagaaacctgcctctttcatgaatgtcacatacacccctaaatgttccagtttttttttttaaaaaaattaaacaaatatgattcctttttattattattttctgcaatcacatagaggcaagatgaacacaaaggcaacaccggcactctttcacaatattggagataactgatagtctgatacaggtcccaatctaaattacccagacattttcagatgctactgaacaaggatctcctgaagcatctta

SEQ ID NO: 127262 - DNA, 613 bp, Zea Mays
gggattcttcaccgccgacaatattttgacgttaaataatctggacgggggcgagccatctcctctctcccccaccctctgcaatctggagctcaatttctggatctcgaatcgtctcctccgctcctctccactctcgagctcgacttctctgagccgctagctacccagcgccaacatgatgtcaccgtcggtcagccctgtcgcgcgcaacgtcggcgtctctccgccgccggatggcaactccgccgtcggcccttttgaggggagctcggttcagcaagaccccgactccaggggccgtcgtgcagatcagcttcccagatactttctgggcgaccagcatgaagggagcccatatcaggttttccccaatgactccggcatccgtcgtccagatccaatgcagcggcggcgtccaaggcatgccgtgggtgggccacgtgatgaggaccgtccttgtgggcccatgtggctccaagtcaccgtgtttttattcctgactgtcaacagcggcatggcgatgtacctgtcgtggggagacgctggggacatctcgttcgttgtttccacatatataaacttgctcggcctctccttcctaataatgaac

SEQ ID NO: 127263 - DNA, 1765 bp, Zea Mays
ccgtccgatccctgctactccgcagcgctaaaagctgcagctgcaggtcagcaaccagttggagccaaaacaatggtcgaggccgccggagcggaggccacgagacgagaccggggacgatcgatagcaggccacctccatctggccgttgcctttccaacacatcggtttcccttccagaaccttcccaccctcccattccaaaaccatcgaatccgcgccgtccattaccaatccgcgggcccaggaaacccgcaggcgccgctcttacccccttcccaagccacaccgttcccccgccgccaccaggtcccaccaagcgcggcccccgcgtgtcaggcgcacaaacagccacacaccgcccgtgtggctgcgtccggctgtctgtctataaagaaaaacagaccgtccattcgatcgcctcacccgaagcacatcccgtcgcatcccatcccactaccacccatctcgtcgtccgccgattcgatccggttcttccaacccagggtgagtctccggatccgtcgccgtctggtctccgtgtgctctcatcgccgtcgccgccgtctgactgaccccctcgcctcccgcggcgtcgggtctctggtgctgctgctgctgctgcgtgcagggcagtgatggcgacgaagaggagcgtgggcaccctcggcgaggcggatctgaaggggaagaaggtgttcgtgcgcgccgacctcaacgtcccgctcgacgatgcccagaagatcaccgacgacacccgcatccgcgcctccgtccccaccatcaagttcctcctcgagaagggcgccaaggtcatcctcgccagccacctgggtcgtccaaaaggtgtcaccccaaagtacagcttgaagcctcttgttccacgcttgtctgagctccttggagttgaagtcgtgatggccaatgattgcattggtgaggaagtcgagaagttggctgccgctttgccagaaggtggagttctgctcctagagaatgttagattctacaaggaggaagagaagaacgaacctgagtttgctaagaagcttgcatctgttgctgacctttatgtcaatgatgcttttggcacggcacacagagctcatgcttcaaccgaaggagttaccaagtatttgaagcctgctgttgctggcttcctcatgcagaaggtaataaaatgtcacccatgctcatgatcttttaagtatatttaggtactgttcagtaggatggggtaaatattttctacctttcaaaagagaccaataaatctttttaacatttcagttttttcataaataaaaaaggaaagatttgacaaatgactttattatctcaggaacttgactaccttgttggagctgttgccaacccaaagaagccatttgccgccattgttggtggatccaaggtctcaactaagattggtgtcattgagtcgttgctggcgaaggtcgatatcctcatccttggtggtggtatgatctacacattttacaaggcacagggatattctgttggaaaatctctcgtggaagaggataaactcgagctcgcaacttctcttattgagaaggcgaaggcaaagggggtttctcttttgcttcccactgatattgtagtagcggacaagtttgcagccgatgctgagagcaaggtttgtttatttacacataaacacctcagatggcacttcagaattatttctttctttccctttaatgaatcgtgaaagctattcactagtaattctgccgcataa

SEQ ID NO: 127264 - DNA, 1714 bp, Zea Mays
cgtccggctgtctgtctataaagaaaaacagaccgtccattcgatcgcctcacccgaagcacatcccgtcgcatcccatcccactaccacccatctcgtcgtccgccgattcgatccggttcttccaacccaggggcagtgatggcgacgaagaggagcgtgggcaccctcggcgaggcggatctgaaggggaagaaggtgttcgtgcgcgccgacctcaacgtcccgctcgacgatgcccagaagatcaccgacgacacccgcatccgcgcctccgtccccaccatcaagttcctcctcgagaagggcgccaaggtcatcctcgccagccacctgggtcgtccaaaaggtgtcaccccaaagtacagcttgaagcctcttgttccacgcttgtctgagctccttggagttgaagtcgtgatggccaatgattgcattggtgaggaagtcgagaagttggctgccgctttgccagaaggtggagttctgctcctagagaatgttagattctacaaggaggaagagaagaacgaacctgagtttgctaagaagcttgcatctgttgctgacctttatgtcaatgatgcttttggcacggcacacagagctcatgcttcaaccgaaggagttaccaagtatttgaagcctgctgttgctggcttcctcatgcagaaggaacttgactaccttgttggagctgttgccaacccaaagaagccatttgccgccattgttggtggatccaaggtctcaactaagattggtgtcattgagtcgttgctggcgaaggtcgatatcctcatccttggtggtggtatgatctacacattttacaaggcacagggatattctgttggaaaatctctcgtggaagaggataaactcgagctcgcaacttctcttattgagaaggcgaaggcaaagggggtttctcttttgcttcccactgatattgtagtagcggacaagtttgcagccgatgctgagagcaagattgtccctgccactgctatccctgatgactggatgggtcttgatgttggccctgatgccaccaaaacattcgacgaagcattggacaccaccaagactgttatttggaacggccccatgggagtgtttgagttccagaagtttgcagctggcaccgaggcgattgccaagaagctagctgagcttacaaccacgaagggtgtcactaccatcatcggcggtggcgactctgtcgctgctgtcgagaaggctgggctggccgacaagatgagccacatttcgaccggcggcggtgcgagcttggaactcttggaaggcaagactctacctggtgtccttgccctcgatgacgcctagatccgctgctgctgctgctactcaggttctgccagctttgcgtgtcatcttgtttcggaccttggtgtagcactgcaaggctaaggtttactcctccacacatggactttcgaggataggcttgccaccgtgttttgctagatgagtcgtgaaataagcttttacttcctcgctgctgtgggtgaagtgactggaattcggaaatttggaactaacaaaaccccccgtggatttgtatgatacgttttgttcgacagtttgcgtcccatctttcactgtggtatctggtatggtatgttcttattttttgtctgacagagtgacagtttgcattcctgtgttgccgttgctattcgttcctgct

SEQ ID NO: 127265 - DNA, 1677 bp, Zea Mays
ccgtccattcgatcgcctcacccgaagcacatcccgtcgcatcccatcccactaccacccatctcgtcgtccgccgattcgatccggttcttccaacccaggtgatggcgacgaagaggagcgtgggcaccctcggcgaggcggatctgaaggggaagaaggtgttcgtgcgcgccgacctcaacgtcccgctcgacgatgcccagaagatcaccgacgacacccgcatccgcgcctccgtccccaccatcaagttcctcctcgagaagggcgccaaggtcatcctcgccagccacctgggtcgtccaaaaggtgtcaccccaaagtacagcttgaagcctcttgttccacgcttgtctgagctccttggagttgaagtcgtgatggccaatgattgcattggtgaggaagtcgagaagttggctgccgctttgccagaaggtggagttctgctcctagagaatgttagattctacaaggaggaagagaagaacgaacctgagtttgctaagaagcttgcatctgttgctgacctttatgtcaatgatgcttttggcacggcacacagagctcatgcttcaaccgaaggagttaccaagtatttgaagcctgctgttgctggcttcctcatgcagaaggaacttgactaccttgttggagctgttgccaacccaaagaagccatttgccgccattgttggtggatccaaggtctcaactaagattggtgtcattgagtcgttgctggcgaaggtcgatatcctcatccttggtggtggtatgatctacacattttacaaggcacagggatattctgttggaaaatctctcgtggaagaggataaactcgagctcgcaacttctcttattgagaaggcgaaggcaaagggggtttctcttttgcttcccactgatattgtagtagcggacaagtttgcagccgatgctgagagcaagattgtccctgccactgctatccctgatgactggatgggtcttgatgttggccctgatgccaccaaaacattcgacgaagcattggacaccaccaagactgttatttggaacggccccatgggagtgtttgagttccagaagtttgcagctggcaccgaggcgattgccaagaagctagctgagcttacaaccacgaagggtgtcactaccatcatcggcggtggcgactctgtcgctgctgtcgagaaggctgggctggccgacaagatgagccacatttcgaccggcggcggtgcgagcttggaactcttggaaggcaagactctacctggtgtccttgccctcgatgacgcctagatccgctgctgctgctgctactcaggttctgccagctttgcgtgtcatcttgtttcggaccttggtgtagcactgcaaggctaaggtttactcctccacacatggactttcgaggataggcttgccaccgtgttttgctagatgagtcgtgaaataagcttttacttcctcgctgctgtgggtgaagtgactggaattcggaaatttggaactaacaaaaccccccgtggatttgtatgatacgttttgttcgacagtttgcgtcccatctttcactgtggtatctggtatggtatgttcttattttttgtctgacagagtgacagtttgcattcctgtgttgccgttgctattcgttcctgct

SEQ ID NO: 127266 - DNA, 1985 bp, Zea Mays
ccgtccattcgatcgcctcacccgaagcacatcccgtcgcatcccatcccactaccacccatctcgtcgtccgccgattcgatccggttcttccaacccagggtgagtctccggatccgtcgccgtctggtctccgtgtgctctcatcgccgtcgccgccgtctgactgaccccctcgcctcccgcggcgtcgggtctctggtgctgctgctgctgctgcgtgcagggcagtgatggcgacgaagaggagcgtgggcaccctcggcgaggcggatctgaaggggaagaaggtgttcgtgcgcgccgacctcaacgtcccgctcgacgatgcccagaagatcaccgacgacacccgcatccgcgcctccgtccccaccatcaagttcctcctcgagaagggcgccaaggtcatcctcgccagccacctgggtcgtccaaaaggtgtcaccccaaagtacagcttgaagcctcttgttccacgcttgtctgagctccttggagttgaagtcgtgatggccaatgattgcattggtgaggaagtcgagaagttggctgccgctttgccagaaggtggagttctgctcctagagaatgttagattctacaaggaggaagagaagaacgaacctgagtttgctaagaagcttgcatctgttgctgacctttatgtcaatgatgcttttggcacggcacacagagctcatgcttcaaccgaaggagttaccaagtatttgaagcctgctgttgctggcttcctcatgcagaaggaacttgactaccttgttggagctgttgccaacccaaagaagccatttgccgccattgttggtggatccaaggtctcaactaagattggtgtcattgagtcgttgctggcgaaggtcgatatcctcatccttggtggtggtatgatctacacattttacaaggcacagggatattctgttggaaaatctctcgtggaagaggataaactcgagctcgcaacttctcttattgagaaggcgaaggcaaagggggtttctcttttgcttcccactgatattgtagtagcggacaagtttgcagccgatgctgagagcaagattgtccctgccactgctatccctgatgactggatgggtcttgatgttggccctgatgccaccaaaacattcgacgaagcattggacaccaccaagactgttatttggaacggccccatgggagtgtttgagttccagaagtttgcagctggcaccgaggcgattgccaagaagctagctgagcttacaaccacgaagggtgtcactaccatcatcggcggtggcgactctgtcgctgctgtcgagaaggctgggctggccgacaagatgagccacatttcgaccggcggcggtgcgagcttggaactcttggaaggcaagactctacctggtgtccttgccctcgatgacgcctagatccgctgctgctgctgctactcaggttctgccagctttgcgtgtcatcttgtttcggaccttggtgtagcactgcaaggctaaggtttactcctccacacatggactttcgaggataggcttgccaccgtgttttgctagatgagtcgtgaaataagcttttacttcctcgctgctgtgggtgaagtgactggaattcggaaatttggaactaacaaaaccccccgtggatttgtatgatacgttttgttcgacagtttgcgtcccatctttcactgtggtatctggtatggtatgttcttattttttgtctgacagagtgacagtttgcattcctgtgttgccgttgctattcgttcctgctacctgtggcgccagatgaattgggaacaaggttttctagtttagttggttaaattatcttctttcagtgttgttctggagtggtggtagctaatggcggcccttgcaaataaaaacttgctacccgagtttggcgctggcgcagcaatttattcattcattttatggcccgtttggatc

SEQ ID NO: 127267 - DNA, 2318 bp, Zea Mays
aaaccacagcactggatagaacacgccaaaagcaagagatatttcagtttcgctcttgtctcagctcagctcagctcctgccagtcgcaactcgcgtcctctccaaaaaaacagcccacagttgaagcgaaaacacgaaagctcagtgatatttctctccaggtctgcacactcgtctcctatcgagactgtcggcggccatcgtcgcccacgctgtgctcatgctaagtgtcgaggctcacacgtactactactacccgaccgcgaggccgagacggaagctatgcgcctgcagaaacgtcttgcaagaaaccgccccgcgtgacgcggaggcagatccctgccgccacggcgagaggaagagcaggagaaggggcgacggtgcttattacatcgacaaggacggcggcggcgtagccaggaccttcgaccggaagaaaatatccagaaagagggggggtgctatcaaagggcgtggatggaagtacggctccgggttcgtcgacggagtgttcccagtgctgagtccgatggcgcaggatgtgctagaactcgtgcagacgagggggaccgacgccgccagcgtctgggagtcactggacaagatccctcaagcacacgatctttgggacgacatcgtcaacgtcgccgtccagctccgcctgaaccggcaatgggagccgatcatcacagtctgcgagtgggtcctgcgccggagctcgttccgccccgacatcatctgctacaacctgctcatcgacgcgtacggccagaagcgtcagctgagcgaggcggaggcggcctacatggcgcttctggaggctcgctgcgtgcctacggaggacacctacgctctgctgctgcgcgcgtactgcggctccgggcagctgcaccgagccgagggcgtgatttcggagatgcagaggaacgggatccctcccactgcgactgtgtacaacgcgtacctggacggtctgctgaaagcgaggtgttcggagaaggcggttgaagtgtaccagaggatgaagaaggagcgctgcagaactaacaccgagacctacaccctgatgatcaacgtgtatgggaaagcaaatcagccgatgtcgtcgttgagagtgttcagggagatgaaatcggtcgggtgcaagcccaacatctgcacctacacggcgctggtgaacgcgttcgcgcgggaaggcctgtgcgagaaggcagaggaggtgttcgaggagatgcagcaggctgggcacgaacctgacgtgtacgcctacaatgctctgatggaagcttacagccgcgcagggctgccgcaaggggcgtcggagatcttctctttgatggaacacatggggtgcgagcctgatagagcctcttacaacatactggtggatgctttcggacgagctggtcttcaccaagaggcggaagcagcgttccaagagctgaagcagcagggcatgcggccgacgatgaagtcgcacatgctgctcctgtcggcgcacgccaggtccggcaacgtggcgaggtgcgaggaggtgatggcgcagctgcacaagtccgggctgcgcccggacaccttcgcgctcaacgccatgctcaacgcgtacggccgggccgggcggctggacgacatggagcggctcttcgcggccatggagcgcggcgacggcgcgatcgccggcgccccggacaccagcacgtacaacgtgatggtgaacgcgtacgggcgcgcggggtacctggaccggatggaggcggcgttccgctccctggcggcgcggggcctcgccgccgacgtggtgacgtggacgtcccgcatcggcgcgtacgccaggaagaaggagtacgggcagtgcctgcgggtcttcgaggagatggtggacgccgggtgctacccggacgccggcaccgccaaggtgctgctcgccgcgtgctccgacgagcgccaggtggagcaggtcaaggccattgtcaggtccatgcacaaggacgccaagacgctcttcgcattgtgaaatccgcgcaggctaaattccgatcctgctgcgtgatcacatacgaaccttgacgagagtcacctagcttgcatactggttaacaagtcacaaggccccgtttggttacatatagaataatctactttttagtcccgtttagtacttaattgtatttagtctctagcccttcactgtaagggcctcacatcacatgggtgctaaaggggacgaaaggacatcatttactctaattaccattgcatagagaatatgcaccgtatacatgcaataaaaagagaggcatttcagtctgtgtacttc

SEQ ID NO: 127268 - DNA, 1452 bp, Zea Mays
attcctactgttagttttgtgaattcggaggcgcagcgccaccaacttgcaccattttggcaaccccgcagggacaaaagaaaggcgaaacgaggccaccagctcaccgccgagcggaagcggcgccgagcaaccaacccctctcctcgtccgccgccgtctccccggaccatggccatggccgccgcctcctcccggctgttctgggcgtcccgcgccgccgcctacctcaggatctccaccttccccagggccttcgccaccgtgctgaaggatctgaagtatgctgacactcatgaatgggtgaaagttgagggtgattcagcaaccgtggggattactgaccatgcccaggttaacacgctcacatatttctattgctgtgagtttagagtgtgaggcaatactaggtgttagtgttaggccctccatatgtttaggttgtctggtgctgtagttcttatcaacactgatatgcatactgcatccaatctgttgccaagacatcaagttctaatatattatatcatgttcagtatacatatgttagtgaaagacagacctagtgtagtggtgagagctgtcttactgactcaccagtcgcgggtttcaagtggcctctctgcatttgtggaggaggttgcctcctccagcactaggtctcctcttttcagtatacatatgtgaggcttgcctcggtttatcacttccctagactccactcatgtgggagccctcgtcactaggtttgtccagtatataacattagggtttgcattgcttaaaatttgtttattgcttttggcgtccaggatcatttgggtgatgttgtttttgtggagctaccagaagttggcatcagtgtatcccagggaaagaactttggtgctgttgagagtgtgaaggcaaccagcgatatcaattcaccagtgtctggagaggtggttgaagtgaacgagaaactaagtgaggagcctggattggtaagtgttgcaactaatattagccagaactcatctgaaaataaaattctgtgggtagattagtcgatgattatcatttctgattaggttaatgcaagtccatatgagaagggatggattatcaaggtcaagctcagcaattcaggtgacctcaattcgctcatggatgatgataagtactcgaaattctgtgaagaagaagacaaccattgaagaaatcagagtgtcttctaaacaccaggacctgtttttcaagctttatcactggttatggtctggagaccagctgtgacaaattggcaaggttcatcgcaaggaataaatgttaggatttgccaatcctacaagggcatgggaaatccaagtttgtgttgtcaatgacgtggtcatatttgatatttctttgtagttgtaatctcgtgaattccttcttttttcttaaaaaaagtactctttttgattccttcct

SEQ ID NO: 127269 - DNA, 959 bp, Zea Mays
attcctactgttagttttgtgaattcggaggcgcagcgccaccaacttgcaccattttggcaaccccgcagggacaaaagaaaggcgaaacgaggccaccagctcaccgccgagcggaagcggcgccgagcaaccaacccctctcctcgtccgccgccgtctccccggaccatggccatggccgccgcctcctcccggctgttctgggcgtcccgcgccgccgcctacctcaggatctccaccttccccagggccttcgccaccgtgctgaaggatctgaagtatgctgacactcatgaatgggtgaaagttgagggtgattcagcaaccgtggggattactgaccatgcccaggatcatttgggtgatgttgtttttgtggagctaccagaagttggcatcagtgtatcccagggaaagaactttggtgctgttgagagtgtgaaggcaaccagcgatatcaattcaccagtgtctggagaggtggttgaagtgaacgagaaactaagtgaggagcctggattggttaatgcaagtccatatgagaagggatggattatcaaggtcaagctcagcaattcaggtgacctcaattcgctcatggatgatgataagtactcgaaattctgtgaagaagaagacaaccattgaagaaatcagagtgtcttctaaacaccaggacctgtttttcaagctttatcactggttatggtctggagaccagctgtgacaaattggcaaggttcatcgcaaggaataaatgttaggatttgccaatcctacaagggcatgggaaatccaagtttgtgttgtcaatgacgtggtcatatttgatatttctttgtagttgtaatctcgtgaattccttcttttttcttaaaaaaagtactctttttgattccttcctatgcaaatttcttggtgctttcgcgaatggttcagattcttcagcattgtta

SEQ ID NO: 127270 - DNA, 1760 bp, Zea Mays
tttttttattacattttcctcttcctttttatacgaacgaggaacgatcacacgcagacacgcttccgcggcgccaccaccttccgccctccgctgcccgctcgcctccgcgcccgaaaggcaaagcctcctcgctcctgccccgccccctcctcgcggcgtcggtcaaaccctagcacaccgtacgcgcaggcccgcccgctcccattccccacctccacccatggcggcgctctccgcgcccctccgcgccgtcgccgccggatcccgcgtcgccgcgtccgaccccgtcaaggtctcgtgcgtgaggagcactggctcagctcacttcggctgcgccttcccctacatcagggcctcctcttcggctgcgaggaacctcgagccgctgagggcgatagccacgcaggcgccccctgccatgccacaatattcgagtggggagaagacaaagattggcatcaacgggtttgggcggattggcaggttggtcctgcgaattgcaaccagcagagatgatattgaagttgtggctgtgaatgaccctttcattgatgctaagtacatggcctatatgttcaagtatgattccactcatggcccgtttaaaggttctattcgtgtcgtggatgattcaaccctcgagatcaatgggaagaaggtcacaattacaagcaaaagagatcctgcagagattccatggggtaactttggggctgaatatgttgttgaatcttctggtgtcttcacgacgactgataaagcatcagcacacttaaagggtggtgcaaagaaagtggtgatatctgcaccatcagctgatgctcccatgtttgtagttggagttaatgagaatagctatgatccaaagatgaatgttgtttctaatgcaagttgcactaccaactgccttgctccacttgccaaggttgtccatgaggaatttggcatcgtggagggccttatgacaactgttcatgcaacaacagctacccagaagaccgtcgatggtccttcgatgaaggattggagaggaggacgtggtgctgcccaaaacataattcccagctccactggtgcagcaaaggctgttggaaaagtcctgcctgagctgaatggaaaactcactggtatggccttccgagttccaacaccaaatgtctctgttgtggatttgacatgccggattgagaaaagcgcctcctatgatgatgtgaaagcagccatcaagacggcatcagagggtgcactcaaaggtattcttggctacacagacgaggatgttgtttccaatgattttgttggtgattcaaggtcaagcatctttgatgccaaggctggtattggactgagctcttccttcatgaagctcgtgtcttggtatgacaacgagtggggctacagcaaccgggttctggatctgatcgctcacatggctcttgtgagcgccaagcactgatgttcgtactcgttcctccagtaccagtagtagcctagataagaggctgcagttttgacggccattttcttttagctgttgtttggaataaaagaccaaatgttggaacacttggaactcgcgcaaaactggaatccgattcatgacctgtgttttagttgtagagggggcaaatttgcatcgtactatatgcgggattgttgatcggatgtcgtatggttcattgacttgatttattatgatgcgtggagggctgatttggtgatcagtgatcacggctctctatgagagagaaatctct

SEQ ID NO: 127271 - DNA, 1185 bp, Zea Mays
aaaaagtctaatttacctcttcaactgtatattgtaatcgttcattcgatttgtctcctcaaactacaagaccattttttaccttcctttacttttaaagcctttattttttttacactttaggcgaatttgactgtagtttttttagaaaaaaaatccaaaagtcataaaaatagtattcaaaaaattatctaaataattttacatgaagaaactaaatttaaaataatttctaaaatcgacggtccgacgcgacgacgacgaccaccacaccccatgatctacaaatagctctatgtcccgcgtcagtctcagtcgtcactcaccactccaacgcatcagacatcccagtgggtctcgatcgatcagctgatagactagcgagccgtcgtagccatggcttcccgcacctcggcggcggcattgctcctccctcttcttgtcttggtgctcttcgccgcggccggtgcacgggctgacggcgccaccgaattctcgccgccgagagcgcgccgtactggccaggtgcccggtgatggagtagtccgggcggagaagaactgcccgttggttcgggtgccgagcatcgtggacgcctgccgcagtgcccccggcctccccgcctgcgcggcgcagtgcatcgtctaccactaccgcggcgggtactgcgacatgctgccccacggcaggcccggcgactgctactgcaccaactgcctagcgtagttatgccactatctaggacggccggccggccggcggcggagccgcctcgatgtctcgatccccgacagatgatatgatcggagctggcaaaccaccagggacaggaaaacaaaatacttattagtcgagtcatactatttgttatatgtctgcatttttagtgagctactactttggatccgccgtttcttcgtcaattcatggtgtcccttcttcctgatttctcattcatttcctaatattgttctttgatctacaagattctttattcggtgaaatgaattttctactatattaaatcatcagcttcaatggtcctcctacgtcacctttttacaaagaaccccttgtgtttcttcaaaatcaacccgcggtcctagatcatatctcatctatgtcctatttattcgcataacagcgttctagcagctgttgctctagcaacaaatcctgtccatt

SEQ ID NO: 127272 - DNA, 344 bp, Zea Mays
gtcatttctatttcgtgctgccagatttcagaagctggtattttacaagtagcaacagtgatgggatttgatgatgaactagatgtagcagatggcattggagaagctgatgtgattcttgcatcaagttttgaaatgaagcaaaatctctggattagtaatgctgccaagtaccacaagcttcccatatttgttgccaagatgattgtgcttgcattgacatacttctttttttatattgtaaatggcagactaatacgatggctcaaatagttaatgctatcagaatgcctcgcaagacgaacatggactgagacaatattttaaatatgaacacggaaatt

SEQ ID NO: 127273 - DNA, 942 bp, Zea Mays
atcccgcctcgtcttcggccgctcgcgctcttaatagcagcctcagattctactcggctctcaaacgccacttgttctccctccctctctgcctgaccagctaggatcagcggaagcagcaatggtgatggcgtcgtcgagcgggctgaggagctgcagcgccgtgggcgtgcccagcctgctggcgccgtcgtcccggtccggccgcctggcgccgttctgcgccaacgccaccacctctggccgcgtcaccatgtccgcggagtggatgcccggccagccacgccctgcccacctcgacggctcctctcccggggacttcggcttcgatccgctgggcctcgcgaccgtgccggagaacttcgagcggttcaaggagtcagaggtgtaccactgccgctgggccatgcttgccgtccccgggatcctggtgccggaagctctgggcctgggcaactgggtgaaggcgcaggagtgggcggccgtccccggcgggcaggccacgtacctgggcgccccggtgccgtggggcacgctgccgaccatcctggtgatcgagttcgtggccatcgccttcgccgagcaccagcgcaccatggagaaggaccccgagaagaagaagtaccccggcggcgccttcgacccgctcggcttctccaaggaccccgccaagttcgaggagtacaagctcaaggagatcaagaacggccgcctcgccatgctggccttcgtcggcttctgcgtccagcagtcggcgtaccccggcaccggcccgctggagaacctcgcctcccacctcgccgacccgtggcacaacaacatcggcgacatcatcatccccagatcaatctccccttgagctcagctcagctgctggttgctgtttcctgtgtacgactaggccctgcctgtacaacgagcgacgacggtgacttcccgccc

SEQ ID NO: 127274 - DNA, 1216 bp, Zea Mays
atcccgcctcgtcttcggccgctcgcgctcttaatagcagcctcagattctactcggctctcaaacgccacttgttctccctccctctctgcctgaccagctaggatcagcggaagcagcaatggtgatggcgtcgtcgagcgggctgaggagctgcagcgccgtgggcgtgcccagcctgctggcgccgtcgtcccggtccggccgcctggcgccgttctgcgccaacgccaccacctctggccgcgtcaccatgtccgcggagtggatgcccggccagccacgccctgcccacctcgacggctcctctcccggggacttcggcttcgatccgctgggcctcgcgaccgtgccggagaacttcgagcggttcaaggagtcagaggtgtaccactgccgctgggccatgcttgccgtccccgggatcctggtgccggaagctctgggcctgggcaactgggtgaaggcgcaggagtgggcggccgtccccggcgggcaggccacgtacctgggcgccccggtgccgtggggcacgctgccgaccatcctggtgatcgagttcgtggccatcgccttcgccgagcaccagcgcaccatggagaaggaccccgagaagaagaagtaccccggcggcgccttcgacccgctcggcttctccaaggaccccgccaagttcgaggagtacaagctcaaggagatcaagaacggccgcctcgccatgctggccttcgtcggcttctgcgtccagcagtcggcgtaccccggcaccggcccgctggagaacctcgcctcccacctcgccgacccgtggcacaacaacatcggcgacatcatcatccccagatcaatctccccttgagctcagctcagctgctggttgctgtttcctgtgtacgactaggccctgcctgtacaacgagcgacgacggtgacttcccgcccggaaattaaaccctcgtaatgtaaagcttatgttattaagtagcggctactcttgtagtcttgtctgtatcaaatataaactggtttgttagctgaatcccaaggttatttctgagcctaaccaggggaaatttagctcaaaacggagaaaatacatacgagacctttgataactacaaagtattgtatttcatgagctagacacgatgtttttttttaagattcacgagggagagcctctactgagattttattagaaatgacaaaagaaaat

SEQ ID NO: 127275 - DNA, 1166 bp, Zea Mays
aaacgccacttgttctccctccctctctgcctgaccagctaggatcagcggaagcagcaatggtgatggcgtcgtcgagcgggctgaggagctgcagcgccgtgggcgtgcccagcctgctggcgccgtcgtcccggtccggccgcctggcgccgttctgcgccaacgccaccacctctggccgcgtcaccatgtccgcggagtggatgcccggccagccacgccctgcccacctcgacggctcctctcccgggtaagcaagcagaagcaggctagctagcgactgatcgagtgacaacggcgtgctctgctctccctgtctctctgacgagtgttgacatacagggacttcggcttcgatccgctgggcctcgcgaccgtgccggagaacttcgagcggttcaaggagtcagaggtgtaccactgccgctgggccatgcttgccgtccccgggatcctggtgccggaagctctgggcctgggcaactgggtgaaggcgcaggagtgggcggccgtccccggcgggcaggccacgtacctgggcgccccggtgccgtggggcacgctgccgaccatcctggtgatcgagttcgtggccatcgccttcgccgagcaccagcgcaccatggagaaggaccccgagaagaagaagtaccccggcggcgccttcgacccgctcggcttctccaaggaccccgccaagttcgaggagtacaagctcaaggagatcaagaacggccgcctcgccatgctggccttcgtcggcttctgcgtccagcagtcggcgtaccccggcaccggcccgctggagaacctcgcctcccacctcgccgacccgtggcacaacaacatcggcgacatcatcatccccagatcaatctccccttgagctcagctcagctgctggttgctgtttcctgtgtacgactaggccctgcctgtacaacgagcgacgacggtgacttcccgcccggaaattaaaccctcgtaatgtaaagcttatgttattaagtagcggctactcttgtagtcttgtctgtatcaaatataaactggtttgttagctgaatcccaaggttatttctgagcctaaccaggggaaatttagctcaaaacggagaaaatacatacgagacctttgataactacaaagtattgtatttcat

SEQ ID NO: 127276 - DNA, 744 bp, Zea Mays
atgccatcacgacgaccgtcctcgtcgtcgccgtctcctttgcctctgtcagcgggcacggcggcggtccaggtcccaggcggcgccgcgagctgcctccccgcggaccagtcctgcctcacggtctcggtctccgtcggtgcgccctactcctcgcgtcgtcgtcacgacactgccaccgacgccgctgtgggcacgacacacgcttgctgcaccgcagcctcctacatcaccgtcctcggcatcagcttcggctccctgctcgccatcctgctcgtcatgtgcgccatccggtggtacctcgtgcggcggtccgcgagccgggacgctaccgccgcggcggaactagagaagaagcggtccaaggggctgggcgccgacgccatcgccgcgctgccagagttcgtgtaccagaaggagaaggatgccaacgacggggaggaggaggaggagcgggagctcgagtgcgcagtgtgcctgggtgcaatggtgcacggagacgcggcgctacggctgcccccgtgcatgcatgtcttccaccggggctgcgtcgacgtgtggctaagggagcactcgacgtgcccagtctgccgcgccgaggtggtcgtcagaccggcggccagcgagggctgtggccagaagggccaggaaggcggcccgtcgcgcgcgtccatgtcgatggcatggacatcacagggaaggctggtagacgacgcggagagggacctagaggcgcagctgtag

SEQ ID NO: 127277 - DNA, 1337 bp, Zea Mays
ctctctctcccctcacagcgaagtcgtcgtctcctcccactcgatgccgcaacctcgtgagggcaagtgcacaggttccatgcccacgcccccgtcaatcacgcgatttccttgccgtgaatgtcgtccaatctctcctcgccgtcggcgttgcgcacccccacgctctcatccactccacgactcgcctgtcctccaagtaagtgggcacgtggcggatccggtgcagccgaccctgggaggagcgcatcgcggcctccacgccctcatccactcctacacgtgccggaggtggcgctggccaagttgtcggatgacgaggaaaacgacgacgcctactactacggcgccggtgacacgtcgtgttccacactgatgacttcgagcacggcggcgttgtctactcgctcctgttccttcttttcctcctgctctgctggtgcgtgcccgtggtcggctacaacatgaacttggcctctgtcggccagggtgcctccgacaagcagttcggcacgctgtcgcggtggcggttcaaggagcccgacgtggcaacgaatcgagagcgcgatgaccaggtgagtaaattaaattagattcgtctctccatcgtcgatgagtgccacgacctcgaggtccagctctctcctcctcattcccgcctgtccccagaagcagtcgcgtgcttcgcggtgcctcactctgctgctacaccatcgccgccgccgcggtggctgagcagagccgcatcaaggcgcagaaccccatcatcgagatggacggtatgtcggcctcccacctctcttcccttccattttgtgtgggtgtagacgtgtggatgagcctcccgccactcttctcttttgtcctgcgtgggcatatgcgtgtggatgagctgatgactggactgctatggctgttttgttttcagaggatgagatgacagggtcatctagaagatgataaaggataaggtctatggattttataattgttttctggtggttttgatccatagtaacctctaatctgatcacttgatggtttgctgatgcgagtgggacataatgggattgaaatgtgtgtagctcatcttcccatacctggagttggatgtgaagtattacgaccttagcaacaagggcaagtcttcactatgcaaacatgtacttgtacttcgggatagtgctattgtttccctgttgtttttttacttcagctacaatgtctccttcagtccaaaacaagctggctagcatgctacatattatttgattttgcaagttgtatgatctaagaccctcgagctttgaatttgccctgaatatttactttctagc

SEQ ID NO: 127278 - DNA, 666 bp, Zea Mays
gaccagatgcccagttgcccaccacggcgtccagtcatgtccagcaccaccgccgctgctttccgcctgggccagcgcgtgcacgccgccggcgacccccgccgcctaggcacggtgcgctacctgggccccgtagagggccacggcggagtctgggtcggcgtcgactgggatgatggcgctggcggccggcacgatggctcgctcgccggccgccgatactttgttgccgtgggagagtgctcggccaccttcgcgcgccccacggcgctcagcggagggatctcgctcccggacgcgctccgcctacgttaccgcgttcaggacttcaccaaggaggaacaggatgagatgtatgtcttctcgacaagccagaagcgggtctcggttgaatttgttggcacagacaaagttcaggagaagctcaacaacttcaatgagttggccagtgcatccgtttcttacatgggagtgagctcaattggagcgcccaatgaactaaacagtttggttccaaatctcaaacttcttgacttaactggaaatctgttctcacagtggcaagtaagaattcccacagaatggttcttgttacttcaattgctatacttagtcacttacaattggtgtgactttatataacatcaaagcaacaagagaaagtct

SEQ ID NO: 127279 - DNA, 1794 bp, Zea Mays
gaccagatgcccagttgcccaccacggcgtccagtcatgtccagcaccaccgccgctgctttccgcctgggccagcgcgtgcacgccgccggcgacccccgccgcctaggcacggtgcgctacctgggccccgtagagggccacggcggagtctgggtcggcgtcgactgggatgatggcgctggcggccggcacgatggctcgctcgccggccgccgatactttgttgccgtgggagagtgctcggccaccttcgcgcgccccacggcgctcagcggagggatctcgctcccggacgcgctccgcctacgttaccgcgttcaggacttcaccaaggaggaacaggatgagatgtatgtcttctcgacaagccagaagcgggtctcggttgaatttgttggcacagacaaagttcaggagaagctcaacaacttcaatgagttggccagtgcatccgtttcttacatgggagtgagctcaattggagcgcccaatgaactaaacagtttggttccaaatctcaaacttcttgacttaactggaaatctgttctcacagtggcaaaccctagatggaaagttcgtacaaggtttcaacacactgcggctcctaaatctagaagataatcatattgattcatgggatgaaattgtgaaactttcttacttaagaagtttggaacaactccatttgaacaaaaacaggttaaagcatgtgaaatatccatctaatctttcaccagatggacctattgatgatgcagctgctgtgccatttgaaaatttgcaagttcttttgttaggatctaatgacatagatgacttttcttcagtggattcacttaacctgttcccaagtttaagggatgtcaggctttctgacaatcctgtagctgatcctgccaagggtggtgctcctcgttttgtgcttgttgctcgacttggaaaagttggaatactaaatggcagtgagataagtccacgtgaacggagggaatctgaaatacgatatgtccgccttgttatgggaaaaatagaatcaaatgaccaagaagagatcagacggcttcaccctagattcgctgaactgaagtcctttcatggtattgaagatgagaagccaacttcaagcatatcagggccacagaagatggcttctggccttataagtattacgttgaaatgtgtgggtccatcaatgggtgagaagcaaccactgacaaagaaactgcctgcgacaacaactgtcgggaagttaaaatctttgtgcgaaagcttcttcaaactgaaggacataaaagtgaaactgttcgtcgaagaagagggatgccctctaccacaaccagtggaggaggacacggcctctctgatggagcttggaattggctcgggcgcaaccattgttgtggacgaagagagctagccagtcgtctttagagaagggccaactgtatggcgcaaactgacgcttcagctgttattaagttttcgaagagaagatagctgatgacgctcttcgttgcccttatatacttctttctgtgggaatatgcacgtgatgaatattggtgcgggtttgggcttcaaaatggactagcatagtaaaaacattgtgaggacggttgtttggttgggagaagttttctttttttattttcgtcaacgcaacgaactacgtcaaatttttttttgattactgtggtgtgtcgctgacgttttccacaactgaaaccactctgtcattgtgccacagataatttttctttttatttaataagcaaaagaaattagggcc

SEQ ID NO: 127280 - DNA, 2028 bp, Zea Mays
gaccagatgcccagttgcccaccacggcgtccagtcatgtccagcaccaccgccgctgctttccgcctgggccagcgcgtgcacgccgccggcgacccccgccgcctaggcacggtgcgctacctgggccccgtagagggccacggcggagtctgggtcggcgtcgactgggatgatggcgctggcggccggcacgatggctcgctcgccggccgccgatactttgttgccgtgggagagtgctcggccaccttcgcgcgccccacggcgctcagcggagggatctcgctcccggacgcgctccgcctacgttaccgcgttcaggacttcaccaaggaggaacaggatgagatgtatgtcttctcgacaagccagaagcgggtctcggttgaatttgttggcacagacaaagttcaggagaagctcaacaacttcaatgagttggccagtgcatccgtttcttacatgggagtgagctcaattggagcgcccaatgaactaaacagtttggttccaaatctcaaacttcttgacttaactggaaatctgttctcacagtggcaagatatattctctctttgtcaagcactggcatccctggaagttcttaatttgacaaataataccatggagaatgatgttgtagaaactccaatgctcgagaatatccgaattcttgttctcaataactgtggtgtaacatgggaactggttgaaaagattaaagtttccttttcatgtatcagtgaactccacctgatgtcaaacaggcttaatatgatcatgaccctagatggaaagttcgtacaaggtttcaacacactgcggctcctaaatctagaagataatcatattgattcatgggatgaaattgtgaaactttcttacttaagaagtttggaacaactccatttgaacaaaaacaggttaaagcatgtgaaatatccatctaatctttcaccagatggacctattgatgatgcagctgctgtgccatttgaaaatttgcaagttcttttgttaggatctaatgacatagatgacttttcttcagtggattcacttaacctgttcccaagtttaagggatgtcaggctttctgacaatcctgtagctgatcctgccaagggtggtgctcctcgttttgtgcttgttgctcgacttggaaaagttggaatactaaatggcagtgagataagtccacgtgaacggagggaatctgaaatacgatatgtccgccttgttatgggaaaaatagaatcaaatgaccaagaagagatcagacggcttcaccctagattcgctgaactgaagtcctttcatggtattgaagatgagaagccaacttcaagcatatcagggccacagaagatggcttctggccttataagtattacgttgaaatgtgtgggtccatcaatgggtgagaagcaaccactgacaaagaaactgcctgcgacaacaactgtcgggaagttaaaatctttgtgcgaaagcttcttcaaactgaaggacataaaagtgaaactgttcgtcgaagaagagggatgccctctaccacaaccagtggaggaggacacggcctctctgatggagcttggaattggctcgggcgcaaccattgttgtggacgaagagagctagccagtcgtctttagagaagggccaactgtatggcgcaaactgacgcttcagctgttattaagttttcgaagagaagatagctgatgacgctcttcgttgcccttatatacttctttctgtgggaatatgcacgtgatgaatattggtgcgggtttgggcttcaaaatggactagcatagtaaaaacattgtgaggacggttgtttggttgggagaagttttctttttttattttcgtcaacgcaacgaactacgtcaaatttttttttgattactgtggtgtgtcgctgacgttttccacaactgaaaccactctgtcattgtgccacagataatttttctttttatttaataagcaaaagaaattagggcctccttccataca

SEQ ID NO: 127281 - DNA, 480 bp, Zea Mays
atgcgtcccgtgccccatggcacaggatcccgccgcgccgtgccgacgggacggacgtgtattgtgatggatcctccgtcggaaccagcagacattgaatcaggagttggtgatgttacgacacctgaacgaggcagaccaaccatggtacgtggttctatgacggcaggtcgtcgtggcgcaggatttacactggcagggcgtagtgccggtcgtggcactagttctgtgaaacgtggtgtgatacgcggtagtaggagtgccggaaggatcattcgtggtggccgaagtgttggtattgacatcgatttaaatgctcaaggtcgggaagatgatgaaccaattgaagttgaagctgaaattactgcaaataattcggcatataggagttggggcctcttggggggtttgatgtatagtagttggatcgaggattatgagtttaaggaaaagagatacgaagagttttataagagatga

SEQ ID NO: 127282 - DNA, 1691 bp, Zea Mays
ccggcccgccggccggcgaatggtcgcaagcacgcacggtggcgcgcgccgaaaacgtacaaacgcacgtgtcgtagaggtctccgtcgcccgatccgccgccgcgacgaccccgatccactcgccgccgtggctgtgcccctccaaaccacacagctctaagctaggcatgaaggcatctactagtatttcttttttccgcgaccgcgaggggattaggagaaagtaaaaaaaaaaaaaccgcgacaacatccaaattcacggcgcgcgccgcgccatccccgcagctcgtctcctgtgtgccccggcccagcgaccggtcccacttccacgagcgggccccggcccccggcgtccggtccgggaggagggacgcttcgtggaaacctgcacgagccatcgaccttccagaagacgacttggcgccgtgcgtcgcgcatccgacggcccggcgaccctcccaagcgcccccggtttgactcgtcgccgggggtggcaactataagtacctgccctccccgtccgtccaaagaactctaactcctctaccagccggcgcacgccgacgccgacgccgacgggcacagtactagcgaccgagctgcgagcgacgccagggcatgggtgacactggcgcgaacatggcccactggggcgggctctacggccggggcggcggcggcggggttgtcgcgccggcgacgacggagacggtgacgacggcaggaggcggcgggtcggtgtcgagcccgacgtcgggcgggtcgggcggcagcccgagccgcgcgcagctgcagcccggggtcggggtggagggcgggcgcgtgggcaagcccgcgcggcggcggtcgcgcgcgtcccgccgcgcgcccgtcacgctgctcaacaccgacacctccaacttccgcgccatggtgcagcagttcaccggcgtcccgcccgggccctacggccccggccccggcggcggcggggggcccgtcatcagcttcggcgccgagtacggcggcgcgcagctggtgcgcccgtcgccgacgtccgccgtcatgtcgttcgacccccagcaccaccaccaccggccgacggcggcgtcgtcgctgcagagccagctgttcaggccgcagcagcagcagcagtacggtgccgacgtcggcggctacggcgtgcacggcatggccatggcggcgccgtcctccttcctgcacggcgggttcgaggcctcgtcggaggaccggctgctgctgcagagcatgatgcaggcctcgacgatgcccaccggccacccgccccccactaacaacggcaatggataccacttcggctagctgatcgatccaccggtttgatccccaccgcacaaccgaggtaattaatataataagcggggagctagatcagggatccatggaacgaagaagccgtcgtcgatgaccacgagctgatgatgacgcgtgttctagcttgttgctgctgcttaagcagctaagcattttttttgttatgttttttttgctggcctcgcagaaggctagctaattacgagtaagtaactaagtatagttagtagtggtagtgttatcttgctgctttaactagaaaaggagttaagctaggtcgatgtaaatagttccctttcctttttttctttttctttttgaaaaaatatcaatcaagaagtttaattttggggc

SEQ ID NO: 127283 - DNA, 819 bp, Zea Mays
ttccctcagctcggtggaggccctcaagtcctacgcgctccgttcccctttccctttccgaagcttctcgaccccccatcccctccctgacatggccgacaacgcgaaggccgcggcggcgcatgcgaggccggagtcgtcgcaggaggaggaggaggactggaaggaggccgagggggacgtcgccgaagtcgaccgcgccgccaccaatggcgccggcgaggggggcgtgcccacagacaggccgatccgggtctacgccgacggcatctacgacctcttccacttcggccatgccaagtcgctggagcaggccaagaagtcgtgagaacaccgcccccaccctcctcctccgcctattgggcctgccgtctccggccgaattgaactgccccacgatctgcccctcgcgctggcgtggggggccgggcgctgttgcgtgctagcgtgcaatggtcgctttagcagcgtttgcggtggcgtctggatcgcgctccatcagacggttcggtgcgagattggcgctgagttgtttctccccacgtcttccctttgtggcatttttgtgatgagttgtcccacgcgtctagcagttcgggaatgtttttctatgagtaaattaccccgtgtgatgatttttgtgtacatattgatgtgagttgattgaaatccccatttagtgttgtctgcggcttgcttgatgtgcgatattgctttaggcgtccatcctttttagacaattagacgggttgtttggtgaggactgcaggtccattcttagtactgctacctaatatgatatgactggatcgtttagtt

SEQ ID NO: 127284 - DNA, 1548 bp, Zea Mays
ttccctcagctcggtggaggccctcaagtcctacgcgctccgttcccctttccctttccgaagcttctcgaccccccatcccctccctgacatggccgacaacgcgaaggccgcggcggcgcatgcgaggccggagtcgtcgcaggaggaggaggaggactggaaggaggccgagggggacgtcgccgaagtcgaccgcgccgccaccaatggcgccggcgaggggggcgtgcccacagacaggccgatccgggtctacgccgacggcatctacgacctcttccacttcggccatgccaagtcgctggagcaggccaagaagtcgtttccaaacacatatcttcttgttggatgctgcaatgatgagttgacacataaattcaaaggaagaactgttatgactgaggatgagcgatatgagtcacttcgtcattgcaagtgggttgatgaagtcattccagatgctccatgggtggtgacagaagagttcttggataagcataacattgattttgttgctcatgattctctgccgtatgctgatgctagtggagctggtaacgatgtttatgaacatgtaaaaaagcttggtaagtttaaggagactcagcgcactgatgggatatcaacatcggacattataatgcggattgttaaagattataatgagtatgttatgcggaatctggccaggggctacactagaaaggatcttggtgttagttatgtcaaggaaaaacgactgcgagtgaacatgggacttaaaaacctgcgtgacagagtgaaacagcaccaagaaaaagtaggggagaagtggagcacggttgcaaaactccaggaagagtgggtggaaaatgcagaccgctgggtggctggtttcttagagaagtttgaggaagggtgccactcaatggggacagccatcaaggagaggatccaggagaggctcatcaaggcacaatccagcgactttggcagcctcctacagtacgacagctacgattctgatgaagccaaagaaaacgacgaggacgaagacgaagatgaactctttgaagacgtcaaggaatagcacctccgtacatatacaatggttttgtagctgcaaattgtgttgtgagtcagttgcctctctctggttggtgatctttatatatggtctcaaaggtaggtcaggttgcaatgtttgtagctgctcttggtgtttgttcaggcaacgcatggttgtaaaagctgtggaaagactcttgtgcagtcaaggatacagattccgatggttacctttgggttagaacatatacggctgtaaaattggaagtcgaggtggttaaaactctgatatcttgtctgttttctttcccctgacgtgcgtgttgcatttagcatctcagcggagctcctggtgtgtagtctgtggaggtcaccgcgtctgccatcgaggtcgcgagagcaggattctcagccgtttccagcacgaggaatgttttggaattattcttgtgttgattgttgattgaagtaatgaacaaataaaagcgtcttggattc

SEQ ID NO: 127285 - DNA, 1386 bp, Zea Mays
ttccctcagctcggtggaggccctcaagtcctacgcgctccgttcccctttccctttccgaagcttctcgaccccccatcccctccctgacatggccgacaacgcgaaggccgcggcggcgcatgcgaggccggagtcgtcgcaggaggaggaggaggactggaaggaggccgagggggacgtcgccgaagtcgaccgcgccgccaccaatggcgccggcgaggggggcgtgcccacagacaggccgatccgggtctacgccgacggcatctacgacctcttccacttcggccatgccaagtcgctggagcaggccaagaagtcgtttccaaacacatatcttcttgttggatgctgcaatgatgagttgacacataaattcaaaggaagaactgttatgactgaggatgagcgatatgagtcacttcgtcattgcaagtgggttgatgaagtcattccagatgctccatgggtggtgacagaagagttcttggataagcataacattgattttgttgctcatgattctctgccgtatgctgatgctagtggagctggtaacgatgtttatgaacatgtaaaaaagcttggtaagtttaaggagactcagcgcactgatgggatatcaacatcggacattataatgcggattgttaaagattataatgagtatgttatgcggaatctggccaggggctacactagaaaggatcttggtgttagttatgtcaaggaaaaacgactgcgagtgaacatgggacttaaaaacctgcgtgacagagtgaaacagcaccaagaaaaagtaggggagaagtggagcacggttgcaaaactccaggaagagtgggtggaaaatgcagaccgctgggtggctggtttcttagagaagtttgaggaagggtgccactcaatggggacagccatcaaggagaggatccaggagaggctcatcaaggcacaatccagcgactttggcagcctcctacagtacgacagctacgattctgatgaagccaaagaaaacgacgaggacgaagacgaagatgaactctttgaagacgtcaaggaatagcacctccgtacatatacaatggttttgtagctgcaaattgtgttgtgagtcagttgcctctctctggttggtgatctttatatatggtctcaaaggtaggtcaggttgcaatgtttgtagctgctcttggtgtttgttcaggcaacgcatggttgtaaaagctgtggaaagactcttgtgcagtcaaggatacagattccgatggttacctttgggttagaacatatacggctgtaaaattggaagtcgaggtggttaaaactctgatatcttgtctgttttctttcaaaaaaggagaagaaaacaaattataa

SEQ ID NO: 127286 - DNA, 300 bp, Zea Mays
atggacgagcaggggatggagacgaccgtgggagagagagagctcggccatcatggaggtgggggctggacgaccatgggacacgctggaggaaacgccggccatggaagagggcaggagagagcgccggcagaggagggagatgagggagagagaggagcgcgcgtgagggagccgctcggctgggcgcgcgcagggagcagagttgagggcgagcggtgtccagcagcttggagaagatgggcgatgggagatcgatgccggcgaggtgaagtacagggcgccaaccgcatgagctga

SEQ ID NO: 127287 - DNA, 1557 bp, Zea Mays
atccacctgcaagcaagagactctgcagccatctgggcgaaaactcaagcacgcggcgatgctgcgccttcgcgcttgcggcggcacggcaccggcatcggtgcccgcgctcgtcaggtcccgcctctccaggagatcctcctccgcagcctacgccgccgctaccgtcgcttccgcttcctcctcttcgtccaccctggaagacctcgccgccgagcacagaggtttggcaaaggtcattttaaagaaggggaagacccaaatattccgagatgggagcccaatggtgtatagcggtgctgttaataggataatcggtcgacctcctccgaaatctggcgatattgttctagtagctgatggaacagagaaacctattggatggggtctctataactctgtgtctatgttttgtgttcggttgatgcagctagaagaagaggcaagaagagatcccacatgcgcacttaatatggaaagactgcttgaagcaaggatttcatccgctgttggtttgcggcacagtttgggtctcccttcagctgacacaaatgcttatcgcctcatcaacagtgaaggagacagattgtctggtctaatagtggacatctttgctgatgttgctgtcattgcttcatctgctgcttgggttgagaaatataggcaagaaatacaatttcttgttagcaaagttaatggcgtcagccatataaagtggaggccatcgacagatattttgaaagaagaaggattggatatatcagagcataaggagcctgcttcaacatgctcaactgtcaaggtcatggagaatggcattgtctacttagtctcattagagggtcagaagacagggttttatgcagatcaacgggaaaaccgctatatcatatcattactttcaaaggatcaaagagtccttgacctttgctgctacagtggcggctttgctcttaacgcagctaagggtggcgctgataatgtcattggcattgattcatcaggatcagcactagaccttgccaatgagaatattgttctcaatgagctaaaccaaggaaaagtctcatttgtaaaaggagatgcaactacattcatgaaaggagctatctcagaaaatgagctatgggacttggtaatccttgaccctccaaagttggcgccacgaaagaagaccttgtgttggcggcttccaaatatctggggtctatgaaagtaataactggggcaagccttacccctgcattttgtagagaggatgcatcaaacccaggacctttggctcagtgaaaaagcttctcaccactacgccaggcctgcccttcgcatttatgtcgtgccaatccaacagaattccctattttatttccccaaaaagtcccgtttctttcagtttttggaatgagatatttacgaaatccccatgaatagaataaaaccttgttttcatgctatttccataagattcctcttaaacatgccatgagctgcagccaatcctttgtcccaatttcaggcagctggtacatatttactcacactaatattatctaatca

SEQ ID NO: 127288 - DNA, 475 bp, Zea Mays
atctgggcgaaaactcaagcacgcggcgatgctgcgccttcgcgcttgcggcggcacggcaccggcatcggtgcccgcgctcgtcaggtcccgcctctccaggagatcctcctccgcagcctacgccgccgctaccgtcgcttccgcttcctcctcttcgtccaccctggaagacctcgccgccgagcacagaggtttggcaaaggtcattttaaagaaggggaagacccaaatattccgagatgggagcccaatggtgtatagcggtgctgttaataggataatcggtcgacctcctccgaaatctggcgatattgttctagtagctgatggaacagagaaacctattggatggggtctctataactctgtgtctatgttttgtgttcggttgatgcagctagaagaagaggcaagaaggtgacataggtaccagtttttacaatcacctacattttagcagctcaagctgaca

SEQ ID NO: 127289 - DNA, 691 bp, Zea Mays
tcgtatgtatagaagcttgaacgcacttgcatgcaagtggtgaagccaggggggttactcatgacatgctcttgttctggagctatgacccaaagtggcatgttcctcaaaaccattcagggtgccgcatcaatggctggccgtaaggttacggtcttacgtcaagctggggcagcatgtgatcaccctatcgaccccgcataccctgagggccagtatctcagcaattacttgctgcgtgtggcatgaaagttatgagttcaaagcagaggcaagtttgtagttgttgcagcgcgcctgacaaaccttcgacgactgatcacttctgaagagctcaagttcatctcataccttagtcatgtaggttagatttaattcttttaaagaagaagagcaaagcatcgaaactgacattaacttctgattatacaattttggagaacataaagctatctgtttcagtttaatgtacaatctgtgcaaggatggatccaaagttgtcgcacgtatacacatgcctactctgtatgtattctacaccaatgctcatgaataaaaattcgatgtggtacaagatacatctgaaccataaatgaatttgttgtccgtgtaaacatttaacttcaaaaccatatcagcgacctaaagtgggtctgttccatgacaagtagttgttatctcccattttcct

SEQ ID NO: 127290 - DNA, 2091 bp, Zea Mays
cgggaaacgtcaaaaaagtcactcgcgactcgcgagttggaactctggcgtccgccatcggcccatcgccactcgtcgtcttcctcgctcgcacacccgtcccatccagtttttaaatggcgacggcgatgatgactatgcgacgcgcggcggcgctcggcgcccgacacatcccgcccgccgccgccttctcccgccacatgagtgcggacgcgagcgccgcgatggagaagatccgcgccgcgggtctgctcaagacgcaggggctcatcgccggacagtgggtcgacgcatacgatggcaagaccatcgaggtgcaaaatccagcaactggtgaggtccttgcaaacgtgtcctttatgggcagcagagaaacatctgatgctattgcttctgctcacagtacattctattcttggagtaaactcactgcaagtgagagaggcaaggcactaagaaaatggtacgatctaattatttcacacaaggaagagcttgcacttctcatgacactggagcaggggaaacctatgaaagaagcccttggtgaggtcaattatggtgcaagtttcatagaatattttgcagaggaagcaaagcgcatatatggtgatataattcctccaactttatctgatcgtagattgttggttctgaagcagcctgttggggtagttggagctattacaccatggaattttccattagcaatgataacccgaaaggttggaccagctttggcctgtggctgcactgttgttgtcaagccatcagagttcacacctctgacatcattagctgcagcagatcttgctcttcaagctggaataccagcgggtgcactaaatgttgtgatgggcaatgctcctgagataggtgatgcattactgcagagtacacaggtcagaaagattacgttcactggatcaacagctgttggcaaaaaactgatggctgaatctgcaaatactgtgaaaaaggtctctttggaacttggtgggaatgcaccttgcattgtttttgatgatgcagacattgatgttgctgttaaaggcagtcttgctgccaagttccgtaacagtggacagacatgtgtttgtgcaaacaggatattggtgcaagaaggtatctacgagaagtttgcatctgcattcatcaaggctgttcagagtttgaaggttgggaatgggctagaagagagtacatctcagggtcctctgattaacgaagctgctgttcaaaaggtggagaagttcataaatgacgcgacttcaaagggagcaaatgtcatgctaggtggtaaaagacacagcctggggatgtcattttatgagccaactgtagtagggaatgtcagcaatgatatgcttcttttcagagaagaagtttttggtccagttgcaccccttataccattcaaaactgaggaagaagcagtccatatggccaacgatacaaacgcaggcttagctgcatacatatttaccaagagcatacctcgttcatggcgtgtatccgaatctcttgaatacggcttagttggggtaaacgaggggattatttcaacagaggtggcaccatttggcggagtaaagcagtctggtcttgggagagaaggatcgaagtacggcgtcgacgaatacttggagctcaagtacatctgcatgggcaacttgggttgagtcatgaaatcggcctcaggctagaaacgcatggaagagatgatgaaccgagagaccaagaaggcaggcgtctagctacaagaccggaggaacatggctgaaaggggccggccactggttgtgggggagcagttttcgaataaagcgaataagccgcggaacatgaacaaaagaagccgaaatgagttgtaaatgacgtgaactataaagtatggcttcgcctccggacttttgtatacgtaatcatggcactacttgtctatagtgtctccaaagacgtccatgttacagaataaaagcgtatagggtggatgctacgttacaggctgtcggtggtatgtacacctcgcctgattcctgacgaaataaagctggatactgcattcttgcggctcttgcctgcaggggt

SEQ ID NO: 127291 - DNA, 2027 bp, Zea Mays
cgggaaacgtcaaaaaagtcactcgcgactcgcgagttggaactctggcgtccgccatcggcccatcgccactcgtcgtcttcctcgctcgcacacccgtcccatccagtttttaaatggcgacggcgatgatgactatgcgacgcgcggcggcgctcggcgcccgacacatcccgcccgccgccgccttctcccgccacatgagtgcggacgcgagcgccgcgatggagaagatccgcgccgcgggtctgctcaaaatccagcaactggtgaggtccttgcaaacgtgtcctttatgggcagcagagaaacatctgatgctattgcttctgctcacagtacattctattcttggagtaaactcactgcaagtgagagaggcaaggcactaagaaaatggtacgatctaattatttcacacaaggaagagcttgcacttctcatgacactggagcaggggaaacctatgaaagaagcccttggtgaggtcaattatggtgcaagtttcatagaatattttgcagaggaagcaaagcgcatatatggtgatataattcctccaactttatctgatcgtagattgttggttctgaagcagcctgttggggtagttggagctattacaccatggaattttccattagcaatgataacccgaaaggttggaccagctttggcctgtggctgcactgttgttgtcaagccatcagagttcacacctctgacatcattagctgcagcagatcttgctcttcaagctggaataccagcgggtgcactaaatgttgtgatgggcaatgctcctgagataggtgatgcattactgcagagtacacaggtcagaaagattacgttcactggatcaacagctgttggcaaaaaactgatggctgaatctgcaaatactgtgaaaaaggtctctttggaacttggtgggaatgcaccttgcattgtttttgatgatgcagacattgatgttgctgttaaaggcagtcttgctgccaagttccgtaacagtggacagacatgtgtttgtgcaaacaggatattggtgcaagaaggtatctacgagaagtttgcatctgcattcatcaaggctgttcagagtttgaaggttgggaatgggctagaagagagtacatctcagggtcctctgattaacgaagctgctgttcaaaaggtggagaagttcataaatgacgcgacttcaaagggagcaaatgtcatgctaggtggtaaaagacacagcctggggatgtcattttatgagccaactgtagtagggaatgtcagcaatgatatgcttcttttcagagaagaagtttttggtccagttgcaccccttataccattcaaaactgaggaagaagcagtccatatggccaacgatacaaacgcaggcttagctgcatacatatttaccaagagcatacctcgttcatggcgtgtatccgaatctcttgaatacggcttagttggggtaaacgaggggattatttcaacagaggtggcaccatttggcggagtaaagcagtctggtcttgggagagaaggatcgaagtacggcgtcgacgaatacttggagctcaagtacatctgcatgggcaacttgggttgagtcatgaaatcggcctcaggctagaaacgcatggaagagatgatgaaccgagagaccaagaaggcaggcgtctagctacaagaccggaggaacatggctgaaaggggccggccactggttgtgggggagcagttttcgaataaagcgaataagccgcggaacatgaacaaaagaagccgaaatgagttgtaaatgacgtgaactataaagtatggcttcgcctccggacttttgtatacgtaatcatggcactacttgtctatagtgtctccaaagacgtccatgttacagaataaaagcgtatagggtggatgctacgttacaggctgtcggtggtatgtacacctcgcctgattcctgacgaaataaagctggatactgcattcttgcggctcttgcctgcaggggt

SEQ ID NO: 127292 - DNA, 1982 bp, Zea Mays
acacccctctgccctcgcactccggcgcgtcactgtgcggtgccttcgtccgctttgttgggtgcggttttgatataatttgggtctgcagatgagtgcggacgcgagcgccgcgatggagaagatccgcgccgcgggtctgctcaagacgcaggggctcatcgccggacagtgggtcgacgcatacgatggcaagaccatcgaggtgcaaaatccagcaactggtgaggtccttgcaaacgtgtcctttatgggcagcagagaaacatctgatgctattgcttctgctcacagtacattctattcttggagtaaactcactgcaagtgagagaggcaaggcactaagaaaatggtacgatctaattatttcacacaaggaagagcttgcacttctcatgacactggagcaggggaaacctatgaaagaagcccttggtgaggtcaattatggtgcaagtttcatagaatattttgcagaggaagcaaagcgcatatatggtgatataattcctccaactttatctgatcgtagattgttggttctgaagcagcctgttggggtagttggagctattacaccatggaattttccattagcaatgataacccgaaaggttggaccagctttggcctgtggctgcactgttgttgtcaagccatcagagttcacacctctgacatcattagctgcagcagatcttgctcttcaagctggaataccagcgggtgcactaaatgttgtgatgggcaatgctcctgagataggtgatgcattactgcagagtacacaggtcagaaagattacgttcactggatcaacagctgttggcaaaaaactgatggctgaatctgcaaatactgtgaaaaaggtctctttggaacttggtgggaatgcaccttgcattgtttttgatgatgcagacattgatgttgctgttaaaggcagtcttgctgccaagttccgtaacagtggacagacatgtgtttgtgcaaacaggatattggtgcaagaaggtatctacgagaagtttgcatctgcattcatcaaggctgttcagagtttgaaggttgggaatgggctagaagagagtacatctcagggtcctctgattaacgaagctgctgttcaaaaggtggagaagttcataaatgacgcgacttcaaagggagcaaatgtcatgctaggtggtaaaagacacagcctggggatgtcattttatgagccaactgtagtagggaatgtcagcaatgatatgcttcttttcagagaagaagtttttggtccagttgcaccccttataccattcaaaactgaggaagaagcagtccatatggccaacgatacaaacgcaggcttagctgcatacatatttaccaagagcatacctcgttcatggcgtgtatccgaatctcttgaatacggcttagttggggtaaacgaggggattatttcaacagaggtggcaccatttggcggagtaaagcagtctggtcttgggagagaaggatcgaagtacggcgtcgacgaatacttggagctcaagtacatctgcatgggcaacttgggttgagtcatgaaatcggcctcaggctagaaacgcatggaagagatgatgaaccgagagaccaagaaggcaggcgtctagctacaagaccggaggaacatggctgaaaggggccggccactggttgtgggggagcagttttcgaataaagcgaataagccgcggaacatgaacaaaagaagccgaaatgagttgtaaatgacgtgaactataaagtatggcttcgcctccggacttttgtatacgtaatcatggcactacttgtctatagtgtctccaaagacgtccatgttacagaataaaagcgtatagggtggatgctacgttacaggctgtcggtggtatgtacacctcgcctgattcctgacgaaataaagctggatactgcattcttgcggctcttgcctgcaggggt

SEQ ID NO: 127293 - DNA, 753 bp, Zea Mays
ctgaattatgccgagaactgtgtgcatacctctaacaatggaagatatggatcattgtctacaaagtagattatctccattgttatgtctgatctcaagcatttccccattgtgctggatatacaggcttagctgcatacatatttaccaagagcatacctcgttcatggcgtgtatccgaatctcttgaatacggcttagttggggtaaacgaggggattatttcaacagaggtggcaccatttggcggagtaaagcagtctggtcttgggagagaaggatcgaagtacggcgtcgacgaatacttggagctcaagtacatctgcatgggcaacttgggttgagtcatgaaatcggcctcaggctagaaacgcatggaagagatgatgaaccgagagaccaagaaggcaggcgtctagctacaagaccggaggaacatggctgaaaggggccggccactggttgtgggggagcagttttcgaataaagcgaataagccgcggaacatgaacaaaagaagccgaaatgagttgtaaatgacgtgaactataaagtatggcttcgcctccggacttttgtatacgtaatcatggcactacttgtctatagtgtctccaaagacgtccatgttacagaataaaagcgtatagggtggatgctacgttacaggctgtcggtggtatgtacacctcgcctgattcctgacgaaataaagctggatactgcattcttgcggctcttgcctgcaggggt

SEQ ID NO: 127294 - DNA, 102 bp, Zea Mays
gaatggattaggaagaccgatgctttcgtggaacgggcatatggcaaagctgctaaaggaactagcctagtcccttgtccgtgcagcaaatgtgacaaccgg

SEQ ID NO: 127295 - DNA, 534 bp, Zea Mays
atggcgaaccgccctaccgcccgcacgccgcaatcccgccccccgacgcatgccgcacgcccacctagcgcgacctgtggaaccctgctgccgcccccgaaccagcccaaagcgagaccggaggggcacgagcgccaccgccttgatcccgcccgcttctccccagatctcctcgccattatcgccgccatgcccggattcgcgccctgctcgcccaaatccgaccgcgactttgatttcccaaccgacgcaggagcgggctcgcacaaccgcaacgagttcgtcatgatccgccatgacggcgatgcgccgggcccggctaagcccacaaagagtgcgaatgggcaggtctgccagatttgtggtgactctataggtgtttcagccactggcgatgtctttgttgcctgcaatgagtgtgccttccctgtctgccgcccatgctatgagtatgagcgcgaggggaaccaatgctgcccccagtgcaagactagatacagagacaaaatgttggtttcctggcaacttctttga

SEQ ID NO: 127296 - DNA, 1745 bp, Zea Mays
cgacagtcgacagcagcacacacactcgggtctcgagctccctccccccgcgtgtcgccctcgacggcgtcgccgcgccgtgcccagccccatggatcccgccgctgcggaccggccgtgtgtcatccagtcgctcccggcgaactgcaacaccctaccgccgcccctggtccaggcactcccggcgaactgcaacaccctaccgccgcccctggtccaggcgctcccggccaagaccaaccccagccagccttcctcccccaccgccaaacgccgccacgcgcctcctgcgccgggctcgggcccggcgcccccgagcccgcgccgcacccgctcgggtggcgcgccggagtggacgcccgccgagacgcttgcgctcgtcgccgaggtggcggccgtggacgacggctggtcccgctccgtatccgcgttccagaagtgggccatggtcgccgaaaacctcgccgcctccgaggccctcttgtcggggcccgggagccgccggagagggcgcgggagcaagaggactgccggggagtgccggcgccgctgggaggcgctggcggccgagtacggggccgtgcgccgctgggaggtgcgcaccggggcgacgtactgggagatgggcgcggcggcgcggaggaaggctggccttcctgccgagttcgacgacgaggtgtatggggctatggacgcgctcatacgggtcgaggaggcgctgcttgcggatgctgctggcggtggtgcgggtggggaggatgtagagggcttggttggcggcggcgccggctgcgttggcgtcgaggtgggtaagcaggatggcggcgactccgttgaggctgaggttggcgaagagcaggtgcagcaggatgcatctgctggagaggaggaggaacaagacgtcgatgaggatgtggaagaaatgcaggaggatgggggcaatgctggtgcttcaaatgaccttgggcatgagacggggacgagtgtggaacccgagagaagccaagacatcgcatcggagctggcgaacaagttacacgataacgcgcagcacatacatgccatactgaaggaagaggctgcccaggatggtggccagaaccatgatctcggtagttcgatgctgcctgacgcaatggaggccgcccgccgaaaagcagatgagctgatccaatcgctcggtgggctcgtcagctacctgaaccaattcaccgagctggtcaaggaaactgggtttgagaacatcgcgacctgattgatgcgtgagacgcagggcttcctttggagggttagatcttagcgctgtagtttcgtttctgtgtgtccgtcatctttgtaaatatgacggcgctgtatgacgaccaccacccaacccgactggtgtagggtttgtagcagacactgtctaggtgtctcgacaccgctgctgttctgagggcttctggccccctgattagtgagatgagatgctcacttctgttcgtttcagttctgtccctgaaagaaaattccctgatgctgagagattagttaatttggtagcagtagcagttgttctcagatgcatcacatattcacatgtgagacataatatgggagggtgacgcaggtgtagcatcgtccacagtgaggatttgtgaaggaggtaggtgtcctgggatatggcatttgtttttgttgggacctgctctatttcagatgtctgaaatatagtatgtttatagataccgatctttatcgttaga

SEQ ID NO: 127297 - DNA, 2026 bp, Zea Mays
atggcgcggccgcggccgcacggctgcatcgtccacgttgccttcgtattcgcgttcgcgtctgccgtcctcctgccgccggccgcggagggtgtccaggaaggcgacgtgctggtcgcgttccgggacacgctgcgcggtctggacggcgcgccgccgggcccgctgcggaactggggcacgccgggtccgtgccggggcaactcctcctcctggtacggcgtgtcgtgccacggcaacggctccgtgcagggcctgcagctggagcggctcggcctgtcgggtggcgcgcccgacctgtccgtcctcgccgtgctcccgggcctgcgcgcgctcagcctctccgacaacgcgctcaccggcgccttccccaacgtgtccgcgctcgccgtgctcaagatgctctacctgtcgcggaaccgcctgtccggcgccatccccgaaggcacgttcaggcccatgcgtggcctccgcaagctgcacctctcctccaacgagttctccggccccgtcccggagtccatcacctcgccgcgcctgctggagctgtcgctcgccaacaaccacttcgagggcccgctgccggacttctcccagccggagctcaggttcgtcgacgtctccaacaacaacctctccgggcccataccggtagggctcagccgcttcaatgcaagcatgttcgcaggcaacaagctcctctgcggcaaaccactagaagtggaatgcgacagctcggggtcgccgcgcaccggcatgtcgaccatgatgaagatcgccatcgcgctcatcatccttggcgtgctgctctgcgtcgcgggcatcaccacgggcgccctcggcagccggaaaaggaagccgaggcgcgcggccgccgagaggctgggaggcggcgaccagacgccctccaacccgaagctcaacaccgcgccggccgtcaacatcgagaacgcagccagcaccagccagccgcgcaccgccgccgcggccgggggcgccgcctccgccgccgcggccgcggggaagcgcccgcgccgcgacgagcacgggcggctggtgttcatccaggagggccgcacccggttcgagatcgaggacctgctccgggcgtcggccgaggtgctgggcagcggcaacttcgggtcgtcgtacaaggcgacgctctgcgagggccccgccgtggtggtgaagcggttcaaggacatgaacggcgtcgggcgggaggatttctcggagcacatgcgtcgcctcggccgcctcgcccatcccaacctcctcccactcgtcgcctacctgtacaagaaggaggagaagctccttgtcaccgattacatcgtcaatggcagcctcgcgcagctcctacatggtaaccgagggtcgctcttggactgggggaagcgtttgcggatcatcaagggcgcggcgcgggggctggcgcacctgtacgacgagctgccgatgctgacggtgccgcacgggcacctcaagtcatcgaacgtgctgctcgacggcgcgttcgaggcggtgctgtcggactacgcgctggtgcccgtcgtgacgccgcagatcgcggcgcaggtgatggtggcgtacaaggcgcccgagtgcatcgcgccgcaagggaagccgtccaagaagagcgacgtgtggagccttgggatcctcatcctggagatactcaccggcaagttcccggcgaactacctccggcaggggcggcagggcaacgcggacctggccgggtgggtgcagtcggtcgtcacggaggagcgcaccggcgaggtgttcgacaaggacatcacgggggccaggggctgcgagtccgacatggtgaagctgctccaggtcggcctggcctgctgcgacgccgacgtcgaccggaggtgggacctcaagacggtcatcgcgcgcatcgacgagatccgggagcccgagcccgccgccgccgccgccgcctccgagtcgtcatcgtcctaggcgagcacccgcgcatgtactagaccaagcaaatcccactgatcgatca

SEQ ID NO: 127298 - DNA, 438 bp, Zea Mays
atgcttcagcgaacaacaaacacattgtttgttacaaatatatacattctgatttattcaaattgcgaagtttggcatggctcgcctggaccactgaggctgcacccagtccaggtcctccatttcagttatctgaatcatcactgtcgctcctctcaggatcagcttcctctccattcgcggcgggctcctgaaccccaggctgctttgctgcacgagctactggaggtttcttacgatcaccaccttcttcgcctcctgtcgcactggcgttctggtctactagtagtcaaggaaaaatgccatctacagagttcgcaaaaaacggtgaaacaaagctgtaggcagagaatccttcaaccaacagaccaaatgcatgtcagacttatcgatgttataagcaaccaattcagaagtataactggtgttcaagtgtag

SEQ ID NO: 127299 - DNA, 663 bp, Zea Mays
atgggcagcaaccacctcggcgtcggcgtcgtccccccaccccgcggtgcttgcgtgctctgttcccatcctcctcgcacgcgattgcccccgcgcccgccgcatccagtgcctggccggctctacgaccgcaccctctccctctacctcgacaaagccaagtgccggggcaaccgcactgctgctctcaatggcctctgccgccttggcgaggccatcaaggagtgcgaggaggcgctccagattgatccgtactacggccacacgcaccaccgcctcgcatccctacatataagccggcacaaagattccatctcagatctcaagcaacttccagactgcaggtatgtgatcgccgggggagggaacgctgccggttacgtcgccaggacgttcgtcgagcacgacatggctgatggccgcctctgcgtcgtctccaaggagattgcacccgccaagcgtgaagggctacccctatctcatctagaaattctggatgctgttgttatcccaaatctgtgttttgctgaagtttctattgcctacgtcgtaaggtcccctgagacttctttgactgaagttgatgttcagaaatttattgaaaagcaggaacagagccaacgtgaaggggtacttcgtctggtcgttcctggacgtgtttga

SEQ ID NO: 127300 - DNA, 1134 bp, Zea Mays
cccccctctttctcgctagacctcaacgataccaccaccgctagcgctagtgctctactgctctgctctttagggagagagagacgggagtgagagagcagagatggcagctgagagctagactgagcacgcacgtaacgtaacaagctcttctcccatctccgtctctggcaagagagagagagagcgcagaagatgatgtggtcgcacgagccggcagcggagcagaaggcggcggcctcggcgccgcctacccggcagcggagctccgtggccaagctgacgacggcctcctcgtccttggccaacctcctctccgccttcgtcaacacgaacaactccccagacccgaggccaccgccgccgaggcggagcttcgacgagcgcggcgccgtcgggctcggcatcgtcgcggccatgggccacggggccgagccgatcgccatcggcgccgcggccaggcggcgcgcgcgcgaggacgacgagagctacacgtgcgtcatcaagcacgtggccggcgccggcggcgccagcgtccgcaagcgggtgtactttgggttcggcgacggcggcggtggatggctcgtggaggccgacgacgcggcgccggcgccggcgcccgacttcctcagccggtgctgcctctgcgacaagaggcttgatgggctcgatatctacatgtacagaggggagaaagccttctgcagctcagagtgccgatgccagcagatgctactggacgaccgtgctgccaaatgtggatcatccgaagccctcatcaggtccggcgactactccgtgtcgccgcactccgccccgatggccttctccccgagcgtcgcagcagcctagtagtctactcgccctcgatcgagctgctccgatccgctatgactctgtgagcaataatgcaaaggagtctagctagaagaggctataatataaacgggtctcgtttaataaacaaacggatcatatatatgtataccgagtaacgtataagatgcttcttaattttaactatgacatgaataagagcgaggaagacagttttgtgtgactatgcagtaacagcaagatgttaaacactttaatcgtgcttgaattttatttatttttattcttgttgcaaga

SEQ ID NO: 127301 - DNA, 358 bp, Zea Mays
ccgccgatggaggagggccaatcgacagcggagcgcaggtcacggccagcgccgaactccgacatcttcaccatcactctatggtcgcatccgtccactgcgcggctgggcggtggtcgggtccgactgcacgaggtccgccggcgtgaggtagagacgaggagcctcccgccagtagagtcccgcggcggcggcaatagggtcggctgcgcaccaaaggaggcgcggtgtcggggtcatgacagctctacccgctttctctctcttgttcccggcagaggcactttcgtttcaacgaccacgcgactcacggtaacgggggttccatgatcacgaggaggaccaatggctcaaagtc

SEQ ID NO: 127302 - DNA, 1758 bp, Zea Mays
gaattccgatcaccaaaaaaaggcctttcttttcttttcgtcgccctctcggtgctctgcttcgctgcgtcgcccgcccgtctctaaaagccttgtgtggatcgtggacgccgacgcggccgcagcagcagccacgggacgggagtagaggcgcagagagagagaaagagagaaagagagagaggttgtgctcgctgcctgccgctgagagacggatgaagaagtgcccatcggagctggagctggaggctttcctccgcggccgggaggacgccacggcggcggcggcggcggcggtggccgagcagaagcctacgcacgacatcgctgcgctggcgccgttcggcgccggtggcgtgttcccctccagcgatctgtccgccttcagcttcgctgactcgaacaccctcaatggaactggaaacatccataatcacctttggtcccataaccacaacgtcaggcatcccgcagtctccacgacgatcgagtcgcagtcgtcgatctgtgcagctgcagcagcaagtccaacatcggctaccaacctgtacctgaaagagagccaggctctgggcggcacgagtggttccgactccgacagcgattcgctgctggacatcgagggtggcccgtgcgagcagagcacgaacccacaggacgtgaagaggatgcgacggatggtgtcgaaccgtgagtctgctcgacggtccaggaagaggaagcaagcccacctagctgaccttgagacacaggtcgaccagctgcgaggcgagaacgcgtcgctcttcaagcagctgacggacgccaaccagcagttcacgaccgcggtcacggacaacaggatcctcaagtcggacgtggaggccctcagagtcaaggtgaagctggcggaggacatggtggcgcgcggcgcgctgtcgtgcgggctgggcagcctggggctgtcgccggcgctgaacccgcggcaggcgtgccgcggccccgacgtgctgtccgtgtccggcctggacttccccggcgccgacgacgcctgcttcacggggctgtccccggcggagcagctgcagctccagagctcccccctgcagagcatcgccgccagcctcgagagcctggacaaccggatggccagcgaggtcaccagctgcggggggcccggcgtcgacgtctggccgtgggaccaccactccaacggcggcctgtccaagtgaagccggagacgccgggtgggagtggggtgagactcgcgccgctcgccgacggcacctatcctgtcctagtgtatgcgtatatcgatatgcatggcgggcgctagctatgaccatgagccgccgttatttctgtgttcgctggagtggtgaaagtgaacggacttgagtttttcagagtccctcgtctccgtcggtacatttactagttctgtaatagaactgactagcttaagctcgtgctactacatatatatatgtatgctgagagactgaactcgaagcataatcatgctaccatattatgtcatcattacatttctatctctagtctgattgtgttaggtgctgtgattcagatgagggccggtttctatttctagtctgagtgcgttaggtgttgtgactctatgagacacatgcaagggaagctcaggtaagtgaacagagagccacatactattctgaatatttcatatcagtaaaatctctgaaaactcccatgcactgtacattcttgtctgtatacattttctccttttttttaaca

SEQ ID NO: 127303 - DNA, 1533 bp, Zea Mays
tacaagtactacttggttctgaatcacgcgttgaggatcaaattaagcatgacctgaccatagaaaagatcgagcgctactgtattttacactgccgtagaccttgatacggacgaagataaccccaacgatcaagtttgctttttcttttgttttgttgttttttgtccgagcagaacaccctcaatggaactggaaacatccataatcacctttggtcccataaccacaacgtcaggcatcccgcagtctccacgacgatcgagtcgcagtcgtcgatctgtgcagctgcagcagcaagtccaacatcggctaccaacctgtacctgaaagagagccaggctctgggcggcacgagtggttccgactccgacagcgattcgctgctggacatcgagggtggcccgtgcgagcagagcacgaacccacaggacgtgaagaggatgcgacggatggtgtcgaaccgtgagtctgctcgacggtccaggaagaggaagcaagcccacctagctgaccttgagacacaggtcgaccagctgcgaggcgagaacgcgtcgctcttcaagcagctgacggacgccaaccagcagttcacgaccgcggtcacggacaacaggatcctcaagtcggacgtggaggccctcagagtcaaggtgaagctggcggaggacatggtggcgcgcggcgcgctgtcgtgcgggctgggcagcctggggctgtcgccggcgctgaacccgcggcaggcgtgccgcggccccgacgtgctgtccgtgtccggcctggacttccccggcgccgacgacgcctgcttcacggggctgtccccggcggagcagctgcagctccagagctcccccctgcagagcatcgccgccagcctcgagagcctggacaaccggatggccagcgaggtcaccagctgcggggggcccggcgtcgacgtctggccgtgggaccaccactccaacggcggcctgtccaagtgaagccggagacgccgggtgggagtggggtgagactcgcgccgctcgccgacggcacctatcctgtcctagtgtatgcgtatatcgatatgcatggcgggcgctagctatgaccatgagccgccgttatttctgtgttcgctggagtggtgaaagtgaacggacttgagtttttcagagtccctcgtctccgtcggtacatttactagttctgtaatagaactgactagcttaagctcgtgctactacatatatatatgtatgctgagagactgaactcgaagcataatcatgctaccatattatgtcatcattacatttctatctctagtctgattgtgttaggtgctgtgattcagatgagggccggtttctatttctagtctgagtgcgttaggtgttgtgactctatgagacacatgcaagggaagctcaggtaagtgaacagagagccacatactattctgaatatttcatatcagtaaaatctctgaaaactcccatgcactgtacattcttgtctgtatacattttctccttttttttaaca

SEQ ID NO: 127304 - DNA, 555 bp, Zea Mays
cacccgcacccgcggccgcgctcgggggcggcggcgggaccctgatacctccttcacctgccgggtcgggccgaggggcgagcggctgcggcggccgaggacgtgaggagcgcgatcgagtcgtcggcgatgcgcttcatcacccggtgcgcgtccgcgatcactctcggcatccttgccaacctgatcgagcgacgacgaacgaacaaaaaggatgcagaaatcccgccaccattccgcatttccgctagtaccgtagtaattcgtttggatggccgtgttcttgcggggtcgagcgagcacgtaccctcggacaagctgcacgagctgcggccggagctcatcgtcgcgcaccgcggcgatcctcctggacacggcgtcgacggaggtgagggagatgtccagcttggtcccgaggtccctgaaggcggccctcgtcttctcgatggcgaacggctcggcgccattggcgtcctggctcctcactcctcagcaccgcacacttcttcccgtaggccagccgaactctcgctccactgccttcagttcacgtag

SEQ ID NO: 127305 - DNA, 1805 bp, Zea Mays
acgagactctgctccatataaaatggagccaaataaaaatcgacgacgacatctatttaaggctgaatctacctcgcctgcgtggccctcccctcctccccatcgcgtcctctccgctacacctcgccgatcggatcgcgacgagacgccgcgcgatccgacctaggctgacgccaacgaccactctcgccgccggcggtcatggcgtacggcgaccgcgttaccaccttcgaggactcagagaaggagagcgagtacggctatgtccgcaaggtctctggacctgtggttgttgctgatggaatgggtggtgctgccatgtatgaacttgtccgcgtcgggcatgataacctcatcggggaaattatccgtcttgagggcgattcagctacaatccaagtttatgaggaaacagctggactgatggttaatgaccctgttttgagaacgagaaagcctctatcagttgaattgggacctggaattcttggaaatatttttgatggtatccagcgccctctaaaaaccattgccattaagtcaggagatgtgtatattcctcgtggtgtttcagttcctgcccttgacaaagatgcattatgggaatttcagccaaagaaactaggtgttggagatgtcatcacaggtggagatctatacgctactgtctttgagaacacattgatgcagcaccatgttgctcttccaccgggttctatggggaaaataagttacattgcaccagctggtcagtacaaccttcaggacacagtgctagaattggaatttcagggcataaaaaagaattttaccatgcttcagacatggcctgtgcgttcaccaaggcctgttgcgtcgaagcttgctgcggatacacctcttctgacagggcagcgtgtactggatgcactattcccctcagttctgggaggcacttgtgctattccaggggcatttggttgtggtaaaactgtcattagtcaggcactttccaagtactccaattctgaagctgtggtttatgtgggctgtggtgaacgaggaaatgagatggctgaggttctcatggacttcccccagttgacgatgacattgcctgatggccgtgaggagtcagtcatgaagagaacaaccttggtggctaacacatcaaatatgcctgttgctgctcgtgaagcctccatttatacaggaattacaattgccgagtattttcgtgatatgggctacaacgttagtatgatggctgactccacctcacgatgggctgaggctttgcgtgagatctcagggcgtttggctgaaatgcctgctgatagtggttacccagcttacttggctgcgcgtttggcatccttttatgaacgtgctggtaaggtgaaatgcctgggaagtccagacaggactggcagtgtcacaattgttggagccgtctctcctccaggtggtgatttttcagaccctgttacctctgcaaccctcagtattgttcaggtcttctggggtttagataaaaagctcgctcaaaggaagcatttcccatctgtgaattggctcatttcctattcgaaatactccaaggcccttgagtccttttatgagaagtttgatccagatttcattgatattaggacaaaagcacgtgaggtgttgcagagggaggacgatctaaatgaaattgtgcagcttgttggtaaagatgcgctggcagaatctgacaagattacactggagacagcaaagctactgagagaagattatttggcacaaaatgcatttaccccaggttggacatccgtctagcc

SEQ ID NO: 127306 - DNA, 2325 bp, Zea Mays
aaaatcgacgacgacatctatttaaggctgaatctacctcgcctgcgtggccctcccctcctccccatcgcgtcctctccgctacacctcgccgatcggatcgcgacgagacgccgcgcgatccgacctaggctgacgccaacgaccactctcgccgccggcggtcatggcgtacggcgaccgcgttaccaccttcgaggactcagagaaggagagcgagtacggctatgtccgcaaggtctctggacctgtggttgttgctgatggaatgggtggtgctgccatgtatgaacttgtccgcgtcgggcatgataacctcatcggggaaattatccgtcttgagggcgattcagctacaatccaagtttatgaggaaacagctggactgatggttaatgaccctgttttgagaacgagaaagcctctatcagttgaattgggacctggaattcttggaaatatttttgatggtatccagcgccctctaaaaaccattgccattaagtcaggagatgtgtatattcctcgtggtgtttcagttcctgcccttgacaaagatgcattatgggaatttcagccaaagaaactaggtagtgttggagatgtcatcacaggtggagatctatacgctactgtctttgagaacacattgatgcagcaccatgttgctcttccaccgggttctatggggaaaataagttacattgcaccagctggtcagtacaaccttcaggacacagtgctagaattggaatttcagggcataaaaaagaattttaccatgcttcagacatggcctgtgcgttcaccaaggcctgttgcgtcgaagcttgctgcggatacacctcttctgacagggcagcgtgtactggatgcactattcccctcagttctgggaggcacttgtgctattccaggggcatttggttgtggtaaaactgtcattagtcaggcactttccaagtactccaattctgaagctgtggtttatgtgggctgtggtgaacgaggaaatgagatggctgaggttctcatggacttcccccagttgacgatgacattgcctgatggccgtgaggagtcagtcatgaagagaacaaccttggtggctaacacatcaaatatgcctgttgctgctcgtgaagcctccatttatacaggaattacaattgccgagtattttcgtgatatgggctacaacgttagtatgatggctgactccacctcacgatgggctgaggctttgcgtgagatctcagggcgtttggctgaaatgcctgctgatagtggttacccagcttacttggctgcgcgtttggcatccttttatgaacgtgctggtaaggtgaaatgcctgggaagtccagacaggactggcagtgtcacaattgttggagccgtctctcctccaggtggtgatttttcagaccctgttacctctgcaaccctcagtattgttcaggtcttctggggtttagataaaaagctcgctcaaaggaagcatttcccatctgtgaattggctcatttcctattcgaaatactccaaggcccttgagtccttttatgagaagtttgatccagatttcattgatattaggacaaaagcacgtgaggtgttgcagagggaggacgatctaaatgaaattgtgcagcttgttggtaaagatgcgctggcagaatctgacaagattacactggagacagcaaagctactgagagaagattatttggcacaaaatgcatttaccccatatgataagttctgcccattctacaaatccgtttggatgatgcgcaatattattcacttcaacacattggcaaatcaggctgtggagcgggcagctggtactgatggccaaaagataacatacggtgtcataaaacaccgtttgggcgatctattttatcgcctagtatctcaaaagttcgaggatcctgccgaaggtgaagaagctttggtcggcaaatttaagaaactgtatgatgacctcaccactggtttccgcaatctcgaagacgaggcacggtgaactagtgtagattctgtgtaaacaaggactgccaaatgttttataagatacataaattgtagattgagatcatctgtaagaattattcccaccgttgcaccatctcttcgccaccactgttttagtcatcggtgcctgatgggcaccctgtttatttcatgtatcatttattgctgtcattgtaataagcgatgggcatgattgtagttgaataagtacaatgtccatgtattcagacaccagtatcgtgcttatttgtttgttaaaaaaactatgttgcctttttggga

SEQ ID NO: 127307 - DNA, 2008 bp, Zea Mays
cttactatatcttttaatgccattgttttgctatcctttaacacataatggctatacccatgcagcctctatcagttgaattgggacctggaattcttggaaatatttttgatggtatccagcgccctctaaaaaccattgccattaagtcaggagatgtgtatattcctcgtggtgtttcagttcctgcccttgacaaagatgcattatgggaatttcagccaaagaaactaggtgttggagatgtcatcacaggtggagatctatacgctactgtctttgagaacacattgatgcagcaccatgttgctcttccaccgggttctatggggaaaataagttacattgcaccagctggtcagtacaaccttcaggacacagtgctagaattggaatttcagggcataaaaaagaattttaccatgcttcagacatggcctgtgcgttcaccaaggcctgttgcgtcgaagcttgctgcggatacacctcttctgacagggcagcgtgtactggatgcactattcccctcagttctgggaggcacttgtgctattccaggggcatttggttgtggtaaaactgtcattagtcaggcactttccaagtactccaattctgaagctgtggtttatgtgggctgtggtgaacgaggaaatgagatggctgaggttctcatggacttcccccagttgacgatgacattgcctgatggccgtgaggagtcagtcatgaagagaacaaccttggtggctaacacatcaaatatgcctgttgctgctcgtgaagcctccatttatacaggaattacaattgccgagtattttcgtgatatgggctacaacgttagtatgatggctgactccacctcacgatgggctgaggctttgcgtgagatctcagggcgtttggctgaaatgcctgctgatagtggttacccagcttacttggctgcgcgtttggcatccttttatgaacgtgctggtaaggtgaaatgcctgggaagtccagacaggactggcagtgtcacaattgttggagccgtctctcctccaggtggtgatttttcagaccctgttacctctgcaaccctcagtattgttcaggtcttctggggtttagataaaaagctcgctcaaaggaagcatttcccatctgtgaattggctcatttcctattcgaaatactccaaggcccttgagtccttttatgagaagtttgatccagatttcattgatattaggacaaaagcacgtgaggtgttgcagagggaggacgatctaaatgaaattgtgcagcttgttggtaaagatgcgctggcagaatctgacaagattacactggagacagcaaagctactgagagaagattatttggcacaaaatgcatttaccccatatgataagttctgcccattctacaaatccgtttggatgatgcgcaatattattcacttcaacacattggcaaatcaggctgtggagcgggcagctggtactgatggccaaaagataacatacggtgtcataaaacaccgtttgggcgatctattttatcgcctagtatctcaaaagttcgaggatcctgccgaaggtgaagaagctttggtcggcaaatttaagaaactgtatgatgacctcaccactggtttccgcaatctcgaagacgaggcacggtgaactagtgtagattctgtgtaaacaaggactgccaaatgttttataagatacataaattgtagattgagatcatctgtaagaattattcccaccgttgcaccatctcttcgccaccactgttttagtcatcggtgcctgatgggcaccctgtttatttcatgtatcatttattgctgtcattgtaataagcgatgggcatgattgtagttgaataagtacaatgtccatgtattcagacaccagtatcgtgcttatttgtttgttaaaaaaactatgttgcctttttgggatttgttcgtgcttattgcatatgatggtttaaaaaagactaa

SEQ ID NO: 127308 - DNA, 1018 bp, Zea Mays
caaatttcaatttaaatttggtttggaatttcaaattcaagttaaatgcacaatagaaaaattccagtatgatatgcaattataatttatcaagttatttatttattatcctttttaggaaaatgttttaagtatgcaattcacactcaaatatagttattttaagaaaatattactttggggtgtaaagtcaaattaaaagtttattttaaaaaatattacttattgttgtaaaatgaagtacttcctaatatacaatcttcatcgggagacactttaatttaattattttttggaaaaaaaatactagaccaaaaatcaagattttgggtgttacaattttctactcatatttctccattttattttttaaataattctgacaagtgttgtttaatattagatatgataagttctgcccattctacaaatccgtttggatgatgcgcaatattattcacttcaacacattggcaaatcaggctgtggagcgggcagctggtactgatggccaaaagataacatacggtgtcataaaacaccgtttgggcgatctattttatcgcctagtatctcaaaagttcgaggatcctgccgaaggtgaagaagctttggtcggcaaatttaagaaactgtatgatgacctcaccactggtttccgcaatctcgaagacgaggcacggtgaactagtgtagattctgtgtaaacaaggactgccaaatgttttataagatacataaattgtagattgagatcatctgtaagaattattcccaccgttgcaccatctcttcgccaccactgttttagtcatcggtgcctgatgggcaccctgtttatttcatgtatcatttattgctgtcattgtaataagcgatgggcatgattgtagttgaataagtacaatgtccatgtattcagacaccagtatcgtgcttatttgtttgttaaaaaaactatgttgcctttttgggatttgttcgtgcttattgcatatgatggtttaaaaaagactaa

SEQ ID NO: 127309 - DNA, 1825 bp, Zea Mays
cattaattaacctctctccttcctcgccccttcccctccacgactccactaccaccaccttcaccttgtctcccacaaccgccgcgcgcaagccctagcccgatctcgccggcgacagacaccagatctcgccgcccgttgcgcgccgatacgcgccccgccggattcaccgctcctcgcgctgcagcacgcccgggcctgggttactgcgtgacatgtagtattgtataattggaggttgtcaccatcaccacaaagcatatgttgtgatttgtcgatggcgaggagatgaaacaggtgtaggggcggagcagcaaggacatgacagccatgccgcatccgcgccaccgaggcgctgctaagaagcccatgtggatcatagtgctattgtctttggtttgtgttgcacttatgggggcctatgtctacccaccacggcgctactccgcatgctacttctttgcttcgagtgtctgtactccgttcaaggattggctacctgctgttgctcgtgagcgaactgatgaagagatagtttcatcggtggttattagggatcttctttcaatgcctatggctatgtcaaagaacccaaagattgcctttatgttcttgacaccgggttcattgccttttgagaagttgtgggagaaatttttacagggtcatgatggccgatattctatctatatccatgcatctcgtgaaaaacctgtacattctagctctctttttgttgggcgtgaaattcacagtgaaaaggtagtatgggggaggatttcaatggttgatgcagagaagaggctgttaggaaatgcattggaagatgttgataatcaatttttcgtcttgctttctgacagctgtgttccactacatacatttgattacatatataattatctgatgggaaccaatgtcagtttcattgattgcttcttcgatcctggcccacatggaactggaaggtatacgatggaaatgcttcctgaaatagaacagagggacttcaggaagggtgcccagtggtttgctataacacgaaggcatgctttattgattctggcagacaacctttactacaataagttcaagctgtactgcaagccagcagaaggacgcaactgtattgctgatgagcattatttgccaaccctcttcaatatggttgaccctggtggaatagctaactggtcagtgactcatgttgattggtccgagggaaaatggcatccaaggtcatatagagctgcagatgttacatatcaactcttaaagaacataacgtctgtcaatgagaatgttcacattacaagtgatgataaaaaagttgtgacacagaccccatgtatgtggaatggaacaaaaagaccctgctatctttttgctagaaagttttacccagaatctttgaacaacctgctgaagctattctccagttacacatcggcttgagttctacatgattcttttggcattttgcctaggagattcctctaggatttatctttttgtgcttcatgtaaattgtggaattgatacttagaggcttaacagagttacagatccagggccttgatgtaattctgagtcccttggtagggctgaggtgatgtttgtttattattgacgctgccctccctgtcattcgtggtgctctctgtatgactatgtttcttttagcccttcacttttttctcttctcttttattcttagattcctagctcccatattctgagtaacaggggttttgtcagttcttactgttattataagattatttttttgtagacacgaagatattatgaaatcagttacactaat

SEQ ID NO: 127310 - DNA, 850 bp, Zea Mays
gacgaagacagacgcgctccgccgtctctgccttgtgggccttacgtgggcctcatggcttaaaatgccatgccccagcaactacacgagtcaacacaggcccggcccggcccggcccggcccaagaacccccatctctcgattcctccaacaaattcccctttcccttactccccatccccacccacccacgccgacgagcaaaccctagcgagcgagagagcccggagccgagagaccagccagccatggcgctgcgtgccctgtacaacgagatccggagcatgaaggtccgcgacgtgccggcttacctgaagccgcgcttgacctgggacaacgtcaagaagagcgccgaccaggccgtcgaccgctacatcgagaagtacatcgacacgagctcgccggaccctctctaccacgtctgcatcggagggatgatcttctcctacttcgtcaatctgccctgggagcgcgcccacctcgcccacctcgaggagatggagaggaccggtgggaagcactagatccgctgccccgtccctcgccggcagcgcgggaggacgggtgactttcatggggtccattcaggctgatggcttctgttttcttctgctgttgagctactggagtcatgttactttggtcgttggttttgtacccagacagcaagaaactgtccagcttattgtcttgttcctcgcgtcttgtcataagtaacttcaaacaaaggagtgcatgcattgtgattaaaaacgttttcagcaattgagtacgaatattctctttttttttgtaatttttactccagactccagtcatatttgctgcattgctggaccatcgtgtgtta

SEQ ID NO: 127311 - DNA, 560 bp, Zea Mays
gatatcttcgcccatttgttcgtgcatcatctgcgccttttactgttgggatgttgatcgatcaaaggctctctttggaacatcaaaggccctctttggaacgctggaatttttcccattacctgtgtttttccagtgaaaatgaactaattcctgtgaaatttctatatgatttctctcaaatccctaccttcaaaggggacctaaaggctgttctaccttccaatcgaagaccactatgtgacacctattctttctatttgtttcaggacgggtgactttcatggggtccattcaggctgatggcttctgttttcttctgctgttgagctactggagtcatgttactttggtcgttggttttgtacccagacagcaagaaactgtccagcttattgtcttgttcctcgcgtcttgtcataagtaacttcaaacaaaggagtgcatgcattgtgattaaaaacgttttcagcaattgagtacgaatattctctttttttttgtaatttttactccagactccagtcatatttgctgcattgctggaccatcgtgtgtta

SEQ ID NO: 127312 - DNA, 1149 bp, Zea Mays
atggatgtaaatcacatcactgagatggaggatggtttaaatgatgatgaaatggaatatccatttgagggtgatgctaatgccagtaacaatgatcagatagtagaggaccatgctgatgatgcccctattgctagtggtgagaatgccatcgtccaacagcaagttggtctgagaaagaagaagtacatgtatgtgaatgaccatcgtgttgtgaaacaacggaaactagtaccaacagtgacagttcccgctatgaacaaggataaaggtcaaatgccaatgagtatctccaagatgaaaaccaagaagccaatcggtacccctactagcagcaagctaatggcatctgcattcaaggtcacatcaagcaagaatgaacttatggttttaatgcaaaaatcagctgaagttgtgcaacctgcaattgcaagtgctaccgctagtgcaaacgcaagtgcaagttcaagtgtaagggcaagtgcaagcataccagcaagtgtgagcataccagcaagtgcccaagcaagtgtcggcgacgatgaaaaacaagtagatggccaaattgggaaaagactcacttcatgggtctggcaacatttcacaaggtatgaaatagatgttgagcaacctgatggttccagtgttaagcaaaagtgggcaaaatgtcttcgatgttcacataaagctaaggctgatgcttcaaatggtacaaaggcttttagtaaccacttaaaattgaaacattgtcttgtgaagggtcaacaacagctaagtcagagtgggaatgacatagcgacatataaatatgatgagaaagccagtgtgagacgtctatattatgccatcatcatgcatgaatatccattcattgttgccgaacacaagtattttgtgaaatttatcaaatcactacggccatcctttcctttcaagtctcgtatcactgttcgtaaagagatcatgcaactttataaagaggaaaagaatatgttgtatgcacaattcaaaaagctgacatgtcgtgttagttttactatggatggatggacatctatacaaaacaagtcgtacttatgtgtcacagcacattagattgatgataattggaacatgcaaaaaaggattatcaattttatgcatgtagaa

SEQ ID NO: 127313 - DNA, 331 bp, Zea Mays
gatatactctgatagtttcaactttcaagggagcaattggagcttccagtagtaaaaaggcacattagtgaactgacacaacgttttgcctgtcgaaaggtaatgcttggtgttgatcaacttgacatgattaagggaattctacaaaagattctggcatttgaaaagtttcttgaggaaaacccagactggaacgacaaagttgttcttctgcagattgttgtatcaataagaactaacgtccttaagtgcatgaacgctttctgtgttctaccttcatttgctaatacttaatgcaagtttgcaagtatgtgtgcagcatagaaggttc

SEQ ID NO: 127314 - DNA, 101 bp, Zea Mays
taaaaccataaccaataatcaaatattaaatatacaatacaagtatgtacatataatagtgcaaatatttaattacatgacacattcacatatgttcaaat

SEQ ID NO: 127315 - DNA, 498 bp, Zea Mays
gactcaccgttgccatggacggcgatgccttcgacctcaactcgcaggcgccggacacatatcaaggttgtggttgataagagtaagaggattccatatttgaacaggcacaatgagaccagtcaaaatgtgcttgttgtttgtgattttaacatgagatttacctttgtgttgtcgggatggcctggttcagcacatgacatgagagttttcaaagatgccataactactcatcaccacaaatttccacatccaccaccaggcaagtattatgtggttgatgcgggttacccaaatcgtccgggatacctttcaccataccggtgtacaaggtaccatgtcgagcaatggcataacggcccaccgccccaaggtatgaaagaagtcttcaaccatgcacatgccaaagttagaaatgtgatagaaagaagttttggagtgttgaagatgaagtttaggattttgttgaacatgcaaagatttccagaggacaagtga

SEQ ID NO: 127316 - DNA, 619 bp, Zea Mays
aacgttgcttacgggacgggcccactacaaactttcactctctcctacgcttgcgcagtctcttcttctccgatcccgactccaactctccctctctccttcgcctggcacatcctcggcggcgcggcagcctgcttcttcaccggcgcggcggcctgcttcttcaccggcgtggatctccagcgctcctcgagctggagcaggcaggcgtgccggtcttctccaggcgggtggatcttcaccggcccggtagcctcttcttcaccggcgtggcggcctaccgggcggacggatccgcggtcgatctccagctgctccgcggcctgagctccgggcggacggatccgcggtccagcgactccgctgcttctgctgctccgtgtctccagcggatccgtgcctctgctgctcggcgtcctgagctccggtcatctcgcgctgttgcttgctccttgaatccgcacacatgtgattggtcaaataaattttctttgttagaacatatgtcacttacatatagcgttgtggattgtgtcagtggtaaggtgtttagggtgctgggttcgatccttctagggtctattttttgcaatttgtccaattaaactatattcaccga

SEQ ID NO: 127317 - DNA, 829 bp, Zea Mays
tttactattttttgtggtgacatatgttttgacaaagaaaatttatttgaccaatcacatgtgtgcggattcaaggagcaagcaccagcgcgagacggccggagctcaggatgtcgagcagcagaggcacggatccgctgtagacacggagcagcagaggcagcagagtcactggaccgcggatccgtccgcccggagctcaggccacggagcagcagaggcacggagcagccggagatcgaccgcggatccgtccgcccggtaggccgccacgccggtgaagatccacccgcctggggaagaccggcacgcctgcctgctctagctcgaggagcgctggagatccacccgcctggagaagaccggtaggctgccgcgtctgcctgcctggacaaaaccggcaggccgctccgtcgaagaatcaggtcgctgtgccttcgaagaatcaggccgcggcgccggtgaagaagcaagccgcgacaccgaggatataccagggcaccaggcagcggagatccgtccacaaccggtaggccgcgcgccgaagatctgccaggcgccggagatccgttcgtccgcggatccgtccgctcggtaggccgctgcaggcctccgcgtcgtcgaagaagcaggccgccgcgccggtgaagaagcaggctgccacgctgccgaggatgtgccaggcgaaggagagagggagagttggagtcgggatcggagaagaagaggctgcgcaagcgcaggagagagtaaaaagtttgtagtgggcccgtcctgtaagtaatgttaaagtggacggagatgacgtctaagcgcatttctgagcaaa

SEQ ID NO: 127318 - DNA, 96 bp, Zea Mays
agttctttgacatccggttgttatatatttgctctgacgacggacaagacgccacccgacacttcatccgtcacacctctagactctagattgtag

SEQ ID NO: 127319 - DNA, 593 bp, Zea Mays
atctcttctccaaccaacttccaccgcttgctctggcagtggtacccacccgacgcccgcctcccttccttcgtgcatcggcgatccgcgctacccaccggaggtcgcctccctccccactctgcacgacgaacccccatatcgagcctacacccgcatcattcccatctcccaggtgccatggtctcgttccgcacagggagctctgcccccggacccgccggccgcctccctcaccacccgcacgacgaggcagaccgactgacgtgccacctgcacgatgagcccagactcatcggcgcattcctccccacccgccggtgcgtccattcctagccgccggtgcaccacgctcatcacccggtcggcacgccaatcaactacggccaactcctcagtgaatgttccaaagtgcgctggccttgttttatgatttctcatatatctctccatcttctgtgacttgcctgattcctgtgttcccagctgctcagtgaatgtcgctatttctttatgtgttgctagcatctattatttagattgcgagacgagcttgaactctgcaatagatttatgacatgttttttgtttca

SEQ ID NO: 127320 - DNA, 652 bp, Zea Mays
gagatatcgtcgtaccatccgccctacaacttaccatggtttagatagtagcttcagatagtccaaatggtaatttgtaaaatacgtgcgtaacattctgtataatactagtagagaaggcatcgcagaggctcgggctcaacagctggatcaaattttcagctctaatcaagctaaactgtgagcaaagtttgccctccaacaacaacaacagtttcttgtaaagtaacgagattattagacggggatataaaccaaacaggttctataatgctgaggaggcttacctgaatggctctttagctgttgtgtgcgggtatggcctagtccctactatggacatggattttgacggacactaccaatggtgactggatcaagccgtatagcataacatttgatcaacctatcctgctcctgcgcatcccgtgttggtcctagatgactagaggctagtcatatgtatggaagagaagggattactacagatttataacccaagaaggaacacttttacagatgttttgaagctggagcactgctcttcaataagtttgtatactgtgaaacaaatatctcatgtaaccaaaccaattttgctgggagtggatttgtgggtgctttttagctgtatgacaagtaccttgttatc

SEQ ID NO: 127321 - DNA, 140 bp, Zea Mays
aaaatatttggataaaataaacaaaactaaaacatatatatgtctttatgcacatcatgttggagttttatttgctggtgcatttaatcttggaaaccttgaactttgaataaaatttgattttcgaatttgaaattggg

SEQ ID NO: 127322 - DNA, 785 bp, Zea Mays
ggctaacgagaattgctccaattggcatatatgcagaagaaagagcctactagggggaaaagtgcattaagttcaccattaattttataaagaagttctcttgtaattaataagtattttatattgaactaaccttggctatggaaacaagatctggtttaatattatacatatcacatccaaacattgtccctagtcttccaaatgcagtaatgacctaaaacaagatgttgacttagtaaattctcgacctctcctccacgaacaagccgtgacgcagagacctaatggaatcacgtaagaagcagaacaatatgccactagttgaagaaacaatcaaatcgaaccaaagtggagatctttacaaattaattcgagataataactaggcaaaccactataccatagtttcattcaataggatgggagagcaggcgattcgagctgttgattgggaatctcaacgagctgctcacctgcagattggaattggatcgatggatggaccgcggacgcccgcacgccgattggatctcctcctccttggacggctgctaactgggttgggatgggacaggagccttcctcgccacagccgccgtgtcgtgctgctcctcttctccgagacgctgggagcctcgattggagacgtctggaagacgggaggtggagaggtatgacgtgacggagtttcatcgtcgaactccaccggcgcgctgaaccttcagctcggcctgcaggaggacgctgggagcttcggctgtggcggggcaggaacgcgctcg

SEQ ID NO: 127323 - DNA, 789 bp, Zea Mays
atgatacgcggtctgggactgatacttggaactgaatttgtcgacaacaaatctccaaatgatccatttccagctgaatggggtgttggttcgatatttggcacggagtgcgagaagcgtgggatgctcatcagggtggctggggacaacatcatgctgtcacccccgctgatcatgactcccaatgaagtcgaagaaactgacagcctgattgccctcttagatcataagcaaattcggcgatgctctgaaggctacagaggaacggattggagaactgaaatccaggaagaattagccgatgctactggttgtaacgacgacatgcaattgaaaatgacaattgatcttttttatgggcgaagtgttgaagatggctttggtgaaggaaatgtcttgttagcatcaacccctcatggtcctgcggccaccagtgcgcaaagggtggtgtggctggagcagatggtggcgaggccagcagaccctcttatacgaaggagagtagtcgtggtagtttcccggtcgacgcagatgagggccagcgccagacggagcgttgcagagggtcgtcatgtcttgcagcctcttgtacgcagaagtgaacaaccaccacgttgctcgggcacgttagtgcagctacgactcctccgcaatggagcacccccatcatctgcttcacccgccgacgcgctaggaaaccgcgtgttgcagccagcaggtggacggtcgctgccatctgtcgcggagcaagcaccctctcttggacatcgctcttggggtcaagggtag

SEQ ID NO: 127324 - DNA, 247 bp, Zea Mays
ctacttattaaggcggtaaggggtaggctgtcattccgtgttctgccattctcattcccgcactgtctttctcattcttccctccccgcaaagctcattcccattcccattctcggctgtcattccgtgttctgccagtgttctgtcattcccattaccccctccccgcactgtctttctcattccccctccccgcaaatctcattcccattctcacgtgcatcccacgcctagctaaaattaaatt

SEQ ID NO: 127325 - DNA, 300 bp, Zea Mays
atggcgtggtggcgcgcgcgggtcgtcgcgccagcgcgccacgcctggctcgccgtcgtcgtcgccgcgcgcgtgcgcggccgcaagcgccgcactgagcgcgcaggaatcgtggacctccacaaggacgtgcagacctgcgggtaccacgacgttcaggtgatgtggggcatgctgggcctggaggccggcgcgcccagcgctccggagcgccggaagcggtcgccgttctggacctggacgccgtcgttctggcacttcgcttcgtcgcgccgcaccggcacggccgccgcgcggtga

SEQ ID NO: 127326 - DNA, 1433 bp, Zea Mays
tgggctggcccggtggaggcccggtgcgaacaaccaatgcctgaaagctgaatatccctgatcccgaagccctagccgccatctctctctctctctctctcttcatcgccgcagtgcgcgctcctacaacccatcgctcaccaccacctgctcctccagcggcggcgtccagggtgaacccgaatccccaacaccatggcggggggcaagatccagaagaagcgccacggcgcggcgggaggcgcccggctgcagggcggtatcccgttcgagaagtccaaggggcagcacatcctgcggaacccggcgctggtggactccatcgtcgccaaggccggtctcaagcccaccgacaccgtcctggagatcgggccgggcacaggaaacctcaccaagcgcctcctcgaggctggtgtcaaggccgtcgtcgccgtcgagctcgacccgcgcatggtgctcgagctcaaccggcggttccaggggcacccgctctcctcgcgcctcaaggttatccaaggagatgtcctcaaatgtgatctcccatactttgatatttgtgtggcaaacatcccgtaccagatctcatctccccttactttcaagcttctgtcacaccgtccaatctttaggtgtgctgtgattatgtttcaacgtgaatttgccatgagacttgtggcacaaccgggagatagcctctactgtcgtctctccgtgaatgtgcagctcctgtcacgagtgtcgcatctcctgaaggtggggaggaacaactttaggcctccacccaaagttgattcatcagttgtgcgaatagagcccaggaagcccctccctcctgtcagcttcaaggagtgggatgggcttgtgaggatttgtttcaaccggaagaacaagaccctgggctccctctttaaacagaaacgtgttctggaattgctagagaagaactacaagactatgcagtctctccaaactgtgcaagatgcagaaatgggtgaggagaagatgtccgcagacgatgtcgcgttgctggctaatatggttgaagatatgagcatggagactggctatgataaggaagatgatgaaatggaaatggatgatgcagacatggctggagatggtgctgcaagctttaaagaaaagattatgggtatattgcagcagggcgattttgcagaaaagagaggttccaagctgagccaagttgatttcttatacctgctgtccctcttcaacaaagctggtatacatttctcgtgattggtggtccagcttctcttcagtagtagtctgtttctttctgttttatttgtcgtgctgttaatgtacttattagttactgaaaaaacctctaagcttgtgctcgtagaaattttttacaggctccgtcctagtttgagctgcaacgaaagaaaattctacttgttattgcc

SEQ ID NO: 127327 - DNA, 1682 bp, Zea Mays
cacactcacacgcacacgtatagctcgatcgctctctgtgtccgctcctcctgcctcctgcacacacatacactcagagagcatagtagcagtagccagtaggatgatgatgaacaccaacgcgatgtcgccgacagcaagtaccgacgccgacttctcgttcggccccttgcagccctacgtcggcttcgacgtcgccggcatgggcatgcccagcgtcgtcgtcgagaggtcgtcgtcgctactgcagcacaacaccagcagcagcagccacaacaacaacctagggctatacgacagtttcgacttcgcggccgccgcagggttaccgttccaagaatctggtctcctgcccccggcgagcctgccgctggcgccgtcgccgcaaagcatggcggccatggcaatgccaccgtcgtcgctgctgctgacgctcccaggcgtgcctgcggcggcggatgtcgtctataacccctttggtggcggcggcgcgggagggttcctgaagcgggaggacggcggccccctcgtggacgctgctggaggcggcgggaggatcgggctgaacctcgggcgccgcacctacttctcccccgcggacgtactcgccgtggaccggctgctgacgcggtcgcggctggcgggtggcggcgtgggcgtgggcctgggtatgggcctcggcatgggcgtgctggggctcggcgccgcccaccaccagcagccgccgccgcggtgccaggccgagggctgcaaggccgacctctccgccgccaagcactaccaccgccgccacaaggtctgcgagtaccacgccaaggccagcgccgtcgccgccgccggcaagcagcagcgtttctgccagcagtgcagcaggtttcatgtgcttgctgagtttgatgaggccaagaggagctgccggaagcggctcaccgagcacaaccgccgccgccggaagccgagcagcgcacaggacgaggactcgtcaccgccaccacccaagaaactggatacttgcataactaatactgcctcttacaatgatgatctcaagagcgcgagcaacacggcagctgcggccatctcgccgaacggcagcggcgtcagctgcctagacgtcatggacaacggccagacgagcagcgcagcggcgccgacggctctgtctttggccgccccgccgccgccgccgctgcacgagaaggacggcagtctcgactcgatgctgatgcagcgggtcctgcagggccgacgggaggacgacgacgacgaacagcgtcgccacttcatcacctcgcttgtgatgcagacgacccagcagcagcacagcggcggcggcggcgccggcaacatcttgtcgtgctcgtcggtatcagatcagcacaacggcggcggctgcaacggtttctttgaggtggacttcatctagtgtataatcagatgcatgacgtgaggaaagcaagcaaaaacaaagctgggttggtttcactgtagagcggctagtagccttttcttttttactgttgttcttagtacgacttgagctagctagctagtggttggacttcttttaccagatggaaatgcttgtgtacgtagtatgtgtattcctttttcctattgcgaaaaatgtaaattattattacgtgtatgtgtctgagttatactacttattaagcaatata

SEQ ID NO: 127328 - DNA, 1685 bp, Zea Mays
cacactcacacgcacacgtatagctcgatcgctctctgtgtccgctcctcctgcctcctgcacacacatacactcagagagcatagtagcagtagccagtaggatgatgatgaacaccaacgcgatgtcgccgacagcaagtaccgacgccgacttctcgttcggccccttgcagccctacgtcggcttcgacgtcgccggcatgggcatgcccagcgtcgtcgtcgagaggtcgtcgtcgctactgcagcacaacaccagcagcagcagccacaacaacaacctagggctatacgacagtttcgacttcgcggccgccgcagggttaccgttccaagaatctggtctcctgcccccggcgagcctgccgctggcgccgtcgccgcaaagcatggcggccatggcaatgccaccgtcgtcgctgctgctgacgctcccaggcgtgcctgcggcggcggatgtcgtctataacccctttggtggcggcggcgcgggagggttcctgaagcgggaggacggcggccccctcgtggacgctgctggaggcggcgggaggatcgggctgaacctcgggcgccgcacctacttctcccccgcggacgtactcgccgtggaccggctgctgacgcggtcgcggctggcgggtggcggcgtgggcgtgggcctgggtatgggcctcggcatgggcgtgctggggctcggcgccgcccaccaccagcagccgccgccgcggtgccaggccgagggctgcaaggccgacctctccgccgccaagcactaccaccgccgccacaaggtctgcgagtaccacgccaaggccagcgccgtcgccgccgccggcaagcagcagcgtttctgccagcagtgcagcaggtttcatgtgcttgctgagtttgatgaggccaagaggagctgccggaagcggctcaccgagcacaaccgccgccgccggaagccgagcagcgcacaggacgaggactcgtcaccgccaccacccaagaaactggatacttgcataactaatactgcctcttacaatgatgatctcaagacaggcgcgagcaacacggcagctgcggccatctcgccgaacggcagcggcgtcagctgcctagacgtcatggacaacggccagacgagcagcgcagcggcgccgacggctctgtctttggccgccccgccgccgccgccgctgcacgagaaggacggcagtctcgactcgatgctgatgcagcgggtcctgcagggccgacgggaggacgacgacgacgaacagcgtcgccacttcatcacctcgcttgtgatgcagacgacccagcagcagcacagcggcggcggcggcgccggcaacatcttgtcgtgctcgtcggtatcagatcagcacaacggcggcggctgcaacggtttctttgaggtggacttcatctagtgtataatcagatgcatgacgtgaggaaagcaagcaaaaacaaagctgggttggtttcactgtagagcggctagtagccttttcttttttactgttgttcttagtacgacttgagctagctagctagtggttggacttcttttaccagatggaaatgcttgtgtacgtagtatgtgtattcctttttcctattgcgaaaaatgtaaattattattacgtgtatgtgtctgagttatactacttattaagcaatata

SEQ ID NO: 127329 - DNA, 208 bp, Zea Mays
tgttaccttcagccctgcacaccctactatcccagtgacaactgtaattgcatccaggtgtcgagcgacttctatgacaccttgctccccaagaataatttttggcttctgctcgcaatcagctaaagcttcttttagttcatcaactaatgtttcgtttcttagttcttacagcaaccaacttaggcgccaatgttttgacatgtag

SEQ ID NO: 127330 - DNA, 117 bp, Zea Mays
atgcacggtaaatttagggatgtgctaaccctaaaacataagccaagacatgtttggtacatcgccatagcttgcatggtgtctcttgaaaagtttcacgcaaacacaaaaaaaaaa

SEQ ID NO: 127331 - DNA, 229 bp, Zea Mays
ggctaacaggtacttcagcaccgtcttctcctcgtcacctgcggggagcacaaatgacgcaaagcaggccgacttgtacacgatgctaaacaagcagagctctagagggcaaaatggcaatggtgtcacagatggcaaatcccacgcccccctacttacaaggatggaaaacatgcatatccaaatgagtcatcagaatccccttactttgtctcatctatgcattatg

SEQ ID NO: 127332 - DNA, 971 bp, Zea Mays
agcttcacttcccgtccaggctatatgttctcgatcaccacgttcgcgtccgccgtccgcgtgctctgctctcccactcccagcactaccgcatggcgcccttcctcctcctgctgctcgccgtcctcctccccgcgccgcccggcctcggcgccggcttcggggagggcgcgggcaccatcgacatcaccaagatcctcgccggcttcccggagttcagcgccttcagcaccatgctcaccgagaccaacgtcgcgctcgccatcaacagccgcgacaaggccaccgtgctcgcgcccaacaacaccgccgtcgccgcggcgttcggcggccagccgcgcatcccgcgctcattcatggcggacctcctcgcgctccacgtcgtgctcgactacatcgacgagcccaggctgggcgcgctgaagcgcggccacatgggccaaggctccgtggtcaccacgctgctgcaggccatgcgcggccgcggcacggggttccttcgcgtctactccgggcacgacgggcgcgccacgatctcctccgccgcgcccgcgaggctccagagcgccaccgtcgacaaggtggtcgccgcgcagccgtacagcctggccgtgctgcaggtgagcggcttcgtcgtcccacccggcatcagagtcccgcagccgtttccagttccaccaccaagggcgcgccacatggcagcgccaccgggacaggcgccggcggctgcgcctgaatcccaccaggaaccgttcattggttccggcccgctggttccgtccccgatcaggccggtgcctacaccaaacctcacaaatacgccaccgccggcgccaggtcagacaggagtgcacggcggcatggcagcaaagcttccatctgccgctggacgcagtgccgcgagctggtggaccggagctggagtagctgtggcgctcagtatcatgacatgcctgaatttgcatttgtaa

SEQ ID NO: 127333 - DNA, 115 bp, Zea Mays
ctgtgcggggtctggggaagggtatctttaagcgccaagccttacccgcataatatgcagaggctggggctcgaacccgggaccttccggttatagacggtaggctctaccgctg

SEQ ID NO: 127334 - DNA, 87 bp, Zea Mays
cttgactatgtgttctcccttgcgaacaagagaaacagacatatggagagattagccatagcgtcggctgctaccaataacttatga

SEQ ID NO: 127335 - DNA, 1558 bp, Zea Mays
gccattagtagcaagcaagcaagaaagcagtggtagtaggtgccacccacacggttttcacggctgccggctgggagcgaccgaggagatcgtcgtcacgctcgatggaggccctggtggggaggtactggggtctggggggacggcggtgcggggcgtgcggcggatcgccggcggcggcgcactgccggacgtgcccgggcggcgcgtacctgtgcggggggtgcgacgcggggcacgcgcgggcggggcacgagcgggtgtgggtctgcgaggtgtgcgagtgcgcgccggccgccgtgacgtgccgcgccgacgccgccgcgctctgcgccgcgtgcgacgccgacatccacgacgccaacccgctggcgcgccgccacgagcgcgtccccgtgcagcccatcggcgccgccgctgatcccgccgcggagaaggcggcgctgctgttcggccttgccgcggaagggaaggacggcggcgacgcggccaaggtcgtcgtcgacgccagtaagctggacctcctgttcgcggacgacgtggtcgacccgttcctcgcccaagacttcgccaggttcccgcacgccgacagcgtcgtgccgaacgatggatccaactgcggcgccgctgtggacttcgactttggtggcggcgtcgccgtcgccgccaagcagccgtcctacagctcctacacggcggcgtcgctgggccacagcggctcgtcgtcggaggtcggcctggtcccagacgtgatgtgcggccgcggtgggagcgtgaccggcggcgtcatcgagctcgacttcgcgcagtccaaggcggcgtacctgccttacgctgcaactcctacccacagcctgtcgtctttggacgtgggcgccgtgccggagcgcagtgacggggtcatggcgggcaggctcgcgacgccgacgccggcgacggccacggagagcagggaggcgcggctgatgcgttaccgcgagaaacggaaaaaccggcggttcgagaagacgatccgctatgcgtcccggaaggcctacgcggagtcgcggccgcgcatcaagggccgcttcgccaagcgcgcggatgacaacgacgccgacgccgacctcgacgaggctgccgcgccggctccgccggcgcggtcgcagccgcagccgcagccgcagccatcgtaccgctacgtgctcgacttcgccgccggctacggcgtcgtgcccacattctgatgacgcgtgccgtgtgagtgttgccgcgcgcgtcgcgtgccccatgttttcacggattgggccggcgcgcgtgcgagccatgctgcatgcgcgcctacgtgtttgctggagcggcgagctcctagttggcgatcacatgccgttttgggctagccatggttaaattagcaggctagcgtgtactgctgctgcgtttgtttgctggggcgaccagttctactaatagtacgtagtaccgtgtaattttgggtcaggaagagatgcttagcatctgtttcgattgatcgatgtagtattatgctataattggaaaggcctctcgatctatttgc

SEQ ID NO: 127336 - DNA, 80 bp, Zea Mays
tttttttctctgttgctcatattgctgcactttgctgctgaatctatccctcttcccatgttttattagtgacgtttact

SEQ ID NO: 127337 - DNA, 2277 bp, Zea Mays
atggaagttgagctgccaaacatccataaagctacttcgagtgaccattggagtttaaccagcagccaatacccgtctggtaaatttcctaaggtctcagtgggtatcatgattccgaaggcaggtagtataccaagagccagaggtggagatgctaccccaactcctacatttgacaggaacttgtctcaaggaactgatggtttatctagaccaaaaggtgataatacttcacttcgtgtttcacaagaagctctgaaccatgatgtatccactgaaggggctcctaaagctgatcctgttacgaaggtctctgtatcacaacctgatgacaatacatgtgagcaaacaggaaccttttcctttggaacaagaagagaacaaggcatcagcgttgaaaaattggagacacctgagtttttaagttcccaaagaaaacggaacacggagtctgcagataaagccaaacccaatagtgagatgctcaggatgaagttgtgggagatccttggtggcacttcacaaaacaagcaggccgctgcttcaccaaaccctgatgacatggagacacctgatcagcctaaaggtcaaactgtcaaaggaccatcttcagggaacaaggaggttttcacttcaccttttcttgataacatcaagacaccagatccactgaagcgtcaaacggtgaacttcacaaagtgtaaactgtcccttgatccaattgaatcagattctgatagtccaaaagttgatgaaagaagacctgttactcgctccttgggacgtaagaaagcactggcatcctccaagaagcagagccgaagttcaaagaaaccattatctacttttcagtctacacccaagaagaaaatgctggacaatgtgtttatctttaatgagaaatgcacacctaaaacagtggatcagggtgaaacaaataaagcgactgagtcacgtggtagcaggtctcctgattctgccaaaaaaagagtaaacaggaaacagccatacctttctccaactgaggatgaagggattaaaagttctgaaacaagttttgcaaaaggatataaatctcacaaatggccttcagatattgatgttcctgataaatctcctgttgagcatatgggtaggaaatcaaatctaaaagaggacagaatgagcaaaagacgcttatcttcagctgctccttttcccactgctgcaacacaagaaaatactgattctgataaagaacaagaacaatgcccggaaaacttcctaaccagggcttttgatcaagcctccaaggagctgagcaaaagcgcaaagaaaccattttctacttttcactctacacctaagaagaaaatgcagggtaatgtgtttaccttcaatgagaaacgcgcacctaaaacggtggatcaggacaaaatgaatcaaactactgagtcgcctggtagtgagtctcctggttctgcagaagaaagagaaaacagtaaacaaccatctcattcacccctttctccaactgaagatgaagggactcaagggagtaaaagttccgaacaaagctttgcaaaaggatataaatctcaaaaatggattccagatatcaagggcacagataaatctccccttgagtatgttggcaggaaaacaaaactaaaagaggatagaatgaacaaaagatacttatcttcacctactccttttgccacttctggaacacaagaaactatagtttctgacaaagatcaagaacaatgcccagaaaactacctaactagggcttttgatcaattgatagtggttctgggaaggtttcaaactaagatcaagtctgaaacaagcaagaaaagttctgagattcttgcagctactagagagactatatgtcagcaccttgagggggttgaggcgcagatgcaggctgacgtggacaaattggtcaatgcaggcaggtctaaaaggaaacgcctagaatctacatttgaagatcaacaagaaaagttaagaattcttcatgagaagttcaaggaggaggtcaacaagcagcttctgaattgcaggagttctcttgaggattttgaatcctaccatgcagaacttaagggagtagctgacaagcaaaaatcatcccacaagaagctcttagcaaatgccgagaaaacagtaggcgctcagctcaacgatgcagaaaccaaaatcgcagaggtccagaagagagcacgcaagaggatgaatggcctgaaatacgtgctcaaggagcttatcacagagactgttgattga

SEQ ID NO: 127338 - DNA, 125 bp, Zea Mays
aggtacggcaccggcgactgccccgccgccggcatcgtgctcgacgacctcggcgacggcgccgcggggccgtggctcatgcccgccgtgcccgccacgcccacgcccatcgggtcctccgcgcc

SEQ ID NO: 127339 - DNA, 2344 bp, Zea Mays
gaaccgaaacccgatacatccaggcgtacagccctccgcctcgtgaaggcaaagcacgcgcaaagccaccacagcgtcttcatcttcgtctccagtccaagcaagcgaagagcacccctcgagatctctccctccccgcgccgccatggacgcagttgactcggtagtcgacccgctccgggagttcgccaaggacagcatccgcctcgtcaagcgctgccacaagccggaccgcaaggagttcaccaaggtcgccgcgcggactgcgatcggcttcgtcgtcatgggattcgtcggcttctttgtcaagctcatcttcatccctatcaacaacatcatcgtcggctccggctgatccgtaaacctcaggtatactttccaatcacgttatacccctgctctggcttccactggatgtgtgtaattcggtagatctcttgtatcgagccacatgcttaggacaattcgttactgttacatctttttgtgtaaattgttctgccgagtttggtttgtgtggtaatttagatttggtgattggagattcgctgaatgagaattcagcataggtgtttatctgctgtctttaatggtatactgactattagtagtgcttgtgagatccaatatcctctaggattctcatactactataatggatgatcagattttttttatttgttctagactctagtagcttggtttggaagccaattatctgtttttacggggtattcccttgaaactgtggcattaatgaattcatgcatctatatggagacaattgcatatttaggactctaaacaatgcgcttcacaataatgccatccgaaagatttaattcgtaaaaaaggtactacaaaccttctctaattgattatactaccattcaacgtatattcttcctttttataatctgatctcatgtattttctctgcaacaagacagttttaccccttataaatctctcctctggccaacgtcccagcaacgagtgagcatccacccgacttagattagcagattcgtttcctctggttccttcatgaactcatgctgaaatggattgctaattaatgctattgtgggttgttcattactgattgatgagtactatacattacctgacatgccgtcacgacacaaatttccttgctttactcaattactcagtgtacaattggtgcatcaaaattcaaaatggacttgctgctgtgatttattcatgcttggatcgattcaggtggcataagtactaacttttttagcagttcaatgggcacatccattccatgcaactggcaaccctttttattttccttcgtcatcatgtgctaatccataagaaagcattgcagatcatgctttatttctctggagtaattagctttttttaggaatggtaattaaccgttttaaagagaaatacttctttgtttataccctgcccactgcccgtcgcggcgcggtggcgtccccgccccctgcccggcgcggtgcggtggcggctctacccggtgtggcgcggtggccgtcgcgtgaacagccgtggaggagagaggcgtggtggcggccctgtccggctcggcgagagaacgcgaaatctcagaggaagatagatctcgaggaagatagagacaaccgagggagaggctagtggctgcaggagtggacaatggcgtcactaccttggaggcagcaccgttttcagctctgatttccgcaaagcaattcctttaggacttgtgttgttaaagggcaactcccttatcttttcctctcttgaggtcgtgtggtagatctggaactcttttgtacctggtgtcgaatagtcttttgtggatcagcgggtgacaaaattaaatggttaccgttgtcttggggattgctttgtgcgtttgtggtgcggcaccgttcataatttaccttttgacgcagcgtagcagtctgaatatgtaattttcgtacgaaagctgccaaagctaagagactgcgtaccactactgaaatcatgccatgaataattatgacttattagttctagatattattgaagttatataactttcagcataacttataatatggataactatatgataacctcataattttaaagtagtatgattaattagaattagtttaaaagtcacaagttgatttcatgaatacatctcttttcctagttgatttcataaacataaacacgactaacagcatcaaaagagtcacaatatatataaaaaaacaagcacaaagttggtcaacaaacatatattttggttctccgacaaattatgatgagattatcatatatagtccaccaagaaaaggaaacaaaa

SEQ ID NO: 127340 - DNA, 1059 bp, Zea Mays
gaaccgaaacccgatacatccaggcgtacagccctccgcctcgtgaaggcaaagcacgcgcaaagccaccacagcgtcttcatcttcgtctccagtccaagcaagcgaagagcacccctcgagatctctccctccccgcgccgccatggacgcagttgactcggtagtcgacccgctccgggagttcgccaaggacagcatccgcctcgtcaagcgctgccacaagccggaccgcaaggagttcaccaaggtcgccgcgcggactgcgatcggcttcgtcgtcatgggattcgtcggcttctttgtcaagctcatcttcatccctatcaacaacatcatcgtcggctccggctgatccgtaaacctcaggctagtggctgcaggagtggacaatggcgtcactaccttggaggcagcaccgttttcagctctgatttccgcaaagcaattcctttaggacttgtgttgttaaagggcaactcccttatcttttcctctcttgaggtcgtgtggtagatctggaactcttttgtacctggtgtcgaatagtcttttgtggatcagcgggtgacaaaattaaatggttaccgttgtcttggggattgctttgtgcgtttgtggtgcggcaccgttcataatttaccttttgacgcagcgtagcagtctgaatatgtaattttcgtacgaaagctgccaaagctaagagactgcgtaccactactgaaatcatgccatgaataattatgacttattagttctagatattattgaagttatataactttcagcataacttataatatggataactatatgataacctcataattttaaagtagtatgattaattagaattagtttaaaagtcacaagttgatttcatgaatacatctcttttcctagttgatttcataaacataaacacgactaacagcatcaaaagagtcacaatatatataaaaaaacaagcacaaagttggtcaacaaacatatattttggttctccgacaaattatgatgagattatcatatatagtccaccaagaaaaggaaacaaaa

SEQ ID NO: 127341 - DNA, 189 bp, Zea Mays
cacctctatcattgcatctatttggacttgcattctaattttttgatctcttttttatgctctatcttttcatatgtagttgtttgtactttggggtcaggcgctcattttcaggaatcgattcttccagcaaacaagtcgtgttatttcttaatgtctaagtgaatgctactttctttcttctttcaa

SEQ ID NO: 127342 - DNA, 91 bp, Zea Mays
atatcttcgtttcccatttcaatcctaagtttgattctgaatttcaaacatatatttgatgcatcaatcagaaatctcagtatgacaatgc

SEQ ID NO: 127343 - DNA, 606 bp, Zea Mays
atgcgagcacgaagacgcttgcacatcgacgcaaagagagaaaatcagagcacgaagggacgctggaatccggactggacacgacaacaaccatacagtgaagcacgtgcgcatagccagggacaaggcacggagctgaaggtcgacggcgttagggttcggcaacaaggaaaggtcgagcacacagaacgactagctacggctctggagcaggccgagcatgaggccatgtcgatctgggcgcggggtacagaaacagccgaccagagtagtttcgcgcgcacggaaaccagaacaacagggagcggcgcgcggtcagcagaggagccgagcgtggcatcacgacgagcgagcagagggacacgactacgcgcacagggagctcggtacggccagggagatgcgctgctcatgtggccagggagttcaacgacggcgcgagcaggaaacggaggagcggtcgagcgaagtccgggcgaggttgacggctcgacggggtggccgggcagagggagcagctgcgcgttctcagagagcttgactgggcacagcgcgaaggggttcaggtgggatcaacggtggctggccatggaaggtggagcttga

SEQ ID NO: 127344 - DNA, 225 bp, Zea Mays
gcgcgatatggcaaacggctacacacattattttctcggatcacgaaacgaaaaatccgaggattaacgattttggctaaattttgtttagatagcttttgggactatgctgggcaacacgtaaggggactgaatatcagatgcattatttgagacaatactggtttagtcgaactcggataaaaatttatccgatgtctaaacacagttgattttattatttta

SEQ ID NO: 127345 - DNA, 2569 bp, Zea Mays
ggctgtctttgttttggccaccgccaccttcctctgctcataagtagaggcgagcgtggcgtcaggccgggagcgcgcggacgagacgagaggcgaagagagcagcccaaacacgactactgcattacacacacacacaggataggagtacgtgtctgcttctctctccccgctggcctcctcctccagtacttcagacagtgcaccgtgctgcggcctctttcatccctcaaggccggccgcccccagaaccagagtcggagcgaatccatggctcctccgcccctctcctcctggccatgggcaagcctcggccagtacaagtacgtgctgctggggcctctggtgtggaaggtgctgcaagaatggcgggagcaggcgggcctgccgctcggctcctggtggctgcacctgttgctgctgttcgcggcgcgcggcctcacctaccaattctggttcagctacggcaacatgctcttcttcacccgccgccgccgcgtcgtcgccgacggcgtcgacttccgccagatcgacgccgagtgggactgggacaactttctcgtgctgcaaacgctgattggggccacggtggtcaacagcccactgctcccgggcctgcggcagctctgcctgtgggacccgcgcgggtgggccgtcgccctgctgctgcatgtgggcttctcagagccggtcttctacctggcccaccgggccctccacagggccccgctcttcgcccgctaccacgccgcgcaccactcctcgggcgtcacccagccgctgacaggtgccggatcttctgcgcccttccgcacgccgaccactcattgcggcatcatttctgctcccttcgctctcgccattatgacgaacagagtacagtagtatagtaatgagcgtgtttttttttgctcgtttccattgcttgcatttgttgcagccgggttcgggacgccgctggaggtcctgctgctgactctggtgatgggggccccgctggcaggggccttcctggtgggggccggctccataggcctggtctacgtgcacgccctcgccttcgactacctgcgcgccatgggttacagcaacgtggaggtcgtgtcgcccagggtcttcgaggcgttcccgctgctcagatacatcctctacacgccttcgtacctgagcctgcaccaccgcgagcggtgtcgcaacttctgcctgttcatgccggcgctggacctggcgggcgggacgctggacgagcgggcgtgggcgctgcagcgcgcggcgtacgacggggggccgggcggcggcgcgctggggacgccggagttcgtgttcctggcgcacgtggtggacatgatgtcgtcgatgcacgtgccgttcgcgctccggtcgctcagctccaccccgttcgccaaccacttcatcctgctcccgttctggcccgtcgccttcggcttcatgctgctcatgtggtgctgctccaagaccttcgtcgtcagcttctactacctccgcggccacctccaccagacctggtccgtgccccgctacggcttccagtacttcctgccggcggcgaagaagggcatcaaccagcagatcgagctggccatcctgcgggccgacaggatgggcgtcaaggtgctcagcctcgccgcgctcaacaagaacgaggctctgaacggaggcggcaccctgttcgtgaacaagcacccggacctgcgcgtgagggtggtgcacggcaacacgctgacggcggccgtgatcctgaacgagatccccagcaacgtgagggaggtgttcctgaccggcgccacctccaagctcggcagggccatcgcgctctacctctgcaggaagaagatcagagtcctgatgttcacggtgtcgtcggagaggttcgtgaagatccagagggaggcgccgccggagtaccagcagtacctcgtgcaggtgaccaagtaccaggccgcacagaactgcaagacttggatcgtgggcaagtggctgtcgccgcgtgagcagcggtgggcgccgtccgggacgcacttccaccagttcgtggtgccgcccatcatcggcttccggcgggactgcacctacggcaagctggccgccatgaggctgcccaaggacgtgcagggcctcagctcctgcgagtacacgatggagcgcggggtggtgcacgcgtgccacgccggcggcgtggtgcacttcctggaaggctggggccaccacgaggtgggcgccatcgacgtcgaccggatcgacgtcgtctggaaggcggcgctcaagcacgggctggcgccggtgtgatcatatcgcatcgtcgagccgcaccgcgcgcgcggtttgttttgcagcggctacctacctagctgcatatgcttgccaggccggggtccagccgccgcggttctgtgtgcatgcatgcaacagcccagcagaccacgggctaccgtgcgtggctaattcttgtactagtactactcctgctgtatgtaccgtgccgatggggcgatgggttaattaaagtcctctcgactacgctacgacgatgcatggcttctttcgtgcc

SEQ ID NO: 127346 - DNA, 2494 bp, Zea Mays
ggctgtctttgttttggccaccgccaccttcctctgctcataagtagaggcgagcgtggcgtcaggccgggagcgcgcggacgagacgagaggcgaagagagcagcccaaacacgactactgcattacacacacacacaggataggagtacgtgtctgcttctctctccccgctggcctcctcctccagtacttcagacagtgcaccgtgctgcggcctctttcatccctcaaggccggccgcccccagaaccagagtcggagcgaatccatggctcctccgcccctctcctcctggccatgggcaagcctcggccagtacaagtacgtgctgctggggcctctggtgtggaaggtgctgcaagaatggcgggagcaggcgggcctgccgctcggctcctggtggctgcacctgttgctgctgttcgcggcgcgcggcctcacctaccaattctggttcagctacggcaacatgctcttcttcacccgccgccgccgcgtcgtcgccgacggcgtcgacttccgccagatcgacgccgagtgggactgggacaactttctcgtgctgcaaacgctgattggggccacggtggtcaacagcccactgctcccgggcctgcggcagctctgcctgtgggacccgcgcgggtgggccgtcgccctgctgctgcatgtgggcttctcagagccggtcttctacctggcccaccgggccctccacagggccccgctcttcgcccgctaccacgccgcgcaccactcctcgggcgtcacccagccgctgacagccgggttcgggacgccgctggaggtcctgctgctgactctggtgatgggggccccgctggcaggggccttcctggtgggggccggctccataggcctggtctacgtgcacgccctcgccttcgactacctgcgcgccatgggttacagcaacgtggaggtcgtgtcgcccagggtcttcgaggcgttcccgctgctcagatacatcctctacacgccttcgtacctgagcctgcaccaccgcgagcggtgtcgcaacttctgcctgttcatgccggcgctggacctggcgggcgggacgctggacgagcgggcgtgggcgctgcagcgcgcggcgtacgacggggggccgggcggcggcgcgctggggacgccggagttcgtgttcctggcgcacgtggtggacatgatgtcgtcgatgcacgtgccgttcgcgctccggtcgctcagctccaccccgttcgccaaccacttcatcctgctcccgttctggcccgtcgccttcggcttcatgctgctcatgtggtgctgctccaagaccttcgtcgtcagcttctactacctccgcggccacctccaccagacctggtccgtgccccgctacggcttccagtacttcctgccggcggcgaagaagggcatcaaccagcagatcgagctggccatcctgcgggccgacaggatgggcgtcaaggtgctcagcctcgccgcgctcaacaagaacgaggctctgaacggaggcggcaccctgttcgtgaacaagcacccggacctgcgcgtgagggtggtgcacggcaacacgctgacggcggccgtgatcctgaacgagatccccagcaacgtgagggaggtgttcctgaccggcgccacctccaagctcggcagggccatcgcgctctacctctgcaggaagaagatcagagtcctgatgttcacggtgtcgtcggagaggttcgtgaagatccagagggaggcgccgccggagtaccagcagtacctcgtgcaggtgaccaagtaccaggccgcacagaactgcaagacttggatcgtgggcaagtggctgtcgccgcgtgagcagcggtgggcgccgtccgggacgcacttccaccagttcgtggtgccgcccatcatcggcttccggcgggactgcacctacggcaagctggccgccatgaggctgcccaaggacgtgcagggcctcagctcctgcgagtacacgatggagcgcggggtggtgcacgcgtgccacgccggcggcgtggtgcacttcctggaaggctggggccaccacgaggtgggcgccatcgacgtcgaccggatcgacgtcgtctggaaggcggcgctcaagcacgggctggcgccggtgtgatcatatcgcatcgtcgagccgcaccgcgcgcgcggtttgttttgcagcggctacctacctagctgcatatgcttgccaggccggggtccagccgccgcggttctgtgtgcatgcatgcaacagcccagcagaccacgggctaccgtgcgtggctaattcttgtactagtactactcctgctgtatgtaccgtgccgatggggcgatgggttaattaaagtcctctcgactacgctacgacgatgcatggcttctttcgtgccaaatcgctggtttaaatcctcaccagaataagaaattaaacacagaggcttaagaaacaaattatttatatacaaaat

SEQ ID NO: 127347 - DNA, 696 bp, Zea Mays
agtatataataatcatgcatggtaataacgacggcggtgcagacttggatcgtgggcaagtggctgtcgccgcgtgagcagcggtgggcgccgtccgggacgcacttccaccagttcgtggtgccgcccatcatcggcttccggcgggactgcacctacggcaagctggccgccatgaggctgcccaaggacgtgcagggcctcagctcctgcgaggtacgtactaaattacgaatgcgtctttgttccgccttcgatcgatcgatgatgcccatgccatgcatgatctgattctgatgcgaccacgcagtacacgatggagcgcggggtggtgcacgcgtgccacgccggcggcgtggtgcacttcctggaaggctggggccaccacgaggtgggcgccatcgacgtcgaccggatcgacgtcgtctggaaggcggcgctcaagcacgggctggcgccggtgtgatcatatcgcatcgtcgagccgcaccgcgcgcgcggtttgttttgcagcggctacctacctagctgcatatgcttgccaggccggggtccagccgccgcggttctgtgtgcatgcatgcaacagcccagcagaccacgggctaccgtgcgtggctaattcttgtactagtactactcctgctgtatgtaccgtgccgatggggcgatgggttaattaaagtcctctcgact

SEQ ID NO: 127348 - DNA, 165 bp, Zea Mays
atgagagcaaagcagttgtttcccccaagaaccatatgctacctggtcaataaagttgagagcgggtggtggccaaggctgctgaaaaaggagggcaaggcacctgtgttcttgaaggttgactaggacaaatggcaggatgaggatgatcaagagttggatgtt

SEQ ID NO: 127349 - DNA, 452 bp, Zea Mays
gacatgtttacttacaaaagctccaccaagcttgtcgagcatccaatgcttgggcgcattgagcctcttcaagtgcttcttcaatcccctagcctggattgcaaaataataatgatcaacaaaagcgcaacagattccagtatggcattcataggtgactcatccagattgcattagctgttaaaagtaacagcaactacacactacttgaaaacaaaagacccttttcatacatgtctatctctattacttatatatgagcagtgccatcgtcagcacctcctgtatgtatacctaggacgacatcagctggcgaggggcacggggacgcacgggcgtcttggacgggctcacccttattggcaaggatcccagtaccacaccgctacagtgagagcggcagtagcactttctgccttgaaaaaaaattgaggcccagtcttaaaacaact

SEQ ID NO: 127350 - DNA, 655 bp, Zea Mays
ttgtgaagtgatttaggaacatctatagggtgtctgatgtctgttggacaaggacaactataggtgggcctaattacttgggaggttccgtcacagtactgatggtactccggtggcgccatttacatctcaagcaatttttctcaaagttggattcttgatccctgcatatcgctggtcgtgacccgtgggcacggcgctcggatccggcagcagcagatcgaggcgaggccgcgagggaggagaagagccatgatggggggcatcagatcatcgctcaacgacagcagtatgggcgtcctcttcctgctggtgctcctgctggatgcgggcgtcgtcctcctagccgtgctcctagcagtagaggctccagtagcaggagaagaggcaggatgcgggcgtcgtcctcctggccgtgctcctactgggcggcgtgtcgtgctcctgctggtgctcgacgactggagcctgctgcttggtggtgctcggcggatgagcaggggatccgatcgggtaggggatgaggatgagatgactgatcggatcagatgggcaggggatgaggatgagtggatgaccgaccggatgagttggtttgctcggaagctgccggctgggggatggggattagatcattagtgtttgtcggtttggg

SEQ ID NO: 127351 - DNA, 1338 bp, Zea Mays
acgtgatccacggtccgcccgccgcgcaagctgggccacgggctcgcgggcgggcatgcgccggttccgcgagcgaccaccccgccatccgcggagcctgccctgcgctgcccaccgctcctccgcctactccggcctcagctaataacgatgggtggtgggagccgagccctttccctctcctccctctgcgccaccaccctcgccgccgccaagcccccacagcaccccgtccccttcgccccggctcaccgcgcgctcccccaccgcctcgccgccgccatgtcctcctcttcctccccgacccccgccgcatcggtggacgccggtgccccggccccttcggcgtccaacgccatcgacttcctcacgctctgctaccgcctcaagacgaccaagagggcggggtgggtgaagcgcggggtgcaggcgcccgagtcggtggccgaccacatgtaccggatgggcgtcatggcgctcgtcgcggccgatctacccggcgtcaaccgcgacaggtgtgtcaagatggcgattgtgcacgacattgcagaagcaattgttggtgacatcaccccttctgataatgtacccaaggaagagaagaaccgcagggagaaagaagcattggaccatatgtgcgagctgcttggtggtggttcaagagcacaagaaattcgtgaactttggatggagtatgaggagaatgcgtctttggaagcgaaggttgtcaaagattttgacaaggttgagatgatacttcaagctctggagtatgaaaaggagcaaggacgggaccttgaagaattcttccaatcaacagcaggcaaatttcagacagacttgggaaaagcatgggcagcggagattgcatcgagaagaaaaacaaagtgatcaaacgatgctcattttaccacgtcggttccaagacaacttgctggcacagcatttctgttgaactttgcttttactagatgatacttcgaggtggcattgagacgtagggttgccttgggaatgtgaacttcaccacatttcttggtcctgccctgaccctgaggcatattgggcttgcgataccagggctctagataagtaagataacccactttgggtattggttgtagatgctcctgccaagggcagttagctggatccaacgggaaggttcagcaccagctggtggtgatgtaaaatccttcacttcatgaattactgtaccattaccgtttctcttgttaatccagcctcacggtttcggccttttttaatgtaattctattgttttcaagtataatgagcctgaatatttgctatatccattttggttgttgatgatga

SEQ ID NO: 127352 - DNA, 387 bp, Zea Mays
cactgtgaaaacgaatgaattatgttaaactgcccccaatttttatgtttgctacatcccagatcctcacatgacattcagaatgattcgtctgttcttgaaatctttattatcctttttaacatgctactccatccgttccaaactatagttctttctggcttttctaggtacgtagcttttgctacacatttagatatatatagcttttagtatgtatctagaaaagctaaaagaacttgtaatttggaacataggggagtacatgttatcttacatatgcaacattggtgtgattgtgtactccaaatgaactcaaacccctggtatagtatatagtcgaacaatctcaagtttagccaggttgatataaaacaatataaaaaa

SEQ ID NO: 127353 - DNA, 304 bp, Zea Mays
gttcagttgagacatttgcggatcaagtgtgaagcaaaaccattttgacatcagattcacgaccaggtttgtgggcgagcagatgtgtggggtgacggcgttgttcctgagatggcagcgcatctggactacttatctattaatttcttgagaattaaagcaggaggtcttgaatatttgtccttaacagtttatattgtcagttttacaagagtagatatctcattacagatatctcattacactggttgttgttcttggatttgaaattttttgttggagttgttgtctggaaatgataaga

SEQ ID NO: 127354 - DNA, 624 bp, Zea Mays
atgcctgcccctgcccccgcacctgtccctgcgatgcccgcggccatagtgccccctcccttcgacgcgctctgcggtctccagatgcgagtccggggctcgctatccgtggaaggcgaggagagacggtgcattggctctcgatccgcgctctacatggaaggtgaggcagatcagggggagtggctcagagcagtcgcctcgatgtcgtccaacgcgccgtccggtgaggtgtcgtccaagcacgacggcggctacgggatcgtgggtgggcccaacggcaacaccgtcgcgcccgccaccaagtccaccgtcgtcgagaccatcatcgagagggagtcgctctcgctggagaagttgtgcctcgtcatgggcctccacgacggatcaaccaagtgcttatatcctgttttggaatatagttccaagaagaacgctaaggggaacaaacctagaaaagaaagaaacataattttgaaggtttcagaacgcctagagaagctattgaagatttatcatggttacctaatagttcgttgccaatcaatcatcatggtcactaatgtagcaattagggcatgtcaattacctgaacttgtgctgaagaagaatatgccaatttga

SEQ ID NO: 127355 - DNA, 563 bp, Zea Mays
ttacctatacagacgatcaccatccctgagataagaaaccatccatggttcttgaagaacctcctaactgacctaatggatgacaacacgatgagtaagtagtatgaggagcctgaacaaccgatgcagagcatgaatgagttcatgcagatcctggctgaggcgaccattccagcagctggttcacgtggactcaatcagtttctgaatgatgacattgacctcgacgatgacatggaggacctagactcagatgtcgatcttgacctggaaagcagtggggagatcgtctatgctatttgacaacattgaatactttgttgtgtcgtagggtaccaagataattagagacaagaggggcaggttgctgtgcttgcaagtatctgttgcagatgttgttcatgcctgatgctgatgcccctttttttatactgttgtgtttggatggtgtaccaccagtgttttacaacagttgagcctttggaattgctactgctaaaacttcattcctctgagaaaaccttttgtttttgctttcccagccgggggacaacgaaatactt

SEQ ID NO: 127356 - DNA, 1347 bp, Zea Mays
gactcgtcctcttccctcgccgcgagctccgggttcccctgcgcatagctaggccaagccaggtataccccaaccatcgcatgggagccgcgactgccccgacgaagcggagacgcggccccagcaagacgcaggaggaggccatggcgcgcgcgagcccggaggcgcggcggcggccgcggccgcgcctggtgggctatgaggagctgccggagtacctcaaggacaacgagtacatccgcgggcactaccgcgccgagtggcccgtccgcgacgcgctcctcagcgccttcgcctggcacaacgagacgctcaacgtctggacgcatctgggagggttcctgttcttcctagcgctcgcggtcgccggaggacggaaggaggccgccgacggtgccgctccgggtatcatgaggttcgttgtgagactagattcatggggcagcgaccatccgggccagccgaggcacgacgacgccggggcatcgctgcccagtgtgccgcggtggccgcggacggtgttcctggtgggggccatgtcgtgcctcgccatcagcgcggcggcgcacctgctggcgtgccactcgcggcgcgccagcgcggtgttctggcagctggactacgcgggcatctccgtgatgatcgtcgcctccttcgtgccgccggtgtactacgccttcctctgccacccgccggcgcgggcggcctacctgtgcgccatcgcggcgctgggcgcgctggtggtggccgcgctgctctccccgtcctgctcgtccccgcgctaccgccgcctccgcgcggcgctgttcctggccatgggcctgtcgggcgtcgtcccggcgctgcacgcgctctggctcaactggggccacgccgcctgctacctggcgctgggcatcgaggtcgtcatgggcctcacctacgccacgggcgcctggttctacgtcagccgcgtgccggagaagtggcgacccggggtgttcgacgtcgtcggccacagccaccagatcttccacgtcctcgtgctcgtcggcgccgtcacgcactacgtcgccgtcgccgtgctcatccactggcgggagaaggtggccgtcgcctgtggcgccgcgtcggcgtaggctcacctgtttggttggctcactcaacaaccattcgaatggcaaaccaagtagtcgcaacatagatcagctctagagtttgagtgtgaccttcgacgatttataatttaattgatggggtgattgagtatggtggttcattagttcatgagatttatctgtcgagtgagtgcgtgcctcagatttccagaccttttgtttccagcctactcaactttttgtcccgtca

SEQ ID NO: 127357 - DNA, 1239 bp, Zea Mays
atggactccacggtgtttgaggttactgaattggatggagcaacaatgattgtcacacaaacaatgagttcgaagaaggttccgtaccacaagcatagggaggctgaggaggcgaggaagaagagggaggaagatgaagcagcacgtgtatatgcggaatttgttgagtccttcaaaggtgatagctcatctggggctaagtttatccgaggtggtgtgatcgaccccaatgcaaagctgaagactgactcggaaggtggaaaatccaaagatggggggtctgttccaaagaagggcagtaggtatgttccatccttcttgccaccatcatttgcaaaagagcctgagaaaaagaaggaaggggagaggccaaaggaaaaggaaaagggaaagccacgagtaatagatagattcttggaggaaatcaagcttgaacaagagcagcgagagaagcgccatcaagatcgagatcaccgccgtgaaggtcgccatggcgatagctccatgtcctcgagccggtttgatgaactaccagatgaatttgatccgactgggagatttccaggatcatttgatgatggtgatcctcaaaccaccaacttatatgttggcaatctatctcccaaggtcgatgagaattttcttttgaggacatttggtcggtttggacctattgctagtgtcaagattatgtggcctagaacagaagaggaacgcagaaggcaaagaaattgtggttttgttgccttcatgaatagaacagatggacaagcagcaaaggatgaaatgcaaggtgttattgtgtatgactatgaactcaagattgggtggggtaaatctgttgctcttccgtcacaggctttgcctgctcctcctccaggacacatggcaatcagaaataaggagggtggtacagctacagtcatactttctggtcctggtggccctgctgttgcatctattaaaccacaaacctcagagctggtccttacaccaaatgttcctgatattgtggttgctccacctgatgatgggcatcttcggcatgtgattgacacaatggctctgcacgtacttgatggtggatgtgcttttgaacaagctgtaatggagagagggcgaggaaatcctttatttgatttcttgttcaatcttaaatctaaagagcacacatattatgtttggaggctatactcatttgcccaggtacttgttgctgtctatagtacaaaattttaa

SEQ ID NO: 127358 - DNA, 1285 bp, Zea Mays
cgtgcggccgtgcggcctctctctttctttcccagcgccaccgccgacctagccaggtgaccaggtcttcgtcaggcccatagccagcgacgaacacctaagtacccaacagatgagttcgaagaaggttccgtaccacaagcatagggaggctgaggaggcgaggaagaagagggaggaagatgaagcagcacgtgtatatgcggaatttgttgagtccttcaaaggtgatagctcatctggggctaagtttatccgaggtggtgtgatcgaccccaatgcaaagctgaagactgactcggaaggtggaaaatccaaagatggggggtctgttccaaagaagggcagtaggtatgttccatccttcttgccaccatcatttgcaaaagagcctgagaaaaaggaaggggagaggccaaaggaaaaggaaaagggaaagccacgagtaatagatagattcttggaggaaatcaagcttgaacaagagcagcgagagaagcgccatcaagatcgagatcaccgccgtgaaggtcgccatggcgatagctccatgtcctcgagccggtttgatgaactaccagatgaatttgatccgactgggagatttccaggatcatttgatgatggtgatcctcaaaccaccaacttatatgttggcaatctatctcccaaggtcgatgagaattttcttttgaggacatttggtcggtttggacctattgctagtgtcaagattatgtggcctagaacagaagaggaacgcagaaggcaaagaaattgtggttttgttgccttcatgaatagaacagatggacaagcagcaaaggatgaaatgcaaggtgttattgtgtatgactatgaactcaagattgggtggggtaaatctgttgctcttccgtcacaggctttgcctgctcctcctccaggacacatggcaatcagaaataaggagggtggtacagctacagtcatactttctggtcctggtggccctgctgttgcatctattaaaccacaaacctcagagctggtccttacaccaaatgttcctgatattgtggttgctccacctgatgatgggcatcttcggcatgtgattgacacaatggctctgcacgtacttgatggtggatgtgcttttgaacaagctgtaatggagagagggcgaggaaatcctttatttgatttcttgttcaatcttaaatctaaagagcacacatattatgtttggaggctatactcatttgcccaggtacttgttgctgtctatagtacaaaattttaa

SEQ ID NO: 127359 - DNA, 1086 bp, Zea Mays
tctacaagtttgggcagactggttcctgttttctgatgcatttcttaatgggctgagggctacttttcttagatcaggcaactctggtgttgttccgtttcactcgttatgcggtgatgcacccgaaattgaaaagaaaggtagctctgaggatggaaatgatggatttaagcttaatgaagacggtgccttggctactggaaaggcagcagcgacaaaggagctattagggctcccactagctgaacttgaacgccgctgtagacataatggcctctctctgtgtggtggtaaagaaatgatggtcgccaggctgcttaacttggaagaggctgagaaggaacgaatatacgagaaagatgttgacatgaaatatgtgcagggtgaacagcatgtggttggaagagaggacagtggtgtgaatgctcatagtacttcaaggtttggtgaaggttctaatggtgatgaattagatgtctctcggaacagtacgagagctggtaaaggacgttctggtggatctgcttctgccgaacttgaatcatttccaagcaagaagccgaaatacgatcctgttttgccagcttctaaatggagtcgagaggatgacatcagtgacgatgaagataggaaaggtggccgaggcttgggattaagctattcatccggaagcgatattgctgatggtctcggaaaggtcgatacaacagaagctagtactgaccacacaagtcgtcatcatgatacgattgttgatgaagagcacaggcagaagttgaggcagattgaaatttctgtcatgcagtaccgtgaatctcttgaggaacagggtctgcgtgacttggatgagattgagaggaaggttgccagccatcgaagacgtctccagtcagaatatggtttatccactccagctgatggtgctaacagcaggcgatcttctggtatgtaagaaggcagggaaggatacctgcttatttgacagtatcatctctgttggatttgaacttgcagcatcattgacttccacaactccatatattactttgtgcactaacaatgagccatgctgtacccctcaacttc

SEQ ID NO: 127360 - DNA, 1526 bp, Zea Mays
tctacaagtttgggcagactggttcctgttttctgatgcatttcttaatgggctgagggctacttttcttagatcaggcaactctggtgttgttccgtttcactcgttatgcggtgatgcacccgaaattgaaaagaaaggtagctctgaggatggaaatgatggatttaagcttaatgaagacggtgccttggctactggaaaggcagcagcgacaaaggagctattagggctcccactagctgaacttgaacgccgctgtagacataatggcctctctctgtgtggtggtaaagaaatgatggtcgccaggctgcttaacttggaagaggctgagaaggaacgaatatacgagaaagatgttgacatgaaatatgtgcagggtgaacagcatgtggttggaagagaggacagtggtgtgaatgctcatagtacttcaaggtttggtgaaggttctaatggtgatgaattagatgtctctcggaacagtacgagagctggtaaaggacgttctggtggatctgcttctgccgaacttgaatcatttccaagcaagaagccgaaatacgatcctgttttgccagcttctaaatggagtcgagaggatgacatcagtgacgatgaagataggaaaggtggccgaggcttgggattaagctattcatccggaagcgatattgctgatggtctcggaaaggtcgatacaacagaagctagtactgaccacacaagtcgtcatcatgatacgattgttgatgaagagcacaggcagaagttgaggcagattgaaatttctgtcatgcagtaccgtgaatctcttgaggaacagggtctgcgtgacttggatgagattgagaggaaggttgccagccatcgaagacgtctccagtcagaatatggtttatccactccagctgatggtgctaacagcaggcgatcttctgaaagaacatcatcgtcgtcggagcggaaagagaggcatcgcgatgcacatgatcatcctaggaaacggggccggagccagagtagaagcttgagccctccaaggaagtcacaggagagggatcgagagcacaatcgcggtagggaccggtctcatggcaacgacgtggggagggatagggtacgcgggaaaagtgcaagccaagggcgagacgaccaccacgacagaagccgagatagagagaaggacaggagaaaagggaggtgaccgacccgaaaaccctcgtcaccatgcaccatttgccctaagcgaagggcccaggagcattatttgagctgggctacacgcccaccagcatctccaacggtaaacatatcttcgcaccaggcaggttaccctggtctgctccatgcttcgtctgtaataggagtttttgaggattaagttgaggttttttagagaagacttgttcgtaactttttttcttctttttttgcggattattcagatgtacccgatgtgtagtttatgctcaaaaccaatgtcgaatacagccagacccagaattgtcagtatcagacaa

SEQ ID NO: 127361 - DNA, 708 bp, Zea Mays
ggaaatcacatggttgcttatatttcctgttttctgtgatgagactgttgatgtgaagatatatcaattcaagcacacatagctttaaccttcataatttcttcaccagttataacagttttcatttttgagataccacatgtcttttaaacaacataacttccttttacccaattattggtttacacaactaatttttgcatttgcttctattactaaacttaaatttcacactcagccttgtgttaactaccttgaggtattatggtttatttctcgcattaggtattcttctgagtactggaataaggtcactttttcattaggaacttcctaagaggcttcttcttacatacaaacctgaagaatcggaggacattcctgagcctgcttctgttgaagaggaaaatgcaccagttgaagagcctgttctggtaccacctgttactgaagttgtttcacctcccaagaccgaggtggccgatactggtgacttactgggcttaaatgatccaaatcctgctgtatcagctatggaggaaagcaatgctcttgccttggctattgttccaacatatggggcttccacaactggtaacactgcatttcaagataaggggtttgatcctacatgatgggaactcgcccttgttaccgcaccgagcaacacgacttcatctgcgtctgtcggtcaattggtttgtttct

SEQ ID NO: 127362 - DNA, 2796 bp, Zea Mays
gcgtgcggccgtgcgtcctctctttctttctcggcgcctctgtttctggcggccgcgactggcccagcgccaccgccgacctagccaggtgaccaggtcttcgtcaggaccatagccagcgaagaacacccaagtacccaacagatgagttcgaagaaggttccgtaccacaagcatagggaggctgaggaggcgaggaagaagagggaggaagatgaagcagcacgtgtatatgcggaatttgttgagtccttcaaaggtgatagttcatctggggctaagtttatccgaggtggtgtgattgaccccaatgcaaagctgaagactgactcggaaggtggaaaatccaaagatggggggtctgttccaaagaagggcagtaggtatgttccatccttcttgccaccatcatttgcaaaagagcctgagaaaaagaaggaaggggagaggccaaaggaaaaggaaaaggaaaagggaaagccacgagtaatagatagattcttggaggaaatcaagcttgaacaagagcagcgagagaagcgccatcaggatcgagatcaccgccgtgaaggtcgccatggcgatagctccatgtcctcgagccggtttgatgaactaccagatgaatttgatccgactgggagatttccaggatcatttgatgatggtgatcctcaaaccaccaacttatatgttggcaatctatctcccaaggtcgatgagaattttcttttgaggacatttggtcggtttggacctattgctagtgtcaagattatgtggcctagaacagaagaggaacgcagaaggcaaagaaattgtggttttgttgccttcatgaatagaacagatggacaagcagcaaaggatgaaatgcaaggtgttattgtgtatgactatgaactgaagattgggtggggtaaatctgttgctcttccgtcacaggctttgcctgctcctcctccaggacacatggcaatcagaaataaggagggtggtacagctacagtcatactttctggtcctggcggccctgctgttgcatctattaaaccacaaacctcagagctggtccttacaccaaatgttcctgatattgtggttgctccacctgatgatgggcatcttcggcatgtgattgacacaatggctctgcacgtacttgatggtggatgtgcttttgaacaagctgtaatggagagagggcgaggaaatcctttatttgatttcttgttcaatcttaaatctaaagagcacacatattatgtttggaggctatactcatttgcccagggtgatactctacaacgatggagaacagaaccctacatcatgatcacaggaagtggaagatgggtcccacctcccttgtcgtccaacagaagccctgaacgtgaaaaggaatctacatttgctgctggtagaagcaggcgtgttgaagtggagcgtacattgactgactcacagcgtgatgaatttgaggacatgctgcgagctttgacattagagaggagccaaataaaagacgccatgggatttgccttggataatgctgatgcagctggcgagattgttgaggttcttacagaatccttgacactcaaggagacgtctattccaacaaaggttgctcggcttatgctagtgtctgacatccttcataacagtagcgctcctgtgaagaacgcatctgcattccgaacgaagtttgaagcttctttgccagatgttatggagagctttaatgacttgtatcgcagtatcactggaaggattactgctgaagctctgaaggagagggttatgaaagttctacaagtttgggcagactggttcctgttttctgatgcatttcttaatgggctgagggctacttttcttagatcaggcaactctggtgttgttccgtttcactcgttatgtggtgatgcacccgaaattgaaaagaaaggtagctctgaggacggaaatgatggatttaagcttaatgaagacggtgccttggctactggaaaggcagcagcgacaaaggagctattagggctcccgctagctgaacttgagcgccgctgtagacataatggcctctctctgtgcggtggtaaagaaatgatggtcgccaggctgcttaacttggaagaggctgagaaggaacgaatttacgagaaggatgttgacgtgaaatatgtgcagggtgaacagcatgtggttggaagagaggacagtggtgtgaatgctcatagtacttcaaggtttggtgaaggttctaatggtgatgaattagatgtctctcggaacagtatgagagctggtaaaggacgttctggaggatctgcttctgccgaacttgaatcatttccaagcaagaagccgaaatacgatcctgttttgccagcttctaaatggagtcgagaggatgacatcagtgacgatgaagataggaaaggtggccgaggcttgggattaagctattcgtccggaagcgatattgctgatggtctcggaaaggtcgatacaacagaagctagtactgaccacacaagtcatcatcatgatacgattgttgatgaagagcacaggtgcttgtccgttttcaatatttttttaccattgccatgctagtttttgtaagtgtctgccacagtgttattaaaactacgtttaaacgatgtttaaactacgtttaaacgtcaaaactctaattagagattgaaaccgcgttttagcgttttggcgttctaaactgtaaaacgtagtgctttatccattttagaccataagctacttttgggctca

SEQ ID NO: 127363 - DNA, 3570 bp, Zea Mays
gcgtgcggccgtgcgtcctctctttctttctcggcgcctctgtttctggcggccgcgactggcccagcgccaccgccgacctagccaggtgaccaggtcttcgtcaggaccatagccagcgaagaacacccaagtacccaacagatgagttcgaagaaggttccgtaccacaagcatagggaggctgaggaggcgaggaagaagagggaggaagatgaagcagcacgtgtatatgcggaatttgttgagtccttcaaaggtgatagttcatctggggctaagtttatccgaggtggtgtgattgaccccaatgcaaagctgaagactgactcggaaggtggaaaatccaaagatggggggtctgttccaaagaagggcagtaggtatgttccatccttcttgccaccatcatttgcaaaagagcctgagaaaaagaaggaaggggagaggccaaaggaaaaggaaaaggaaaagggaaagccacgagtaatagatagattcttggaggaaatcaagcttgaacaagagcagcgagagaagcgccatcaggatcgagatcaccgccgtgaaggtcgccatggcgatagctccatgtcctcgagccggtttgatgaactaccagatgaatttgatccgactgggagatttccaggatcatttgatgatggtgatcctcaaaccaccaacttatatgttggcaatctatctcccaaggtcgatgagaattttcttttgaggacatttggtcggtttggacctattgctagtgtcaagattatgtggcctagaacagaagaggaacgcagaaggcaaagaaattgtggttttgttgccttcatgaatagaacagatggacaagcagcaaaggatgaaatgcaaggtgttattgtgtatgactatgaactgaagattgggtggggtaaatctgttgctcttccgtcacaggctttgcctgctcctcctccaggacacatggcaatcagaaataaggagggtggtacagctacagtcatactttctggtcctggcggccctgctgttgcatctattaaaccacaaacctcagagctggtccttacaccaaatgttcctgatattgtggttgctccacctgatgatgggcatcttcggcatgtgattgacacaatggctctgcacgtacttgatggtggatgtgcttttgaacaagctgtaatggagagagggcgaggaaatcctttatttgatttcttgttcaatcttaaatctaaagagcacacatattatgtttggaggctatactcatttgcccagggtgatactctacaacgatggagaacagaaccctacatcatgatcacaggaagtggaagatgggtcccacctcccttgtcgtccaacagaagccctgaacgtgaaaaggaatctacatttgctgctggtagaagcaggcgtgttgaagtggagcgtacattgactgactcacagcgtgatgaatttgaggacatgctgcgagctttgacattagagaggagccaaataaaagacgccatgggatttgccttggataatgctgatgcagctggcgagattgttgaggttcttacagaatccttgacactcaaggagacgtctattccaacaaaggttgctcggcttatgctagtgtctgacatccttcataacagtagcgctcctgtgaagaacgcatctgcattccgaacgaagtttgaagcttctttgccagatgttatggagagctttaatgacttgtatcgcagtatcactggaaggattactgctgaagctctgaaggagagggttatgaaagttctacaagtttgggcagactggttcctgttttctgatgcatttcttaatgggctgagggctacttttcttagatcaggcaactctggtgttgttccgtttcactcgttatgtggtgatgcacccgaaattgaaaagaaaggtagctctgaggacggaaatgatggatttaagcttaatgaagacggtgccttggctactggaaaggcagcagcgacaaaggagctattagggctcccgctagctgaacttgagcgccgctgtagacataatggcctctctctgtgcggtggtaaagaaatgatggtcgccaggctgcttaacttggaagaggctgagaaggaacgaatttacgagaaggatgttgacgtgaaatatgtgcagggtgaacagcatgtggttggaagagaggacagtggtgtgaatgctcatagtacttcaaggtttggtgaaggttctaatggtgatgaattagatgtctctcggaacagtatgagagctggtaaaggacgttctggaggatctgcttctgccgaacttgaatcatttccaagcaagaagccgaaatacgatcctgttttgccagcttctaaatggagtcgagaggatgacatcagtgacgatgaagataggaaaggtggccgaggcttgggattaagctattcgtccggaagcgatattgctgatggtctcggaaaggtcgatacaacagaagctagtactgaccacacaagtcatcatcatgatacgattgttgatgaagagcacaggcagaagttgaggcagattgaaatttctgtcatgcagtaccgtgaatctcttgaggagcagggtctgcgtgacttggatgagattgagaggaaggttgccagccatcgaagacgtctccagtcagaatatggtttatccactccaactgatggtgctaacagcaggcgatcttctgaaagaacatcatcgtcgtcggagcggaaagagaggcatggcgatgcacatgatcatcctaggaaacgtcgccggagccagagtagaagctgcagtcctccaaggaagtctcaggagagggatcgagagcacaatcgcagtagggaccgagatagggtacgcgagaaaagtgcaagccgagggcgagacgaccaccacgacagaagccgagatagagaggacaggagaaaggggaggtgaccgacccgaaaaacctcgtcactatgcaccatttgccctaaccgaagggcccaggagcatcatttgagctgggctacacgcccaccagcatctccatcggtaaacatatattccgcaccaggcaggttaccctggtctgctccatgcttcgtctgcaataggagtttttgaggattaagttgaggttttgtaaagaagacttgttcgttactttttttgtggattattaagatatatcctatgtgtagtttatgcttaaaatttaaaaccaatgttgaatacagccagacccagaattgtcagtatcagacaaccgaggtatggactgcgattctgttcttccctggtggtgggctgttacgtgtagatctttgcacggcgtgagaataccgtcggttgtgcgtgggcgcatgcgtcgacgacaatgcatgctgcttaacgtgctcacgtggacgagaatgtgttgcatcatgctctagcatgcgaacatgtgcggtactgacatggtgcgtagctaagctattgtacacttgctttttcatgatgcctcgtgttaacgttgtcagagatctgaaa

SEQ ID NO: 127364 - DNA, 127 bp, Zea Mays
ttatgttttatgcctaccacatgcactatttacgctaaaaactataacgattttatgcttgaatatggagttcgtatatcagtttactgcatgcatatttttggaagcacattggaaagaaaattcc

SEQ ID NO: 127365 - DNA, 683 bp, Zea Mays
ggctagtactagcaagcagtagtggtgtcgcatctgccgatctcctctgtccgagtcactcactcgtaggtggcttccacccatctccctcagcagtcagtcagcaggactcagcagcactatctcccaccccccatccttcgctactctttcgttccttctgatcgccgctatcctcttcagccccgactgaggaggcggccggcgctccccaggcacgcacgagttgacgggtccagcagcggcctcgggatcttgccgccagctgcagcggcaatccggtccgtccgcccaggtacaagagaggccgtggccacttctccgttggattcttccaccttctacactatcatttatgtgtttgtttccttcaagtctccaggaaaccagtgctgtcttaggtattgttgattcatgattcttgattccgggaggcggtttcgtgttgtgacagcccgatcttgcggttcagcagagagccaatccgctgggtatcattttgttttgttttttctttgttgttaattaatatacagggagctgcgcctgcgcaattttcgcgcactggtggctagagagcctccaaatctcttctcctttccaggtggtgtgagtgtggagtgtatgtgttgtgtgtgtccggttgtttgtacccaataaaaaataatcaatacggttgaaca

SEQ ID NO: 127366 - DNA, 596 bp, Zea Mays
ggctagtactagcaagcagtagtggtgtcgcatctgccgatctcctctgtccgagtcactcactcgtaggtggcttccacccatctccctcagcagtcagtcagcaggactcagcagcactatctcccaccccccatccttcgctactctttcgttccttctgatcgccgctatcctcttcagccccgactgaggaggcggccggcgctccccaggcacgcacgagttgacgggtccagcagcggcctcgggatcttgccgccagctgcagcggcaatccggtccgtccgcccaggaaaccagtgctgtcttaggtattgttgattcatgattcttgattccgggaggcggtttcgtgttgtgacagcccgatcttgcggttcagcagagagccaatccgctgggtatcattttgttttgttttttctttgttgttaattaatatacagggagctgcgcctgcgcaattttcgcgcactggtggctagagagcctccaaatctcttctcctttccaggtggtgtgagtgtggagtgtatgtgttgtgtgtgtccggttgtttgtacccaataaaaaataatcaatacggttgaaca

SEQ ID NO: 127367 - DNA, 1786 bp, Zea Mays
ggctagtactagcaagcagtagtggtgtcgcatctgccgatctcctctgtccgagtcactcactcgtaggtggcttccacccatctccctcagcagtcagtcagcaggactcagcagcactatctcccaccccccatccttcgctactctttcgttccttctgatcgccgctatcctcttcagccccgactgaggaggcggccggcgctccccaggcacgcacgagttgacgggtccagcagcggcctcgggatcttgccgccagctgcagcggcaatccggtccgtccgcccaggcttccgtggatatacatatactggtctgagttgtcaagtccttgacctgatcatatcagttttgcttataaggatgggggtttacctcagtactccaaaaactgacaagctatctgaaaatggagaaaatgatagacttaagtttggtctttcatctatgcaaggatggcgagcaaccatggaagatgctcattcagcattgctagatcttgatagcgagacagcattctttggtgtttttgatggtcatggaggaagagtcgttgccaaattctgtgcaaaatatctgcatggtcaagtcctcaaaagcgaagcctattcaactggtgacctaggcactgctgtccatagagctttcttcagaatggatgaaatgatgcaaggacagagaggttggcgagaactatctgcacttggagacaaaataaacaagtttagtggtatgatagaaggattgatttggtctccaaggggcagtgattcaaataatcaacaagatgattgggcttcagaggagggacctcactctgactttgctgggccaacatgtgggagtacagcgtgtgtagcattaataagaaacacccaacttgttgtggcaaatgctggtgattcccgatgtgttatttcaaggggtgggaaggcatacaatttatcgagggaccacaaaccagagcttgcagctgagagagaaaggataatgaaagcagggggcttcatccatatgggacgagtaaatggaagtttaaacttgtcaagggcaattggagacgtggaattgaaacagaacaaattcctgcctcccgagaagcaaattgtgacggccaatcctgatatcaatgtcgtggagctctgcgatgatgacgactttgttgttgtagcatgtgatggcatttgggactgcatgtcaagccaacagctggtggattttatccacgagcgtataaacacggagagcagcctgtctgccgtgtgcgagagagtgctggacagatgcctggctccatcaacgatcgctggagacgggtgcgacaacatgaccatgatcctggtgcagttcaaaaaacctgtcgatcggaacaagaaggccgaagcagcagggcaatctgccagcaatgtggacgaagccaagagtcgtgttgctgaggagtgaagcatggctggcactcaccagggcgcaaccatttgctttcataaggcaggtgaaaaaaaggaacgaagaaacctgcagtgtacgtatctcaactgtacgtggcatgccatgcaaatcctgcctaagttaccccggacaatggcattgcctagtgcagtggtggatcttcagatcacaacctttcttgtgccagctttcggtcatctccactctccagccctcggaaccatggctgagtctgtctattctttgtgtggtgtgtagcattcctcgtgttttcgttgtccaaaatggtgtcaaatccagttttttgttgcgagaatgaaccgtgacgtta

SEQ ID NO: 127368 - DNA, 1698 bp, Zea Mays
ggctagtactagcaagcagtagtggtgtcgcatctgccgatctcctctgtccgagtcactcactcgtaggtggcttccacccatctccctcagcaccccgactgaggaggcggccggcgctccccaggcacgcacgagttgacgggtccagcagcggcctcgggatcttgccgccagctgcagcggcaatccggtccgtccgcccaggcttccgtggatatacatatactggtctgagttgtcaagtccttgacctgatcatatcagttttgcttataaggatgggggtttacctcagtactccaaaaactgacaagctatctgaaaatggagaaaatgatagacttaagtttggtctttcatctatgcaaggatggcgagcaaccatggaagatgctcattcagcattgctagatcttgatagcgagacagcattctttggtgtttttgatggtcatggaggaagagtcgttgccaaattctgtgcaaaatatctgcatggtcaagtcctcaaaagcgaagcctattcaactggtgacctaggcactgctgtccatagagctttcttcagaatggatgaaatgatgcaaggacagagaggttggcgagaactatctgcacttggagacaaaataaacaagtttagtggtatgatagaaggattgatttggtctccaaggggcagtgattcaaataatcaacaagatgattgggcttcagaggagggacctcactctgactttgctgggccaacatgtgggagtacagcgtgtgtagcattaataagaaacacccaacttgttgtggcaaatgctggtgattcccgatgtgttatttcaaggggtgggaaggcatacaatttatcgagggaccacaaaccagagcttgcagctgagagagaaaggataatgaaagcagggggcttcatccatatgggacgagtaaatggaagtttaaacttgtcaagggcaattggagacgtggaattgaaacagaacaaattcctgcctcccgagaagcaaattgtgacggccaatcctgatatcaatgtcgtggagctctgcgatgatgacgactttgttgttgtagcatgtgatggcatttgggactgcatgtcaagccaacagctggtggattttatccacgagcgtataaacacggagagcagcctgtctgccgtgtgcgagagagtgctggacagatgcctggctccatcaacgatcgctggagacgggtgcgacaacatgaccatgatcctggtgcagttcaaaaaacctgtcgatcggaacaagaaggccgaagcagcagggcaatctgccagcaatgtggacgaagccaagagtcgtgttgctgaggagtgaagcatggctggcactcaccagggcgcaaccatttgctttcataaggcaggtgaaaaaaaggaacgaagaaacctgcagtgtacgtatctcaactgtacgtggcatgccatgcaaatcctgcctaagttaccccggacaatggcattgcctagtgcagtggtggatcttcagatcacaacctttcttgtgccagctttcggtcatctccactctccagccctcggaaccatggctgagtctgtctattctttgtgtggtgtgtagcattcctcgtgttttcgttgtccaaaatggtgtcaaatccagttttttgttgcgagaatgaaccgtgacgtta

SEQ ID NO: 127369 - DNA, 2038 bp, Zea Mays
ctgccgatctcctctgtccgagtcactcactcgtaggtggcttccacccatctccctcagcagtcagtcagcaggactcagcagcactatctcccaccccccatccttcgctactctttcgttccttctgatcgccgctatcctcttcagccccgactgaggaggcggccggcgctccccaggcacgcacgagttgacgggtccagcagcggcctcgggatcttgccgccagctgcagcggcaatccggtccgtccgcccaggaaaccagtgctgtcttaggtattgttgattcatgattcttgattccgggaggcggtttcgtgttgtgacagcccgatcttgcggttcagcagagagccaatccgctgggcttccgtggatatacatatactggtctgagttgtcaagtccttgacctgatcatatcagttttgcttataaggatgggggtttacctcagtactccaaaaactgacaagctatctgaaaatggagaaaatgatagacttaagtttggtctttcatctatgcaaggatggcgagcaaccatggaagatgctcattcagcattgctagatcttgatagcgagacagcattctttggtgtttttgatggtcatggaggaagagtcgttgccaaattctgtgcaaaatatctgcatggtcaagtcctcaaaagcgaagcctattcaactggtgacctaggcactgctgtccatagagctttcttcagaatggatgaaatgatgcaaggacagagaggttggcgagaactatctgcacttggagacaaaataaacaagtttagtggtatgatagaaggattgatttggtctccaaggggcagtgattcaaataatcaacaagatgattgggcttcagaggagggacctcactctgactttgctgggccaacatgtgggagtacagcgtgtgtagcattaataagaaacacccaacttgttgtggcaaatgctggtgattcccgatgtgttatttcaaggggtgggaaggcatacaatttatcgagggaccacaaaccagagcttgcagctgagagagaaaggataatgaaagcagggggcttcatccatatgggacgagtaaatggaagtttaaacttgtcaagggcaattggagacgtggaattgaaacagaacaaattcctgcctcccgagaagcaaattgtgacggccaatcctgatatcaatgtcgtggagctctgcgatgatgacgactttgttgttgtagcatgtgatggcatttgggactgcatgtcaagccaacagctggtggattttatccacgagcgtataaacacggagagcagcctgtctgccgtgtgcgagagagtgctggacagatgcctggctccatcaacgatcgctggagacgggtgcgacaacatgaccatgatcctggtgcagttcaaaaaacctgtcgatcggaacaagaaggccgaagcagcagggcaatctgccagcaatgtggacgaagccaagagtcgtgttgctgaggagtgaagcatggctggcactcaccagggcgcaaccatttgctttcataaggcaggtgaaaaaaaggaacgaagaaacctgcagtgtacgtatctcaactgtacgtggcatgccatgcaaatcctgcctaagttaccccggacaatggcattgcctagtgcagtggtggatcttcagatcacaacctttcttgtgccagctttcggtcatctccactctccagccctcggaaccatggctgagtctgtctattctttgtgtggtgtgtagcattcctcgtgttttcgttgtccaaaatggtgtcaaatccagttttttgttgcgagaatgaaccgtgacgttagtgtgttttgctggcggttaggtgcaaaatactcgaaacctgaattgcccgctcgctatttcgggttgtaagtatatgatgaatctgattttagttgcatggtgtacccatcttatctgaaaataatgaaagatctgtttgtggttgactaattacgtgtgtgtttttttctaatg

SEQ ID NO: 127370 - DNA, 1335 bp, Zea Mays
actcccgtcactccttatcccttcccatcgatcccatgccctgttgccgcgcccgcacctccttccccatccgcgcccgccgcggctcctccggcagctccgccacgcgcccaaccgcaacctgcccgcacgggccaccgctgcctggtagtatctatcaaatcagccacctgtcctctttttcttcaaatcaagtccgtttccctttcctttctaccctctccctcgtctccggcgggcggtggcctcacctccctctccccgtcgccctgatggctccctccacagctctcgctccggtggccttccgctccgccttctcgacgccgctcgcgtcgaaacctacccgtaatagaatgaacatagagggcgctttctgtttgccgtgttccacaaggaagagagcaagttatagacctttccgagtgtacagtttatttggagggaagaaggataaagatgagaatggtgatgaggcgccatcgaaagcaggaatttttggaaatatgcaaaatctctatgaaactgttaagaaggcccaaatggttgtccaagttgaggctgtccgggtgcaaaaggagcttgcagcgactgagattgatggttattgtgaaggcgaactaatcaaggttacactttctggaaaccagcaacctattagagttgaaatcacagaagctgcgatggagttgggtgctgaaaaactttccgggttggtcaacgatgcttacaaggatgcacaccaacggagcgtccaggccatgaaagagaggatggctgacttggcgcagagcctgggaatgcctgcgggcctcggcgatggtctcaagtgatgccgcaattcgggaaagctttccaataatcctttttcctcaattttgtatgctagccgtgtgagtagtaagcataacccctccgcgacctctcataagaagtgtacttgtgagcacttgttttctttcagctttagctgccatttgctgttctgcgcacgcagatatttgcacattaacttcacgtctggtctacaaagttgcaagatgcgggccatgatcttttgggcatttttccaacaagttgttgggctggcccagttgtagcccttcgaagatgagacaaccaagcccatatatataacacacaccgaaagccttcagaatctgtcgtgtgtgaccaaggataaatcatggctttggtgaacagtgatttaacagcaaataaaacactaagtgggtgttcggtttgaggaatcactctatccaaaatgtggtggtgtatcatgggtcaattcctcaaatttggtgggatgacctattccttatattagtactaact

SEQ ID NO: 127371 - DNA, 891 bp, Zea Mays
gtttataacaatattgaagccctctgatattttaataacgttaggcaggaatttttggaaatatgcaaaatctctatgaaactgttaagaaggcccaaatggttgtccaagttgaggctgtccgggtgcaaaaggagcttgcagcgactgagattgatggttattgtgaaggcgaactaatcaaggttacactttctggaaaccagcaacctattagagttgaaatcacagaagctgcgatggagttgggtgctgaaaaactttccgggttggtcaacgatgcttacaaggatgcacaccaacggagcgtccaggccatgaaagagaggatggctgacttggcgcagagcctgggaatgcctgcgggcctcggcgatggtctcaagtgatgccgcaattcgggaaagctttccaataatcctttttcctcaattttgtatgctagccgtgtgagtagtaagcataacccctccgcgacctctcataagaagtgtacttgtgagcacttgttttctttcagctttagctgccatttgctgttctgcgcacgcagatatttgcacattaacttcacgtctggtctacaaagttgcaagatgcgggccatgatcttttgggcatttttccaacaagttgttgggctggcccagttgtagcccttcgaagatgagacaaccaagcccatatatataacacacaccgaaagccttcagaatctgtcgtgtgtgaccaaggataaatcatggctttggtgaacagtgatttaacagcaaataaaacactaagtgggtgttcggtttgaggaatcactctatccaaaatgtggtggtgtatcatgggtcaattcctcaaatttggtgggatgacctattccttatattagtactaact

SEQ ID NO: 127372 - DNA, 375 bp, Zea Mays
tttttttttctttttctattgttttttcaaattccaatttgattcaagctttaaacttaaaatttcgaaaatacttaggactagggttttaacatgtttttgcataagttttcatttatttctactgtgtttatttaaatattttaaactacctagttaatgaaagaaatatcccacttgttttatcacacatgagaaatcttattgtgattatatatctaaatcacatgttttaaagacacaattacataattttgatactaaagtatagtcttatctcatcatatctagagaatatttctaattatttaatccaaaagaagagtctaacacataaaccaagtataatttaatttctaagtatcttttatttta

SEQ ID NO: 127373 - DNA, 450 bp, Zea Mays
atggcgcggctgtggcgtgcggcccggcgtcggcccccgctcggcgcgcgcggcggtcccgccccggccttccctgcctgcggcgctcgcccccggcccctgcgcggcctcggcagcctcgtgcagccccggtcccggcgtggcctcggcgtgcgcgcggagccccggcgcggcccgtgcacgcacggtgcccccggcgagctcgccgcacccacggctcgcggccatggcggctcggtcccgcccgcattggcgtgtcccgcccctgcgcagcgcggccccggcccggcgcagcttcagctcgcgcggccgtggtgcccctgcgtagcgcgtgcgcggttcggccccggcgtgtgcgcgactcattcgcgacacgtcagcgcggccttgcgcgtacgtgctcgcgtggtgcacggtgcgtttgcgtggctcgtcgtgcccgcgacgtaa

SEQ ID NO: 127374 - DNA, 1716 bp, Zea Mays
ccactggtggtgttggtcttcgtcgccgtcaaggtcgtagcactcgcgtttcacatgacggcctggtgcgaccgcgaccgccttgagacacccgcgttctgtgccatttccgccccttcaccgtaccatttcgtcccgattccgcggataaatgcttgcccctatttgctcagcccgctctcggacgaacccattcacccgtccggccgtccgtgcgcggcgcacccacccggcaccggcaccagcatcaccgcccgcccggcgcccgtcacgctcgagaggaggaggaagaagaagggactgggcgacagcgcgcgatggccgccgtcgtgtgcgtcaccggcgccggcggcttcatcggctcgtggatcgtcaagatcctcctcgcccgcgggtacgccgtccggggcacctcccgccgcgaagctgctgaccccaagaacgcgcacctgtgggcgctcgacggcgcggcggagcgcctcaccatgctgcaggtggacctgctcgaccgcgccagcctccgcgccgccttccgcggctgcgacggcgtcatccacaccgcctcgccgatgcacgacaaccccgaggagatcatcgagccgattatcgccgggacgcggaacgtcgtggaggcggcggcggacgccggcgtgcggcgcctggtgctgtcctccaccatcggcaccatgtacatggacccgcgccgcgaccccgacgccccgctcggcgactccagctggagcgacctcgagtactgcaagagcaccgagaactggtactgctacgcaaagacggtggcggagcagggcgcgtgggaggcggcgcgggcgcgggggctggacctggcggtggtcatcccggtggtggtgctcggcgagctgctgcagcccagtatgaacaccagcaccctgcacatcctcaagtacctcacgggacagacaaaggagtacgtcaacgagtcgcacgcctacgtgcacgtcagggacgccgccgaggcgcacgtcagggtgctggaggcgcccggagccggcggccgccggtacgtctgcgccgagcgcaccctgcaccgcggcgagctctgccgcatcctcgccggactcttcccggagtaccctattccgacaaggtgcaaggatcaggtgaacccactgaagaagggctacaagtttacgaaccaacctctgaaggaccttggcgtcaagttcacgccagtgcatgggtacctgtacgaagcagtgaagtcccttcaagacaaggggttcctcccgaagacatctggcgccaaggtgcctgaacgacgcagctgcctgcctcaaacgacatcacagccaccacccgaaatcgtttcgaaactttgaggtggatctgcacacgtgctcaaactggccatgtgtttttttgtcagaacaagccgttcatttgattggttattaaaagattttgggcagtctgttcttacatagcaaaaatgtcttgtctctgtctatggtgcatcctgttgcttttgcactacaactatacacatccttgtctgggtagtctgttctttacatagcaaaatgcgaagtctgcagggtgatttcagcgatgatggaagcatgcccgcccacctcttgactgcatgcgctggtcagctgcggcttattctacacatcttgcttgtctgtactagcctgagttcaacaaggaacaagtcagtctacgcatcggttcagc

SEQ ID NO: 127375 - DNA, 112 bp, Zea Mays
ttttttttttaaatgtggtagaagctttaattcgatgcacatacatatgttctccatcaaaagatgaattaatttatagtgttatccctgaatttttgtagccaatagcaag

SEQ ID NO: 127376 - DNA, 688 bp, Zea Mays
aaaggtactacaaccccatcaaattaaaccggttcagttgaatcgaaatcaaacctggacatcaaatcaggctaattgaatcgaaaccaactaggacaccaaagcagcctttaattgaattgaaatcaaacacggattttgcccggccccccaccagactaagagactaagactaacaacggatctagacgggagataagccatcgagagaaagaggctgacagaaagagaagtgagcacgcggcgaggacggcatacatgctatgtcgttcgtcgcgccgtgtgctcactctcttctgtcaatctctcgagagcctctccgcatctacagaaacgccgccgtcgtcgtcgtcgtcgtcgtctaaccagcgacaacacaaaatcagggttcagaagttgcggaaccaccaaagcgaagagggacaaaccaaccctccaagcacgaatgaagacagaagaacaagaaagagagagatagagggggcttcgttgttcttggatccggtgagcgctcgtcgccgtacagggaacgaaaggaggaggtgctgctgagactgtcctttctttctttctttctctccctccctccttccctgcctgtgcgtgtgtgtgcgccctcttggtgattggtttttggagcagaggagatggatgggatagataggcggtcgtaccttgcccctctcag

SEQ ID NO: 127377 - DNA, 112 bp, Zea Mays
tcagtcataagtcatggcatttttcacataaaattcgcgcgttacgcggttgttagtgaaaggatcacgatgcccaagagggggggtgaattgggcttttctaaaaatcaac

SEQ ID NO: 127378 - DNA, 909 bp, Zea Mays
gccgggtcgtcgagtcccccagtccccagtccttatataaatcacgccatgtcccgagcaatcgccactccaactctcaagcgtctctactcctcttcctcctctctctactctccaagttctcttctccgtcgaccgctctacacgtctcttgtcgacctggacaccgaggtggaagaaggaagcagtcagcagatggatccatggatcagcagccagccttctctgagccttgacctgcgcgtcggcctgccgccgctcagcctccaccaccaggcgccggtggccgtcgccttgcccaggcccaagctgctcgtcgaggagaacttcctcctgccgcctccaaagaaagaaccagaggtacgcatatatacactacactccgatcctatgtgcgacgcaagcatgcacccaccccacctggactggacggagacggcgggcgtgacgacgagcaaagactctaacggactgtccccttgatttgatcccaggtcgcggctctcgagacggagctgcagcggatgggcgaggagaaccggcgcctggcggaggcgctggccgaggtggcctccaagtacgaggcgctgcgggggcagtacacggagatggtggccgcggcggccacggcctgcgggaaccacccgtcgtccacgtcggagggcgggtccgtgtcgccgtcgcggaagcgcaagagcgagagcacggacaccgcgccgcccgcgcagcagctactgcaccagcactacccggcggtggcgccggaccagacggagtgcacctcgggcgagccgtgcaagcgcatccgggaggcggagtgcaagcccagggtgtcgaagctgcacgtgcacgccgacccggccgacctcagcctggtggtcaaggacgggtaccagtggcgcaagtacg

SEQ ID NO: 127379 - DNA, 1703 bp, Zea Mays
gccgggtcgtcgagtcccccagtccccagtccttatataaatcacgccatgtcccgagcaatcgccactccaactctcaagcgtctctactcctcttcctcctctctctactctccaagttctcttctccgtcgaccgctctacacgtctcttgtcgacctggacaccgaggtggaagaaggaagcagtcagcagatggatccatggatcagcagccagccttctctgagccttgacctgcgcgtcggcctgccgccgctcagcctccaccaccaggcgccggtggccgtcgccttgcccaggcccaagctgctcgtcgaggagaacttcctcctgccgcctccaaagaaagaaccagaggtcgcggctctcgagacggagctgcagcggatgggcgaggagaaccggcgcctggcggaggcgctggccgaggtggcctccaagtacgaggcgctgcgggggcagtacacggagatggtggccgcggcggccacggcctgcgggaaccacccgtcgtccacgtcggagggcgggtccgtgtcgccgtcgcggaagcgcaagagcgagagcacggacaccgcgccgcccgcgcagcagctactgcaccagcactacccggcggtggcgccggaccagacggagtgcacctcgggcgagccgtgcaagcgcatccgggaggcggagtgcaagcccagggtgtcgaagctgcacgtgcacgccgacccggccgacctcagcctggtggtcaaggacgggtaccagtggcgcaagtacgggcagaaggttaccaaggacaacccctgcccgcgggcctacttccgctgctccttcgccccggcctgcccagtcaagaagaaggtgcagcgcagcgccgacgaccccaccatcctggtcgccacgtacgagggcgaccacaaccacggccagcccccgccacaggcgcaggcgccgcacgacggctccagccctggcgccagcaagaagccgccgtcgccgccgaggccggtcgccgccgctccggcgccgctccaccaccagcaggtccagcagcaccagcagcagcaggcggttggcgcggtgaaatgcgagccgcccgtggccgcggcggcgtcggagctcatccggcggaacctcgcggagcagatggccatgacgctgacgcgggaccccagcttcaaggcggcgttcgtcaccgcgctgtccggccggctcttcgagatgtcgccgaccaaggactgacggaacggatcggatggattgggagattggcatcgcaggagattctggatcagattgtcttcgagcgcacgccgcaatggtcaactgcgcagcgctggcttggctgtcagagcgaaacagcggtaacagagcaagacacgaggggtctgcactctgcagttgtgcaggaggaggaacagacacaaggggaggacggcgcgcggccggacatggcgtggaacagagatcgtcgtcaccgccggcgggggtgtggtcgacgacgcgacatgcgaaacactacgtgctagctagcataggaaaaaacaacatgaaatcgtacaaccaaccaatccctcgcactgttttagttgttagctgtaggcgaaactgttcatccaattgatcaaatgaaacttattttttccctagcactatgtttcatgagaatgagaccaggaatgaaccaacttgagtttgaaaatttc

SEQ ID NO: 127380 - DNA, 259 bp, Zea Mays
gtagtaacctgtgctgaaaactgaggtgtatagacaagattatgttccaaaagccttatattacagctatccgaattctgacacgtttttattcacatgcaatacactcctgcaattgatgcgttttggtgttatggtgaaacacagttttgtgtgtatgtaccaacagctaaaatgtaaacatgacattatcatagttgagtacaggaataattatctcttatatcttattgcaaaatctgaaacagttctcctgtag

SEQ ID NO: 127381 - DNA, 226 bp, Zea Mays
atggtgggtgagccggcacgacccgcagtggccggacacggagatcccacgacggcggcgagttcccgaccagccgagcacccaccatacacggcaacacctcgcgcgagacccttcaacgcgaccaaagctcctgaattcgcccccgagacttgagacgtggcgatatctccacccagctactctctccggacttgctgtcaatggctatttctggtggcggcgc

SEQ ID NO: 127382 - DNA, 1175 bp, Zea Mays
cgcccacacgacgcgcgcgcttcacccgccgagccgtctctgagctcttgctcgtgcgatggcctccgccggcgacatcggggaagcagaggcgacgcttacaacgaacaggatgacgatctacgactgcctaggcgaaggcgaggaggcatcgccgccttccccggagacgccgccgcagctgcggctcccgaggttcacctgcgccaggatccggttcggcaggctcgggaggaagcgcggcggaaggggtggccggaaggaggtcgccgcggccgagaagagcgaggacgcgtcggtgggctcctcaggatggaagcaagcggcggcgggaagcagcggcggcggcggtagtagtgtggcgaccggacaaaccggcatggggctaagcatgctcttcctccttgcgaggacatgtgtggagctcaaccggatggccgaggtgcgcgcgcagatggagacgctgctcaaggagatccgagacgaggctagcagggtgaaggccggctccgcggaccacgtcgtccttgtcgcaccgaaaacctgcaacaacctgcggccgtcgtcgacttccactgtgtcgtcgagctgcgtctcggacacgagcaccaactgcctggagatccggcgcggcgaggacggggagtggacgtcggagccagagtggaagtgcaccaccgagcgagaaactcccgatcagtgctgggtccagtcgccgtccgacggcgagttcatcgagctggagggagggcgcttcggcaccggcggcgggaattcccagcgaggcgccgcggtcgacgagagcgacgacgacgacggcgagtcgtgcgggaggcggcacgaggttggagtctccgcgacggagctggagcggaggctgcacgagctccagcaccgccgggacagggagcggatcgaggcgctggagtcggcgctgcggcgcgcgcagcgaaagctgacagagaaggagatggaggcgcgactgtggcaggacacggccacactggcgctggggcagcccacgccgcgggacggacagtgaccttgcgcttgcaggtgaagctagcgtgccgtactggctgtacatgtactgtacagctagcgtgcttacgttgcttggcgctcggtttctctgtgctagtggggacttacgagatgccgagatgtaatttgta

SEQ ID NO: 127383 - DNA, 493 bp, Zea Mays
acaccaaaagacgcaacatcgcaacgtccataaaaatttggcgtgatcccacacagcccaaagcaagcgtagcaccgcagcgcaatcaaacccaagacaaatccaaccaaccaagctattccccatctccggaccagcgccgctgccagtcgctgtccacgggcaccccgggcgcgcctcctccgagcccagactcgagctccatcccgccgtggatcaccgcgtgaggtggggcgcaccgaccggaccccggagggccagatggtgtccggcgccggatggggcgagtagcgcgttcggcggccacgaacggatcggcggcgacgcggcgaggcgtcggtcagggcgggggccaccatgtctgcggtagtgtgcggttgtacggttcatcatcttgccgaaaacttagattatacagggaccgattcagttactcagaagtgtagatcagatcaagctgctccttctaattctaattactatttgacctgag

SEQ ID NO: 127384 - DNA, 332 bp, Zea Mays
tttgttccttctttttccaccaaaaaaaaacgaggaagttgtgggctagcgtgtccaatgaagcttgagtggccgagcgcggggcggagagggagatggctgggttggagtgggaggagatgaggcgccggcggatgaggaagcgatgggaagacgagttatacgggaatgaagaagaaagaaataaaaagaacgaatcattttttaaactagtggcgctcggtcctcaacagaaattcatggcgaaaatctcgctggttctgttgggattccgccaaccggagcgcctctgggttctctggctataaaaccgggcgccgagcacctttccc

SEQ ID NO: 127385 - DNA, 1167 bp, Zea Mays
atgaagggcgggcctggtgcagcggtagagcctaccgtctgtaaccggaaggtcccgggttcgagccccagcctctgcatattatgcgggttgatcgatggaggtttctgcggcataacagttggctccggtggcgatacattgatttgtccaagaattgtggaattgtttaagatacctgtaaatcctgggatttgtgttaagttgatatgggttgactgttttgcattggtggataagaaacaactgatcagcatttacaaacaaaagccgcaactgcaatgggatccgaacgccgccgccgacgcggccagttccaattctctttgggtggccgacgagacgcaaaccctaatcgaggtcctgctccaaccccaaccaaaccacatgtcgcctcctccttctggtgaaggggacgacgggatcactgcctccagtgctcctgttggtggggacgccgcggcatccgcttctgctgcggcggcgcctaacgcgacaatagaagagcgggtgagggggccgtggtccccagaggaggacgcagtgctgagcaacctcgtggagaagttcggggaattgccgactccgtgcagcctcagcgccattgtcgagctcgtgttcgacggaccggaggtcagcaggaattcagtgcggcaacgtcttggtcatccgtgtgggagacccttagtgtggcattggctgtcagctccaccagcgccgctcactttgactgagggtcgctctctgaagaagaaatcaatgtggcaacggctgttagctccaccggcgccgctctctttgactgagggtcgctctctgaagaagaaaccagtgtgggtgaggattacccctgctggtgaagccctgatggagaaagcgcctgaagtcattcctgaagtttccccaccgcatttaacatctcgggttttggccttctcggatgatatggcaagggaagaattaaacttgagaagggccttgcttgtcaccgttactggtactaggccggaggtccttggattagaggtattagaagaagtggcacattgtttcagcattaagttggaagacatgacaatccaatctgcaaagcctgaggattttcttctattctttcctaatgaagaaactgcaatgagggttcttaatggtggtaaagtgctctga

SEQ ID NO: 127386 - DNA, 255 bp, Zea Mays
aggggttggggacacatatttatagccctaggggctgcactaccacacattctcacacacactacacaacaggattgtcctctagatgctaaagagactacagaggacagtcaaaagcgactgttgtcctctagatgctaaagcgactacagaggacagtcaaaagtgactgctgtcctctagatgctaaagagactacagaggacagtcaagctgtcctctagatgctaaaggactacagaggacagtcaaaag

SEQ ID NO: 127387 - DNA, 108 bp, Zea Mays
cccaatatcactacactcttagaggccactgctaaggaaagggagaaatggatggttgcaggagctaagggtctttcctttttagctgctcccagtaccaatgcctga

SEQ ID NO: 127388 - DNA, 782 bp, Zea Mays
atggagtcaacttatatttattttctttttcaagctgttgctgatgttgagagagaaattatgaaggcactggagaagcaatgcatggatattctgatgcctctaagagatggcataccagaaaaaattgagaagcaggtccaaagattaacaagaagacaatctatagctccctatgttgtgccaaaccagttaggagcattcatgaacacagtaaaaaggatgctagatgtgttagactgccaagtcgaagacattctcaagtcatgggcaacgtaccttactatatcaagtgggaacactgtttttggagagcaaatgaactccatcactgtcatgctgaagaagtacaagaaatatctgcaagcgatagtggacaagtttgtcagcaatacacaagctatccggaatatgagcctcaagcgaattcttgaagaaacaagaggctgatggtgaaagtgatatatgagatagggtgcccagctctcggattccgttcacaatctaaatgagatcttctctagtagaatatttgttgctatttgccaaggtttatgggagactgggatcggttaggccaggtaataaacgtggcaacaagaaaagtactatgaatatttccttttgttgtgaatccttattatgccaaactcacttttgagcggattgtgttgagatttcttgagagcagaaaggagaacatgatttggtaccaaggatctcactttgctatagggtaagactcaacttatatttccctcattattaagattcttaatggt

SEQ ID NO: 127389 - DNA, 112 bp, Zea Mays
aaaaaactaactcattcgtggacgtggtgcacgcacgtacagtccgggtgttgcaagccgccgtcggtgtgcgggttcagctacgtgagcccgacggtgtggtacgcccgac

SEQ ID NO: 127390 - DNA, 669 bp, Zea Mays
gcagtgaaaaaatgcatcaatgttgactctagatggagttgacgtcatgggggaacgcttatatagtaaatgaggtaagtaatgcagacagctaattcaagaactagctgttggtccatagtaatttgtaataaaattttattctttatcaaactgttctctagcacagttcctattgtctgaacaatcagtctagatgctaacttgcattctcgtcttactcaggtgcttgatgtaattagtcaaaggccagaaatcaccaaaatttctttccttgcacattccgttggaggattagcagcaagatatgcaattgcaagactttatagacatccagacaacgcgtctaatggaaatactaaaggaaccatctgtggcatggtaggaataaactttattactgtagcaacgcctcaccttggttcacaagggaacaagcaggttccactcctgtttggatctgttgcaatggaaaaggttgcttgccacatcgttcattggatatttaggagaaccgatagacatctctttctaactgacgatgatgaaggatagcctccactgctgcagcgaatggttgaagatcaagacaatctctactttatatctactttgcgagcattcagaagaagagtggtgtacacaaacacaaactgtgatcgtatcctt

SEQ ID NO: 127391 - DNA, 112 bp, Zea Mays
gggtttcaacttgagcctactccaacttccttgactaaaagacacttctgtttttgttttggttctgtcatactatactaacgatctgcacctgttgtagatctactttgcg

SEQ ID NO: 127392 - DNA, 220 bp, Zea Mays
aaaaaatgcatcaatgttgactctagatggagttgacatcatgggggaacgcttagcaaatgaggtgcttgatgtaattagtcgaaggccagaaatcaccaaaatttctttccttgcacactccgttggaggattagcagcaagatatgcaattgcaagactttatagacatccagacagcacgtctgatggaaatactaaaggaacccatctgtggctt

SEQ ID NO: 127393 - DNA, 1431 bp, Zea Mays
agctttggttcgcctcccacctccacgccccgcctcaccccacatcccgttcctttccttccactcgcctcccttcctcctccttccctccacggctccacccacatctccacctctccctctctcctatctctctccccgtctctccctgccgacgtccaggcttcgtcggtctgcgacctgagcaagctaagctaagctgcgtggggaagccaagccaccatggcagccgacgcggaagccgacgagctcgtggccgctgcggccggcatcatctgctcgatgcgcggggccgacctcgccgggtggacgccgccgtggttgcgtaggacggagccggcgcgggacggggagctggtgtggccggcggtggcgcgggggaaacgctcgcgccgccgctcgccgtccgcgggctcctcgggcaaggcgaggtggggcagggccagcccggcgtcgccgctggactacagcggtggctccggctccggttccgccgcgtccaccagcggcggtgaggacggcggcttctcctccctggcccaccgacccggaccggcgaccaaggtgggggccaacgagcggccgcatgctacctttccgaccccgcttccacgccccaccggtcagcgaccacagaagaaattgaggctaccggagatccagcagctgcttcagtctctcgccgtggagaacgagagcctccgcgaggagatgcgggatttacagagagcttgcaaggcgctgtcgaaagaaaacgacaagcttgagacaaggttagggcaatcaatctctcagaatgaagtcactttaaaggagcagaaaggaaagcaacaacttgatcagcagtcggttatgcagtccgcacgagacagcttcgtgctaccagatctcaatctccccccacaggactctgccgatgtttcaacagttcattgatcactccagattgctgcgactttgttaaccgaataacaagtgtacatagaggaagcagggtaccaatctacggtggcggcaccaccacgtcatccttctgagaatgacacgcatttgataagttgttactagatcagagttttactaccactatagccgcaagttacaagccacatttgtagctgagggaagtctagttttaacccacctgacattgttttgcctagtgcgtttgcatatggtagagctgaagtcttcttcagctcaaactgatctccacgctgtagtggacttagatgaatttgttcatgttatttcattcaattaggtgaaatgtcacttgtgaagatctgacatttatgagaaaactgttacttatttctgtacggttttatggatcttttgttacttcagttgtaattgtatcatgccttttcgctggttggtctaccaatttctgtatcactaataagttgctaatggttattgcctcta

SEQ ID NO: 127394 - DNA, 682 bp, Zea Mays
taacccgactcgaccttgttgcttcagcttaacgactagcgagcggcagagaagatgtcgccgtcgtcgtcgctgagcgcgctgcggcacaggctgatggccaccgtgtgctgctgctttggccagggcgccggcggcctgggcgagcggacgcggtggcgccgccgcgcggacgtcggggagttccggtacgacccgctgagctacgcgctcaacttcgacgagggcgacggcgacgaggaggaggaggaggaggaggaggggcaacggggtgcccgcgcccgccgcggcgacggcctgctctaccacagcttctcctcgcggctgtcgacgcccgccgcggtcgtcgaggtcgcgtagccgtgtagcgcctgcctacctgggagcggaagtgccggccgatgatatcagttttggctgtacttgtgcggttgtgccttgaatctaggctattagtagcatatgcgtcagatcagatcgacgaagaaccgatatagttgtgttagtggtctgatccatgtaaaaatgttagcatacgtgcttgattattgattgttatatactatcgggtttggaggtctacttatcactacgctgcaaaaaaatcaaccagtcaatttctttactccatgagttcgaaaacgtagttcgttttaattttgtttcacgtacaggttaattc

SEQ ID NO: 127395 - DNA, 561 bp, Zea Mays
tgttccatcaggttgtcaggcgctgttctcagctcgctatggggcttgctgggctcgccatgttttaaaatgttgtcaaaaattcgcctacaaccgcggtctcggcgtgtccgtcggtcttcaacttcagcgaccactatcatcttcatcagcaacatcatcgttgtctccttggtgctcgttgccaactctgctacccggaggttcctatccgctacccgcggagtgcgcgatgaatagtttgaactagagtttgtcgtcattcctcgtcctcgccatggacgagtctacatctccgcatgttgatgtgcctagaccgtcaatcttgtccttgccgttgaaagcgtcgtcggcgcccgcagataggtacgctagttaatcacgtgatgcggaagacgacccaagtctaccctaggataatgagagattggacatctccgcaagacgatgtctcgcagtcggacgaacctgaagatggataaactgaacaagtatcggaacaaaagctgatcgccaagtggacgtcatctaaccaacacaaacatagtgtcattccaggca

SEQ ID NO: 127396 - DNA, 1327 bp, Zea Mays
agtctacctaaattttctctctctcttagaacgagcaaccattacccgtgctcaggaccgaggcttcgaaccggcacttcccgatccgattcccatgagcgaatctgacggttgcgccttgcggcggccgccgacggcagcggaggtggtggggcggctcaaggatgacggcgacttcgatgctctccgccgcgccatcgtccggaaggtcaaggacaacgagatactacggaacaaaatcatctcagaggtaaagcagtcagtggttctacaagaagatggatctgagaggatgaaattaaaagacctatctgatgcaatttttcaagatattgggagcaaaataatgggtcaaatctcagatgaggtatggaatgtcatccagtcaaatgaaactgatatacagggaactgtgaaagccgtctacaataggatactgaaccctgaaaaggtctctgagccttctcccaagaagctgaagcagagaggcaaagaggaacaagttctgcccacaaagacagcaactagcgttgcagtcgaggcggaagatgatgatccagaggagccaccaggatttggtttcaacaatacacagcgtaatgatattggagcaacaaagccacagatgagtttggaaaatggtaatgaagggaagccaaatggaggcgagccagctactatcagcaatccaggggatgaggaggaagatcctgaagtgccccctggatttggttaatggaattcactaacttcagtggaatgcagctgtttctttcttagcaatatatacaagaagggaaatgtttaatcttctgttgacaggaagagtaatgcaagctcatgtctgcgacagttgaaacccgtgtaatgatggttacttctatccagccccaggataccctttctgtgatagtggcaaatatgttgggtgctaacagtctgacaacgagttccaggcacgaagttttcgaagaagctggacatattatgagaggtcctctaaattatggagatgtttagttctttattccaagaggcacgtatgaaaaacatatgctatataaaatcccttgtgagttgggagttgggacagtttcttaccaagggtctgtttggatggaggtcctccaggctccagtgcttttgcaaagctcttgagatgcacagctctcccagtatttttttgcacgtttatttatatacgtaaaataagtatttatacgacaagttttcttgagttgggacagtttcttaccaagggtctggacatatttgcatgtttttgtatttattcatagaccttacgtggactggaacatttatcacc

SEQ ID NO: 127397 - DNA, 513 bp, Zea Mays
gctacgcccgtcgccaggctcccgtctccatgggtctcctctcaaacagttcaaccctcagattcgttccttctctggattaggaaggagagcctcaaggtgggggatcacatctactcctggaaggcagcatgagtctacacgcttcacggttgtggatgctaaagttattcatctggactataataatatccgcatatttttgtcacttaaagatgtaaaggtgatggtggagacaacacttggcaaagaagagttgaaagaggcagttttgatgtgcactaatagggttagctaggatctccatgatgtgcatttgatgggggactattttatcaggttgctagcaggattggaacaacatacagtaagttaaatggtttgttcaattgatagaaacaaaggcaattatctcacattctactacgtggaacaagaaatagcctttctagaggagcggtagcaggaactgtgatatcctgtgttgtttattttgattgctggcatctgact

SEQ ID NO: 127398 - DNA, 1800 bp, Zea Mays
atggcggtggagagaaagcactgggtatggtgtgcggtagtgggggaaattggtgtgggtgaagtggtgtgtgggaatggtggtaatgatgaaatgggagatggtgaatgtggtaacggtagcaggtgcagtggaagtgaggtggtggtgtgctggtgcggatatggtggtaggtggtggtgggaggtggccatcggccgctatcatagccggtggcagtccgccatatccaggcatgccgtaggggcagtctggtggcggcgccatggccgatgttctaggggtggattccaccacggcaatgcgggaggacatggaggccatctgcgtggcgaagagccccagttggcgctggacttcggcaagggcggtgatcctggttacatcaacaagaatataagagattcacaaaatcaaagagacgatgaacctttgttgaagatgggtttggacagtcctgaacttcttgatggtaattggtctcgcctatgtataacatgcaaaattgtcaggcctgtacgctcaaaacattgctctacatgcgaccgctgtgttgagcaattcgatcatcactgcccttgggtatcaaattgcattggaaagcggaacaaatgggacttctttatgttccttatcctagaagtttctgcaatgattattactggtgtaatggccatcataagaagtgtaggagacccagcttccccagcatcatttggtggatggcttggctatacagctataaaccattcttgggtggtgtcttttgtcataatggacctcctccttttccttggtgttataactctaacagtaattcaagcatcacagatatccaggaacattacaacaaatgagatggcaaataccattaggtacagttacctcaggggaccaagtggcagattcagaaatccatatgaccatgggctgcgtgagaactgttctgacttcttgctgaaggggtacaatgaggatattgagagcactgtacagacattgcaatctgacgaggaaatgggaccaattcagatgagcagcccagtctcacagaatggcgagagcattccaccacatgtgaatggcactgaccatggttccaccatttcacatgccaactcaaaatcccatcgccaaagtccatccaattgtttgggcctagggctgggcactgggcataacaacccctctagccgttatgcgcgatctcttcttcccttatgatttgtcttgaggatatccagatgtgctcctttatatttgtgcatacttgttggacaaccagtcaaccacagctttgtttgggctatttcttcatgggtgctcggtgatttctctctggttgcacaaacgtgaaggcttcagaaacatcttcagcttactgcacctatgacacacgatagaaatagtgtcaatgtcaaggttttgttcttgttttcttggcaaaaggcaccaaggctctatgcctactatccaatatgtatgtacatggatggggctagtagttcatgcactaacccgttttgacttttgaggcatagttgtacgcttagggctgataacggcctataatttttgcactataagatttaagtatcaaatcgggttaggatcggactctatttctagtcatttttgaattataatttatttagggcattgatattttttgaagaaccatttggatcacgatccattaccacccatatgtacgctacgagagttgtaaaatgtacagtaacagaactacatggcatgtttgttcctgcatacgtatttatagaaaaaaatgatttgtct

SEQ ID NO: 127399 - DNA, 1042 bp, Zea Mays
cacccctcctccctccccatccttcataagctctcatacgtctctctctctctcccttcttcaaaacaccccaccccatccaaaacctagaacacacacaacaccagagggctttacaaccgcgcacatgatcatggcaatgtggaagccaggatggctagaggcccttgacacacagaagttcttcgtagcatgctctttccatgagcatgccaagaagaacgagaagaacatctgttgccttgactgctgcactagcatctgcccacactgtgtggcagcacaccgtgcacacaggctcctgcaggtgcggcgatacgtctaccatgacgttgtccggctggaggacctggagaagcttattgattgctctagtgttcagtcttatactattaacagctctaaggttgttttcctgaagaagagaccacagaataggcaattcaagggttcagggaatatctgcacctcctgcgacaggagccttcaagaaccgtatttccactgctctctggattgcaaggtagagtatatactacgacagaagaaaaaattgtcagcatatttgcgcccatgcaagaccttgcagcttggccctgatttcttcattcctcatgatgctgatgacgacacaactcactcaacccttgttgatgttgatgagcccatgggatcatcggactcggagaatttgagtgtgccgtgcacaaattttgttcggaaaaaacggagtggaccatatatttgtgcacggtctgcaaacagagtgtctgaagaagacatggccacaaatatgagcagaaggaaaggggttcctcagagatcgcctttgtgctaataaattcaatagttaattattttcccttttctttacttctttcatgttctttatctcttggactaaactggtgcaacaatgatagaattttgtctcagtactaccatgtgattaaaatacatcactagaggcaattgtactcaattcttcaagttggtgcaccagtttatatatatgtatgctttaacatagttcatgttatcc

SEQ ID NO: 127400 - DNA, 1812 bp, Zea Mays
ggaccaagaaacagttttacacaaagacccctcctcctcggtgctctcgagtctcgagagtcgagactcaggggacctgatttcctcgtccggccatggcgaccggtggcaagtccgctgcccctcagccacctcccgccgcgtcctcctcctccgaacgcgcgctggagtcagtccacttctcttccggaaaccctcgcatcgaggagacccgcggcgtcgtcgtcctccaccccgacccgcccgcggccgcctcctggtctcatgtcccgttggggaggaagccgcgggtgtgcgtgctcgccgtgcccaaccacatgacctacgccgacttctgccgtttctgcggcgccttcgtccctcacacactcgagatgcgcatcgtcagaactgatggagcagaggaccagtacagcgttcttataaattttgacactcagagctccacagacagcttctataagcacttcaacgggaagcagttctcttcgctggaggggggtgtctgccatgtccgttttgtggaagaggtgcactacactgaattgattgagcatgcacatacctcagttacaaacttggctgagcaacctacatgcccagtatgtcttgaacgacttgaccaagatcctggaggtattctcacaacaatctgcaaccattctttccactgctcgtgcatatcaaaatggacagactcctcatgcccggtctgtagatattgtcagcagcaaccagagaaatccatgtgttctatttgcggaacttcggagaatctttggatatgtctaatctgtggccatgttggctgtggaaggtacaagggtggacatgctattgaacactggaaggaaactcaacattgttattcacttgagttagagacacaaaaagtgtgggactatgctggggacaactatgtacatcggcttattcagtcaaaaacagatggaaagctagttgagtacaatttccatggtgatcacacagcagagagcacgtgttcactatgcagtggtgatgccgcaatggatgaagctctactgaacagtaaatttgaagctattgttgaagagtacaatgatctcgtcacatttcaacttgaaaagcaaagaaattactatgagtcacttctactagaagtcaaggaggaaactgagaaagaaatttctgctgctactgagaaagccatgagcacaaaactccaaaagttggaagtaaagtttgacaagtgtatggaagagaaaaaatttcttgatgaagtaaatggcaatcttgtcaagaatcaggagatgtggattgaaactatacgaaaagcacaagcaagggagcaagctgcgctcagattaaaagatgagaagatcgaaaaacttcaggaagagctaagaggtttgatagcccatttcgactgccaaagtgacactgcacaagcttcaaatgcgatctcgagcgatataccagggggcatgattcttccggtagcatcagaatcgtcctcgagcggcggcgttgttggtggcactggaaacggggagcaaaattgagtaaactgcgccctgtataaagcacgtttggatcttagggacctaggtatattcttgcttccaaacccccaccgttgtatgttcagttagggtaatacacacttgttagctgtcacctcactgcccctcgattctactgtcactagccgctagtagtgtggtactagggatgaaaacgatttcatttttttttggtttttcgaaattcgtttccgatttttcgaccgtatttaatggttatggtatttttcgaaaacataattggtta

SEQ ID NO: 127401 - DNA, 992 bp, Zea Mays
cgcatacggcaactcctctctccgctgttgctctcttcccgtcgcgctttctcctcgtgcggctactgggtaaccgccgccgctgccgccctacgccaggttctcaggtcattgtcagtccccttacttcgccggctcattcggcggcgacgagcaccagaaatcctagctgctttgagtatggaggcgctgtttgggtgcaacaaacatggcggggacaaggccgctgatttggcctcgtttataatcgtgcaggctgccttggaggtgccaaggttacttgggctccttgccatgattcttcataatgaaatctttacatctggtggagatcagaatttgattaataggattctgagcaaaaacaaaaatgcaactgatttcgagaacaaggatgatggagagtctgatgatgataatgatgaggagggagacgatgaggatgctgaaaaccaagaagatgatggtggtgatgagggatcagatgacaatgggaatgaggaggaagatgacgacgacgatgataacgatcctgcagccaacggtgaaggaggaagtgacgacgatgatgatggtggagaggatgaagaggaggatgatgacgacgatgatgatggggatggtgacaatgaggaagatgaggaggaagaagaggaagaggatgatgacgatgatgtcccccaaccacctactaagaagaggaaatgatagatggctgtgatttggttggctggttgcttacatgcaggaatgctccctgttcgcccctgcctagcagtctcctgtttagtgggtagggggttttagcttgatcgtggacaattcatagcctagcttggaaacaaaaagaaacatttaattgtgcatgtactattaaaccattcctttaatcatgtatctcagattgctaccaacccctgtgatgctccgaatggtttctacattgtgtttgcttcagttttgttgcaacttgcaatttgacaatgttctga

SEQ ID NO: 127402 - DNA, 623 bp, Zea Mays
gcatactaacttctatttttatgccattttttgggtgtatatgagtacactcatgtccttacttggtccgcccctgatcctgaccaaatcctagctgctttgagtatggaggcgctgtttgggtgcaacaaacatggcggggacaaggccgctgatttggcctcgtttataatcgtgcaggctgccttggaggtgccaaggttacttgggctccttgccatgattcttcataatgaaatctttacatctggtggagatcagaatttgattaataggattctgagcaaaaacaaaaatgcaactgatttcgagaacaaggatgatggagagtctgatgatgataatgatgaggagggagaagaggaagaggatgatgacgatgatgtcccccaaccacctactaagaagaggaaatgatagatggctgtgatttggttggctggttgcttacatgcaggaatgctccctgttcgcccctgcctagcagtctcctgtttagtgggtagggggttttagcttgatcgtggacaattcatagcctagcttggaaacaaaaagaaacatttaattgtgcatgtactattaaaccattcctttaatcatgtatctcagattgctaccaa

SEQ ID NO: 127403 - DNA, 214 bp, Zea Mays
gtttatttggttatcaaatatcacacctagattgccatgtcaaccagtaggaatgggcacgcacgttacgtgcgagatctctggacggttgcacatagagatattccagagggcggtttctggaatttagcagatctaatcaaggggttgcggtggcccatctatatagggcagacgtctttcagttggaggaaacatgcgaataacaaccgac

SEQ ID NO: 127404 - DNA, 1360 bp, Zea Mays
gccatttgttttgagcagtcattctagagctcctagttttctctctaggtagacaccagttgagccgaggtttccagagtgattttgtacttcgactgtgttcttgatttttaagtttaatcagaggaagggacgccggtccggaccacatggctctttggcttcaaatctcagtttgtacctttgctgaaaatttctgaagttttatagtcttggtttctccttttcccgatcttgtgttgttggtgaaaaaatttgattcctttgagaggatttggtttggggattgtttggtagtgagttgcactctttggaccactgcatacacctatttgttgcagattttggtcacgatttgagaaaaactcaggttgaactcgtttctagaaaaccccaacaaaaccccaatttctgctgtatttttaaatctgcgggtgattcacaagtcggattgagctcaaaatttagggagatcttgcaaaggtacttgctcaggtgtgtgtaaaatttcataacaatcggagtttgtttagttcagctttgaaatcaagaacagattttcgtactgctgaaaacagcacttgttgacgatactgtattaaccgttttggactttttggtgtccgatttgcgatccgtttcttttgctggtctcatgtgagtattaggaacattttgtaatcatgagatcagtcgtttgctgatgtgtttattgtttgtgcacttacttcatctcaattgaagtaaagtgttaattttcagtgtttggagacaaaaatctgattggctcctattcaccccccctctggtcgccttaccggtcctacacggatccagctgtggcgactacgaagaagggttgggcggcggggcaagggcctgcactaggcctagcaagggggttgacaccagcgatgagagaagtttgaaggatagagaggcgctccaaggacgcctcaggcgaggggcgagatagtgcacgaccatggtaggggagaggccggccttggggcagcatcttgctggctagagcaggaaacatggccagagcaaaaggtggcgcgaggtgggctgctagtgggttaggcacacggcattgtgacgcaggggtgccagctgccaacaccgggcgtcgttgtagcaggggcgatccaggagaggtcgctggaaggtgaaagcacctagagggggggtgaataggtgatcctatagaaacttaaaacttaaagccacaaaacttgattaagtgttagcacaatgaaatcaagtggctaaggaccaagctcttgtaaaacacaatagtcacaatgagaacaagcacaagagacacgatggtttatcccgtggttcggccaagtac

SEQ ID NO: 127405 - DNA, 3661 bp, Zea Mays
aataaactcatttttgaattgaccattccatttgaattaaaaaaaattatgtcacagttgccaccacactgtttccttattgtctactcaccccattatgagccaccttccttttttttcatttgctataataattccagcgcctcttattatatttttttaactcgctatttctgctcacctcctcctctccttttcttcctccctcagcctggcctcaactcccctcccatcccgtcccccgatctcatctcgccggcggcggcgatggcgggcaacgataattggatcaacagctacctcgacgccatcctagacgccggaaaggctgccatcggcggcgaccggccttccctcctcctccgcgagcgcggccatttctcccccgcgcgctacttcgtcgaggaggtcatcaccgggtacgacgagaccgacctctacaagacatggctacgcgcgaacgccatgcggagcccgcaggagaggaacacgcggctcgagaacatgacgtggaggatctggaaccttgcaaggaagaagaaggagttcgagaaagaagaagcttgtcgtatgtcaaaacgccagccagaaactgagaaaacacgagctgatgctactgcagatatgtctgaagatctctttgaaggagaaaaaggagaagatgctggtgatccatctgtcgcatacggggacagcaccacggggagctcacctaaaacaagttcaattgacaagctatacatagtattgatcagtctacatggtctggtccgtggtgagaatatggagcttggccgagattcagatacgggtggccagatcaaatatgtggttgaacttgctaaagcattaagttcatccccaggagtttaccgggttgacctgctaacaagacaaatcttagcaccaaattttgatcgtagttatggtgaacctaaagaattattggtttcaacaagtggtaaaaattataaacaagaaaagggagaaaatagtggtgcatatataattcggataccgtttggtccaaaagacaagtatctagctaaagaacatctatggcctttcattcaagaatttgttgatggtgcactcagccatattgtgaggatgtcaaaagccataggtgaagaaactggccgtgggcatccagtatggcctgctgtgattcatggacattatgccagtgcaggaattgctgctgcgttactttctggagcacttaatcttcctatggcgttcacaggacattttcttgggaaagataaattggaagggcttctcaaacaagggagacaaactagggaacagataaatatgacatacaaaataatgtgccgaattgaggccgaggagctatctcttgacgcatctgagattgtcattgcaagcactaggcaagaaatagaagagcagtggaacttgtatgatggttttgaggttatacttgcaagaaagctccgagcaagagttaaacgtggtgctaattgttatggccgttttatgcctcgtatggttataattcctcctggagttgaatttggtcacattattcatgattttgatatggatggcgaagaagagaatccatgcccagcatctgaggatccacctatttggtctcagataatgcgcttctttacaaatcctaggaagcctatgattctagctgttgcccgcccttatcctgagaagaatattactacacttgtaaaggcatttggtgaatgcaggccattaagggagcttgccaatcttacactgataatgggaaaccgtgaagctatatctaagatgcacaatatgagtgctgctgtcttgacatcagtgcttacattgattgacgaatatgacctgtatggtcaagtggcataccccaagcatcataaacactcagaagttcctgacatttatcgtttagctgcaagaacaaagggggcttttgtaaatgtagcttacttcgaacaatttggagttactctgatagaggctgctatgaatggtttgcctataattgcgacaaaaaatggagcccctgttgaaattaatcaggtcctgaacaatggtctccttgttgatccgcacgatcagaatgccattgcggatgcactatataaacttctttctgataaacatctttggtcaaggtgcagagagaatggactgacaaatattcaccaattctcgtggcctgaacattgcaagaattacctgtcaaggatactaactcttggcccaaggtctcctgctattggtaacagagaggagcggagtaatacacctatttcaggaaggaagaatatcattgttatttctgtagactctgttaacaaggaaggtctagtcaggataatcagaaatgctattgaggtcatacataaagaaaacatgtcgggttcaactggttttgtgctgtcaacttccttaacgatatcagaaatacattcactgctactatctggaggcatgcttcccactgattttgatgctttcatctgcaatagtgggagtaacatttactatccttcacattccggagaaacgtcaaacaactccaagattacatttgcattagatcaaaatcaccagtcacatattgagtatcgttggggaggagaaggcctaaggaaatatcttgtgaagtgggccacttcagtggtagaaagaaagggaagaacagagagacaaattatttttgaagatccagagcactcttcggcgtattgtcttgcatttagagtggttaatcccaatcatcttcctcctttaaaggagttgaggaagttgatgagaatccaatctctccgttgcaatgcattatataaccacagcgctaccagattatctgtagtccctatccacgcatcacgctctcaggccctaaggtacctgtgtatacgattggggatagaagtgccaaatgttgcagtcctcgtgggtgaaagcggcgattcagattacgaggaactgctggggggtctccataggaccgttatcctaaagggcgagttcaacatcgccgcaaacaggatccacacggtgaggagataccccctgcaggatgtcgtcgccctcgatagctcaaacatcatcggtgtcgacggctacaccacggatgatctgaggtctgccctgcagcagatgggtatactggcacggtaacaccttccggagcttccgtttccactaccaggtcaacgaagagaaacgagaaaacagacagaatggtgacgaaacaagtgcgaccgtttccatgctcgatgggaatgccgattttgcattgtaggctgtagcggttgtgttcgtgtgtgtgtgcccgcgcgcggtggtggcctattcttgtgctgtgaataactgcccctcctttgtttgtgatatgccaaaattttgaagtgagtacagtacaaccaaacatgttgatgatggaaaaacgaatggagaaaggggaaaaacaaacaaaaatggtttgggacggcagtgttccatggtatggtacgctgttgttgaatgcctgggaaatgggtgattccgctgttcgtcactcgtcccatctggctagtttgttctatgccttctgaaacatgtatcatctggctagttacctggggacatcagatgttctccctgttttgacttgcgattgttgtttcgtaggaagcac

SEQ ID NO: 127406 - DNA, 1590 bp, Zea Mays
acaccaaaagacgcaacatcgcaacgtccataaaaatttggcgtgatcccacacagcccaaagcaagcctagcaccgcaacgcaatcaaacccaagacaaatccaaccaaccaagctattccccatctccggaccagcgccgcctccagtcgctgtccacgggcaccccgggcgcgcctcctccgagcccagactcgagctccatcccgccgtggatcaccgcgtgaggtggggcgcaccgaccggaccccggagggccagatggtgtccggcgccggagggggcgagtagcgcggtcggcggccacgaacggattggcggcggcgcggcgaggcgtcggtcggagcgggggccaccatgtctgctgtagtgtgcggcaagaggtcctcctccatcttcggcgacgagcttgtaccttccccttcctcccctccgtccccttcccaccaccatcaccccgccaagagggcccgctgctccccgtcccgctggagggagggtctactccaccacctcctcaccctcttccccgacatggatccccagttacttgaaaaagctcttgaggcctctggagatgacttggactctgcaataaagagattaaacgagctgcgactggagtcagctggggctatcctatctgccactgtttgtgaatctgagaaggacatatcatcagctcataacttattggctgaaggtaccaccagtaatggccatttagacatagctactgaaaatccacctgcaattgataactctcagacaagtcatcatagctctgaatgggttgacctatttgtcaaagagatgatgagctcctctgacatagatgatgcgcgagctcgtgcatccagggctttggaggtgtttgaaaagtccatcatggatcgagttggacctgaagcagtgcagaatttgcatagggaaaatgtgatgctaaaggagcaacttgcaataattctccgagagaatgctgttctgaagcggggcgttgcgatacaacacgaacgccaaaaagagtttgatgtgaggactcaggaagtcgacagccttaaacagttggtactgcaatatcaggagcagataaaaactcttgagataaataattacgcacttagagtgcatttgaagcaggctcagcagggcaattctatgcatggacgtttcccgcctgacgtcttctaatgtctgccatggctcaacagaataattatgcatggacgttcgttaatatttgatgctgtacagttggattttgaactaagcagtgtcaaataaaaaaaatcgaggtagtacctattaagataagtagactcaggacctcaagttcgactcaaatgctgcatatacgatcgtaccccatcattggagtcgacaacactaaggtccaactacctggaagctgagatgaaatagcatgttagggttggcagtgcactggtccttgcatacttgttgtaataatggatcttgcaggggaagctcggatgaagtaatattggctgtatgcgtttgaagtgtgagaactgatatatatcgtaagcttaacacactaaaaacaaaacaatgtttaaattaatcttt

SEQ ID NO: 127407 - DNA, 433 bp, Zea Mays
caggtaatggtcgcacgtggtgcagtgcaagagctgcaacgcggcgctcaaggccatgaaggcgctcgaggctgccctgcaggtggcctcggtcggtgtcgtcgggttccttgccgtcgccaagggaacggtcctcacgtcgactgttcagagggccgcggtcgtgtcggcggccgtgctgtgcttcgctgcctcccgctggcttgccaacttcatccagaacttctacttccaagactacatccacgcctacaagtgacgcgctcaggaatacaactatttttaaggtttttgttgctaggagattgttgtatttactgtgaatgcatattattagaagaattgggtgggtagaaagcagtatctatgctgcattaacttgtatataataatgcatataatcgatgatgaaacggaatacacgcggcttcag

SEQ ID NO: 127408 - DNA, 1728 bp, Zea Mays
ctcaccaaagtccaaggatcggtgcattcagaatttcagattcagttcttggttagccattgacagcatctgaggccatatcatggatgcgctcacgtactacctgtacctcttcttggccttccttcccctcttgctcctgaagctcaagaggcgagacaacaacgatggcctgaggctgccgccgagcccatggagtctgccggtgatcggcagcctccaccacctgctcgtcggcagcccgctcccgcaccgtgccatggctcacatctcgcacaggctcaaggcgcccctcatctacctcaagctcggtgaggtccccgtcgtggtcgcgtcgtcgcccgacgctgctcgggagatcctgaagacgcacgacgccaacttcgccacgcggccgtggagcccgacgatgaaggtgatgatggcggatggggagggcctggcgttcgcgcgctacggcgccctgtggcggcagctccgcaagatcagcatcctggagctgctcagcgcccgccgcgtgcagtcgttccgcggcgtccgggaggaggaggtcggccgcctcgtggctgccatcgcggagtactccccgcggggcgaggccgtgaacctcagccagaggatcgccgagctcatgaacgacacggccgtgcgcgccatgatcggcgaccggttcgagaggcgggacgagttcctggagaacgtcgcggagggagtgaagatcagcaccgggttcagcctcggcgatctgttcccgtcgtcgaggctggcgagcctcgtcggcggcacggctcgccgggcggcggtaaaccaccgcaagatgttcaagctgatggactacgccatcgagaagcacgaggagcggagggcagccatgaccacagatgcagagggcgtcgtgaaggaggatctggtggatgtgcttcttaggatacagaaggaaggaggcctggaggtgccactcaccatgggaatgatcaaggccgtcattctcgtatgtgctgctgcctactccaactgctatacatctatgtgcttcatgcgtgagtccatgggctctcttgttgcttgtgtgtgtaggaccttttcggtgccggcagcgagacgtctgcaagtacactccaatgggccatgtcggagctcgtaagcaacccaagagtgatggaaagggcacaggccgaggtacgtgagaagctccaagggaagccaacggtgaccgaagatgacttggtcgacatgaggtacatgaagctcatcatcaaagagaccctaaggatgcatccggtggtgccattgcttctcccaagggagtgccgagagccatgcagggtgatggggtacgacgtgcccaagggaactaccgtgttcgtgaatgtctgggcgatcagcagggatcccaagcactgggaggacgctgcgacgtttagaccggaacgattcgaggccgcgggtacggttgattttaagggcacggactttgaatacacgccgtttggggcgggccggaggatgtgccccggcatggcgtttgcgcaggcaagcatggagctcgtgcttgcagcgctcctgtaccatttcgactggaagctgcctggtgggatgctgccgagtgaattggacatggcggaggagatgggcatcactgcccgaaggaagcgcgacctttacctgcatccagtcgttgtcagtgtgccaccacatgtctcataaaccatagctgttctacttgct

SEQ ID NO: 127409 - DNA, 1704 bp, Zea Mays
ctcaccaaagtccaaggatcggtgcattcagaatttcagattcagttcttggttagccattgacagcatctgaggccatatcatggatgcgctcacgtactacctgtacctcttcttggccttccttcccctcttgctcctgaagctcaagaggcgagacaacaacgatggcctgaggctgccgccgagcccatggagtctgccggtgatcggcagcctccaccacctgctcgtcggcagcccgctcccgcaccgtgccatggctcacatctcgcacaggctcaaggcgcccctcatctacctcaagctcggtgaggtccccgtcgtggtcgcgtcgtcgcccgacgctgctcgggagatcctgaagacgcacgacgccaacttcgccacgcggccgtggagcccgacgatgaaggtgatgatggcggatggggagggcctggcgttcgcgcgctacggcgccctgtggcggcagctccgcaagatcagcatcctggagctgctcagcgcccgccgcgtgcagtcgttccgcggcgtccgggaggaggaggtcggccgcctcgtggctgccatcgcggagtactccccgcggggcgaggccgtgaacctcagccagaggatcgccgagctcatgaacgacacggccgtgcgcgccatgatcggcgaccggttcgagaggcgggacgagttcctggagaacgtcgcggagggagtgaagatcagcaccgggttcagcctcggcgatctgttcccgtcgtcgaggctggcgagcctcgtcggcggcacggctcgccgggcggcggtaaaccaccgcaagatgttcaagctgatggactacgccatcgagaagcacgaggagcggagggcagccatgaccacagatgcagagggcgtcgtgaaggaggatctggtggatgtgcttcttaggatacagaaggaaggaggcctggaggtgccactcaccatgggaatgatcaaggccgtcattctcgaccttttcggtgccggcagcgagacgtctgcaagtacactccaatgggccatgtcggagctcgtaagcaacccaagagtgatggaaagggcacaggccgaggtacgtgagaagctccaagggaagccaacggtgaccgaagatgacttggtcgacatgaggtacatgaagctcatcatcaaagagaccctaaggatgcatccggtggtgccattgcttctcccaagggagtgccgagagccatgcagggtgatggggtacgacgtgcccaagggaactaccgtgttcgtgaatgtctgggcgatcagcagggatcccaagcactgggaggacgctgcgacgtttagaccggaacgattcgaggccgcgggtacggttgattttaagggcacggactttgaatacacgccgtttggggcgggccggaggatgtgccccggcatggcgtttgcgcaggcaagcatggagctcgtgcttgcagcgctcctgtaccatttcgactggaagctgcctggtgggatgctgccgagtgaattggacatggcggaggagatgggcatcactgcccgaaggaagcgcgacctttacctgcatccagtcgttgtcagtgtgccaccacatgtctcataaaccatagctgttctacttgctattttaccgtagctatatgctttattgatgcagcaaagttcactagtacacacagcctctat

SEQ ID NO: 127410 - DNA, 1534 bp, Zea Mays
ttttatccacgaacatttatcagtttcttgtagtgtcactagtgcgatttacgcgcacatcatcggtccacattaacaccgcaagtatactaaactgatgagaaatattaaaacgaagagcgagagcgacgacagctcactaataatttaatccgtcttgacagccacgagcacaactacgatttccaatttcgccattacgtcgagcacgtggtgagcaccacacggacttcactgccttctcgatccacatcaagaattttccggctgcgtactgatttttttccttctacgcctaatcttctcggatttttagtgtaaacacaagttcgagacgtcatgtaggagccagcatcgaggcgaggcgacggatcgacgacaagcatcaaggatagatctacaatattgtggtacacccgacacggagatgaacaacaacgaaccagcaagctgaaccaaagcgagtgatgagcgacctcgcgtatccctcgcgtattcctggttcgacatttgatcgaacataaagaaatcgaggcctagcaggaatggtaggattgaccgcgaccacgagctcgataaggggcgcgctgctgcacggcgcatgacgccgcgaacaggagctggacacaggcgaggagttgggtgtgatggggtgggcgcaaacagggaggtcgacggcaaggttcgagcaccggcgatctgaggtacggcggccaccatccagggaacaacgatgccggggctgagagagcaacgatgggcgagctgcaagggaggagcgcggacgcgatgacgagatcaggccaagaggcgaccaccaaatagcagcatcgacgaggttgtccgaccatgaggagaagagtgaaggtcgacgaactcaaacacaaggacgcggcgagctccatcgcgacgagatagaagagaagcaggatggccggcgagtcgcagctgtcgtacgaccacggacggtggccggcgaggcctccacgcactttgcgagtagcgcaacggatccggatttgcctgccctcatccagccatccatccacgacgaggcacagattcacgagaccggacagccggccacaatcctcgtcacggcgcgagcgatgctggtcagccttggtctgctggaggttccaggcggtgagctcgtcgagggagacgaatccgccctgtggggccagtaggaggcgaggagaagcagcaggatcaagaggccgctgccggcgccggtgccatcgccggcaaggggcggagatggaggaacgggtgggtgaggtcgagcggaggacgagctcgtgggagatgccgagccgagaacgtccagggagcggcgcgcagggtcaagcagaggaggatcattccggcgaacaggaggccacgcgcgtgaaccagggagggcacgacgaaatggccgagaaggagaagtccgagcgccatgggaaggagaggaggagcaaggagggcgctcggccatggggagaggagctaggcggctgcgcagtggagcaagcagcatagagtcggctgg

SEQ ID NO: 127411 - DNA, 2007 bp, Zea Mays
tcacgcgtaagtttccagagactcagactactcccgcagtagaccgtgggttgattcaagtgtttgtcagggtcctattggttaaattgtgtggtcgaaggggtatgaatagatctcgtccattggatcagggttggacgcgcgggattaaatcaaggccctaccgaaccggtacataataacaaacgtcagattcgacatggatggcccagatttaattattgattcacccactcctgaccgcctgatctcgatctacggcgcagatgcctctccaatcatagctgcatgatcccggccggacgatgcagatataatccccgaactagtacgagagatgtgatcacaaccgtttggtttctaatctacgacccacaatgcttcacctacccgcgaccccaagcggtggtgttggccttcccgcggcggcgctcccgccggagaacggcaacccggcacgccaatgccccaaactacaccgccaaccgagcaacacgatgctcgcaacactacgatcctatcggatggctctttacctgggatatgtcgcgacgacctcgacttctcggagccgcgcagtccacggcggcgctagcatccggcgagcaataagcagggttcccagagacgacttgcccggatacttcttgaccccatccagtagacctccgcgaccccgatgatccaccccgaggtctggttcttggtgtctatgcttgacggcagccgcgacggatccacacatcaagcggcgaatttcttaaacgatggcatccatggttttgatgagatgcgcccctacgtcacctatatactctgtgaaggagtccgaacacttgcagaatagaagaacagatcctacaatctcgcgatgaccccaacggcttgcgacggagcggcgagatcggaaccagagacccacggacggtgagtttggcatctctgtaatggagctagggcggggaaagtgtctgactggcgtgtgggcctggtctttaaggtcagcaggccgcgccatgcgcggaggccgttgggcgcggattcaatggtggcgacccacggcgttcagttgagacggggtggagcgcggccgagattctaggcggccacatcagcccaacgcaccgaacacgagaggaagacgatcctgatgggagggccccacacgtaagtgattctgtatgtgaagagggaagggaaagagggatgggccggccagaagcaagtgggccgaaatggagcagaagcggcccaggcgcacaatttctctttttcctttttctttttattttctttttttcctatttctttcatttgcagtttaaaatccaaaattttgaattcaaatttcgtaggagaatttatactcatttaagtattcagtttgaacatatcggtgggttgaatctatatatttataaattttatcttgtcttttatagtatttctctcttgaattccaaatccaattttaggttttaatccaaatcttcatctctttattgtattcccctattgttcctttttgaccttacaaaatttcaatcccaatctacgatatagtttaataattcaaatttaatacccactacaatcattcatgatatagtagaatctatttattttaattgatttatttgtttgataaatgtttgaaatgtgaggcacactcatattgtttctttctttttagaaaaaaatagtattttgaatgtgggataagaagtaaaagttactttgaaattaaatattcatgtaaataaacgcttatggtgcatcatttaataatatgcataatcatttagttgaatataaaacttttctattacttcttttctaaaatagtttttggttttcaaagttcagtcttcaaatttcaacactcaagtataattcgagatatctaaatttactattccattttttcatatatttattttattattattattattttcttatactaattttgggccttacaaatcctacccccttaacaaaaatatc

SEQ ID NO: 127412 - DNA, 623 bp, Zea Mays
catgtgcctacgacagctcgggacttcgggagccgcgggtgatcggaccgcgccccggccgggtggccttgcgtacggcagtggaaagtggtgatgcgctcagccgacacacacaccgcaaaaggcccacgagaagaccccgccggcccgccctctccctccccacctctactccacctccaatcctccccgttgctgtcccgccggcgtcgaagctcgagagaagggtgagcaccttgccgcgaggtgtgtccggtgagctagctagggacgcgccagctcgtgctgatctgacctggaagctctggaggcgatgaaagcgctcggacgggcgatgaggtgggcttcctgctgcaagctctcggacggggatgaaccaggtaggaggaagaaggacgcatcgtggcggatcttttcactgaaggagcttcagtcagcaacgaacaatttcaattacgataacaaggtcggcgagggtgggtttggcagtgtctattggggccagctctgggatgggtcacaggttgctgtgaagaggctcaagagttggagcaacaaagctgaaacagaatttgctgtcgaggtggagattctggcacggcacgcagcagagtgcaatctca

SEQ ID NO: 127413 - DNA, 1744 bp, Zea Mays
catgtgcctacgacagctcgggacttcgggagccgcgggtgatcggaccgcgccccggccgggtggccttgcgtacggcagtggaaagtggtgatgcgctcagccgacacacacaccgcaaaaggcccacgagaagaccccgccggcccgccctctccctccccacctctactccacctccaatcctccccgttgctgtcccgccggcgtcgaagctcgagagaagggtgagcaccttgccgcgaggtgtgtccggtgagctagctagggacgcgccagctcgtgctgatctgacctggaagctctggaggcgatgaaagcgctcggacgggcgatgaggtgggcttcctgctgcaagctctcggacgggtaggaggaagaaggacgcatcgtggcggatcttttcactgaaggagcttcagtcagcaacgaacaatttcaattacgataacaaggtcggcgagggtgggtttggcagtgtctattggggccagctctgggatgggtcacaggttgctgtgaagaggctcaagagttggagcaacaaagctgaaacagaatttgctgtcgaggtggagattctggcacgggtgaggcacaagagccttttaagcttgcgcggatattgtgctgaaggccaggaacgcttgatagtctatgattatatgccaaacctgagcatacacgcccaacttcatggacagcacgcagcagagtgcaatctcagttgggaaagaaggatgaagatcgccgtcgattccgcagaagggatcgcttatctgcatcaccatgcgacgccacacatcattcatagagatgtcaaggcgagcaacgttctcctggattcgaatttccaagctcgggttgctgactttgggttcgccaagctagttccagacggcgcgacgcatgtcaccacaagggtgaaaggcacactcggttatctcgcaccagagtacgcgatgcttgggaaggcctctgaaagctgcgatgtcttcagtctcggagtcatgctcctagagcttgccagcgggaaaaagccagtggagaagcttaaccccaccacgaagcgaaccatagctgagtgggctcttcctctagctcgggacaggaagttcaaggaaattgccgatccaaagctcaatggtagcttcgtcgaggacgagctgaagcgaatggtgctcgttgggctcgcctgttcccaggacaagccagagcagagacccgtaatgtctgaagtcgtcgagctgctcagaggagaatctaccgagaggctttccaggctggagaatggtgatctgttcaagcctgatatctcgttccatggctcatccggacctgatagctcggactgcgtcacggaggagaggagtcccaaggcagatgcgacagaggaggctgttgattcaagtgagacggttccctcagcaaggtagtgtgatgcacggtggtgtactgtcagtaggtgccctgagctccttgcctgggggaaatgtgtttatcagttcatttttgtggttattccttgctatttagcaagttaatctgggagcctccttgcccggttctcttgtgtggtgtcattccttcgtgttggcatggttctatggcttgtaaaattctgtatgtaaatctgggcctggttccatcccttcgtgtagcaagcagttcactgcactgtggttagcgttttagctacttcagtccattaatgatttgtgtgtaagtctgtaatatgtatttt

SEQ ID NO: 127414 - DNA, 1865 bp, Zea Mays
catgtgcctacgacagctcgggacttcgggagccgcgggtgatcggaccgcgccccggccgggtggccttgcgtacggcagtggaaagtggtgatgcgctcagccgacacacacaccgcaaaaggcccacgagaagaccccgccggcccgccctctccctccccacctctactccacctccaatcctccccgttgctgtcccgccggcgtcgaagctcgagagaagggtgagcaccttgccgcgaggtgtgtccggtgagctagctagggacgcgccagctcgtgctgatctgacctggaagctctggaggcgatgaaagcgctcggacgggcgatgaggtgggcttcctgctgcaagctctcggacggggatgaaccaggtaggaggaagaaggacgcatcgtggcggatcttttcactgaaggagcttcagtcagcaacgaacaatttcaattacgataacaaggtcggcgagggtgggtttggcagtgtctattggggccagctctgggatgggtcacaggttgctgtgaagaggctcaagagttggagcaacaaagctgaaacagaatttgctgtcgaggtggagattctggcacgggtgaggcacaagagccttttaagcttgcgcggatattgtgctgaaggccaggaacgcttgatagtctatgattatatgccaaacctgagcatacacgcccaacttcatggacagcacgcagcagagtgcaatctcagttgggaaagaaggatgaagatcgccgtcgattccgcagaagggatcgcttatctgcatcaccatgcgacgccacacatcattcatagagatgtcaaggcgagcaacgttctcctggattcgaatttccaagctcgggttgctgactttgggttcgccaagctagttccagacggcgcgacgcatgtcaccacaagggtgaaaggcacactcggttatctcgcaccagagtacgcgatgcttgggaaggcctctgaaagctgcgatgtcttcagtctcggagtcatgctcctagagcttgccagcgggaaaaagccagtggagaagcttaaccccaccacgaagcgaaccatagctgagtgggctcttcctctagctcgggacaggaagttcaaggaaattgccgatccaaagctcaatggtagcttcgtcgaggacgagctgaagcgaatggtgctcgttgggctcgcctgttcccaggacaagccagagcagagacccgtaatgtctgaagtcgtcgagctgctcagaggagaatctaccgagaggctttccaggctggagaatggtgatctgttcaagcctgatatctcgttccatggctcatccggacctgatagctcggactgcgtcacggaggagaggagtcccaaggcagatgcgacagaggaggctgttgattcaagtgagacggttccctcagcaaggtagtgtgatgcacggtggtgtactgtcagtaggtgccctgagctccttgcctgggggaaatgtgtttatcagttcatttttgtggttattccttgctatttagcaagttaatctgggagcctccttgcccggttctcttgtgtggtgtcattccttcgtgttggcatggttctatggcttgtaaaattctgtatgtaaatctgggcctggttccatcccttcgtgtagcaagcagttcactgcactgtggttagcgttttagctacttcagtccattaatgatttgtgtgtaagtctgtaatatgtatttttttaggtttttatgatggaacttcgtttttctaaaagatttttattttttcaagggacaatgaactaatttttttggaaaatagaaatctattatgaaaatgaggttctc

SEQ ID NO: 127415 - DNA, 1620 bp, Zea Mays
ttccacccgccggaacactggtaaccctcacgccggcgcagccgcagccgaggcgccatgaacaacctccggaagcgcatgatctcccttctcctccgggcacctggatcaccatacgtcccttgcccccacttcttcccgctcttctatccccaccgcctcctctccgccaccaaatgcgtcgctacaaaaccattcgccgtcgaggactacctcgtcgccacatgcggcctcacccaagcacaggccctcaaggcgtcgaagcatgtctcccatctgaaggatccctcgaaagccgacgcggtcgtcgccttcctctccaacctcggcctgtccagcgccgagatcaccgacgtcgtgaccagggaccccaaagtcctctgctccgacgtggagagatccctcaccgctcgcgtcgccgagctcaccgacctcgggttttcacgtccggagatcgtccgccttctcatcgttggcatgaaccacttccgccatagctcgcttcgcctcaatcttgagttttggatctcggtctttggctctctcgacgagctcattcgggcgctcagaattaacgccgctctcctcagcacaaggattgaggaggtctgcaagcccaacttggagctccttcaagagtgtggtataaatgtttctgatatctccaacagcttcatgtcccgtgtgctcaccagggaccctaagagcctgcaggaagctttggctcgccttcatgagttcagaatccagccgggctctcaacctttcttccgtgggctttatacatttgcaatccttggcagcgggaagataaccaagagcattcagctgtttgagaagcttggatggtcaaaggaccatatagtatcagcggtgaagagagacccgactatattgggtttcaccgaggagagggttcgaagaaacatggaattcttgatcagggttgtcggattggaggtaccatacatcgcacgaaggccagcgctgataaattatagtattgaccgtcggttgttgccacggaattgcttgatcaattttctcagggcaaaggggttgttcaatgacgaggctagtttcctttctgtcgccgctataggcgatgagaaatttcggcgccgatacgtgcatccttacgaggaggattttccaggccttgctgctgcttttgcttctagctgtgctggagaacaccaatgggaacggctatataagatgacaggcgaaaataaagaaagctgacaattgttctggaaagtacaatcaggaacctgctgcaagccttgtttttcatcaccatggttctatcttgctgcctcccttctgagaaagagcttctcatgtgatggcatcgttacaagtttatttattaacttgcaaggattatctcaagttttagcccaactttattcctgtgcttcaggaagattattacgttggtggtctacttcccaccatgttttttgtaccacaatctatgagctctcgaacaccaggaacgggtttttttattccaaattcttcagtcgacaattggtttacttgagtgatcctggaaatggaattttagtcctgctaagcacaatggtacttcgatgggctacgctgcttttcttg

SEQ ID NO: 127416 - DNA, 340 bp, Zea Mays
tgttaaattaacagactatgtggcccaagaagacgacaacgacttcttcattgaaatggagctgtgaaatctgcctggtggaagcacccaccgagtgccacttacaacaacattttgcatggcatccagtattcttgcttcataaagttgcagaaaactcagcacttattctagtttttggtagtttatttggaggcgcactcctttggcactttgggtccgtcctttttattgtcatgccaggaagcaatttattttatccttcctattgcagtactcaaaaactgtgttgagtactctattaatattgtgtgataacaagaacacatgttggtggttt

SEQ ID NO: 127417 - DNA, 408 bp, Zea Mays
atggaggagcaaggaaggcgccacacgcttggaggagagagggagcggagccttgagcgctggattatagatggagagctcgggttcggctccatggcgtcggtcgacattggaggaaggaaggaggagcagaggtgctgcttagccccgtggatcctggcagccatgggccagagaagggcgccccaacctggaggaggaggaagggggcgactggagctacgacacagagagcgcggggttgagcgccatggccagttgagggagctgagcggctgctccctgggagcttctgcgcagaaccagagaggagaaggaagatgccaggagaatccttctatgctaaggaatagagaagggaggcaccggctagagaagaagacagggagtgggagagcgcagagatga

SEQ ID NO: 127418 - DNA, 1659 bp, Zea Mays
gttccttcgctatgctacatagttgttgctttcgtggcttgtttagtcacgttttattttgtccggcattgactgggtcagtactcagtagccactagccagtaccgtccagtcatccacgctgatttgccggaaggcgcctcggcggaagctgctatctagttgaagccagccatggccgccgagcccccggcgtacttgctgctccttcccctcatcgccataccgctcatcgtcttcctcgtcctgtcccgccgaagggatgaccagcggcgcttcccaccggcgccgtgggcgctgccggtcatcggccacctgcaccacctcgccggcgcgccaccgcaccgtgccctgcgggaccttgcgaggcgccacggcccgctcatgacgctccgcttctgcgagctccgggtcgtggtcgcctcgtcgccggacgccgcgcgggagatcttgaggacccacgacgtggacttcgcgtcgcggcccatcgggccgatgctgcagctcgtgttccggggcgccgagggcctcatcttcgcgccctacggcgacgggtggcggcagctccgcaagatctgcaccctcgaactcctcagcgcccgccgcgtccactccttccggcccgtccgcgaggacgaggtcggccgcctcctcggctcggtcgcgtccgccgcggcggcggggttgcccgtgaacctgagtgagaggatcacggcgttcgtcgcggacgcagcggtgcgcgccatcatcggcagccggagcgagcaccgcgacgagttcttgcgcctgctgatggacgggctcaagataattccgggattgagcctgccggacctcttcccgtcgtcacgcctcgcgatgctcgtcagcagcgttcccggtaaaatcgagcgccgccggaaaggcctccttgacatcgtcgaccccatcattctggagcatcaggagaagagagcggccggtggcatagacgaagatgaggacttgcttgacgtgctcttgagactccagaaagacatggactcccagtaccctctcaccaccgacaacatcaaatccgtcctcatcgtaagcgctcctcacaatctctcaccttagatccacaaacgaaacagctctccacgttcactctgtttcttccacacactgcgcaggacatgtttggagcaagcagcgagacgtcggcgacgacgctgaagtggacaatggccgagctgatgcggaacccggcggtgatgcggaaggcgcaagatgaggtcaggggagcactcgccggccacgacgaggtggcggaggacagcctggtcaatctgcggtacctgcagctagtcataaaggagacgctgcggcctgcggctgcacccgccggcgccattgctgctgccgcgggagtgccgcagcccgtgccaggtgctcggctacgacgtgcctcgtggcaccatggtgctggtgaacgcgtgggcaataggcagggacccagcgctgtgggacgcgccggaggatttcgtgccggaaaggttcgaggagagtggacgagacttcaagggcatggattttgagttcatcccgttcggtgcgggaaggaggatgtgccccggcatggcgttcgggctggcgcacattgagctcgctctcgcggcgttgctgtttcacttcgac

SEQ ID NO: 127419 - DNA, 1824 bp, Zea Mays
ccttcgctatgctacatagttgttgctttcgtggcttgtttagtcacgttttattttgtccggcattgactgggtcagtactcagtagccactagccagtaccgtccagtcatccacgctgatttgccggaaggcgcctcggcggaagctgctatctagttgaagccagccatggccgccgagcccccggcgtacttgctgctccttcccctcatcgccataccgctcatcgtcttcctcgtcctgtcccgccgaagggatgaccagcggcgcttcccaccggcgccgtgggcgctgccggtcatcggccacctgcaccacctcgccggcgcgccaccgcaccgtgccctgcgggaccttgcgaggcgccacggcccgctcatgacgctccgcttctgcgagctccgggtcgtggtcgcctcgtcgccggacgccgcgcgggagatcttgaggacccacgacgtggacttcgcgtcgcggcccatcgggccgatgctgcagctcgtgttccggggcgccgagggcctcatcttcgcgccctacggcgacgggtggcggcagctccgcaagatctgcaccctcgaactcctcagcgcccgccgcgtccactccttccggcccgtccgcgaggacgaggtcggccgcctcctcggctcggtcgcgtccgccgcggcggcggggttgcccgtgaacctgagtgagaggatcacggcgttcgtcgcggacgcagcggtgcgcgccatcatcggcagccggagcgagcaccgcgacgagttcttgcgcctgctgatggacgggctcaagataattccgggattgagcctgccggacctcttcccgtcgtcacgcctcgcgatgctcgtcagcagcgttcccggtaaaatcgagcgccgccggaaaggcctccttgacatcgtcgaccccatcattctggagcatcaggagaagagagcggccggtggcatagacgaagatgaggacttgcttgacgtgctcttgagactccagaaagacatggactcccagtaccctctcaccaccgacaacatcaaatccgtcctcatcgacatgtttggagcaagcagcgagacgtcggcgacgacgctgaagtggacaatggccgagctgatgcggaacccggcggtgatgcggaaggcgcaagatgaggtcaggggagcactcgccggccacgacgaggtggcggaggacagcctggtcaatctgcggtacctgcagctagtcataaaggagacgctgcggcctgcggctgcacccgccggcgccattgctgctgccgcgggagtgccgcagcccgtgccaggtgctcggctacgacgtgcctcgtggcaccatggtgctggtgaacgcgtgggcaataggcagggacccagcgctgtgggacgcgccggaggatttcgtgccggaaaggttcgaggagagtggacgagacttcaagggcatggattttgagttcatcccgttcggtgcgggaaggaggatgtgccccggcatggcgttcgggctggcgcacattgagctcgctctcgcggcgttgctgtttcacttcgactggaagctaccggaaggggtggtcgccgaggagatagacatggccgaggcggtcgcgatcacggcccctccgcgatctgatttagtggtgctccctgttactaggctaccggtgtcaatataatgtgcttcggcccaaaagcttattttctttcagtatgctagaaatagaacaacaacttttctttcgctttcggcggttgtgaaggtcgaaaccttttcctcgttatgtttgatattggttccttttctttt

SEQ ID NO: 127420 - DNA, 923 bp, Zea Mays
cttcaacctccagctcgtggggccctctcctctctggtcctggccgctaccccatggagccaagctccttctcggcttcgtccacacctgtcaccatctcccccaggctggcctcctctctctctctctctatttcctctggccgccggcctccatagcacacgagcacttcccccagcacgcagctctgagctccatggcgctttccctgctcctccatggtgcccagatccggcgaccccctgctggtcaagttcccagccgcgcaccaggacagcgtcgacccccgcggcggcctggtactcgcgctgctccccgagccgaggaccttgcacgcaaccttgcacgcagcagcaagccccggatcccctgcgtgtacgcgtgctgctcgtcccgcgccgtcgtctttgtgatttggacatctccaatgcgatgtcacagacccttggtgagccccttgattcggtcgtcctcgctgcgcaggttcccagcgccctcgcctgctcgacgggatgccccgtcgatctgtgcagccacggcgcgatgtcactgactctgatagctgtcgatgtcgtccctcgcgcatggctcgttcggcgaaaagcccaagtcgacatgcatgcatgcgcaggtccaaaaatcctatcctatcgccaggttgttcgattggtatttttgtggattaatctatttatactttggtggatgttgtgcatgtgtgtatatgagtaaaaaatgattcggtatgaatgaagttcgtatagaaagaaaatgagttagaaagagggctcggatgtttttatgttcctgacaggaatacatgcgatgcgttgtttgatacaaagactacgtttaaaaacgtggattatgtgatggaacctctaaggtattaggctcacctacagatttccttgtcccaaaga

SEQ ID NO: 127421 - DNA, 1449 bp, Zea Mays
ggtggaataatatgccaaccatctctctccggtccggtccggagcggttgaagcgaagcgagagtcaactaccgccgccctctctctagtccagatttccagcggtccagaccgagagctcggctccctacacgacatcatcatggacgccgccccgctcctcgctctcctcctcgcggccgtgtccctctccgcggcggcggcgggcgacggcgcgcacccgggctactccgacgagggcacctgcacggtggaacgccgccggagcgggcgtgggctcgggcccggagctgcggcgcctggaggagcgccggcccgggcgcatcatcgacatcacgcacgcgtacgtgccggaccttctggcgttcgcgccgggggctgtcacggggcccttggtccacctcaaggagtccatggcgaacgggtccgagtacaacctgtcggagctgcggttggagtgccacatgggcacccacgtcgacgcgccaggccacatgaaccaaggccacttcgccgccggcctcgacgtggacacgctcgacctcgacgtcctcaacggacctgcgttgctggttgatgttccgagggacacaaatataacagctgaagcgatggaattcctgaatatccctagaggagttcgccgagttctattcaggacgctgaacactgacaggaagttgatgtggaggaagggaggtgacatgagctatgttgggtttacagaggatggcgcacagtggctagttgacaacactgacataaagctagtcggaatcgacagtctatcggttgcagcatttgagcacttgatctctgcccatgtggtcttcttcaagaccccggtaagatccatatagttttgctggccagaacatttcaggcataacccagataaattcggctgcatttagcacacctgtaatctcattctgttattctcttgttctaccgcagaagattccgatgccagttgctactggctacataactcaagaaaaagaaaacatgtttgcttctaaatcatcgattaattttcccctttattgtaccaggatataatccctgtcgaaggcctgaagctagacaacattgagacgggaatatacatgctgcattgtttacctctcagactggttggagccgagggtgcaccgaccagatgcatcctcatcaagtgatcacccccctgctcttgctggaggtgacattgtatcatgccagctgagctgatgcttcatcgtggccaacgcattgattcgcagtcttcgtcttcgtctatatgaaacatagtgttgtatgcccatgtagatatgcttgtacggacaatagagacacagcaatacttccatcaaggaaatacttttgggtaagccggtaatgtaaaagacagacatacagttgactgaataaactagaggcctgagaggctgaggcctcgtgcttcac

SEQ ID NO: 127422 - DNA, 1296 bp, Zea Mays
ggtggaataatatgccaaccatctctctccggtccggtccggagcggttgaagcgaagcgagagtcaactaccgccgccctctctctagtccagatttccagcggtccagaccgagagctcggctccctacacgacatcatcatggacgccgccccgctcctcgctctcctcctcgcggccgtgtccctctccgcggcggcggcgggcgacggcgcgcacccgggctactccgacgagggcacctgcacggtggaacgccgccggagcgggcgtgggctcgggcccggagctgcggcgcctggaggagcgccggcccgggcgcatcatcgacatcacgcacgcgtacgtgccggaccttctggcgttcgcgccgggggctgtcacggggcccttggtccacctcaaggagtccatggcgaacgggtccgagtacaacctgtcggagctgcggttggagtgccacatgggcacccacgtcgacgcgccaggccacatgaaccaaggccacttcgccgccggcctcgacgtggacacgctcgacctcgacgtcctcaacggacctgcgttgctggttgatgttccgagggacacaaatataacagctgaagcgatggaattcctgaatatccctagaggagttcgccgagttctattcaggacgctgaacactgacaggaagttgatgtggaggaagggaggtgacatgagctatgttgggtttacagaggatggcgcacagtggctagttgacaacactgacataaagctagtcggaatcgacagtctatcggttgcagcatttgagcacttgatctctgcccatgtggtcttcttcaagaccccggatataatccctgtcgaaggcctgaagctagacaacattgagacgggaatatacatgctgcattgtttacctctcagactggttggagccgagggtgcaccgaccagatgcatcctcatcaagtgatcacccccctgctcttgctggaggtgacattgtatcatgccagctgagctgatgcttcatcgtggccaacgcattgattcgcagtcttcgtcttcgtctatatgaaacatagtgttgtatgcccatgtagatatgcttgtacggacaatagagacacagcaatacttccatcaaggaaatacttttgggtaagccggtaatgtaaaagacagacatacagttgactgaataaactagaggcctgagaggctgaggcctcgtgcttcacaaatgacaaatgcagaaatcagtgtaagttctgaaaagaagaagaaacattaacggt

SEQ ID NO: 127423 - DNA, 1154 bp, Zea Mays
atggacgccgccccgctcctcgctctcctcctcgcggccgtgtccctctccgcggcggcggcgggcgacggcgcgcacccgggctactccgacgagggcacctgcacggtggaacgccgccggagcgggcgtgggctcgggcccggagctgcggcgcctggaggagcgccggcccgggcgcatcatcgacatcacgcacgcgtacgtgccggaccttctggcgttcgcgccgggggctgtcacggggcccttggtccacctcaaggagtccatggcgaacgggtccgagtacaacctgtcggagctgcggttggagtgccacatgggcacccacgtcgacgcgccaggccacatgaaccaaggccacttcgccgccggcctcgacgtggacacgctcgacctcgacgtcctcaacggacctgcgttgctggttgatgttccgagggacacaaatataacagctgaagcgatggaattcctgaatatccctagaggagttcgccgagttctattcaggacgctgaacactgacaggaagttgatgtggaggaagggaggtgacatgagctatgttgggtttacagaggatggcgcacagtggctagttgacaacactgacataaagctagtcggaatcgacagtctatcggttgcagcatttgagcacttgatctctgcccatgtggtcttcttcaagaccccggatataatccctgtcgaaggcctgaagctagacaacattgagacgggaatatacatgctgcattgtttacctctcagactggttggagccgagggtgcaccgaccagatgcatcctcatcaagtgatcacccccctgctcttgctggaggtgacattgtatcatgccagctgagctgatgcttcatcgtggccaacgcattgattcgcagtcttcgtcttcgtctatatgaaacatagtgttgtatgcccatgtagatatgcttgtacggacaatagagacacagcaatacttccatcaaggaaatacttttgggtaagccggtaatgtaaaagacagacatacagttgactgaataaactagaggcctgagaggctgaggcctcgtgcttcacaaatgacaaatgcagaaatcagtgtaagttctgaaaagaagaagaaacattaacggt

SEQ ID NO: 127424 - DNA, 99 bp, Zea Mays
cgccatttccagctccatggctaggtcttgctgctcagccggatcgtcttccgactccgtaccgttcaacaactaacctagtgacagagtcagaatctc

SEQ ID NO: 127425 - DNA, 868 bp, Zea Mays
tgccaccgctttccttatcttgggcgttggacggacggggcgagcgagcgactcgagcgtaccgccgccgccatggtggcgctcgcctcactctcatctctctgtccctgcggcatcgcccgccgccgcgctgcgtcagccacttcatccaccgccttttccatctcgtgctgcgccgtcgcgaccccgtccttctcagggaaaggaccccaggaatctagaacaccccgaagaaggctgaggaaaactgagggtgctaccaagagcctggaagattcggtcaagcgaaagatggagcagttctatgaaggggccgatggtccacctctgcgagtgctccctattggcggtcttggggaaatcggcatgaattgcatgcttgtggggaattatgatcgatatatcttgattgatgctggggttatgttcccagattatgatgagtttggtgtgcaaaagattataccagacaccacgttcatcaagaaatggagccacaaaattgaagctgttatcatcacgcatggccatgaagatcacatcggtgcgttgccttgggtaaataattctcctgcttattgagtaaaccattcatattcatcatgtttgcttggctatgatctgctacatactttagtcacatgcaaatcaacagccctttgttgagtcagctcattctacagtctcaatagcagaaaaggaaaatttgttgcactagtttggaattagatgttttgtgtacaagctagttaatttggcacctgtttgcccctttgctggatttcagtgtaatttacattttgcagaagcactggatttgtattatttttttgtttgaaatgttataatacataattgatgatctata

SEQ ID NO: 127426 - DNA, 659 bp, Zea Mays
aggtcattccagcactcgattcaacaacaccgatttttgcatcatctttcaccatggagctaataaagaagcgtttgaaggagtttgggatcttcctctcatccaggcttaaggttttaagaattaaaaagagatttcaggctggaccttttgaagttgaacccatccgtgtaactcattcaattcctgactgttgtggcttagtgcttcgctgtggtgatgggataattttccatactggtgactggaaaattgatgaatcaccagtggatggaaaaaaatttgaccgacaagcattggaggagctctccaaagaaggtgttactcttatgatgagtgactcaacaaatgttctttcccctggaagatcaatcagcgaatctgttgttgctggttcattgctgcgacatatttcggaagcaaaaggaagagtaattacgacacaatttgcttcaaacatacatcgaattgggagcatcaaagctgctgcagatttaactggtcgaaaaatggtgtttgttggaatgtcactcaggacataccttgaagctgctttcaaggatggaaaggcaccactggatccatcaaccttggtgaccaagatgaccaaagtattgaaaccttttctcagatctttgtcgagagatgcagcagcctga

SEQ ID NO: 127427 - DNA, 1965 bp, Zea Mays
gtcaaggtagaggacatggatgcatatgcgcctaaagatcttctggtggtcactacaggttcacaaggagagccacgtgcagctctgaatcttgcttcttatgggggaagtcatgctcttaaactatcgaaagaggatgtccttctttattcagctaaggtcattcctggaaatgagacacgggtaatgaagatgatgaatcgtctcactgatcttggccccaaaattatcatgggtaaagattctggcctccatacctctggacatgcctaccgagaggagctggaggaagttcttcggattgttaaaccacaacatttcttgcctgttcatggagaactcctatttctcaaagaacatgaattacttggaagatcaactggcataaggcacacaactgtaataaaaaatggagagatgcttggtgtgtcacatctaagaaacagaagagttttgtccaatgggtttgtttcattagggaaggaggatcttcagctcatgtatagtgatggtgataaggcttttggtacatccactgatctctgcgttgatgagagactaagaattgcatctgatggcattatttttgtaagtatggagatcttccgacctcagaaggaacatgggttagcgcagtcaggtttgaaaggaaaatttaagattaccacaagatgtctatggcttgataatggaagattattggacgcgctctacaaagcagctcatgctgcattgtcaagctgtcctgtgaattgtccacatagtcacatggagaggatggtagctgaaatcttgaggaaaatggtacggaagtatagtggaaagaggcctgacgtcattgctgttgctacagagaacaccacagcaggtttctcagaacacctcgacactaaagcatctggaaattttggaccgtcctcagctactagccacctgagcaggagtccagctacgagtcttgaaggcagttataaaacacacccagacaacccagaggtggatgctgaagaaatccttcccgagactgtgagaacaacacccgacgatgcaaccacaagctccaatggcgaagcattattctcttcagatttacatcagcctaaaacattggagcacttttgggagtcattcaaatcccctacagctgtcaaaattgcacggatcgtcaatgggggggacaaacaaaatttcggcaagattggcataatgggtcaggactcattaatccagtcagctcctgctccagttaaatcctcaaaacggaacaagtggaaacctgaggaaattaagagcttaatacagatgcgtggcgaaatgaatgagaaatttcagagcgtgaaaggaagaatggtactgtggaaggagatttctgataccatgttgaaccaaggagtaagtcgtactccggcacagtgcaaatctctatggacatcgctagttcagaaatatgaggaaagcaaggatacggaaagcatgaagacttggccgtatttctcggccatggataagattctatcgcagcaaggggagatggcaaccaaaggatagaaaaaggcttgtagcttagtggtagaaatttagaatattgattggtatgttgcagcagagcccagtcagtctagtaatataaagatgaaatgtctgtctacagtgcctggtgatctattgggatcggattcttttgttttgtgtaagacatgcagtagcacaagatcgagatgcatcgactggcttgaaattaagcttcagggcccgtggactcagagcggggtagccaggagcgctctattcttagcaacaggcagacatgtgtggttttatctgccagataacgtttgtaactcctataatgtaataggctacacggtaggcgaacggcgaacccctaaaagacaactgatgtatcatatgttttgaggagttatgtaatcgcctgcacggcatatacgtgtacttttcttcaaa

SEQ ID NO: 127428 - DNA, 177 bp, Zea Mays
gcagacacatatactggatcctttagagctaatgtgattgaccctgccaaggtgaccaggtgtgcgctccagaatgcggcctctgtagctggaatggtcctaaccacacagaccattgttgttgagaagccaaagcctcaagtggcagagccaccggagggagcccttaccatttaa

SEQ ID NO: 127429 - DNA, 758 bp, Zea Mays
tcacgtgctataataataagacactaaataaacagaactcgttcatgcaaaatcaccatgaccatactgatcatcacacataacagattaaacatgatatcggcgctactaaccagatcacaccattacaaagatcacgttaaacagattaaatataatcactgggagtgccatcttgatcacagtcaacacatagtattaataaaatgggcacggtaatagcctaacacatgacagttccttcacaggaatttccacgaacacaaggcacacaccagcaaatcgaccaactacacccgaagtttccaactaacagcatagaggaattgatcaacagaacagcgacgccccttttagagatggaaagggggttagggttttaaacgttcctggtcgtagctccggccaccgggggctcacttggccagcatctgcgcggaagccgcctcctactgctgctggtagttgatccggcggcggaacagcatgatgtgcgtctccaggtggtggatcgcgtagtgcaccgacccgcggctctgctgcactccgatcgcgcgccactcgttctgcaaagaagagaaggggaaaaatccccacaccaaaaaatcatctgggcatcaaataaccaaaccagcagggcaataatgcaatcaacagaaatgcaggtggaactgcaagcgtttacctcggataggaggcggttcttggggaggagcttggcgacctcgggcgggaggactaaaatcatgtataaacaa

SEQ ID NO: 127430 - DNA, 518 bp, Zea Mays
gcgcgcacatcaccagattgggagccgccggtgccgctgctggggttctccgtctgctcgggcgcgcgggtcacgtcggtcgcccagggagcttcaccagggcacggtgttgcagggtcggacatcaatcgcgacgtccctagctccccgccggtgtcggggattgaacatgtgccgctgcgagcgaatcagttggccgctgtcaggaatcttcaaccgcttcaacgatttggtggtgctcggtggtcgggaagcttctctggctcacccctcacatgtgtgtggccttattggacaaagatagccttccgagctcgaccaattgctcatcggtgcaatggctccaccgcgggcgggaccactgctgcagacccatttcactcccttgccatcaccgcgtgaggtcacgagtcacctgaagatcatcctggtacctggaatctcaagtcccaggcaagttgtgcccttgatcacttcgtttacccactcatgttctaataaatcataatgatctacat

SEQ ID NO: 127431 - DNA, 1358 bp, Zea Mays
gtcgatggccctcatgaaaatcacaaattgagagagggagaagggggtgggggttacgtaacacggcgattcaggaggggatagcatcgtcatcgcaaaatgcaggctctcctgctccccgcgcgggccgcgccgccgacgccggcgatgcttcggcagcgtgcggtttctgcctccgcgtgtgcgtcgcaggtctgccgccccctattcggtgccgccagttgcatctcctgtggggtccacggaagcgttcggcggcacctcacagtggcggtggcggcggccccgccctcgccttcgtcctcaccttcgtcgggaccgctctacccgacgcctccacccaccgagcaggaggtggagagggtcaagctcgagcaggttatgaggagactagagaaaacagcaaggtatttcaagaatttgggtaccctggggttctggtcccaattggtgtgcacaattatttctgctggaattttggcattctctacagttgtaacggggaaggtgacatcaccctttacattctatgcaactgctgctggtattgctgctgcttttatttcagtcttctggtcatttggttacatccgtctctctgaaaggcttagaaaaacatccaaagaacctgctaaggctcctccacgtgctgatgttgttaagagccttaaaaatggcatcgtggttaatattcttgggatgggcgctgctgttctcggcatgcaagctactgttggtgctttggtagcaaaagctctcacaacctctgcagtaccctattatcaggctgctggccaaagccctgtcttggctttagatgttttcctagttcagtgccattggtatgatctctactccttaggttgtatgagtggtggggggtagagcgcaggctggaagaacgggggcgagaggacgccgtgctgtcgcacggctgggcacaatgagaggcttcagcgaacaccatcctgtcgcatttccttggggtggcgagctccctggagctgctgcgctcggtgtcactgcctccagcagaagccgccgtcccggccccggcccctgcacgggcctgagccatggcccgttgggcaggtcaagaaaaaccttcaatccttggctttggctctagacagttgctatttcttgattgcatgtacaacttgcatcaagaatacatacacatcgatgccttccagttcacctggacgcaacatgttcgcgtaattcccgccgagtgtgagctcttgcatgagcactcgcgaaccacatgtggcgcttgtttgctgtgcaagtgcaagtgagtgcagtgaccggctctcgctcgttcttaatcattgtacccgtttcgctggtctcaa

SEQ ID NO: 127432 - DNA, 1242 bp, Zea Mays
gtcgatggccctcatgaaaatcacaaattgagagagggagaagggggtgggggttacgtaacacggcgattcaggaggggatagcatcgtcatcgcaaaatgcaggctctcctgctccccgcgcgggccgcgccgccgacgccggcgatgcttcggcagcgtgcggtttctgcctccgcgtgtgcgtcgcaggtctgccgccccctattcggtgccgccagttgcatctcctgtggggtccacggaagcgttcggcggcacctcacagtggcggtggcggcggccccgccctcgccttcgtcctcaccttcgtcgggaccgctctacccgacgcctccacccaccgagcaggaggtggagagggtcaagctcgagcaggttatgaggagactagagaaaacagcaaggtatttcaagaatttgggtaccctggggttctggtcccaattggtgtgcacaattatttctgctggaattttggcattctctacagttgtaacggggaaggtgacatcaccctttacattctatgcaactgctgctggtattgctgctgcttttatttcagtcttctggtcatttggttacatccgtctctctgaaaggcttagaaaaacatccaaagaacctgctaaggctcctccacgtgctgatgttgttaagagccttaaaaatggcatcgtggttaatattcttgggatgggcgctgctgttctcggcatgcaagctactgttggtgctttggtagcaaaagctctcacaacctctgcagtaccctattatcaggctgctggccaaagccctgtcttggctttagatgttttcctagttcaggcttcagcgaacaccatcctgtcgcatttccttggggtggcgagctccctggagctgctgcgctcggtgtcactgcctccagcagaagccgccgtcccggccccggcccctgcacgggcctgagccatggcccgttgggcaggtcaagaaaaaccttcaatccttggctttggctctagacagttgctatttcttgattgcatgtacaacttgcatcaagaatacatacacatcgatgccttccagttcacctggacgcaacatgttcgcgtaattcccgccgagtgtgagctcttgcatgagcactcgcgaaccacatgtggcgcttgtttgctgtgcaagtgcaagtgagtgcagtgaccggctctcgctcgttcttaatcattgtacccgtttcgctggtctcaa

SEQ ID NO: 127433 - DNA, 1044 bp, Zea Mays
gtcgatggccctcatgaaaatcacaaattgagagagggagaagggggtgggggttacgtaacacggcgattcaggaggggatagcatcgtcatcgcaaaatgcaggctctcctgctccccgcgcgggccgcgccgccgacgccggcgatgcttcggcagcgtgcggtttctgcctccgcgtgtgcgtcgcaggtctgccgccccctattcggtgccgccagttgcatctcctgtggggtccacggaagcgttcggcggcacctcacagtggcggtggcggcggccccgccctcgccttcgtcctcaccttcgtcgggaccgctctacccgacgcctccacccaccgagcaggaggtggagagggtcaagctcgagcaggttatgaggagactagagaaaacagcaaggtatttcaagaatttgggtaccctggggttctggtcccaattggtgtgcacaattatttctgctggaattttggcattctctacagttgtaacggggaaggtgacatcaccctttacattctatgcaactgctgctggtattgctgctgcttttatttcagtcttctggtcatttggttacatccgtctctctgaaaggcttagaaaaacatccaaagaacctgctaaggcttcagcgaacaccatcctgtcgcatttccttggggtggcgagctccctggagctgctgcgctcggtgtcactgcctccagcagaagccgccgtcccggccccggcccctgcacgggcctgagccatggcccgttgggcaggtcaagaaaaaccttcaatccttggctttggctctagacagttgctatttcttgattgcatgtacaacttgcatcaagaatacatacacatcgatgccttccagttcacctggacgcaacatgttcgcgtaattcccgccgagtgtgagctcttgcatgagcactcgcgaaccacatgtggcgcttgtttgctgtgcaagtgcaagtgagtgcagtgaccggctctcgctcgttcttaatcattgtacccgtttcgctggtctcaa

SEQ ID NO: 127434 - DNA, 782 bp, Zea Mays
attgaactcaattcaatttcatgccttccaatatcgacatccaaacggagcataagggaaattctagtatcatgagctggttatgaggagactagagaaaacagcaagtcttctggtcatttggttacatccgtctctctgaaaggcttagaaaaacatccaaagaacctgctaaggctcctccacgtgctgatgttgttaagagccttaaaaatggcatcgtggttaatattcttgggatgggcgctgctgttctcggcatgcaagctactgttggtgctttggtagcaaaagctctcacaacctctgcagtaccctattatcaggctgctggccaaagccctgtcttggctttagatgttttcctagttcaggcttcagcgaacaccatcctgtcgcatttccttggggtggcgagctccctggagctgctgcgctcggtgtcactgcctccagcagaagccgccgtcccggccccggcccctgcacgggcctgagccatggcccgttgggcaggtcaagaaaaaccttcaatccttggctttggctctagacagttgctatttcttgattgcatgtacaacttgcatcaagaatacatacacatcgatgccttccagttcacctggacgcaacatgttcgcgtaattcccgccgagtgtgagctcttgcatgagcactcgcgaaccacatgtggcgcttgtttgctgtgcaagtgcaagtgagtgcagtgaccggctctcgctcgttcttaatcattgtacccgtttcgctggtctcaa

SEQ ID NO: 127435 - DNA, 192 bp, Zea Mays
ggattgatgggttccgttggaggtcttgttcgtttatgtcggattggtgggtcggaacgattccgagccgaattgcttctctaatttatataaattttgattaaccggaacgattccgggtgcaatcctatgtaaccgaacaaggctggaaggaactcttgcccggccaccggattaaaaaataaaaaaaaa

SEQ ID NO: 127436 - DNA, 1860 bp, Zea Mays
aaaaaaactaacaattcaaatttcaaaccgcccggggaccctttgattaacagccaaactgccttggtcccccgctcagcccgtcggctccgcgctaccactgccagacgggacctaaatgttcccgaccccacctgccatcgagacgggaggaaacgacgcgagccccgagcatgaggtggcacctcgccagctgtaccccggtgacgaagccaccggccgctcccggtcacccgctatataatgcccggcttcgccttccccttcctccagccacggatcgagacgtcccaatcgagctaatctcacaccgccagtgccagtgccagcggcagctgctaatccgtgccgtgttccagcagcgatgggagtggagtcggagtgcgacaggataaagggcccctggagccccgaggaggacgaggcgctgcggcgtctcgtggagcgccacggcgcgcggaactggacggcgatcgggcgcggcatcccggggcggtcggggaagtcgtgccggctgcggtggtgcaaccagctgtcgccgcaggtggagcgccgccccttcacgcccgaggaggacgccgcgatcctggccgcgcacgcccggctgggcaaccggtgggccgccatcgcgcgccttctcccggggcgcaccgacaacgccgttaagaaccactggaactcgtcgctcaagcggaagctcgccaccgccacggcgacctccagcggcagcgatgctgagcgggcgtgcaagcgcgcaagccctggcccggggagcccgacggcgtcggaccgcagcgacctcagccacggctgcggcgccgcgcaggtgttccgtcccgtcccgcgcgccggaggcttcgacgccatcagcgccgcagacgtgcgccctccgcccccgccagcagtcgcagacgaggacccgctcacctcgctctccctctcgctgccggggctggaccagtcgccgtcgggcttccaccacgacagcgcccggagccacttccaggagctctccccctcgtcgtccccgtcgccgcagtctactccacccgccttccctccgcaggcggctccgtctcagtcgtcgtacgcgttcagcggcgagctggttgccgcgatgcaggagatgatccgcgccgaggtgcgcaagtacatgtccggcgcggggctccgcgccggatgcgggcccggggccgtgggcgaggtgtgcatgccgcagctggtggagggtgtgatgcgcgccgccgcggagcgcgtcggcgtcgtcacacggccgtagaaacccggaaacggaccaaatcagatctgatcaatgcgaagcattgtgttaattaagatcccgtccgtcctgtgtagcagcgctacgtagactactactactactagtcgttctctggccgttgtatttagcagaggagctcgcgtttgtttattcttcggcggctgtcgctctgaatccagaaaggaacagagcggcggtgtaaagccgggagcggaagcggaggttggcaataatcgagatcgagcctgccatttctataaccggatgtggccgcggcttgctcagaaaggggatgtgatttgtgctgatccgccgatgccaatgtgcgcccaaaaccgacgcttggttgcgttgcgccagatctgcgccgatttggaacgtctcttccgctgttccagtttccactttgctgtactgcgcgagtcacgagcgcgagcgcaacccaacaaaatgacggatcagagccaggatagtacagaacggcagctccgcctcttcctttcacatcaggagctctggatcctcaaagcacttctcattgttctattggaatcatgcgatgattgaactcgataaaa

SEQ ID NO: 127437 - DNA, 101 bp, Zea Mays
gggtgtttagtgtactttcagcggcagaaaagtccagtgcaggatgcagcgccacttgtggcttgggtagcaacgtctgaaaaaggtcagcacaaacatgc

SEQ ID NO: 127438 - DNA, 2143 bp, Zea Mays
atgaattatggcagcagcacaccgcgtaggcttgccgcagtgcccgaaagcgtcgagctcgacagcttcgcaacgtcactgctgtggcaaagcagctaccgcgacacaatccggagtgtctccatcggcgcgggcaggtcggcacgcttctacccgcggagcgacggggatgctgagagagcgagtagcttttcgtcgagcgccagctcgacctccttacttgctgcatcgtactctggctcggggctctcctccaccgacggcatgtcgtcctttcgcggctgggggactgcaggcttcaatggcgtccacgagctccgggggatcgcgctccagatgctcaacgacggttacatccgaggcatcatccaagcgtttagtggcggctcgtcagtggaggcgaacggcggaggccctgaccacgaaaagctcatcgtggagaggtggttatcggagctagacgtggaatggatcctccatttaggagcgaattcagcagtgggccaggggtggtcggagtccccatccatttttatggaagaaggggcggaaagaagaaggggagctataatggcaagagagatggaggacgaggagcctcttctaggctctccgacgacttcgtccaccctccacacgggggaagggaaaggagaagacatggttcagttgcacctggacctggacctggacctggaatccctccgagatttgatggagaggtggatccgagccctcctggtcatggtgcacgtgctcttcatcacgtatctggagctccgcgccaagaggtcgaccgtcggcggtgtcaggactgtcaggaagaccatccgatacatccagatgcttatcggcgtggcaacgccgggagctaccggcgaaacagcaagcagccaggaggaggaggtgacactgttcgcccgattcgccgaggtgagcgttctcaggatgctgaccttcgtcgacgccgtgtgccatgccgtacccacctactattgggcgccggaggcgctcccggggatgctgcaggtgtacgcctgcgtcgctgatgcctcgccgacagtcttggctttgttcaaacaagccgcaagcagcaccaccgtgttcgaaggcatgaatgctgccttcctgaggaagagaacgaacctaagtaacaccatatggagcttgatgggcatggtcagagcttctttcttcacggaggattgctgtcgaatctcgctagagtccagtgggcctggagttcatgagaccaccaggctgatgatgaactacatcgcgctgctgtggagcaaccagggcgctctcaacttggtcctgcaggatcaccacttcagcgtcttcgtgtccgaggatgaaggcttcaactcggtggtcagcctcatcatcgacatgatctccagcttggagaaacatctcgtggacgcttcccattccattgcggaacatggattgaggtacatattcttgatgaacaactgtgatttcatcacgcagcaggtcagatccttggaccttccggcctggtttccgtcagacgacagcaagattcagggctacatagatgcatacctgcacgcctcttggacaccggtgctgtcttgtttgtacgtcgacatacctttcggtccgcgaagatacgcgtcgctatccaaatttgagtcacaattcaatactatttgtgactcgcataggctctggaaggttccagatcctgagcttaggaagaggttgcgcaaagccatcatcgagaaagtcattccatggtatgccaggtatttggagcagcgagcagcgacagggaggagaaccacatcccgcagcagtaccccacatcaactgcaggaagtcctagaagaactgtttgaaggataaatagcaacgactgctaggctttttctttctatctatctttttctttctttcagttggatgatttaagacgccaaaagtccagctctatgtgtctgcggctcgagccaagctctcaatatctgtcagtttaatttgcacgaatcatttgtgtttattactcaactctgctatgaaatagttttttttaacgaacggcacgagattgtgcacgtttttattaataaagaatagtgttaagtagtgaccaaaagacacagcacgaaaagta

SEQ ID NO: 127439 - DNA, 342 bp, Zea Mays
atggccgcggcgtccgagctcactaggtacgcgtccgcgccgaggtggtccattgcctccgcgcgcttcttggacgacgagctgatcaccgtcacgtggtggcccatggccttggctaccttcacgcccatgtggcccacgccgccgaggcccaggatgccgccacggaggcccggggtcgtcagcccaaagtgcttcagcgggctgtacaccgtcacgccagcgcacagcagcggcgccgcttgctccggagccagacccgccgggatcttcaccacaaacttctggtcgacgaccatggtggaggcgaatccaccctgcgtgggccgtccatcagtgtag

SEQ ID NO: 127440 - DNA, 243 bp, Zea Mays
gttgtccccgtgggtgctactccaggtggtcgggcagaggtgcctcttcccgtcagtggtctttctctgatgcagtggatgggcatgaagttggacacttttgatggcagtggtactccggttgaggcgacagattagctgacttatgtggaagataagaaggatgtctttgagatagtgtttggggatcgtgttcgctttggcacgcaactgttaaagggggaggctcaaatttggtggaga

SEQ ID NO: 127441 - DNA, 558 bp, Zea Mays
atggtcgaaggagggggcgcggaggggcggctggacaacggcgtggtcgcgggctcgcggcggtgctccggcggtccggatccggcctggcgggcgagccgcgagcgcgctgcggtggcgggcgagtgcgcctggcggtggccgtggtgctctgggactcgggcagtcgggcctcggcgtcgacggtgctccgggactcgggcaaaagggctcacggctgctcggctgtctgcggctctggccactgggctccgcacctccgctcgtccggcgactggcggtccggctcggcctcggcgggcggcggctccggcctccagccgctccaggcgactaggcgaggtgcggtgcgggcgtgcggcggccggcggtgctccggggctccggcctccgggagtccgagcgtcaggctgtcggggactcgaggcgtggggtcgtgggccgctgggcgcctgggcggtggcgcggacgcgcgatggctggtgggtgcctccgtgcgagtgtgcaaccgtgcctgggtttgggactccgggtggctcctcggcgggcggcggctag

SEQ ID NO: 127442 - DNA, 1055 bp, Zea Mays
atgcccctgttccctaggtccgagctcgcccaactccctagccatgtctgctcacccctctctgtctctctgcgagcagcagcatgccggagaagacctgtgtcctcgacgcgcgccaggtgtttgatgggagtggaggttgtggagcatgtcgccgaggtgacagagaagttggctgcagatgcggccagttccatgccagagaatggatccctgcacaaggttgccgtggaggtggagtgcgttgctgaagcgatggataaggatgcacataaggttgaagcagtcaacgataagagcacatatctgaggcatcaattcaatttgacctccaccgacgccgtgatttcgccattgtggctagttcagatcggtcctgaccagattgaagctctgtatcagtatgctattcagatgaccctagaactcattcagtttgatgccatgtttgatccttatgttaaatgtcggtctccaccaaagatacttgtcatcttgaatcctcgatctggacatggtagatctagcaaagtttttcatggaaaagtggaacccatatttaaggttctgcacaacaggacttcctagcgatgtcactgttgaggttggggatgtgtctttccaccttcacaagttccttttactttcaaaaagtgcctttcttgaatggtcaattgaagaaaattctgaccaagaagaatgcatcatcaaactaaatgtcattcctggggtgccaagtcatttgagctagttgcaaggttctgctatgggtgtgaaaatagagcatcaaaagctactagagtgaaccgatgcttttgtgactgatcagctctggagcagctagagtgatgtagttgtaggcttttaaacaatagctagagtgatatgaaacattagtgatgtagttgttggcttttgaactacttcaagctggagtgatgtcgccgtggtgcttttgtgaatgatctagctagctatctgtaaatgatctagttgtgaatgatattataattgtgatgcttttgtgaatatataattgtggtgcttttgtgttt

SEQ ID NO: 127443 - DNA, 1143 bp, Zea Mays
atccaatccacaccgagccgcgcttgctgatccgtgagcgaaaacatgtcggctttgcgccattctctaccgatcatcctcctgcagctgtacatcctctccggccgacccgcggcggctaaggtccctgcgctgttcgtgttcggcgactcgacggtcgacacgggcaacaacaactacatctccacgctcatgaagagcgacttcgcgccctacggccgggacctctggccgggaagcggcggcggcagtactagtagtggccagtccaccggccggttctccaacggccgcctcgccgtcgacttcatctccgaggcttttggcctcccgccactcgtgccggcatacctggaccccgacgccaacatgagcagcctagcgaccggcgcctgcttcgcgtctgcaggagccggctacgacaacgccacatctgatctgttttccgttctgccactgtggaaagagctggactacttcaaggagtacgcggcgaagctgaggaccttccagggcgacgacaaggcccaggaaacgctgtcggaggcgctctacatcgtcagcatgggcaccaacgacttcctggagaactactacgcggtgccgagcggccacgcggcgcagtacgcggcggcgtccgactacgccggctacctcctgggcgtcgccgagtccttcgcgcgcaagctgcacgcgctgggtgcgcgcaagctggacctcaacgggctcccgcccatggggtgcctcccgctggagcgccacgcggccacaggcgcgtgcaccgaggagtacaacgccgtggcgcaggccttcaacgcgggcctccgcgacctggtggctcgcctggacgccggcctcggcggcggcgctagggtcgtctacggcgacgtgtatggccccgtggctgacgtgctcgccgacccggcggcgtacgggttcgaggatgtcggagccgggtgctgcggcaccacggggcggttcgagatggggtacatgtgcaacgaggccagcctgctgacatgcccggacgccggcaagtacgcgttctgggacgccatccatcctacggagcacctccaccgcttcctcgccgaccgcaagatgaacaccacgctctacgtcttccagtaaaaatgatggaac

SEQ ID NO: 127444 - DNA, 1283 bp, Zea Mays
cgactcgacgcaacagacacgtcgcttgtgattgtcccctgctctgcagtcttctagctgtcgccacagttcccttcccagttcccaccagttcaccacttcacctccatttattgtgccaagaaaccagcgcatgcgcacccttcaaaacgacacccgctcgccgtcagttgcttcgcacactaaccgaagtcccaatcccaatggcgccaacctgccgtcctcggccggatgcggcgctcctgctgctgctgctgacggcgagtagcgtcggcgtcgcacgggcggcgccgcgggtgccggcggtgatcgtgttcggggactcgacggtggacacgggcaacaacaaccagatccccaccccgctgcgcgccgacttcccgccctacggtcgcgacatgccgggcgggccgcgcgccaccggccggttcggcaacgggcggctgcccccggacctcatctccgaggcgctcggcctgccgccgctggtgccggcctacctcgacccggcctacggcatcgacgacttcgcgcgcggcgtctgcttcgcgtccgcgggcaccggcatcgacaacgccaccgccggagtcttgtcagtgatcccgctgtggaaggaggtggagtactacgaggagttccagcggcggctgcgcgcgcgcgtgggccggtcccgcgccgccgccatcgtccgcggcgcgctccacgtggtgagcatcggcaccaacgacttcctggagaactacttcctgctggccacggggcggttcgcgcagttcacggtgcccgagttcgaggacttcctggtggccggcgcgcgcgcgttcctggcgcggatccaccgcctcggcgcgcgcagggtcaccttcgcggggctggccgccatcggctgcctgccgctggagcgcaccaccaacgcgttccgcggcggcggctgcgtcgaggagtataacgacgtggccaggagctacaacgccaagctggaggccatggtgcgtggcctcagggacgagttccccaagctcagcctcgtctacatctccgtctacgacagcttcctcgacctcatcacgaacccagacaagtttgggctggagaacgtggaggaggggtgctgcgcgacaggcaagttcgagatgggcttgatgtgcaacgaggactcgccgctcacctgcgacgacgccagcaagtacctcttctgggacgccttccaccccacggagaaagtgaaccgcctcatggccaaccacacgctccaagtgtgctaccaagagggcgtcctgtaa

SEQ ID NO: 127445 - DNA, 1262 bp, Zea Mays
cgactcgacgcaacagacacgtcgcttgtgattgtcccctgctctgcagtcttctagctgtcgccacagttcccttcccagttcccaccagttcaccacttcacctccatttattgtgccaagaaaccagcgcatgcgcacccttcaaaacgacacccgctcgccgtcagttgcttcgcacactaaccgaagtcccaatcccaatggcgccaacctgccgtcctcggccggatgcggcgctcctgctgctgctgctgacggcgagtagcgtcggcgtcgcacgggcggcgccgcgggtgccggcggtgatcgtgttcggggactcgacggtggacacgggcaacaacaaccagatccccaccccgctgcgcgccgacttcccgccctacggtcgcgacatgccgggcgggccgcgcgccaccggccggttcggcaacgggcggctgcccccggacctcatctccgaggcgctcggcctgccgccgctggtgccggcctacctcgacccggcctacggcatcgacgacttcgcgcgcggcgtctgcttcgcgtccgcgggcaccggcatcgacaacgccaccgccggagtcttggaggtggagtactacgaggagttccagcggcggctgcgcgcgcgcgtgggccggtcccgcgccgccgccatcgtccgcggcgcgctccacgtggtgagcatcggcaccaacgacttcctggagaactacttcctgctggccacggggcggttcgcgcagttcacggtgcccgagttcgaggacttcctggtggccggcgcgcgcgcgttcctggcgcggatccaccgcctcggcgcgcgcagggtcaccttcgcggggctggccgccatcggctgcctgccgctggagcgcaccaccaacgcgttccgcggcggcggctgcgtcgaggagtataacgacgtggccaggagctacaacgccaagctggaggccatggtgcgtggcctcagggacgagttccccaagctcagcctcgtctacatctccgtctacgacagcttcctcgacctcatcacgaacccagacaagtttgggctggagaacgtggaggaggggtgctgcgcgacaggcaagttcgagatgggcttgatgtgcaacgaggactcgccgctcacctgcgacgacgccagcaagtacctcttctgggacgccttccaccccacggagaaagtgaaccgcctcatggccaaccacacgctccaagtgtgctaccaagagggcgtcctgtaa

SEQ ID NO: 127446 - DNA, 1470 bp, Zea Mays
cgactcgacgcaacagacacgtcgcttgtgattgtcccctgctctgcagtcttctagctgtcgccacagttcccttcccagttcccaccagttcaccacttcacctccatttattgtgccaagaaaccagcgcatgcgcacccttcaaaacgacacccgctcgccgtcagttgcttcgcacactaaccgaagtcccaatcccaatggcgccaacctgccgtcctcggccggatgcggcgctcctgctgctgctgctgacggcgagtagcgtcggcgtcgcacgggcggcgccgcgggtgccggcggtgatcgtgttcggggactcgacggtggacacgggcaacaacaaccagatccccaccccgctgcgcgccgacttcccgccctacggtcgcgacatgccgggcgggccgcgcgccaccggccggttcggcaacgggcggctgcccccggacctcatctccgaggcgctcggcctgccgccgctggtgccggcctacctcgacccggcctacggcatcgacgacttcgcgcgcggcgtctgcttcgcgtccgcgggcaccggcatcgacaacgccaccgccggagtcttgtgatcccgctgtggaaggaggtggagtactacgaggagttccagcggcggctgcgcgcgcgcgtgggccggtcccgcgccgccgccatcgtccgcggcgcgctccacgtggtgagcatcggcaccaacgacttcctggagaactacttcctgctggccacggggcggttcgcgcagttcacggtgcccgagttcgaggacttcctggtggccggcgcgcgcgcgttcctggcgcggatccaccgcctcggcgcgcgcagggtcaccttcgcggggctggccgccatcggctgcctgccgctggagcgcaccaccaacgcgttccgcggcggcggctgcgtcgaggagtataacgacgtggccaggagctacaacgccaagctggaggccatggtgcgtggcctcagggacgagttccccaagctcagcctcgtctacatctccgtctacgacagcttcctcgacctcatcacgaacccagacaagtttgggctggagaacgtggaggaggggtgctgcgcgacaggcaagttcgagatgggcttgatgtgcaacgaggactcgccgctcacctgcgacgacgccagcaagtacctcttctgggacgccttccaccccacggagaaagtgaaccgcctcatggccaaccacacgctccaagtgtgctaccaagagggcgtcctgtaacgtagtagtagtattcaaagttatcgaaggaattaaaagaaaaaaatgaaagcacacaaaggtttgtcgtaatcacagaaaatgtactacacttgtgatttgaatgtacgtgtcctgtaacgacgacgtgtgtacattgaaattagagagacggcatcgcatctatcgattccatcgttattcatcttgct

SEQ ID NO: 127447 - DNA, 984 bp, Zea Mays
ccaagaaaccagcgcatgcgcacccttcaaaacgacacccgctcgccgtcagttgcttcgcacactaaccgaagtcccaatcccaatggcgccaacctgccgtcctcggccggatgcggcgctcctgctgctgctgctgacggcgagtagcgtcggcgtcgcacgggcggcgccgcgggtgccggcggtgatcgtgttcggggactcgacggtggacacgggcaacaacaaccagatccccaccccgctgcgcgccgacttcccgccctacggtcgcgacatgccgggcgggccgcgcgccaccggccggttcggcaacgggcggctgcccccggacctcatctccgaggcgctcggcctgccgccgctggtgccggcctacctcgacccggcctacggcatcgacgacttcgcgcgcggcgtctgcttcgcgtccgcgggcaccggcatcgacaacgccaccgccggagtcttggtaagtctccgccgtacgcctccagccgatacttgctgttctttgtcgatccatcatctgtgctcgttaagtcttcactgccgaatagtatcgccacacaagcatttctgcagaacagaattgtgcacggcccatccgcattccaaagcagagaagtgtgtggcttacctgcgtacacttcagtttgattgagtgtaggtgttgctcgcgcattagaccgtctcaacaagagttttatcagagtttggtggcattaaatatgttgatatggtatggaataaacgataagagatgatgaaagttttacgatatcaaatgaatttgagcaggatgaaacttatgtgcactatttctaacacatggaattttgaatcttgaaaaaattggaactcccacttaattactggccttgtatttgggatatgtatgacacaaacttatatgcatcgagaattgtgtattgttcatagagtacaactacggccttcgtctcttgtaaaagaaaaaaa

SEQ ID NO: 127448 - DNA, 1100 bp, Zea Mays
acgacgcttgcattgacaagctagagattccacgctagcgacagctgccatggtcagtgcatgcatgcacgcatgcatgtggcacattaagacacctcaccaaatactacaactgcaaactgtccgtgtgcgtgcgtcttgtcttgaaccgccggggccgggggtccggcatgctgcatacagtatactactatgcgctgaccaacgccgtgccactagtcagtgatcccgctgtggaaggaggtggagtactacgaggagttccagcggcggctgcgcgcgcgcgtgggccggtcccgcgccgccgccatcgtccgcggcgcgctccacgtggtgagcatcggcaccaacgacttcctggagaactacttcctgctggccacggggcggttcgcgcagttcacggtgcccgagttcgaggacttcctggtggccggcgcgcgcgcgttcctggcgcggatccaccgcctcggcgcgcgcagggtcaccttcgcggggctggccgccatcggctgcctgccgctggagcgcaccaccaacgcgttccgcggcggcggctgcgtcgaggagtataacgacgtggccaggagctacaacgccaagctggaggccatggtgcgtggcctcagggacgagttccccaagctcagcctcgtctacatctccgtctacgacagcttcctcgacctcatcacgaacccagacaagtttgggctggagaacgtggaggaggggtgctgcgcgacaggcaagttcgagatgggcttgatgtgcaacgaggactcgccgctcacctgcgacgacgccagcaagtacctcttctgggacgccttccaccccacggagaaagtgaaccgcctcatggccaaccacacgctccaagtgtgctaccaagagggcgtcctgtaacgtagtagtagtattcaaagttatcgaaggaattaaaagaaaaaaatgaaagcacacaaaggtttgtcgtaatcacagaaaatgtactacacttgtgatttgaatgtacgtgtcctgtaacgacgacgtgtgtacattgaaattagagagacggcatcgcatctatcgattccatcgttattcatcttgct

SEQ ID NO: 127449 - DNA, 243 bp, Zea Mays
atggaggacgatagaggcgagccgagcttgggtggccttgcgacgaaggacgactggcgaccgcggaggacgatggcggaggacgagctcgggcagccttgcggcgacgatgtgctggcggcggcgcggtcagctttggatgtggggcggggggcgcgtgccagttctgaatgcagtggtctatggcatggtttagtgcctataacaatggttgtgaggataaagacttttagagaacaatga

SEQ ID NO: 127450 - DNA, 222 bp, Zea Mays
atggccggtccagcccggaacacgagcagggcggacccggtgtccaaacgccaagcccgggcggactggacaagccggcatggggcgcagttcgacatcgaggaaacgagcaccactggcggccgaacgctggcggcgaactacggatgtgacgcgacagagagacacggcgcagtggagttggacgagcgcagggcgagcagggaggagcgaccgagctag

SEQ ID NO: 127451 - DNA, 1764 bp, Zea Mays
ccaccgccaaatcacccccggctaccctctcgcctcaacggccccagcgtggtctggtctccctcctcctctcaatcgctgcaggaagccaagcgtaccagcaagcgccaatggagaggccttggctgatcctaggccgaatactctacgtcaacccgccccgcgacgacgacgacatgctcgaggtcgaggacgcggaggagcacgccgtggtcggcgaagctcaagccgaggaggacgcgcaggcgcaggaggagcagcacgccgcggccgtggacgcggtggtggaggcgcatgatgatcagcaagccgaggtcggggaaggcggagccgaagccgaagccgaagaggaggaacagcaggctcagctggaggagagcatcttgaacgtgaacacggacgcagcagcgtcggaggcggcgcacgcggcgcacggcgcggcggaacccgacttcaccatatgggtcgcgccaccgccgtggctaacggacctcgtcgcgggccccggttcccatcccgaccccgcgagacccgacatgtacccctacatcatcgcctccggacgcttctgcctcctcgtccacttctccatcgctcccttctacggcaccaacttcgagaaggaacccaaccacagcaacctcgtggtggtgcgccacttccgcaggtcagacaatggccagatcgaggcgcgcgctgtgcacgtacccgaccgccccgaggacaacgtcaatatacccgccctagccaatatcgagagcgtcggcttaatatgcaaccacgaaacaggtcactacctgattgccgagctcgttgttcccacagataatcaagacgaatccagcgtcatctacataagaacggaggatggcgtctggtactcgaactactttgcttaccccttctggtgggagagccgccggcattgggtaccccacggctctgtcaccataggcaacgtggtcttctggttcgacctctcgtgggggatcatcttctgcgacgacctcacccagccgcacgaggagcaaatattgtccttcttccgcctcccgcgtggttgcgttctccgcgacggacacgcgccggacctccactacagccgctgcgtcgctgtaagcgagaacgtgttgcggtacgtgcagatcatccgcaaacacgaccaagcagcgacggtgcacatgtggtatcgaaacccggagcgatggatcaccaactataatgaaagcttcgacgacatctgggacgacgaaagctacatccaaaccgggctgccacggaaatctcccgggctcgtgggcgtctccccggtagactccaatgtggtctacttcaccctggaccagcgattgttcggagtcgatgtgcccgagcaccgggtggtggactgtgcggaaagtgttgagccgctgaacaggacagagatgctggacgattcggtctcaagtcgctccttgatcacttggaacctggacgcggatggagcaataaacgtcggacatcagccggatgaaccttcagaccatgcggattcgacaagcgagggtggaacgatggatgaaggagagctagatgatccaagtgactccgagatagtggacatgaccgagcactagtcgttcttaggcatgggaaactcggtcaggacgactaaaaagaagggacatgaactgctccattttttgtttgtgcatgcttttcttgtggagatgttagagaagctgaggctccacgtgatggactaattgaaacattttgtctact

SEQ ID NO: 127452 - DNA, 462 bp, Zea Mays
attcataattgtcggtttagcctgtgctagttaatagcaacttgtgcttttctcaaggtcatgagcttaagtaattaagggctatagactgaaaaaagtaaatcactttgttgcattaaaggcaaaacctttcatgagcaagctctatttgccttaagttatgctagtccaggtcagttgtcacttaggaaagcgagatattcttgagaccaaaggcttctgtggctgctatttgtattcgtgttatagttctttctcgggatccatccccatcatatgcatgcatgtgtacttgcagctgctctaaccatcagtgcatgcttcatgtccatgtatgttcttttggttctttcgttgctctctgataataattttcttgccccaacccaagagcagtgcaaagagtattctcgtatatacttagtttgattgttttaattcaaattcatatttgtctccgag

SEQ ID NO: 127453 - DNA, 5452 bp, Zea Mays
actggcactaaatattacaggtaggtaacgatttttccactgacggttttataaaccgtggttttaggtgaggagagaggtgaacatggtatggaatggagcatgcagtggtgaaaacttttgtcttgctcagtcaaacaacggctcatggttgactgtactggcatcaacctttgtccacagtccaccccaccatccaccattagcagggcatcaatcagcatgcatctttcttcctggtggcctctgcaagctctgttccgacttcatcgcctttcacctactcccattgctccgccattaattttttaccggatcaagagcaccttccttcctgtcctgtgcatcgaggaggagagagaaagagtatgtgcgtgtgagagggagcagagtcaagaacagcaagcagcccagaacccaacatacatttaagagggggatccaaaaaaattgcagtctttacctgcaccacccctccctaccacaaatttccctctctgctggaactggaagcagccgtggcatccgccgtttcttgcgtgcttcctttcttggttctcctactagctgtcatcgctggtactgaaccagcggagaagagagaggtgaaccacggtgatccccgtgctggacaccatggccgtgtcctggtaggggataagcaacccaggaaagcagcaaccttccgctgtgcggatcacaggagggggactgcgtggggaccagaccaagcatggaggcactggcggccgcattcgccaccggccttgtccttgccctcgcggcggcgccagcgggagccgaaaccgaccccgacgacgccgcggcgctggcgaatctctacacctcctggaacagcccgtcgcagctggctgggtggtcggccagcggcggcgatccctgcggcgcggcgtggcagggcgtcgcctgctctggcgccggcgtcaccgaaatcaaacttccagggacagggctcgatggttctctgggatacgagctctccaacctgttctctctgaaaacactagatttgagcaataacaacttgcatggttcaatcccttaccagctgccacctaatctcactaatctgaatctgggtagcaacaatttcaatggcaaccttccatactctatatcaaatatggcttcgattgaataccttaatctcagtcacaactcaatttctcagcaactgggtgatatatttggaagcctcaactcactttcagacttagatgtgtctttcaacaaattgacaggggatcttcccaattctattggttctttatcaaatctttcaagtctttatatgcagaacaatcagttaacaggttctgtcaatgttctccgtgggctaagccttactacattaaacatagcaaacaacaatttcagtggttggataccaaaagaattcagctccattccagatgtaacacttgaaggaaactcatttgccaatggacctgctcccccgccgccaccttttatgccaccaccccctcaaaggccacggaatcgtcctaagcatcctcaggggccaggagatgctcctaaaggttcagaaagccacactgttcaaagtaacaagaagcaaggccttgggacaggtccgcttgtgggcataattgctggatcaatagttgctgttttatgtgtgtttctgcttctgttatgctgcatgtgcaatgctcagaaaagaactgatgatgccagcagtgaatcaaaagattttggaggacctctaacagtaaacattgagagagcttctagcagggaaatcccagagcagatggatgacacgtctatagcaactgtgaagctcccacctgctgagaaaatgactcctgagagagtttacggtaaaaatggttctgtaagaaagacaaaggtccccataactgcaacaccttatactgtcgcttctctccaagttgctactaatagtttctgtcaagattctcttctgggtgagggctcacttggtcgtgtttataaggccgatttcccgaatggaaaggttcttgctgttaaaaagatagatagcgccgcactttctttacaggaagaagacaatttccttgaggctgtatcgagcatgtctcggctaaggcatccaaacatcgtgccattgacaggatattgtgttgaacatgggcaaagacttcttgtctatgagtacattgtaaatggaacgctgcatgatatgttgcacttctctgttgaaataagcaggaagcttacatggaacatccgcgtaaggatagcactaggcactgctcgagcacttgagtacctgcatgaggtgtgcatgccgtctcttgttcatagaaatttgaagtcttcaaacattctactagatgaggagcataatccacacctatctgactgtggacttgctgccttgactccaaatactgaaagacaggtttcaactgaagtatttggatcatttggctatagcgccccagagtttgcaatgtctggcatttatactgtaaagagcgatgtatacagttttggagtggtaatgttagagctattgacagggcggaagccactagacagttccagagagaggtcagaacagtctcttgttagatgggctacccctcaacttcatgatattgatgcacttgctaggatggttgatccagcattaaacggaatgtacccagctaaatcactctctcgttttgcagacgtaattgcactctgcgttcagcctgagccagagttccgcccacccatgtcagaggttgtccagcaacttgtgcgcttgatgcagagggctagcatcgtgaggcggcaatcaggagaagagctagggttttcatacagagtcccagaacgagaaggagacctgagagacatttccttctgagcaagtgcgtccacgatagaagcgcaaaacagtttggaggcttaatgtgcaaagaaaatatctagagcactcgtatagtcatatcgattggagaactcgagctgaccgcaacaattcaggatcggatgagttttgagaagataatttcgttgcctattgttcaactttgttcattcttctacattcgtctcattttcagtcagtatacttgttgcagctgtatttaaaacgagactcaaattgatggtggtgtatagctgattattggtagagaagaaggaaaagaaatgtaaaattgatgctccgttatgttttaatgatagaaacctcaagactctacagccattcgcacatactggatagattgttttgatttcaaaccaatatgatataaaatcttcccgttctgttcagtccagcccggttcctacttcgtattctccggtttgttcctagaacaagaacagtgtacccaattcctatcacccgttctttctatgttcttgaaatatcgaaaacaccctatcataatacacaactgtcaatttcatattttgttggaaatttgatcttttatatgaagaccatgatatctgatacgtagattctcacgacatccctcagtgtgcaagtgcaactatacacctctgtaatcaccatactgaagtagcgttgcagcagcaattcctatatctgacaggaggtcctgaactgctgttgctaactgtgttttgtgaatccatctttgcaaatcgtaaatacagtgaaaatcatcgataccaaaatcagagatccaatggagatcagatcttcacgtgaaaaatgtaggtatacataccctcctcacccatctctgtcctgtatcaagttgccaatcatcttgccaagaggcacggtgcccttggccatgatctccagcctcgacgagttggaggcgttcccgaacagtgcgaggccgaacatcaagagctccggcaggaacagtctggatgacaggaaaccgtgccagtagtgtggctccaggtcgaagaaggcgtcgaagaaccgccgcgttccctcgaggtccagcttgagcaggacgtccatgccgaagcagaagaactccctctgccgccgcctgttggctggccacagctgcttccacacctcggcggagagcgcgtcccctgccaggccacccatgccgttgccggtgccggtgtcgaggaaccttacgatggcgtccgccacgataggcgcggtggcaagcgtgcgcgccaccatgtagcccgtggacgggtgcaccatccctgccgtgccgccgatgccgacaaccctctgcggcaggacgggcagcggccctcccatggggatgacgcagcgctcgtcctcctcgacgcttcggacgcgtatacccaggtgcctgaggcgcgcggccatgcgctcctggatgtcgtccatggcgagccccgggcgcgcgaccagggacgtctcctcgaggaagatcctggtgggggagaagggcatggcgtagaggaaggtggggatgcggcggttgcgctccctgatctccgacccttcggggaggtgcgagtcgcgccagtccatgaagagcatcttgtcgatgtcgaacgggtgggcgtcgacctcggcgaggatgccgtaggcgacctggtaccccgggttgtacggcttgtcgtactgcacgaggcagcgcgagaagcccgtggcgtcgagcacgacgcttgccgggacggcgacgccgtcgtcacagatgaggagggacgaggcgtcgtagtggacggccttggcgaccttggcctggtggaagacgacgccgttggcgacgcagcggtccatcatggtggacttgagcttgcggcgcgcgacgcgggcgtaggggcggtcgagcgacttggcgccgccatcgtcgatgaagacggaggcggagggccagacggtgtcgaggcagtgggagaggcccatggcctcgaactcgtccacccacacgccgtagttgttgggccacacgaccgcgggggacgggtcgatggcgcacaccgacaggcccgcctccgcgacgcgctgcgccacagcgaggcccgcgggcccgccgcccaccacggcgaggtccacggggcgggcgggcgctgggtcgtagcggggcaggtcgagcgacagcagctccggccgcgtgggcggggccagggaccgcagcgccgcggccgacgccggcccagccatccccgccgtggcgcggcagagtacggacgcgcgcggcgccggcggcttgcagggatggtggtgagtgcggaggaggagggcggtagtggccatggtgctggcctggtggaaggtggggggaattcgagcgcggcggagccgtgcaatcctgagcctgaggcggtggtgataagctgcagctgctttgagtgggggcaccaccgtcgatccaattccattgtggcattcttcacccaagcacctcaaatgttttttgaatattacttttggccttaaagacgaaggacaagtccacgaaaacgctgctggccgattctaccgatagatcctgcgccggccttc

SEQ ID NO: 127454 - DNA, 2504 bp, Zea Mays
ccaagcatggaggcactggcggccgcattcgccaccggccttgtccttgccctcgcggcggcgccagcgggagccgaaaccgaccccgacgacgccgcggcgctggcgaatctctacacctcctggaacagcccgtcgcagctggctgggtggtcggccagcggcggcgatccctgcggcgcggcgtggcagggcgtcgcctgctctggcgccggcgtcaccgaaatcaaacttccagggacagggctcgatggttctctgggatacgagctctccaacctgttctctctgaaaacactagatttgagcaataacaacttgcatggttcaatcccttaccagctgccacctaatctcactaatctgaatctgggtagcaacaatttcaatggcaaccttccatactctatatcaaatatggcttcgattgaataccttaatctcagtcacaactcaatttctcagcaactgggtgatatatttggaagcctcaactcactttcagacttagatgtgtctttcaacaaattgacaggggatcttcccaattctattggttctttatcaaatctttcaagtctttatatgcagaacaatcagttaacaggttctgtcaatgttctccgtgggctaagccttactacattaaacatagcaaacaacaatttcagtggttggataccaaaagaattcagctccattccagatgtaacacttgaaggaaactcatttgccaatggacctgctcccccgccgccaccttttatgccaccaccccctcaaaggccacggaatcgtcctaagcatcctcaggggccaggagatgctcctaaaggttcagaaagccacactgttcaaagtaacaagaagcaaggccttgggacaggtccgcttgtgggcataattgctggatcaatagttgctgttttatgtgtgtttctgcttctgttatgctgcatgtgcaatgctcagaaaagaactgatgatgccagcagtgaatcaaaagattttggaggacctctaacagtaaacattgagagagcttctagcagggaaatcccagagcagatggatgacacgtctatagcaactgtgaagctcccacctgctgagaaaatgactcctgagagagtttacggtaaaaatggttctgtaagaaagacaaaggtccccataactgcaacaccttatactgtcgcttctctccaagttgctactaatagtttctgtcaagattctcttctgggtgagggctcacttggtcgtgtttataaggccgatttcccgaatggaaaggttcttgctgttaaaaagatagatagcgccgcactttctttacaggaagaagacaatttccttgaggctgtatcgagcatgtctcggctaaggcatccaaacatcgtgccattgacaggatattgtgttgaacatgggcaaagacttcttgtctatgagtacattgtaaatggaacgctgcatgatatgttgcacttctctgttgaaataagcaggaagcttacatggaacatccgcgtaaggatagcactaggcactgctcgagcacttgagtacctgcatgaggtgtgcatgccgtctcttgttcatagaaatttgaagtcttcaaacattctactagatgaggagcataatccacacctatctgactgtggacttgctgccttgactccaaatactgaaagacaggtttcaactgaagtatttggatcatttggctatagcgccccagagtttgcaatgtctggcatttatactgtaaagagcgatgtatacagttttggagtggtaatgttagagctattgacagggcggaagccactagacagttccagagagaggtcagaacagtctcttgttagatgggctacccctcaacttcatgatattgatgcacttgctaggatggttgatccagcattaaacggaatgtacccagctaaatcactctctcgttttgcagacgtaattgcactctgcgttcagcctgagccagagttccgcccacccatgtcagaggttgtccagcaacttgtgcgcttgatgcagagggctagcatcgtgaggcggcaatcaggagaagagctagggttttcatacagagtcccagaacgagaaggagacctgagagacatttccttctgagcaagtgcgtccacgatagaagcgcaaaacagtttggaggcttaatgtgcaaagaaaatatctagagcactcgtatagtcatatcgattggagaactcgagctgaccgcaacaattcaggatcggatgagttttgagaagataatttcgttgcctattgttcaactttgttcattcttctacattcgtctcattttcagtcagtatacttgttgcagctgtatttaaaacgagactcaaattgatggtggtgtatagctgattattggtagagaagaaggaaaagaaatgtaaaattgatgctccgttatgttttaatgatagaaacctcaagactctacagcc

SEQ ID NO: 127455 - DNA, 1970 bp, Zea Mays
aatacacaactgtcaatttcatattttgttggaaatttgatcttttatatgaagaccatgatatctgatacgtagattctcacgacatccctcagtgtgcaagtgcaactatacacctctgtaatcaccatactgaagtagcgttgcagcagcaattcctatatctgacaggaggtcctgaactgctgttgctaactgtgttttgtgaatccatctttgcaaatcgtaaatacagtgaaaatcatcgataccaaaatcagagatccaatggagatcagatcttcacgtgaaaaatgtaggtatacataccctcctcacccatctctgtcctgtatcaagttgccaatcatcttgccaagaggcacggtgcccttggccatgatctccagcctcgacgagttggaggcgttcccgaacagtgcgaggccgaacatcaagagctccggcaggaacagtctggatgacaggaaaccgtgccagtagtgtggctccaggtcgaagaaggcgtcgaagaaccgccgcgttccctcgaggtccagcttgagcaggacgtccatgccgaagcagaagaactccctctgccgccgcctgttggctggccacagctgcttccacacctcggcggagagcgcgtcccctgccaggccacccatgccgttgccggtgccggtgtcgaggaaccttacgatggcgtccgccacgataggcgcggtggcaagcgtgcgcgccaccatgtagcccgtggacgggtgcaccatccctgccgtgccgccgatgccgacaaccctctgcggcaggacgggcagcggccctcccatggggatgacgcagcgctcgtcctcctcgacgcttcggacgcgtatacccaggtgcctgaggcgcgcggccatgcgctcctggatgtcgtccatggcgagccccgggcgcgcgaccagggacgtctcctcgaggaagatcctggtgggggagaagggcatggcgtagaggaaggtggggatgcggcggttgcgctccctgatctccgacccttcggggaggtgcgagtcgcgccagtccatgaagagcatcttgtcgatgtcgaacgggtgggcgtcgacctcggcgaggatgccgtaggcgacctggtaccccgggttgtacggcttgtcgtactgcacgaggcagcgcgagaagcccgtggcgtcgagcacgacgcttgccgggacggcgacgccgtcgtcacagatgaggagggacgaggcgtcgtagtggacggccttggcgaccttggcctggtggaagacgacgccgttggcgacgcagcggtccatcatggtggacttgagcttgcggcgcgcgacgcgggcgtaggggcggtcgagcgacttggcgccgccatcgtcgatgaagacggaggcggagggccagacggtgtcgaggcagtgggagaggcccatggcctcgaactcgtccacccacacgccgtagttgttgggccacacgaccgcgggggacgggtcgatggcgcacaccgacaggcccgcctccgcgacgcgctgcgccacagcgaggcccgcgggcccgccgcccaccacggcgaggtccacggggcgggcgggcgctgggtcgtagcggggcaggtcgagcgacagcagctccggccgcgtgggcggggccagggaccgcagcgccgcggccgacgccggcccagccatccccgccgtggcgcggcagagtacggacgcgcgcggcgccggcggcttgcagggatggtggtgagtgcggaggaggagggcggtagtggccatggtgctggcctggtggaaggtggggggaattcgagcgcggcggagccgtgcaatcctgagcctgaggcggtggtgataagctgcagctgctttgagtgggggcaccaccgtcgatccaattccattgtggcattcttcacccaagcacctcaaatgttttttgaatattacttttggccttaa

SEQ ID NO: 127456 - DNA, 99 bp, Zea Mays
agttccgctgggaaacacaaaaggaaatcgaatgcacatctggttgctactttacctgacagaatacaatcaaccccagatggtagttctactggcaca

SEQ ID NO: 127457 - DNA, 95 bp, Zea Mays
ggaaattttccctaggtgttgagttaaaatatatttttcataggaattatcttacctttgaaactattcatcctaaaacaatgtttcctaattaa

SEQ ID NO: 127458 - DNA, 255 bp, Zea Mays
atggcgctctcctgcgtgcagccctgcgcgtgggtagagagggctgcgaccaagggggagagtaggggctcggcacacagggggctagagagaagggcgctgtgggggagagatgagagaaggccggccgaagttggagctcggtcactagttgaggagaagggagcagggccgaacaccatggatgggaggagtagaggcgtcgcgccatggctgagggcgcatggagatgtggtcagggcgagcagcggctag

SEQ ID NO: 127459 - DNA, 348 bp, Zea Mays
atcacgatgggctcactgaagctgacggagatcgtctccaagaaatggggagtcggcggcagcagcaaggtcacctccccaagcgcggcagcgtgcccgcgaggccatttcgcggcctacacccgggagggccgccgattcttcgtccccatcgcctacctcgccagcgacaccttccgggagctgctcagcatggccgaggaggagttcggtgagcccggcgcccgccccatagtgctgccctgctccgccgaccgcctcgagcagatcctcgacgccttccgcagcggcggcggcgccaagaagaagagcgccggcaccgccggcaggatcgtaaagatctggtag

SEQ ID NO: 127460 - DNA, 3048 bp, Zea Mays
atgcccaggggtcgacgccgacttactctcgccccaatttcgtcgcctctgccggagggcggtcagactgaagatgggcgcgcccagggcggacagactgaagatggccgcgatgctgctgctaccgaggaagcgagttcggaggatgaagttcttcggtcggcgatgtacgctgggttctcgtcggaggaagcaagtgtttttttgcaagagaagaagaattcgcaggtgtctcaggtacgttttgatgctcaatttagagaagatttctggattgatttgggctttcctaagggcagccgctggtgggagaactcggattctcccattcatggtgcgcctgtgaatcctaatgctgttgttcgatccgatgctagtctgggcgttcatgaatcttcagagagcctacaggctagcctgaatgctttggatctggaatctaggatcggaacacatacggatcaaaataaaagatcattcgtaaacagttcatcgatccaggattcaggtgcacacctaaaaccttctcgtcgtggtgtccatatccggccttggcgcggtcctctcccgcggcctagaaggaaggaagctatttctcttgctgcgttctggccttcttcggcacaggccttccatgggtcctgttcgccggtctcaacttccaaggtgggatggacgatgccacagcccccaaagctagatgtgcgcagcgagtttccaccgctgattgctgctgtttcggtagattcccgatcgggtccagcagtgatcccggcggagattgaggcagtcgggattttgaattctgtaagtttggaaacaaatcgtgcggctttggtgaatcgggccaagggatatggtttgacaagaaaacttttacgaagacctattcctaggacttgccgtcacttctcctctcggctcggcctcattcccatgagcgacaacaaccgaccttcatacgcagcgatggcggcccgtcagccgacgcgtgaaggtcagcgcccaccgatgccgcaagcacgtggtggtgggcttgctgctccgcgtgggggtagaggatctctcccaaggtccagccgtggacgggccatcttggggggtcgtgatcgcggtcatgcccgtgggagtggccgcgggtggttcaatcctggacgtgggcgtggctttgggcaggttcaggctgctgctcctcaacaacgctatgtcccggttgaccttcaggaagctagccaaggaactcaggcagaggcgccggaaccaatcaaggccaaaaagcctcgtacaccattctgttttcgctgtaagtgtcttgggcacctgcaagagaattgctcagctattcttgactgctgcatctgcaacaaaaaaaataatcatgtgccggcaaagtgtcctattctcaagatgccaaggcctactgcatctatgttggggtgtgcaaaaaatgaattgaccttttttcggatcccggagtttgacttgatggtcgaggctcctgcaccggcaccaactgctttgatatcagtatcaggtggtaaattagatgcgttggccattcaattggagcttgccaaattgtctagagtggagtggaactgggaagctctaccccatggggatgattcttttctggtagtatttccctcagaggatgaactgctccggatggctgatattgagtataaactcaagagtggaatttctattagtatcagtcaatgggaaaggactggggatgctagtccagcctattatttggatgagatttgggtgcatgttacaggtgttcctcatgactggcgtcacttcttggccttctgggcagttgggtctatgattggcactacgattgaggttgatatgttgacatacaggaagaaggggattattcgccttctggttggtattttagacagagaacagttgcctctaacaacagatattgtcttccacaaggttggatatgatattactttcacccctgagctgccagattttgaaccggctatgccttccctggtcctggatgcttctgagaaagaggacggagacaacaaggaagatggggctccgagggtcagtgaatttgatccatcaagaaagaaacaaaagaatgtactgggttccttcggtccaaattcctctagtgataggcaggactcggcccccatgcatgttgattgcagtgaggttcataggccaatgtacacaacagggtcaggagtatgtgttgtagcacctacagagaagagtgtaatcaaatcgtctttaccacctggtttcaagacaggcaaaccaaatggttcaattagtctgatgaagcctctttctccttcgaaggaaaggacaactgatcacgctaagcaggtttcagtgcatgttgtgcctggttccgctttggttgcagggacaggtgccgcaatcccagcaggtgatcttgcctcggataattgggcaccggtggtccctcaggctgggccatctttaacctccatggtcaatgggactacgatgcctctgcagtttggatctctgaacatggccaaccaaaccttggctgcttgttcacggcctgctgtggagaggaacctggtggcgactcagcaaatgaagaccacccaaggtgttgtccaggatcagagcctgcgtggcgagtctgagcccgaaaattatgcacctgctccggttatttcttatggtaatagtccatcccattttcattatattgatggtttacgccgtagcttacgatgtaatatgcaagctgctaatggctcttacctatcagatattgatatgacagaaaaggcaatgcggcgcgctgcagcacggaatcttgacgctgatttgggctccaagacggtggcttcctcacaagagatgctacattcgcctttaacgcccgtgcagcaggaaactggtatgtcacaacacataaattccatgtcttttgtcacaatgactgatcgggattgtgctataaacttagacaatttaggtctaacaatgaaaagaagtagctcagggactaacttatcaaattaa

SEQ ID NO: 127461 - DNA, 799 bp, Zea Mays
atcttcgacgccccgccaccgcccacaccgcacacacggatagcataccataccaatctttgaggtttcatcaacaatcaatacaaaagcacacggtcgagaggatatgaggatagcaagaatcgcgatggctatggaggacggcggcggcgcgtcgtcgtcggtgcagcagatgcagccggcggcggccatggcgtacggccgcgtcgagccgccgccgttctggtccacgccgacgccgtacctcttcatcggtttcgcggttgtgatggcgctcatcgccgtggcgctggccatgctcctctgctcccgccgcaaggaggaggaaggccggcgcgccgccgaggcggctggggtcatgtctgtcgtgcgcgtgttgacgccgctcgacagggaggatgccatgcctaaggtgctcgtcgtgatggccgggcacagcgcgccctcgttcctcgccagcgccgcaccgtttgccagcttcactgaggctgccgacggggccgccaagccccagcacggccgtggcggcggcggcaaggagggcgccgccgccgtgtaggcttccttacccagccgcgtgcaagagacatatcgaaaccccctaaaagctggatcatcggagaagggcgaaaaaaaaactaagggcttgttcggttagctctcaatccatgtggattgagtgagattggatgggtttgaatcccaaacaagtcaaacttcttttcaattttttccaatcctatccaatccatgtgtattgggaataaccgaacaagccctaagctgaatcatcaaagaa

SEQ ID NO: 127462 - DNA, 116 bp, Zea Mays
tttttttcctcattcggttgttgcattttggggatttggaatttgtggaaagcattcacaactagggcagtagaatttctttggtttggcgcttgcgatggggtcgagagctgtcg

SEQ ID NO: 127463 - DNA, 541 bp, Zea Mays
aagcttattgtatttgcagatgtatagtgctcagatgggatctcaaatgggaccccagttcacccgtccgtcacaatctggacagacaccaaacaccaatgaaacacagggttctgagaccggacaaggaaacccacagatggacatacattggtctatgccccctagaggacagattcttcctcctccacaaccaggcatgggatattggccgccaccaccatggggatatcctacacatccaatggggccttggggacgccccccatggccaacacagccacttccgtcaccagcggattccacaactcatcaagtgactcctccccctcacgataactttgcggacagatgtctcaattctagtggtggagctacaaacaacaatccgatgtcctgatcgagagcgatggagctaatgtttgaacttgtgtatttgaacttgtgaactacaaatgtgaactatggatgtgaacttatgtatttggacttaattatgtgaatttgtgaacttatgtatttggacttgtgtgaatttgtg

SEQ ID NO: 127464 - DNA, 314 bp, Zea Mays
ctttgatgcatattattagaattagtttgttagttaaaatttgatgcatgatttttgggtagttgttacaattgatgcataatttcttgttcattgtaaattattcgatgttaggttcaatgtttggttaattttttatgtctagtgatccttcctaatagaagaagggcttaatgatgtttatttacacattttttatttatgtttgtatgcataacgatgtttatttatacattttttatttatgtttgtatgcttaatgaggtttacttacatattttttatacattgagttatttagtttttgaaatgga

SEQ ID NO: 127465 - DNA, 207 bp, Zea Mays
atgggcagttgcttctcttccatgggcgaggacgcggccggctatggcgacgagaggagggtcaggagggtgtggcccagcgacgacgacggcggcgagtgggacgtcgacaacagggccgccatctacatcgccacgttccacagccaccagaagaacgaccagcatcagcagcagcaggcgccggccgccactgccgcccagtga

SEQ ID NO: 127466 - DNA, 2444 bp, Zea Mays
gaagagcctgtggctgaggatcccggtgtttagcagatagaagttgctgagcaggagctcattgaaggcaagttgtgcccttgaccactttttacccaataatgttctttaatatcacttaattatgcataggtgtaattttgataggacccaataggtcacccttgactggttatcctctaccttgtttacccctgaatcatttgggtagttttgctattgctttatatggttttgggttaatattacattttatccatgttccagttattttatttatgttcatgtcaagatcattatttttaattggaacatggagcttaacttgagaaacaccaagggtggaatgggtcgtccttggctgactaattaggaaagctagtgggagactaccttacccgaaaggggcaagggcagtaggggagcaggcgtgtagggaggttctcgggttgattttgctgcgatggcggtcagacgagggtttcctgcattgctcttcccagaaactgtagcggattttcggaagctagtggaactttgtaaaggccgcgtagtgttatcctgcctcgctttccttgggagaggtgtatggggcccatacaaccaccgtggcagatgggtaacatgacttgtgggtacagggtacaacctctgcggagtgtaaaactggtatactagccgagctcgctgtcatgagcagcttaggactctcgcatgattaaattatggaacttaaatttaatttgtcatttgcattgcatgggtttatttattaattttcttctattcttattatggtttggtatttacttacacttagtaactgctaataaaatttgaccaacttattaaaagcaatgctcagctatcacccctattgttgataagccttacacctcacatgaactatcacctttggtgagttcatgcacattattccccacaacttgttgagctatgaacgtatgtgagctcacccttgctgcctcacaaccccccccccacataggagaagaaaaggtggcccaggaggagccgcacaatgaggagtttgacttgatctaggtgtcgtctcccagtcgactttgtggcgccaaggatgaactttagtttgttttatatttatcttttattttgtaagacatccgctatgtaataagtacttttatgatattgtgacatttatctctatacactttattattatatgtgttgcttctttggcgcatatatgagatgcacccgactttatcccttaaatctgggtgtaacacatatccaatctaaaggaagttacttaaacaagttagttaatactggtaacacaaattagaccatattcctataaatgggttttaaaacctaaattggtgttttagaccaactcgtccgtgaaaccacgacctagcctatgttataggttaccaaacccatttatcccaaaagcaaagtaaaactctgtttaatctacctaccccttgtacccgcaatagttatcccaactcagataatggcatctaacaccaccgatggtccctaaatcagacccaagaagaaggttaaactcgacaatgaaggagataagtagaaactgaattcatatgaatcaagatccaccacccgaaattaaagtctcccctacttaattttctcttaccccttaatcttctctacactcaccaaataactaaagcatgatgtacccttgttttctatgccacacctgttaatggcatgaaatttttaggtgtataaaaaaatattaattggaagttccacttagaaaaaaagatactagaatttcataaagataaagtcggccagatatgctcaactaaatgatattcttaaatagcattatagaatctaatgtgatctaatctagtatgatctaacctgatgtggcttacttaaacagattagtgatactggtagaataaaggagacctatctaatctaatgtgatctaactagagtgagttacttaatgttgggggccttcgtcttccaaaggtcctcaaaaaaatgatttaacaatgtttcccaagtgtaatatatgaacaggtaccatcggactcgggttaaaacaatacatgatgtcaaaagcatgttcaagacgaaggctgatgttgctccgaagctacgcgcaagggagcttcggtccaatggcggaaaaaggaaccgacttaaaggggacaaggctatctagtcctcgttgggttgttcataagtcaatagtaaatatgaagggcataaatttacacaggttgcgccctgtgcctataaatagatgaacagtacccccgtactgttcacgctgacttgatactcgcttgtgtgtcacgcttgtacttttaccttctgtcaagccgaaggtacatatgtaatcttgtattgtttctattcattcatgattatataacaaaaagatatattatgatatc

SEQ ID NO: 127467 - DNA, 412 bp, Zea Mays
gacaacccgaccgtgttgcctctctcctcctttcgtgtcgtctctctcctctcctctcctctcgcgtctgcagcttcccttgccggctagggtttgcagatgacgacggtggcacccacattttcggcccctcccagaagtactcgtcccgcgacctcgccgcgcatacctcgctcaagcccaggtattcgcgctgccttccatccgcctcaccaatctcgaacggttaggctatttcctttcctctattttaggggcagaaattttgacttggggccgattccctgagtagaacgactgctgttggttcaatcctaacacaagacagtcgccatggtgtggccgcctcatattcttgctacgccgtacaggatgcttatagcctttttttgtatagcatgttatccattgg

SEQ ID NO: 127468 - DNA, 425 bp, Zea Mays
gacaacccgaccgtgttgcctctctcctcctttcgtgtcgtctctctcctctcctctcctctcgcgtctgcagcttcccttgccggctagggtttgcagatgacgacggtggcacccacattttcggcccctcccagaagtactcgtcccgcgacctcgccgcgcatacctcgctcaagcccagaaaagacggtcaatagacccaagaggagttacagaagaggaatctcagggaggaacttgaggaacgtgagcgcaagcactactcttccaaggataagtcctatgctaaagaaagagaccggcggaaaagctcaagccagctactcctagaaggttcaaagagagaggcagaggataagatagttccatgagaaattgatgcagatgactccgatgtggagcctaaaagtgatgatgacagg

SEQ ID NO: 127469 - DNA, 684 bp, Zea Mays
atgccatttctgaatgttattcttgcactctgtgtacaagaaccagttcaacaggtcaatgaaggcgatagtttggatgatggaaatgatgacatggatgagcaagctagatcttcacaacacctgtcctcatcaacagctgagatttccttgcccccatctgaggatagtgatcgaatgagtgggcaagtagagaatgatgatgggctgggattagttcagagtgacactccagttggagcagcagatggtgacagtacccagatcacctcgactttgactactttttcggcttattgtcataaagatcctaatattcatacaaccaatgaggcccagctatatgaactggtggagcctaatgtacatccacaagcattagcttcctcttctcaggctcttaaagtcccttactctcatcagggatacccttcagaaaatccagaagcagataatgttgtgcaagtctacaggatgccagattctaatgttcactcacaagttctcccgtccacatctgagcttccttccggtggttggggagaaagctatttatcatctcaagaccaggcttgcagctacatgaccaacattttgaagacaaccaatttgtacataaggttctgcattttccttgaggacaaccaatttctccttaacggaaatccatttcttcaatcataa

SEQ ID NO: 127470 - DNA, 373 bp, Zea Mays
acccgtgtgaggaatgacttgattaaagtcaaacacatgtacattaaaggaagaataattaggctgggtaatggtaagaatgttgatttttggcatgatgtttggtgtggacctttatccctgtagggataggttccccaatctatatagcatatgctttgaccaagaatattcagtgtattctatgtgcaatctaaaatggagattatgtttcaagaggtggctctctaaagacttgcagaaccaactcagagatctctgtaatatgctgttcagatataaaactaatgaccaatttgatggggcggtttggaagtgggaaaagtctggtttgttttctgtcagatcagtatgtaaacacatgtttaaaaac

SEQ ID NO: 127471 - DNA, 100 bp, Zea Mays
ctttccagctgagggtgggttctagacctcagttataccctccacacttatctcaactatacacatacatgtatctcttttgtcccctactgcagacagc

SEQ ID NO: 127472 - DNA, 1562 bp, Zea Mays
tatactttctgacctcttctggaatcctgcgacgaggggaccgaaatggcctcgtcctcctctgactccggccgcatcgccggaaccctagccttgcgtacgagctcggccttagcggcggcgtcgctaatcccggggctcccggacgacgttgcagctgtcattctctgcctgctcaccttccccgaccagtcccgcctccgcgccacctcgcgcgcttggtgcttgctcctctctgcggctacgctcctcccgctccgccgtagcctccgtctcccgcgccgccaccttctctgcctcttccccaccgacccatccctcgcctccccgatcctgctcgaccccgccgcacctaccacctggtggcccctcccgccgctcccctgttcgccgcagctttacggcctcgccaactttaccgccctcgccgttggccgccacctctacgtcctcggcgggtcttgcttcgacgcccgcagctaccctttggggcaaccctccgcctcggcggcggtctaccggcttgaccttgccaactctcgacattgctgggaacgccttcccgacatgcagctcccgcggggaagcttcgcgtgtgcccacgcgcccagtgctggcgggctcctcgtcgccggtggcgggtcccgacaccccatgttcccctccaacggcagccgcaccggcagcaccgagtggtatgatgccaccacgcactcgtggcaccttggtgcctcgatgcctcgtgatcgggctgggtgtgttgggttcctggcacgcggagcaggggatggtggtgaggatgagttctgggtgatgggcggctatgatggatacaccacgttgggaggagtggtgccaaatgacgtgtactgtcgggacgcggtggcgttgggactatggagtggtaagtggagggtgattggagacatgtgggaggaaggggagaggaggcgtcttggtcccattgcagctttatctgcagatgatggaagaattaccgaggtgttcatgctagacggcaatgatgtcttcaggtatgacttcgcttcaaataggtggctgaaagaggcaaccacgagaagaaagatcccaaacactgaatcttgcggcttcgtaccaatgaacggggaactgtacgtgctcagatctgcaaaagttcgtgttgaatcctctggtccgtggaggcagctgaagaagaagctggctatggagtttcaggtgtacaaccctggggcaaagaaatggagagtgctcaccacgtatccacctgttgatgcacccattgatttcaggactgcagctctgtgtacagttgagttgtagatccattagtagtcaccattaactgtacatattcaggtggcaagcgcaacaatcgattgcaaatatagacatgaaaatgcctaatgcttcaagtgctcccagcagatagtttgttctagcgtgtttatatacagtagagataacattctggagtatatcgcaagaattggtgttttttggtgctgaatgtgattgctgctaacaagatatgaattgtaccagcctgttattattgcgtc

SEQ ID NO: 127473 - DNA, 355 bp, Zea Mays
gttgcaaagggacaatgtcaagaagaggttataacatattggcagataagtattacattagtactggtcttaagcatgacaagactcagctcaagaatagaagagaccaactaaagggtctctatggcttctggttgcaattgaataagcgatctgggttggggaaaaatcccgatggcactgttgatgcacctgactggtggtggaagcaaaacgcaaagactccagaatggaagaagctaaaatatggttcaccaggctacatagatgagctagaggaaatgttccaggatattgttgtagatgggtccagctcctacattccagggcaagaatttgacgaacaaggcacaac

SEQ ID NO: 127474 - DNA, 833 bp, Zea Mays
acggttggtccacctcctcctgctcctctggcctctgcggtgcctcctcccggtcccgagtcccggccatgtcgtcgccgctggaggatgtcagcgtgggcatggaggaggaggatcagcggcccctgaaccgggccctgctccaccggagcgccaccaccaacgcctcccaggtggccatggtcggctccaatccctgccctatcgagagcctcgactacgagatgatagagaacgagctgttcgaccagaactggaggacgaggcgcaaggcggaccaggtgcggtacgtggtgctcaagtggaccttctgcttcgccatcggcatcctcaccgggatcgtcggcttcttcatcaacctcgccgtcgagaacgtcgcgggcttcaagcaccaggccgtttccgccctcatggactccgccagctactggacggcgttctgggtgttcgccggctgcaacctggcgctcctgctgctggcgtcgtccatcacggcgttcttgtcgccggcggccggcgggtcgggaatcccggaggtcaaggcctacctcaacggcgtcgacgcgcccaacatcttctcgctgcggaccctcgctgtcaaggtgcgccgtgtgtgttccgttcccatcctcctgccctcgccgtcgctttcgcttgctgcagtgcacatgctcccctcaccatttcctggtgccagctgcgcaaatggattaccatccacactaatataatgtaacaagggcattcattcctccatccaactgcatgatctacgagaaaggaaagcaaccagcaagtaaataaacaatcataattagacttttctggccaga

SEQ ID NO: 127475 - DNA, 258 bp, Zea Mays
atgggacttggtgtctcgaaggagatgggaggggatggaggcgtcggcctcagcaggaatgggagtgcgagtggagggggctctgtgctggagaaggagcggctggaaaatggctcagccactagggagggctgtaggcggccatggaagggagctggggactaccgatgtccatggtcaggggcggaagttgagggaggggcaggacgcgatggacgccggagccggggaaaaagcaggggcatggagtggaggtga

SEQ ID NO: 127476 - DNA, 384 bp, Zea Mays
atgaggctactgttgagggccatgtgctggagggaggtggtcgcgctagacattgtggcgttgctggctagagtgggcgcatctgcatcgagaggaggaggggcagcgacaggcagtggccaagctggcgcgaccatggagaatctgaggggctgtgggcgacgcgactgcgccagcagaagcaagcgggtccgcgccgatggtaaacaagctgggtggagcggcgacattagcggcgggggaggtgccagtggccatagccgcttaagagggactcgttatgggagggaaccgcgagagcaggggccgacagccaagtggcgacggatgggggataagaggagcaaggggttgatggctgagggtgggagggaagatatgtag

SEQ ID NO: 127477 - DNA, 2236 bp, Zea Mays
atgaagtgctggccatcgtggtacactgcaagtcaagtagctatcacgcatcatcaaatcatcgtggtaaacatgttgtgcaaacatgatgatgtgcaggtagtggggaacatcgcggccgtatcatcgtcgctgcacgtcggcaaggcggggccgatggtccacaccggcgcgtgcatcgctgccatcttcgggcagggaggctcccgcaagtacggcctcacctgccgctggctgcgctacttcaaaaacgaccgcgaccggcgcgacctggtgaccatcggcgccggcgcgggggtggcggcggcgttccgcgcgcctgtcggcggcgtgctgttcgcgctcgagtcgctgtcgtcgtggtggcgcagcgcgctcatctggcggtcgttctttacgacggcagtggtggcggtggtgctgcgcctcttcatcgagctgtgcgggaccgggcgctgcggcatgttcggccggggcggtctcatcatgtacgatgtcagcaccgtgttcgacgacctcatgacctaccacctcaaggacatccccaccgtcatcctcatcggcgtcaccggcgccctgctcggcggactctacaacttcctcatgataaaggttctccgactctacaacgccatcaacgagagaggtggagcgcacaagctgctgttagcggccaccgtctccatcgtgacgtcgtgctgcgtcttcggcctgccatggctggcgccgtgccggccgtgccccacgacgggtccactttcgtcgccggacgggacctgccacgcgctgaaccgtttccggcggttccactgcccaaagggccactacaacgatctcgccagcctgttcctcaacatcaacgacgacgcgatccgcaacctctactccaccggcaccaacgacgtgtaccacccggtttccatggtcatcttcttcgtggcgtcctacgcgctcggcgtgctcagttacggcgttgtggcgccgtccgggcttttcgtccccatcatcctcacgggcgccacctacggccgcctcgtggcaatgctgctcgggggccgctccggcctcgaccacggcctcgtcgccatcctcggctccgcgtcattcctcggcgggacgctccggatgacggtgtccgtgtgcgtcatcatcctcgagctcaccaacaacctgctactgctgccgctcgtcatgctcgtgctgctcatctccaagacggtcgccgactccttcaactccagcatctacgacctcatcctgcgcctcaagggcctgccccacctcgatggccacgctgagccgtacatgcggcagctggccgtcggcgacgtggtggccgggccgctgcggagcttcggcggcgtggagaaggtcggcaacgtcgtgcacacgctccgcaccacggggcaccacgcgttccccgtcgtggacgagccgcccttttcgccggcgccggtgctctacggcctggtgctgcgcgcgcacctgctggtgctgctcaagaagagggagttcctggtggcgccggagcggtgcccaaaggagtacgtggccgagaggttccaggcggaggacttcgacaagcgcgggtccgggaagcaggataccatcgccgacgtggtgctgtcgccggaggagatggagatgtacgtcgacctgcaccccttcaccaacacgtcgccgtacacggtggtcgagaccatgtcgctggccaaggcgctcgtgctcttccgggaggtcggcctgcgccacctcctcgtcgtgcccaaggcctgcgataggtcgccggtggtcggcatcttgacgaggcatgacttcatgccagagcacattctggagctgcaccctgtccttctgaggagcaggtggaagaggctccggtggcagaggggcgccatggccaagtacttccgatcgctcatcgtgtgggtcgccaacagcggctgaagcagatacattgctgccaggaaactgctgctggctcctgcagattgaaggagtcatcatcattgggtatttgtgaaataacaacacgtgttgatagcttcatatacatatatgcatatatatgttcagtcaaaattttgtcgttgtcttttggtactacgtttgtataattttcattttagtgaaagaagacgagttcgccacattgttttatgtcttctatacacttgaacaggtggcgtcctttggacgccctgcaatgactaaatgaagcaagtccctgctgatc

SEQ ID NO: 127478 - DNA, 660 bp, Zea Mays
tcatcttccgccaaatcggaattatctctactcgccgaaagatcgggcacctcagctacatcatctcctaccgtgcccatctccctcctctgctcggctttcctcctccctctctgctcaccgaccgagctccttccctgcagccgagcttcttcttccacagcccgccgcgcctgctccctttatccggctcatccccatggcgactgctcggccctgccctcagccgcgagctcccaggtgccgcgcgcgcccctggctcggcccagcgctccgttcctgcatcgcctagccgcgattccccaaccatggatgcgcgtagctccctggcacttcctccctactttgttcctatgcgtgctcgctggctggagctttctggccctgctcggttcttactgtgccgcaaccctggctcctctgttggccgcgcggtcgtttcctgctccgcgcacgacaggggtttcctgctcgccagcgcgtcctctcggctcgcttggccttaatccccatcgcgtcgtcgacctcgccgattgttgtcattcgtcgtcgcgtcgtgcgtgcaatagtcccgaatctgtgctgccctggtcttgttgtcaacatcgttcgccatggcttagcttgctagttcgtcgttatttcatcgtctcgtcttgc

SEQ ID NO: 127479 - DNA, 2143 bp, Zea Mays
cagttccgttccctcccaaaccctaactcccgaatcccctcgctctcctctaatggccgccgatgccgacgcagccgaggtggagcggctttacgagctcggcgagcgcctctcttccgccaaggacaagtccgagcttgcggcggactacgaggcgattattgcagcagtgaaggggcagagtgtcaaggcgaagcagctcgcagcgcagctcatcccgaggttcttccggagcttccctgcactcgccacccgcgccatgtcggccatgttcgacctcgttgatatggaggagctcgcgatcagaatacaagctattcggggttttccacttcttggtaaagatactgaatttgtgtcaaaaattgcagatgttttgggacaactccttacaagcgaggaaaatgtggaacgtgatgctgttcataaagcactcatgtcccttatacgagaagatgttaaaaattctttacaacctttatttaagcatgtggagcaaggatcagagattcgtgagaagattatttgttttcttcgagacaaggtttttcctcttaaagcagagctactgaaacctcaagcagaaatggagagatttataacggatttggtaaagaaaagtgtgcaagatgtaactggttcagaatttgaactattcatggggtttctgcgaagcttgagcatatttggggattctgctcctagagagtcctttcaagaactaattgaaattattcaagcacaggctgatctcaactcacaattcaatgtttcggacattgaccacattgaaaggtggatttcatgcatgtatatggctcttcctatcttcatgagaggagcatcagcaagcaagttcctcaattacttcgttaagcaaattgttccagcattcgagaagattcctgaagaaaagaaactggatttgctcaagactattgcttcaagttcaccgtacgcgacagctcaagattcacgtcagctgcttccatctgttgttcagttactcaacaaatatatgcctgggaagaaggtggacgatatcaaccataattatgttgaatgcttgctgtacacttatcatcatttggctcataagactccaaacacaacgaacagtctatgtggttacaagattgttactgggcaaccatcggatagacttggagaggacttcacagagcattacaaagattttacagagaggttaactggaacagaagagacggtaagagcagcctcaaagcgactaactcagggaatggcagatttcagcaaggcaatatcttcagcaaaaaccgaagaggaaaaaactaaaattaaaggcgatcaacaaacttcaacaaggacaatgaggtcatataacaatatattggcaatggcacagggcaaggcgaggccggcgcccagaagaatccggctcatgaacgcctaggcgacgccttttaaaccatgccattgcattcaaaatcccctttatttatcggtgataagaaaatcgctctatcatggatggagcatcccaagaaaccaacagctacgacagcaggggggaagaggtcacaacctgctactacaaatgggaatggccctgcaaacaagaaagggagaggaggaatgcacaaccagcttgtgaacagagcttttgaaggactgtctcgtggtggtagaggcactggaagggggcgtggcaggggtggccgaggacgaagagggtggggtggctaccgctgagatgacctggaaactctgttcaaacctgacatgggatgagctttctgcttccacttgagagtaaatgcaaaggtcgatatttatttgtgtgcctcagcgcaacaagtttaaattggaaggcacacaacagcagaatgcgtacagaaagagtaaaaaagaatgcttgagaaatgtccgcaagatctgtgcatctttcctattcatttgccatcaagccgtgttctttgccaccctccgtcgcttcacctgagttggctgtttgatgaaatgttggcaagatctgtgcatcatctttcatattcacttaccatctcaccgtgttctttgaaccctaacagtcgtttcacctgtgttggctgttagaactcaacagtaagatatcgttcatttattttatttgattttacca

SEQ ID NO: 127480 - DNA, 1270 bp, Zea Mays
cttatcccaaaccccataccactcagctccactgccaccatggtgccgctccactgctcagctagcgtccacctccacttcctatcgccatctctccccctttcgtcatccttctctctcctctgccatcgcgtccgccgccccaccgccatccgcgccgaagctgaagtgcggcctccgctacctgtctccgcggcggagtcagagccccctgacgccggcgctgtggaagccgaaggtcagggacccgtggagctccgcgctccgacgctcttctcgactgatgacaatcccaccccgctccagactgccaccagtctcctcctcaccggcgccatctcggtcttcctcttccgcgccctccgccgccgcgcccgccgcgccaaggagctcagagtgcggtcgagcgggttgaagaagcccaacaatctcaccgaggaggccctggagaggctgagattgatgagcgcctcaccgatcgagaccgagaaggcaacttcgcccatccaggctctgctcggcgggattgcggcgggggtcatcgcactcatcctctacaagttcagcaccacagtcgaggctgcgctcaaccgtcagaccatctccgacagcttctcggttcgtcagattacaatcacaataagaacaattgtcactgggctgtgctacctagcaacttctgtctttggaatcaatgcggtgggattagttttgtattccctccaactcactttacaatcaatcatggacgatgactccagctcttccacagggaagattagtgaacaatctaatacactggcatcatctgatagctccacaagtagcagggaatcagacagtagtgacatgcaagtcactgacaaaagtaaaaactcagcagagaagcagagctagacatgtaatccagacagccaaaatctgagatctgagggtacatatctgatgaaatcattttaagcattccttctcattattagctgaaaaatctgatgagagcgatctcaactcgagagtttcaattatgctagtattccgtccaaaatccgtccaaaaaaaagaagagaactcaattctagatttgagctaagttaaattgtcttaagtttgattatgtttttttaaaaatatcattatttatatcattaaatatgtttgttataaaatatattctatgattagtggaagtacctctagttgagttggtatttctcaggactgtcgttggatttatgtgggaatgtcaaaggcttggccggtatttctcagg

SEQ ID NO: 127481 - DNA, 862 bp, Zea Mays
aattagctctagaggtttggaaaggggccctattggtgtccaagtcacttggtttcgcgcaggtgtagaggtaagcgatggacaaggacgtgccagtggaggagtgacgtaaaggtgggggagtagaggagcagtgatgcgcaggtaggggagagcagaggagcagcggcgtgcaggcggaggagagcaaaggagcggcgacacagcttggttcgtcagattacaatcacaataagaacaattgtcactgggctgtgctacctagcaacttctgtctttggaatcaatgcggtgggattagttttgtattccctccaactcactttacaatcaatcatggacgatgactccagctcttccacagggaagattagtgaacaatctaatacactggcatcatctgatagctccacaagtagcagggaatcagacagtagtgacatgcaagtcactgacaaaagtaaaaactcagcagagaagcagagctagacatgtaatccagacagccaaaatctgagatctgagggtacatatctgatgaaatcattttaagcattccttctcattattagctgaaaaatctgatgagagcgatctcaactcgagagtttcaattatgctagtattccgtccaaaatccgtccaaaaaaaagaagagaactcaattctagatttgagctaagttaaattgtcttaagtttgattatgtttttttaaaaatatcattatttatatcattaaatatgtttgttataaaatatattctatgattagtggaagtacctctagttgagttggtatttctcaggactgtcgttggatttatgtgggaatgtcaaaggcttggccggtatttctcagg

SEQ ID NO: 127482 - DNA, 536 bp, Zea Mays
ctcctggagggaatggctacagagcggacgagatcaaggagcgggcggtcgggggccgcccgtgacggcgcctaggctcaggctccacgatggccgccaccttgccgcgcaaaggtctcaccggctcccgagaggacagcttccgcgcctcccaggtttcagaaaaccttctgagaaggcatgtataaaactttgggcaaaaggagatcttcctacccagcatatcttgcctcggaggagggttgttgtattcaatactatgggtttgatggaggctttcagctggggccatgaaaattcttgagagcaagattcattcgctggaaacatttttaagatctagaagaaataagagaaggagccacgcagtaccattgacacttaacctcaagggtaaaaacacaaatatcattgacattgtgcacatagtcttcatcagtatttcactgtcaagtcattgttccatcttcctaggaactgatatacgtaaagatacacagtatattcttatacaatagtatattcatatgaagaga

SEQ ID NO: 127483 - DNA, 528 bp, Zea Mays
atggggacgagctcacctgctcgagctcggacccagagaaatgctctgcgcgctaggagcttgggggatggggatgctgtgcagggcactggcgccatggacgccagagagagaggagctcgaggggtcgagctgctgggatatgggagcggctgcttgcttgaggaagaagaaggggaggggatggagaggggcgctgcacctggagccgagcacgcaggcgagcaagatcccggcaaggagtggcgccatggatccaaggagaaatttctcctgttcctgcggagaagaagggcgcggcttcctgcgctggtgatgaagtggtggcaggacactgcgtgggggaggagtcgcaggacctggggcaactccagagagcagcaccatggggaaacggccttccctgctgctggcgaggtacgccagggaggcagccatggaaggccttgctcctgcgctgagaagggggaaaacgctagaagaggcttctgcgctaaggaacagaggagagaatggagtgtcggctga

SEQ ID NO: 127484 - DNA, 105 bp, Zea Mays
ctatcttatttcttctcttggtatgcacctacattgcaaatcaaatcggtcaaacaatttagaatagataaggctatttttagtctaattgatgataatatgaca

SEQ ID NO: 127485 - DNA, 3621 bp, Zea Mays
atgatgcagatgctaggcctccgcggctccgcgtccaaggaccgtggccgcgggggcgacgcgtccccgtcctctgctgtggcaggggccacgggaaccccgcgctcgccgtggactccggcgtcggcatcgtcgccgcgctcgccgttcgcggcggaggcgggcggcgagggagggggcggccggccgctgcggctggtatactgtgacgagcgcggtcggtttcggatggacccagaggccgtggccgcgctgcagctcgtcaagggacctgtcggggtcgtctctgtctgcggccgcgcgcgccaggggaagagcttcatccttaaccagcttctaggtagaagtagcgggtttcaagtggcaagtactcatcgtccctgcaccaagggcctttggatgtggagtgccccaataaagagaactgcctttgatggaactgaatatagtcttttgctacttgacagcgagggcattgatgcctatgatcagacgggcacttacagcattcagatattctcattggctgtcctactatcgagcatgttcatatataatcagatgggtggtatagatgaggcagcccttgatcgcctttcacttgttactgaaatgaccaagcatatccgtgtgagggcaaatggtgggaggtctactgcatctgaacttgcgcagttttcacctattttcatctggctactgagggatttctatctagatttagtggagaatggtagaaagataactccacgagattacctggaaatcgcactgaggcctcttgaaggcagaggaaaggacatatcttcaaagaatgagatccgtgagtccatccgtgcccttttccctgatcgagaatgtttcacactggtgcgcccattgaacaatgaaaatgaacttcaacgtcttgatcaaatccctctcgagaaattgcgccctgaatttcaagctggactggacgaattaacaaggtttatttttgagaggacaaggcctaagcaagttgctggtacaatcatgacaggaccagtactagctggtattacacagtccttcctggatgcaataaacaatggagctgtgcctaccatttcatcttcttggcagagcgtagaagaagcagaatgccgtagagcatatgattctgctgctgaggtttacatgtcatctttcagccacatcaaattagctgaagaagatgctttaagggatgaatatgaagctgctttaaggaaggcacttgatgcatacaatactactgctgttggaactggcacttcacgtgcccattatgagaaagttcttaacaatttctgcagaaaggcgtttcaggattataaaaagaatgctttcttagaggctgacaagcagtgctcaaatgcgaagcacaacatggagaagaagatccgagcggcatgcactgctcctggtgtcaaagtttctgctgtgattcaggtcctggaaactgcacttgctgaatatgaaacatcttgtactggcccagccaaatggagaatgcttgctgcctttttaagacagtgtttggaaggacctatattggacctctgcttgaagttaataaatgaagtggaatcagagaagacttccttcactttaagatgccggtcaaatgaagaccaactagaacttctaaaaaagcaacttgaggccaatgaatcacacaagtctgaatatctaaaacgctacaaagctgctataaatgagaaacagaaagcctctgttgatcttagtagtaatcttgcaaacctgaggaccaagtgtagcacattagaagaacgatgtgtaagcatatctaaagaacttgatcatgtccgacatgaatgcactgattggagggtgaagtatgagcaatctgtttctcagcacaaggctgaacaagatagatttgtcgctcagttggcatctcttgagtctaggcatagctctgcagaaggaaagttgggagcagctcgggaacatgcagcatctgctcaagatgaggctgcagaatggaagaagaaatatgaaatggctgccgtgcaggctaaaactgcattggagagactagcatcagtgcaagaacaaattaacaaaattgcacaagaaagggaaagttctataagggcagaatttgcctcacatttggagggaaaggaagaggaaataaggaaattagttgctaagattagagaagcggagagtgaagaaagtgtattgactgaacgcttgctggttgtggaatcaaaaacacaaggccacaacaaggaaactacaggcttgagggatgaaatcaaagaactaacaagcaagttagagtatctaagagatagagcagtatcatatgaaaagcaagctagaatgctcgagcaagaaaaaaaccatcttcaagagaagttcttatctgaatgtaagaaatatgatgaggcagaacaaagatacaagtctgcagaaagggatgcgaagaaagctgttgagttggctgatgcagctcgaacagaggctattgcataccagaaagagaaggacaaggcacagcagttatctattgaaaaggtagcagttatagagagggttcaaagacaggtagacagactagagcaggaaaaggttaatctattgggcgaagttcagaggatgcataattctgaatctgatgcctggtccaaggttactttgcttgagagtagggttgctgagagggagaaagaaatggatgatttactgagccgtagcaacgaacaaaggtctagcactgttcgtgtccttgagagtctgttggcaacggaacgtgcagctagagctgaagccaataagcgtgcagaggccttatctctacagctacaatctgcccaaggtaaacttgatatactccatcaggagctgacatcgattcgccttgttgagactgcacttgacagcaagctcaggaccactacctatggcaaaaggttgagagataatgaagtacgactgtattctatccaagatatggacattgatcctccagagaggagcagaaaaagaaccaaaagcaacactagccccttgaagcctgtccaaactgaggatggtggttctgttcacatgagagaagacagcgttacagttagcacggatgtaaaagatgacaatccagatggttacaaaaagttcaccatagctaaactgaaagaagagctaactaagcatggatttggcacgcagttgttagagctcaagaatccaaacaagaaagatatactcgcactttataagaagcatgttttgtgcgagtaaataatggccacgtgaagttccagtcttcaacacataatctatccaaactagggaaacaatagagtagtctgtcagtatttttaacaagctgatgcctcattgttctccaggcattcgtttctgctgattggtttgtattttggtgttaacatcgaattagttccggtttgtgtctaggctttgtatttcttagcttgctggttggctgggtgaagttcttaggacttctgagtgctaaatgacctcgaccaacgctagtcgtgggcaagtttgtggtacgtttgtatatggtatattgctgtgtaaagagtgctttatccaattcaaatatgatatactcttcaa

SEQ ID NO: 127486 - DNA, 104 bp, Zea Mays
tgccaaggaaatcccgtccacgtctcgtgggtttcgcatcaaccgctcacacacccctattcaagcgctcggcgtcgctgtctacaaccccatcttcaaaaaaa

SEQ ID NO: 127487 - DNA, 399 bp, Zea Mays
atgggaaggcgaggggaaggagctcggactggagaagcaaggggagcaagcagcgggtgcggcatccatggaagcaggggcgcgtcctatggctggagcaggagcacgccggcgaggagaagacgcgagagggaaggagaagcagggagggagcgccgtggggaagagccgctcggctggggaggtgcagcagccatggagcttggggaaagggaaccggcgagcagcggagaggaacgagcggccgagctgccgaacgcctggcagggagaagatccaagcgcgctcagccatgggaagaggatagagggagcgccgtgcgttggagaggaggaagggcgagggataaggctaacggctgaaaaatcagggaagggagagagagcggctgggaaatag

SEQ ID NO: 127488 - DNA, 222 bp, Zea Mays
atggagaggggactcgactgcaccagcaggcttggacgaggagcggcggctacgggcagggcgagtgacggaaccgtctgccttgcgctcggccgcccccttcttccccatgctaccggctccactagcgaccaaggacgtgcggacctggtgacgagggagcagggggcgtgcgaaggggaggaagaagccaagggaggtggctggagggggctcggctag

SEQ ID NO: 127489 - DNA, 291 bp, Zea Mays
agatagtataataaaaatttgaataaaaagaatttctatatcatgttggttttccttaaaaatttatttacaaggactctctataaaactttatacactaaaaatgattttctaaaatacctaattcctattttgtgtatagattgcacattttaaagtgttattttaaataggataataaataaaatatagttttgcaccatgctgggattttgagtgtgcattaaatttgaactcttagactttaacttggatttgaatttgaaattttaaatcaaaaagaaaaaaaca

SEQ ID NO: 127490 - DNA, 840 bp, Zea Mays
atgactactgcgacgaggacagagaaggcgaggccgcagagctccgtgcgagtgaaccccgtggacagagatgaggcggatgaccacccggcggcacgcgcacggcaaccatggggcgaggtctggcgagcgacgaccatggatcggcaagcagcacgacggctggtgatgctctgcgcgcatgcacagagggaagccgagcagggtcgcgcatctggtgaggacgaccggcacggagggcaggtcgcacgttgcaactgctacaggcagagggaacgacatggcacagactggcgacgtccaaactcaatcgcgacggtgatgccatggccgggcacagggagctttgccggcaggtatgttccaatgtttgtggagatagagtatgatctgaactgccagtacacatctgttctaatggaagagcaactggaggctcttggaagagcaatagttgctggcaagtcgtgggagcagtttgtgttatgctatatatgggtccatgaggttgtgtatgcaagtggtggaaaagctcatgaaaggtgcggactctacatatcttatattgttttattggttgaatgcaatatatgttctaaatctgtcgtgatgttatttgtttgtaagtacacaatgtttgataacatcatcgactcgagccaggtgagggctcagcgtggaggttcgtcgaggtctgctgctcatagttcccatctctccactcaagatcgagcagaagtggagcaactgcgtgaagaacttaatggagtatcgaccatcactcgtcgttgtaccctgatggtgatcagcgatagtgacattccattttatgtgttgtga

SEQ ID NO: 127491 - DNA, 720 bp, Zea Mays
atggatggatgcacggagctgggtgacagcggactggggatggaggctcgacgagacgacgtactacaattgcaggctcgatccgatgaggaagatcggcggcgaggcgtcctggagcctacccaatggcgaggacgagcagagaagggcggccggcactgggctgggaacagggagcaggacgcgcgccaggaagttcaaggagatgagagctcggccatgggagagagaacccgcagaaaatccgacgccaggagctcagagcaggtcgagcgccatgggagggagatccgagttggggctagacatcgagtagagggagaagaagccgaccagggagaagcgtgcgaccatggacgagcacagggagatgggcagagacgcgcatccaggggaagaggtgggagatggcgtggccatggaggagcaccgggcacggccacaaaggagatccatggctggggaggacggagcgagcatgtccatggagaacggcgacacaggagcacgcaggccgagctgggcgtgagggagatggagcagagggagctccgagctgggctgcggccatggagaggaagatggagggagagagaagcagggagggtggccgacgagctggagctggagggagctctggccgggcgggagtggaggagggccatgggagaagctaaggaagcaccgcaacggagaaggaaagtccaaggcggcggctga

SEQ ID NO: 127492 - DNA, 1305 bp, Zea Mays
attccactctccaactccatcgcatttcgctgccgaaatcgatcgcagcggcggtcgggaggcattccatctccaacctcgacggaccgtcgggatacgtaggtttccaccaccctgtaagtacctcagtcctccattccatccaagttatcatttgcttcaccccgtttagttcaacgacaacgctcgccgtcccttgcatttcccctaccaaattgcacatagcgtcggccggagcgatttcatcgacgatcttagtggactatcgggattcggattagtccaccgccctagtaagtacctcgttccatctgtcccatccattgtagcatttgcttccccccttgaactcaacggcgtcgctgtgcgtaatcagccgcgagttattagttttttccacggtaagtacactttcaactccccacatttagtagcaatttaatttttcaggttatcgtaataaaatatccaacgttgctcagcaccttaaaccacagttctatggtgattcatactttatgcagatttttcctcgcaagaaactagttcaatatatatatatttgtaattgtttacattgttatgacaacatatattagtatttatgaaaattatgtacatatttatgttaataattatgtacagtgtcagtcttaagttttgttttgttttttatttctacgcagtcaactagatgtatctatattgtcattttttatttatgtatgtcgacatctatatttatggccttgctattcatttcagtgtattcaaaatagttcagaaatttgtgaatacattttctgcatatttaatttttttcatgtatacctttttgttgttaaaccattcttatttttatgacctatattttaaagatcgttttttcatttttgtagagttgctctggtattcattgtattcaacatgaagcccatcgactagccttcttgaaatcccaagaaaattaccattcaatcaagccacgaagttttcactgtcgagatcccttagttggtaaatgatgtgaacaacccgaatgagatccctgcacgccctgatgatgccacaggacaaatgaaacaaacctatattaggcgtaacacaaagcgggttataggtcatgttaaaaaagcttctgatgttattggaaacccagacaatgtgaaagggaaatagggttaaccttttcccacaattatttttggctgttgaatttgcaacgcaaacacatggactaactagtttgccaagtattcatgtattacaggtgcctaaaggttcaatacaaaccaataaatattc

SEQ ID NO: 127493 - DNA, 2772 bp, Zea Mays
caagctccagccgttcctagcgtcatccacagcaggtcgttgctccgtctgctccctccgttccaactctccctctaacctccagctcgccagcaccctcagccgtcgcaggttccctcccatggcgcccagctgagcatcttcttccccacctcttgccgcccacgtgccattccctggaaggtgctcgcgcgtcctcatgtgcttgtcagggactccggcatctagattctgactccatgccggcgctgccctctcatgctcgccgagctgctctcaaatggctgctcacgagtttcccccagccccgtcagcttgccggtctccatctcagcgcgtgagctcctctacagggctcaacagccgccgttctgcgccactagaccacgcccaacgcatacgcagtccgtcgctgggactccatcagcgctgatgtcgttcttcttcgtcaacatccaccagccagcgcccatcctcgccaccaaccacactcgcccggatccgcgactccctggtaccagccgaccgtccctgtgccccacgcccagatcgacctggccccatgctcgactgctcgttgtccaatccatccaggcatcaacgtcgacatatgctcctctgctgctcacctggactgaagctgccaagctgtcgaactccatcgcgcccctccgttcaggccgcgccctgctcggcttctctggtgcacgcgcagttcatcggccaagtcccctcaccggcatcctccacagctcgccctaccacgccgatgcccttccctatttagccgttcgtcgaggtcgccaatggccttcatcaatgccgcacctgctccgatctcatgtagctcggtccaactgtgcatcgctaccactcttctgtccatggaaatctgctccaccgggccgcacctcacctgcgatgtcgtgcacaccaagccgaagtgtcgtcgctgctcatacttcgtttgtcggtcaccatgggcatgccctacagttgcgtttcttccccagcgttggccgccattcacagcactcggcctcaggtcttcgagctcccaagccgacctccttcattagtctcaagctccgccccttcgtgctcgacgtaaagcctgaaccgaatgtcatcgccgtttcgcaattgtcaagtcaaaatttagtcatgatttgctagttgatcacgtgatgcgtggcacaagagccgaggcgagcccaagatgatgtaacgggtgggctactccacaaggtaatgttggtggatcaacctaaagatggataaatcaagcaagtgctcgcctaagagatgtttggatcaagcgctaggatgtgagatgctcgccaagtggacgtcatctaacaaacactaacctagtgttattccaggcaagccccagtgtattatcccttttccttgttgttttaaaatctttatcaccttatatgatgcattaggtgataggagttgtgtgctaaacaatttatgcattcccttccttggaaaccgattaccattccttgttacctgatttacttaaaagttttctgatgcttagccttgctttagaaaacaaaatgttttgttttaaacaaaaggtgatgcttcatattggatgggaatttttacaaagaaaagacttgtgatggtgaatccatcatgcccatgatgggtttaacatctgaaaagatgtacctctgtcaggtaccaaactttgggttttaaataataaagacgagactgggcgcgtgacttgtatgagaaggaagtctcggtgtagtgtctctgtctgagtcgcttaaggaccgagccgatgtaggcctggtgactgaggaccttttaactggccatatgcctcgtcatgggtaagctttgcctcgatcggaccattaccagaaaggccaccacgcaatgagagtggagagatggcgagagtatcgtgcaccctccgtggcaagaggttggacggtggagtatttgtgcactcggttggcgtgaacccattctagtcttgagaaaaccggtggcgagttgacatatgcaagggttaagtgctacatatgtcgtgtggttggagatccccagctaggtattaatcgattcggatcaccgttacttctcgaacatgaagacttggtcactaacttacacgtagcaatccagcaaactgaagggatgataaaagatggctagtataggccaagtgcttgatctaggataaaagaaatctagatacaggtaactacttgacctgataagtaaaatgaattcttaaggatccactcatagtaagcttttctgcaaaaagagtctttgaatcttgataagctttaccttgatttccaaaagctagcatatccttgagagtatttttccttagatgggtgagacttgcgaaagtacactacgtacttagggttttcgaacccatgttattgtaggcactagatttgtgctgctgtggatggtgctaagcgccggtgggcatgaccttcttataggttaaagtagctcttctatacttcttattgaggattgtcattgagctagcatataattcaaacttataaataatttataacatttcaaagtatatttttttgaatcacttttgtaatcactttgataaatataatgtaaatttgttgtaacttgtaactttttgtaataaagaaattccaatgcaaatgttggtgtgtgatttgtgtttacttaaccttgcgatcctggttgtaagtggtttatccggggtccttgggacactcggacggatcc

SEQ ID NO: 127494 - DNA, 1522 bp, Zea Mays
tccacagcaggtcgttgctccgtctgctccctccgttccaactctccctctaacctccagctcgccagcaccctcagccgtcgcaggttccctcccatggcgcccagctgagcatcttcttccccacctcttgccgcccacgtgccattccctggaaggtgctcgcgcgtcctcatgtgcttgtcagggactccggcatctagattctgactccatgccggcgctgccctctcatgctcgccgagctgctctcaaatggctgctcacgagtttcccccagccccgtcagcttgccggtctccatctcagcgcgtgagctcctctacagggctcaacagccgccgttctgcgccactagaccacgcccaacgcatacgcagtccgtcgctgggactccatcagcgctgatgtcgttcttcttcgtcaacatccaccagccagcgcccatcctcgccaccaaccacactcgcccggatccgcgactccctggtaccagccgaccgtccctgtgccccacgcccagatcgacctggccccatgctcgactgctcgttgtccaatccatccaggcatcaacgtcgacatatgctcctctgctgctcacctggactgaagctgccaagctgtcgaactccatcgcgcccctccgttcaggccgcgccctgctcggcttctctggtgcacgcgcagttcatcggccaagtcccctcaccggcatcctccacagctcgccctaccacgccgatgcccttccctatttagccgttcgtcgaggtcgccaatggccttcatcaatgccgcacctgctccgatctcatgtagctcggtccaactgtgcatcgctaccactcttctgtccatggaaatctgctccaccgggccgcacctcacctgcgatgtcgtgcacaccaagccgaagtgtcgtcgctgctcatacttcgtttgtcggtcaccatgggcatgccctacagttgcgtttcttccccagcgttggccgccattcacagcactcggcctcaggtcttcgagctcccaagccgacctccttcattagtctcaagctccgccccttcgtgctcgacgtaaagcctgaaccgaatgtcatcgccgtttcgcaattgtcaagtcaaaatttagtcatgatttgctagttgatcacgtgatgcgtggcacaagagccgaggcgagcccaagatgatgtaacgggtgggctactccacaaggtaatgttggtggatcaacctaaagatggataaatcaagcaagtgctcgcctaagagatgtttggatcaagcgctaggatgtgagatgctcgccaagtggacgtcatctaacaaacactaacctagtgttattccaggcaagccccagtgtattatcccttttccttgttgttttaaaatctttatcaccttatatgatgcattaggtgataggagttgtgtgctaaacaatttatgcattcccttccttggaaaccgattaccattccttgttacctgatttacttaaaagttttctg

SEQ ID NO: 127495 - DNA, 411 bp, Zea Mays
attagtaggaaaaaaggaaaatgtctcggcctcaccttgttcgttgcggcatccggtgtggaagcacaagacgtcgcagcatctagcgtggtggaaacctcggaggagctttggccatcgctaccggcagtctccgacacgggcgagtcccatgacttcttggcctgcaggagcggcctctccctaaaggccgactctggcaccacggaaaacacggagcgaattgtcgacggtgagacagattgcaatgtggatggggaaatggaaagagtaattggggaagagggagggagcagcgtaagtactgggaggggagacgccacatttgaagcaagcgaagaggcggttgacgtcgtctttggggtcgtacgccgtcatcgctttccttggatcgcctgccaccaacgttga

SEQ ID NO: 127496 - DNA, 177 bp, Zea Mays
atgccgtcgcttgcccgcacaagcgccccgctgtcgctcgtcctctggatcagggacccaccgccagtgacctgggaaccaccgccactactctggatcgaggaacctctgccaccagacgtcgaggtcatggagctgcggccacagcctgggggtccaccaccgcgcacgctctag

SEQ ID NO: 127497 - DNA, 1710 bp, Zea Mays
atgagggaggagatggacatagacgcgaccggcgcgggctggctgtcgtggcgagaggcggcggtcgccgtgctcgcgtggctggtgttgcacgtggcgacgcgcgtggcggatgcgctttggtggcggccccgtcgcctggaggcacacttcgcggagcagggtgtgcgcgggccgccgtaccgtttcctgctggggtccgtgaaggagatggtggggctcatggcggaggcctcggccaaacccatgtcgccgccaacctcccacaacgcgctaccccgcgtgctcgccttctaccactactggcggaagatctacggaccgagcttcttgatctggttcggaccgacgcctcgcctaacggtagcggagccggagctggtgcgcgagatcttcctcacgcgagcagaggcgttcgaccgctacgaggcgcatcccgtcgtgcgccagcttgagggcgacggcctcgtcagcctccacggagacaagtgggcgctccaccgccgcgtgctcaccgacgccttctacccggacaacctcaaccggctggtgccccacgtcggcaggtcggtggcggcgctggcggcgaagtggaacgccatggcggccgccgctgggaacggcgaggtggaggtggacgtagcggagtggttccaggctgtgacggaggaggccatcacgcgcgtcaccttcggccgcagctacgacgacggccgcgtcgtgttcgccatgcagggccgcctgatggcctacgcctccgaggccttccgcaaggtcctcgtccccggctaccggtgcgtactacctgatggcggcgcatctcgtctccgtctcggattttcattcaagatacgacgcgttgtttgcaggttcttgcccaccaagaagaactggcagtcgtggaagctgggcagggagatacggcggagcctgacccggctcatcgcccggcgcagcggcatggccgaggaggaggaggaggttcaggccggccactccggaggcttccgcgaccttctcggtgccatgatcaatgccggtgagaggaagacgccggcggcgatcccggtggcggacatgctggaggagtgcaagactttcttcttcgccggcaagcagacgacgacgaaccttctggtctgggccaccgtgctcctggccatgcacccggagtggcaggagcgcgcccgcagcgaggtgctcgacatctgcggccccgacgagctcccgtccaaggagcacctcccgagactcaagactctgggcatgatcataaacgagaccctccggctgtacccgccggcggtggccaccatccgccgcgccaagacggacgtgcagctctcggacgggtgcatgatcccccgcgacacggagctgctcatcccgatcatggccatccaccacgacgccaggttctggggccccgacgccgcgcagttcaaccccgcacggttcgccggcggcacggccagggcggcgaagcacccgctggcgttcatcccgttcgggctgggctcccggatgtgcatcggccagaacctggcacggctggaggccaagctcaccatggcgatcctgctgcagcggttcgagatgaaggcgtccccgaactacatccacgcgccgacggtcctgatgctcctctacccgcagtacggagcgccggtgatcttccggccacgttcggcgcatccggcagcctcatag

SEQ ID NO: 127498 - DNA, 371 bp, Zea Mays
gtgaaggtttcaccaatttttgaatttcttcgatctcgagaaaggccgaatttggagcctgttaaaacttttatttctcggcacgaatgcaaactcgataatcaatctcgatttataaatctcgtctaaagctcatttaatcaaacgctcgacagttgccagtcgagccgtgtccgagtctgattcctcgaccttcgatctatgtctgactattctatccagatcagtactctcaaacgaaattctatgttgtgttggtatctaattaattattatccgactcggcctaatatctctgtgtccgaaccgaactcaaaacccgcatcgacagtgatttttaaaatgtcacgattcaccttctacaacaaaaa

SEQ ID NO: 127499 - DNA, 363 bp, Zea Mays
atgtcgggttccgccacacccgaccccaagctcggtgtcgcggggttcgaccgggagcagccttggaagcggaactcaagatgttgcgccaccgctcagggcctgtggtgcctccttaatcgagcgcctggacaacactacgtgcgtgtctgggacatcgtcgacttcggcgttcatcgtggggctgcggtggcgctgcccattgcggaggtctacactggccaccgccttcaggatctcattggtctcccttcttccctctcagatgaggggttgaaggatctgctggaaggctacgacgatgtagccagtcgcgtcgtgcttagggtgtctactcatgacatcgttcgttctgcgctctaa

SEQ ID NO: 127500 - DNA, 2983 bp, Zea Mays
gcgtggtggtgcctcccgcggcgctgcggctgctctccgatcccgagcgagcacatatcctcgccaccttatcacgaggccctcgcaccgcgccgacgcgatcagcgcgtcgagccaccggagtctccccttgcgggattgcatctcaagaatatggggagaaagaagaaccccattgtctttctggatgtatccgtaggtgacgagccagatgaaagaatgatctttgagttgtttgctgatgttgcaccccttacaactgagaacttcagagctttatgcacaggtgagctgggaattggacagaagactaagaagcccttatgttacaagggaacattgttccaccgcgtgatcaaggggtttatggcacaaggaggtgacattgcaaaagaaaatgggtctggtggtgaaaacatatatagtggaaaatttacagatgaaacttgtgttctacttcatgatgatcgtggcctcttgacaacagcagatactggattcaaacctagtggctcccagttctgcattactttcaagcctaattctcatcttgacaggaagcacacagtttttggcaagcttgttgttggaagtgatgttctgaagaggatcgagcaagtagatgtgcaatcccctgattcaactcctgttattccagttactatagtaaattgtggagagctcattgaacgcaaagatattggctctatgtcaatagaaattgataaaaaaagggctgccaaatcaaagttgacaagggatataacttctgacgaggaaagtaatgaaggacaacacaagagacgtcgtaacaaatcttcaaaaaggagaaggaagaagaggagatattcttattcggaatcagatagctcttctgagtcagagactgaatcatctgattatgagagcgattctgatacttactctagtgactcatctgatgtcagcagctcaagtgatgacaggcgaaggcgcagaaagagacactcgaagaaaaataaacgcaagcattcaagaagaaagcgtgaccataggcgcgaaagaaggcgtaggaagcgtggtaggaaatcaaaacagaagtcaaaaaggatagtaaagggtgatagtgaagctgaaagtacgggcgatagcagttctgaagatgctagaagcaagagacaccgccgtgggcggaagttcaaggcatcatctcaagtttctgaggaaaatcttgctggagtggctgctttgaaggatgccacctcacctcaacaaaagagtggaatacagaggagtccagcacaagatgtctcctccctgcaaaatggggaagtccatacaaatggtgttaatgactcaaaaattgaaagaaatgccgctgtcatgcctgttttaactggcaatcgaagcaaatctaggagccagagcatgagtgttaatcactcaatgagcaagagtatgagtatcagtccaagaagaagcccaatgaaaaggtcaagtaccagcccgaagaggtcacttagcaggagccctgttgacaataatcacagtagaagccctatccgtactcccaaaagaagcgtgagcaggagtccagccaggcggcagatcatgagcaggagccctgctaggagcccacccagaaattcaagcagaagccttcacataagcaggagtcctgttaaagcccacagaagaagcattagcaggagctcagctaggtccatgcaacagagaagtccaagcaggagtctggagagaactcatgtacgaaaaagtatcagtccaagcccacctttggagaagggaagaagcattacccgtacctctgtggtatctccattgcgaagtgttagtcggagcccagcaaggatttcaaggagcccacataggccttctaggagaagccctatgagaagtccacgatggaacatacgcagaagcctcagcaggagccctgcaagaatacctagaagaagtgtgagcagaagcccagtaagaggtggtcgacctcgcaggaacattagcagaagtcccagtccacatcgcagggtagtaacaccaccaaacaatggaagaagcccatccaggagtggttctcctgatgggtcaccaaaacgcataagacgtggacggggttttactcagaggtactcatacgcaagacaatatcgctcaccttctgctgatcgctcacatcgttatggtggaagaaatgaccgtgacagatacatgggttaccggggttcccgccatcgatcacctcctagacggtatagaagcccacccagaggaagagtgtcatcgccaaggcgtggtaggtacaggaggaggagccgaagcgcctcacgcagccctgtctacagggaaagaggaaggggaggtggatacagcaaaagccctatacggagcagttcaccccctgccaggaaaccaaggtcacatggtgaccgtgcacggtcagtttcaagaagccacctttctgggtcagtatcaaggtctcctccagtgcatcatccctctccacctgattccccatcagtgaagcatgcaagtgatgagaaatctcagtccgcgtccccagctctgtcactgtctggtagccctaatcgtggaggcaagaaaggtttggtttcctacggggatggctcacctgattcagctgggaagtaggtttccaccggggcattgaaatgtatcttacaccgttagccattggctgttgatcaggtccatcaatactttttgttatatttctactgtaagaagcggtttggtccttgagctgcccagctgttacatatgttgtttgggatgatcggctatgtcctttggttatcacaagagtcgtaatttgagcttaggttttgctgttgctaaacatgtagcacagattcagtgtgggattttgatgttatataagcttcaacgcaaagaatcattacaatgttttgacctcggatgcctaagtacgattcacaatttatttcttttgcatattcaa

SEQ ID NO: 127501 - DNA, 2974 bp, Zea Mays
gcgtggtggtgcctcccgcggcgctgcggctgctctccgatcccgagcgagcacatatcctcgccaccttatcacgaggccctcgcaccgcgccgacgcgatcagcgcgtcgagccaccggagtctccccttgcgggattgcatctcaagaatatggggagaaagaagaaccccattgtctttctggatgtatccgtaggtgacgagccagatgaaagaatgatctttgagttgtttgctgatgttgcaccccttacaactgagaacttcagagctttatgcacaggtgagctgggaattggacagaagactaagaagcccttatgttacaagggaacattgttccaccgcgtgatcaaggggtttatggcacaaggaggtgacattgcaaaagaaaatgggtctggtggtgaaaacatatatagtggaaaatttacagatgaaacttgtgttctacttcatgatgatcgtggcctcttgacaacagcagatactggattcaaacctagtggctcccagttctgcattactttcaagcctaattctcatcttgacaggaagcacacagtttttggcaagcttgttgttggaagtgatgttctgaagaggatcgagcaagtagatgtgcaatcccctgattcaactcctgttattccagttactatagtaaattgtggagagctcattgaacgcaaagatattggctctatgtcaatagaaattgataaaaaaagggctgccaaatcaaagttgacaagggatataacttctgacgaggaaagtaatgaaggacaacacaagagacgtcgtaacaaatcttcaaaaaggagaaggaagaagaggagatattcttattcggaatcagatagctcttctgagtcagagactgaatcatctgattatgagagcgattctgatacttactctagtgactcatctgatgtcagcagctcaagtgatgacaggcgaaggcgcagaaagagacactcgaagaaaaataaacgcaagcattcaagaagaaagcgtgaccataggcgcgaaagaaggcgtaggaagcgtggtaggaaatcaaaacagaagtcaaaaaggatagtaaagggtgatagtgaagctgaaagtacgggcgatagcagttctgaagatgctagaagcaagagacaccgccgtgggcggaagttcaaggcatcatctcaagtttctgaggaaaatcttgctggagtggctgctttgaaggatgccacctcacctcaacaaaagagtggaatacagaggagtccagcacaagatgtctcctccctgcaaaatggggaagtccatacaaatggtgttaatgactcaaaaattgaaagaaatgccgctgtcatgcctgttttaactggcaatcgaagcaaatctaggagccagagcatgagtgttaatcactcaatgagcaagagtatgagtatcagtccaagaagaagcccaatgaaaaggtcaagtaccagcccgaagaggtcacttagcaggagccctgttgacaataatcacagtagaagccctatccgtactcccaaaagaagcgtgagcaggagtccagccaggcggcagatcatgagcaggagccctgctaggagcccacccagaaattcaagcagaagccttcacataagcaggagtcctgttaaagcccacagaagaagcattagcaggagctcagctaggtccatgcaacagagaagtccaagcaggagtctggagagaactcatgtacgaaaaagtatcagtccaagcccacctttggagaagggaagaagcattacccgtacctctgtggtatctccattgcgaagtgttagtcggagcccagcaaggatttcaaggagcccacataggccttctaggagaagccctatgagaagtccacgatggaacatacgcagaagcctcagcaggagccctgcaagaatacctagaagaagtgtgagcagaagcccagtaagaggtggtcgacctcgcaggaacattagcagaagtcccagtccacatcgcagggtagtaacaccaccaaacaatggaagaagcccatccaggagtggttctcctgatgggtcaccaaaacgcataagacgtggacggggttttactcagaggtactcatacgcaagacaatatcgctcaccttctgctgatcgctcacatcgttatggtggaagaaatgaccgtgacagatacatgggttaccggggttcccgccatcgatcacctcctagacggtatagaagcccacccagaggaagagtgtcatcgccaaggtacaggaggaggagccgaagcgcctcacgcagccctgtctacagggaaagaggaaggggaggtggatacagcaaaagccctatacggagcagttcaccccctgccaggaaaccaaggtcacatggtgaccgtgcacggtcagtttcaagaagccacctttctgggtcagtatcaaggtctcctccagtgcatcatccctctccacctgattccccatcagtgaagcatgcaagtgatgagaaatctcagtccgcgtccccagctctgtcactgtctggtagccctaatcgtggaggcaagaaaggtttggtttcctacggggatggctcacctgattcagctgggaagtaggtttccaccggggcattgaaatgtatcttacaccgttagccattggctgttgatcaggtccatcaatactttttgttatatttctactgtaagaagcggtttggtccttgagctgcccagctgttacatatgttgtttgggatgatcggctatgtcctttggttatcacaagagtcgtaatttgagcttaggttttgctgttgctaaacatgtagcacagattcagtgtgggattttgatgttatataagcttcaacgcaaagaatcattacaatgttttgacctcggatgcctaagtacgattcacaatttatttcttttgcatattcaa

SEQ ID NO: 127502 - DNA, 1939 bp, Zea Mays
cctgcctcagaggcagagcagagtggcctgggaggcttggatgaaccaacacgattcacctgtagtttggagaccacatctttgaatgagggaagcgactcagcaccagctacaaacgaacacacagtcaaactggtcgaactccctttccagcgcaactccttgttccatccaacagcaagctcctaggaaggcagagatggagagagggacctgacgaccgaggaacagatggacaaactgggggcgaggtggccgtcgaacctggactgggcgccaatgcagagacggggatgcgagaaggaggatcgttggcaaggtgagcggatagggcagaagcaaaagagccgcccgaaggggagggcgggagccgaacagtcgtccatctctttctttagaggttcattcatcttatcgtactggtagataataggatacagtaaaagtaacagggatttgtaaccatagttgttaagtgtcccgaggcgtcgtctaagcggtaaggcgcccggcgacgtaaggcatcctgctcgccttacacctggtaaggcgagtgggagagtccatcggtggctccagcagcgcggcacggcagctcctccagcagcgacgaggcggcggctctagaggctcctccagcagcggtcgacacaagagagagggagccaacgaggagagagagggagagatgccagtggggaaatagggggaggcggctgggtcgctgggagtcaggagtcgagcgtgaggcagctaggtcactaggagggggaaatcaggagtgtggcggctaggtcactgggagggggaaatcgggagtgtggtggctaggagaagatagagagagaggtctaggagagagggagagaaaatgggcttaatctatgtggtggctaggaaaagatagagagagaggtctaggagagagggagagaaaatgggcttaatctagttttattgggctagtgggattttgggctgatttgtaggctagagactaagtttttcttttcttttatcttttcctcttctttattaatgtttttatcctaaatactttttcaaatatcaatatttttttctatttttaactatatttaaggcgtcgcctcgcctacgccttatcgcttaaaaggtaaaagagggtcagtcaacttacctcgccttgccgccttaacaactatatttgtaacgaccaaatattttaattggattaccttttggcatggggaaacctctacttaaaaatgtcattaaatgcaaagactggacatactacatacataatgaaaataaaagggcaaaatgtatttttacaacatgtactacatgtataaacctccttacgttatccaaaatattaagttgattatgatctgcagaattccataagttgcaatgtctactgtaatcgtattagtacttacaacctccaatccttttgattaataccagttactacttacatattttgcaggcaacatatgaaaactttagataccattatgacaaggacaatccctaccagaaaagcattgcagaaaagttctcagaagtgttctttaccaagataccacctctgaggctccgatgaaagatttccgttcatgggtaggtgagggcgcacttgaagcctggcttctacactccatacattaggctagatgtgagaaacccaagggaaaagattgatctagacatggaagaaaaagaagtacttgttggtattctgcagattccaacggtacttcagaacatagactatggttcctttgaagagagttcaaatgacaagaacagaaatgctggcataaaataaatgcattttcctatagctcgggcacaaggaaatgaagctgctggaacatctgcatgagctactgcagtattcaacaacgaaacaagtgaggacatgaaattgacagtctgaatacaactg

SEQ ID NO: 127503 - DNA, 300 bp, Zea Mays
tttttctatacaagtgcttgtattgtaacataaaattatgatataacttaacaaatatcatttgtacatgtatattagacccatgtagctaccttgccgacgcatgaacgagaagacgggttatactttgtcgaaaccctcttcgctagtgaccatcactcgtcactgtaacccgatggtgatcggcggccgtgagcttccatgttattgtgttatgatacttgagacttttattatgactatgtatgagatattgtttcttattagtactggatgatgagatgtgtcttattatggtta

SEQ ID NO: 127504 - DNA, 82 bp, Zea Mays
ttttggtcgttttgttgaacattttctattaatattttccatattagttgtgaatgattctcagtttctcactcaaccttgt

SEQ ID NO: 127505 - DNA, 295 bp, Zea Mays
ttttatcacaggttcaacaatattcaacattaaatggcaatatcatgccttcaaatcacacaaaacatagtattgattctacaaaactgtggacaaaacatagcattcattttatatgagacatataaatccggacccacgtgtcatatattagcgggttccttatcgggtagcgggtatggagcaacagagaacatacccacgcccaccgtacccgatgagcataacaaatgacccaataaaatacccatgtgtatcaaaatccgccatacccgtgccctaatagggtttttac

SEQ ID NO: 127506 - DNA, 89 bp, Zea Mays
gcattgtctactactaccatgcctacgttaataccgagaatcttgagaagaatatactaagaaacatcgatgtgcatctccaaaagggg

SEQ ID NO: 127507 - DNA, 291 bp, Zea Mays
atggagcccaatggaaatgcagtttacattgaaatttggctatcatcacaatataaatcacatttgaccatcacaatattcagtgttccatgtttcccaccgaatcactgttcggataacatggagaacatcaaccctttcgatgagaatggagagcagggtacggggtatgcattggtgccagcttcactctaccttggttttattgcattgatcatttgggttgggcagggtacatacctaacatcagctaccctgcccttagtgacgcaagagaaaatgattgcttga

SEQ ID NO: 127508 - DNA, 753 bp, Zea Mays
acggacaccatcatttgactgctccgatgtctgccactctgccaactttctcgaaaatctacctcccctttccgcgctatatatgctttgttgttttacttgttggattggacgagttcatcgaatggacgggctgcagaggtcggcgcagacattcaggaggtcgggctcgtcggggctggtctgggacgagcgcttcatcaccgagggcgccggcgcggcggcgccacgccagcagccggagctgcggcactcgaggagcgtcggcagcgtcgccatgctgctgctcggcggcgaggcagatcgcgacgacaagaggaagctgacgctggccaagccgaacctgaagggccaccacaagaagcaggaggagctggtgcctggcaggaaggcgtttcggaccagggacgtagccccggccgccgagccaccgtcgccgagggtgctcgccatctgctgcgcgccctgctccatcttccgggatgccggcgccggtggctcgtcgtctctggcgcggcgggccaagaagcggtaggataggaaaatcaatatgtttattttttcgggttcatggtatgcttgagacgaagtgtaaccgtacggggggatcgtgaccaagtggctcgcgcgtacgtacgatttgaggctcataaaatctctctgattctgaataaatttgtactacatgatggataatctgttcaaccaagcgcctatcgagggaagtaggtaacgatcaacgattgctcttca

SEQ ID NO: 127509 - DNA, 861 bp, Zea Mays
gaacctgccgtgcgtggcgtcaaaaaagcactcttggtccaaccaaatacaatacaagcaagcgaccaggagggacaggaaggatcgcagcggaggagatagctagggaagggcaaatctgcagggcctgagagggtgaggtagagcgcgccagccagaatgcaggagcaggcggcgagctcgcggccttccagcagcgagaggtcgtccagctccgggcaccacgtggacatggaggtcaaggaagggatggagagcgacgatgagataaggagagtgccggagctgggcctggagttgccgggagcctccacgtcgggcagggaggctggccctggcgctgcgggcgcagaccgcgcccttgcccagtcgtccacggcgcaggccagcgcgcgccgccgcgtccgcagccacgccgacaaggagcacaagcgcctcaaaaggttactgaggaacagggtgtcagctcaacaggctagagagaggaagaaggcttatttaactgatctggaggtgaaggtgagagatctggagaagaagaactcggagatggaagagaggctctccaccctccagaacgagaaccagatgctccgacagatactgaagaacaccgctgtaaacagaagaggttcaggaagcactgctagtggagagggccacggccaatagcactgaatgacggaaaaatagtaatgaatcatgataaatatatgtttatatggagtggatttggtgagcttgctttgtggccaaaggagggaaccccaaaaactggggtcagacagccaagtgccgacggttcagggaaaaagaacttatggaattaatgcatttgattttaacatggtttacatatca

SEQ ID NO: 127510 - DNA, 1664 bp, Zea Mays
acttctttctcgtcttcctctcctgtctcctcgcagttgcgcagcagggtgctggaagaagtttctggttggaagaatccggttgaggttgccatttcccaacttcttccagcggttcggctcggaggcaaactgagatgtcctgttcgtgatcggtttattcttgcagctgtagacagcttgtcgattcgttgcttgaggagcagccatggacagaagaaaccgaccagctccgttggttgacagctctgcatgcttttgccgagtggacagatcatccgccgcggcggcggcgaggcgaatcccagtgtcgaaggcgtgcgtgcaaccgagcctcagggcgtccatccacccgctgaagccacggccgggcgcagagcggagccgcggaggggcgtgcccgctgctcccaggccttccggacgacctcgccattgcctgtctcatccgggtgcccagagccgaccactggaagctgaggctggtgtgccggaagtggtgccgcctgctcgccggcaactacttctacggcctacgccggcggctcgggctcgcggagcagtggctgtacgccgtgaagcgcgacggcagggacgggcgcgtgtcgtgggacgtgctcgacccgtcgcgcggcgagtggcgcgcgctgccgcccgtgccgggcgagtacgcggaggccgacgggttcggctgcgccgtgctcggcggctgccacctgtacctgctcggcggcagggacccgcgcaggggcagcgccatgcggcgggtggtgttctacagcgcccggagcaaccggtggcaccgcgcgccggacatgctgcgccgccggcagttcttcgacgtgtgcgtcatgggcaaccgcctgtacgtcgcgggcggtgagggtggcggcggcgggctcaggtccgctgaggtgttcgacccggccaagaaccgctggtccttcgtggccgagatggccgcgccgatggcgccgttcgtcagcgcggtgcatggcgggcggtggttcgtgaagggtattggcgcgcagcagcaggtgctaagccaggcatactccccggagtctgactcgtggtccatcgtcctcgacggcatggtcaccggctggcggagcgccagcgcgtgcctcaacggccggctctatgctgcagagtgcatggacggatgccggttgagggcctacgacgaggccgtggacgcgtggagcacctgcgccgacagcaagcagcaccgagggagctcccaggcggctgccattgtcgccctccacggaaggctcttcgtcgtccgcaacgacatgagcgtctcggccgtccaggtggcggccgaggcgggaaagcagaggtggcagaccctcgccggcaaagcgcataccaagagctttgtcacgggcctgttgtccaacctcgctggtcgcagccgcgccaagaacaacatcctccattgccaagttcttgaggtctagctgtcttgctccctgatgagttatgcttataagttactagaatcacgcaatgaaaaagtacgtgagaaatctccatgtctgctcaagagtgctaattaaataagcgagaattacaggcatctgaagaacgcgcgtgatcgttgtataaaactacaaatacagtttatatggtatacagtatacagatttattatgatca

SEQ ID NO: 127511 - DNA, 1427 bp, Zea Mays
cgcagttgcgcagcagggtgctggaagaagtttctggttggaagaatccggttgagctgtagacagcttgtcgattcgttgcttgaggagcagccatggacagaagaaaccgaccagctccgttggttgacagctctgcatgcttttgccgagtggacagatcatccgccgcggcggcggcgaggcgaatcccagtgtcgaaggcgtgcgtgcaaccgagcctcagggcgtccatccacccgctgaagccacggccgggcgcagagcggagccgcggaggggcgtgcccgctgctcccaggccttccggacgacctcgccattgcctgtctcatccgggtgcccagagccgaccactggaagctgaggctggtgtgccggaagtggtgccgcctgctcgccggcaactacttctacggcctacgccggcggctcgggctcgcggagcagtggctgtacgccgtgaagcgcgacggcagggacgggcgcgtgtcgtgggacgtgctcgacccgtcgcgcggcgagtggcgcgcgctgccgcccgtgccgggcgagtacgcggaggccgacgggttcggctgcgccgtgctcggcggctgccacctgtacctgctcggcggcagggacccgcgcaggggcagcgccatgcggcgggtggtgttctacagcgcccggagcaaccggtggcaccgcgcgccggacatgctgcgccgccggcagttcttcgacgtgtgcgtcatgggcaaccgcctgtacgtcgcgggcggtgagggtggcggcggcgggctcaggtccgctgaggtgttcgacccggccaagaaccgctggtccttcgtggccgagatggccgcgccgatggcgccgttcgtcagcgcggtgcatggcgggcggtggttcgtgaagggtattggcgcgcagcagcaggtgctaagccaggcatactccccggagtctgactcgtggtccatcgtcctcgacggcatggtcaccggctggcggagcgccagcgcgtgcctcaacggccggctctatgctgcagagtgcatggacggatgccggttgagggcctacgacgaggccgtggacgcgtggagcacctgcgccgacagcaagcagcaccgagggagctcccaggcggctgccattgtcgccctccacggaaggctcttcgtcgtccgcaacgacatgagcgtctcggccgtccaggtggcggccgaggcgggaaagcagaggtggcagaccctcgccggcaaagcgcataccaagagctttgtcacgggcctgttgtccaacctcgctggtcgcagccgcgccaagaacaacatcctccattgccaagttcttgaggtctagctgtcttgctccctgatgagttatgcttataagttactagaatcacgcaatgaaaaagtacgtgagaaatctcca

SEQ ID NO: 127512 - DNA, 243 bp, Zea Mays
atggcatccaagttctctgcgcagcgatgtcggtccaaaacagcagcctcagatcccctccgcatcgcgtgcttcgctcgatctgcgtagtcccgacccacgccgtcgcgttggtgtttggggacagcccatgtcgtgtcgttgatctgcgcagttcgaccgtctacgcgtctcacttcgccggatctgcgcagccccaacatcgacgtcgttcaccccggtgagacgacgatgatctttgtt

SEQ ID NO: 127513 - DNA, 2080 bp, Zea Mays
gtcaggggttatgttgctatgcttcagaagaaggatccaaaactttgctctcatattttccataaccagccacaatatgatgagcaccatgattcgtccccagttttggtgtcgaagtatcatcgatgggattgctcaagatgtcttgatagtgtggaagtttcaggccataggccaacatcggaaaatgtttctatgcagcagaatggaatgaatgatggctgctctatttcaattgtttggattttgcctaatagtgttgattccagaagactgttttcttgcacacatcaatcatctcaagggaatgatcgattgaccctttcaaagactgcccaagaatgcaattcaaaatgcagttctcctggcaacaaagcaattactgcgatgaatgttccagtagctgaagaaaatgttccagaggcactcgttgatacgagggttccatctatagaagttttacaggcctctcccaatagtattgatttgtcagcaaatatcttgaatgctgtctcgaagaatgtcagcgatctacctgatgatgttgaagaaaatggcacacagaatccacacagtctaaaaccttgtgtggcgccaaatgaagatgagaataacatagctaatgatgacctcaatgagcctaatgtatgtaaaccagtatctgggcacaaaagcaaacaagtctgcaacatgggtccacgccgagcatcgtcaaaaagaaatgttgaatctgatggtaagaggaaaaggaataaatctactaaactgcctggtatttcagatctcaaattttgtcagagaaagccaaaaaagacaaggctgttatcagaactcataggttctgaacaggtaggggtttctggagatgccgttcaagtggaccatactaacagtgttgatctctgtgagggtggtaaaagaaaaatgcaccttgaggttggaaaaggtaatgacactactaatcagcaagtggacaaaatccagtcaagagctgtcaagaacaaggcaaaatacacaggagtagacaagttagaagatggatcctctctaatgaactggctgaaaagcactaataaggaagttagaacaaagaaaaaagactcagaacacaagaatcttgattcctcttctatttcaaggtcttacccagatatagttgcttctaatgatatgcatcatgattttctaccctcagttggggatgtgggccaggcagatgtaccatctactaccagtgccaagcatgggaatggaaatgcacagaatgacaaactggagcaaaatatgcagaagatggatggcttgtgtgaaaatgaatctagaaacttgaaacagaggttcttctcaaatgaaaaatcaacgattttgctaaagagaaaggtactgtccacttccgttgtccatgatgagaacattgagaacagtaatataaagagagatatgctcaggtcagatgatttgcctcaaaaggaacctgaagtctctgtacaaagatatttggcaaaggtttctcttggtaaacaaaagatccagaatgtgtctggcctccacaagaagaatataccaaagaataagaaaggaaagcagaaggtgcacgagaaacaaaatgtgatagacgacttccccatggacattgttgaacttctcgccagaaatcagcacaagagacaattgatgactgacaccaattctttggaaaactgtcatactcaacccaaggtagctcaagttgattgtgctgcatttgcagccaagggttgtcccaccaatgcatcaaatgagttcaacactaatttccaaaaatctttggcatcagaaagtaagcagaagtccttacagtctgtcaaacaacgagagaatcacttctgtgattccagaggaaattttttcatcacaatcgcaatataagaaaatccagtggtgttaaactaaaggctgaaagctaatgtgcataacaaccactgaaatagacaagtcagaatgcatactttttagccaagtcagtgtgcttgtcagcatcaagattggcaatcacaacactgtcgtcctgcttgaaaactgaagccagcttctcataaat

SEQ ID NO: 127514 - DNA, 227 bp, Zea Mays
tattcggcaaccatgactagagaataaattcatttctgatctagtgtctcagatttaaattaaatgcgcaattcaaagacccggcatgatgcacatttatttattatttttctattttaaattattgttgataattaatttaatctcttatatggtggtttatatccatggtatgtaaatacgaaaaacttacgtattcatataagtagagagaatcctttcttttt

SEQ ID NO: 127515 - DNA, 5948 bp, Zea Mays
atggcaccgcttccgccgcgcgagctcctctctgtcatcgaggcggcgctgctgggctccacggcgccatcgccggcgcagcgcgtggagctcctccacgccgtccgcgatgctgcccccgcgttccgcacgttactctcctatccggtgccgaaggcgtcggatcggactcaggtggagagcaaggaagtgcggctaccgggcatgcctcccatcactcttgatgacacagacgtgcggaccgcgcttaagctgagtgatgaactcaatcttaatgagattgagtgtgttcgtttgctagttgatgctaacagagagtgggttctctatgggcgagagccattggaaatatatagactcgcagctggcctttggtacatggagagaagggatcttataaccgctctgtacattctgttgcgatctgttgcacttgaccaaggtcttgatgccgatctgatgtctgaaatcgaggatcaaatccaacctttattcaatgatggtctccgacaacggataattactcttgtaaaggagctgaacagggaagaaccagctggaattggcagtccaagctctgagcgttatgtgcttgatttcagaggggctcttgtggaaagaagggcaattgtctcgagagagagattaagtttgagccactgccttgccctttctgcacttattaaactaacgagccccaaagaggttaaggatgtattttcaatattgaaagactgtgcagctgaagcaaatcaaaatagcagtgtggagctccagatcacctatggacttctgttctttcttgtagcaacttttatttctgatgccctaagtacttctcttgagaaagcatcattgtcatcgtctgattcctcatttagacgtgaatttcatgaacttgtgatgaggacaggtaacaatatgactattgaagggtttgttggtgttgtgcggcttgcatggtctgttcatttgatgctaactcaagatcgaagtaattcaagagaaacgtcagatatttggtcatgcctggaaattatctgtcgtcaaaattcttttgagtttttgcgggagcaagttttgaaaacagctgcataccagaatgatgatgaggacattgtctacatgtacactggctacactcacaagctaatgatgtgctttatttcccacccaacttccagagataagataaaggaaatcaaggagaaagcaatgactgccctcagtccatatgagccaccacgaggtcaacgagaagatcttggtagaaatggggaacaagctgatcagcctactaaggagccttttgtatccctgctggaactggttagagaaatctatcagaaagtgcctgagctagggaatggaaatgaggaattgtggacttttgttatatatgcaggagaagaccacacaaacacacaaactcttgtggcctttcttggacttcttagtactttggcttccactgaagttggtgctgccaaagtctatgagctgctccagggaaaaacttaccgttcagttggttggagcactttgtttgattgcttatctatctatgaggagaagttcaaaaaatcaattcaatcttctgcaaacatactgcctgattttcctgagggggatgcacaagcgcttgttgcatatttagctgttcttcagaaggtggtggaaaatgggaatcttacggaacgcaggaagtggttccctgacattgaacctttattcaagcttctcagctatgaaaatgtgcctccatacttgaagggggctttgcgaaattcaataactgcatttataaaagtgtcacccatactaaaggatgcaatttggaattatcttgagcaatatgatcttccggtggttacagctccattaggtcaccatacagcaacacaggtctatgatatgaggtttgagttgaatgaagtagaagcgagaagggagagttacccctcgaccatatctttcctcaaattgatcaatgcacttattgtggaagaaagaaacataagtgacaaaggccggaggttcatgggtatctttaagtttgtttatgaggatgtctttggtccttttcctcaaagagcttatgctgaccccctggaaaaatgggagcttgctcttgcttgcttggagcattttcgcatggttttgagcatgtatgatataaaggatgatgatatttatgcttctgtgaacacattagctccttcctctcttgagagacaactccctctgctagaactactcaaagatttcatgagtgggaaagttgctttccggaatattatgaacatcatattagtgggtgttgactctattatcaatgagcgaactacccaaacatacggtatcattttggagagaactgtccttctatctcttgaaatatttattcttgtcatggagagagatcttgctcttgctgatgtttttcggccgctctaccagccattggatgttatattggctcaaagtcatagacagattgtagcattgctagagtttgtacgatatgattatcttccccaaattcaacagtgttctatcaaaattatgggcatcctaagttctagaatagttggtttggtacagttgcttttgaaagctgatgttggaaaaatggtaatagaagattatgctgcttgcttggagttccggtttgatgattttcaggtcatagaagacacgaaagatgatgttggggttctaacactgcagttgcttgttgacaatatttgtcgtccagctccaaacattacacatttgctcttgggattcgatgtcaatgggtccattgagcaaacagttctaaaaccaaaatctcaatacagttgtttgaagataatcttggacaatcttgaaaaagcgacaaagccggatataaattccttactgcacgaattcagttttcagcttctctatgagttatgtcttgatcctttaacttgcggacctgttatggatctcttgagtacaaagaagtaccagttcttttctaagttggaactcatattttccttgcccactaatgtcagcatgttggaaccattggagtgacaccgcttccaaaaaggaacagtaaccaatctcttcgaatcagcatgctccatgagagggcatggttgctaaagatgttagcactggcattacatatatccgatatatcatcatctgtatacagggaagcctgcatggctattctttatcatacttttggtcagtgtgctgagaacttccagagcacaagcttgatccattcacatgatgctttgactagcattagcgatgtaccagcaaagaggaacaaggttttggacttgcttgaggttctacagtttagatgtccggatacttcaacgaagtatccacagctgctttccagcttgggaatcgaatcgaagattgaagagatcctaaggaactctgccactttcgaaaatggtggtgtatattattattcagagagaggtgaccgactgattgatcttgatgctttccgtgaaaaacttctccagatttcacaagaattgaactcacaattaaccgagcctgagaaagctggactaaaagaatcagttcatcatttgctcaaatgggcgtggcgatataacaaaaatcttgaagagcaggctgcccaacttcacatgttgactggctggtcacagattgttgaggttgctgtatcaagaaggatgtcattattcgaggactgttctcagctattgtttgaactgcttgatgcttcgttgaatgccacaacatctccagattgttcagtgaaaatggcatatgttttaactaatgtatcgttgacctgtatggcgaaactgcgggatgaaagattcatatgcccagctggtacagattctgatgcggttacttgccttgacattatttcgtcaaagcagctaccaaatgcagcttgtaactcattgttattcaagcttgtgatggcaacattaagaaatgaatcatctgaaatcttgagaagacggcaatatgcattattactgagttattttcagtattgtagcagcattctggactctgatgtccctccatctgttcttcggttcttgctactggaggagcaagatggtgatgatgaggacatcactcttcaaaaggttctcaaggagcacaatgaattagcacatgccaacttttccatcataaggaaggaagctcaagctatcgttgatttggttactaaggatgctttccatggtagtgaagctgggaaagcactttccttttatgttcttgatgcattaattagtattgaccatgaaaagtattttctaaatcaacttcaaagtcgagggatccttagatcatgcctgagtgatgttgcaaactatttgtcaaagggccagtgtttgaatccacaggcacagaggcgggagcagagcctgcgctctccatcattgacctacaaagttttggtactgggcttcactctggtttttggcccatctacagtagcccgccccttcaaaaaccctcccagccaccaggacccctcccagccgccagaaacccgccagaacccttcccagccgccagaaaccctactcctctcctctgtcctctctggtttctgccgacgtctctgctccagcctccaagtgctccagccagcagagaggcagagagcagatcagccgagggggagggggagctcgccgcggaagggggagggggtggagcctcaccagggagcaggggaaggggacttcaccagggagggagaggtcgcgggctcacggtatggggccgccgccgttggtgaactgagagctgccgtcacctggacctcacgtgaagccctaaccgcgtccttctctggaatcacatcaccgttgttaccttgtttggtgaagaacaagattgtacgagagatagtggacttcgcaaagcagcatcagtcagtttttaatagcattttaagggagaacatgactggaactaatttgctcacgttggagcagcttagcatggcggtttctattctcagcaaggtttgggcgtatgaggaaaatgaggaatgcagctacattcaagatctattttccttgatgcattctctttttagcgttgactttgggattctaaattttatgcaatcaccaaacatgattgagaatcagaagtcagaattgatagcatttggtctttgcttcagccttgtctcttacctttatgttctcgctacaaggaaaaacatgcgatttcaagtttcatatggccgtaacagtgatcagcagcacccaacactacaaatggtttctgatcttctgaattcagcaacacttgccctagaaagagttggtgaagaaaaatatatgcttttaaacaagatccgtgacttaaatgagttgtccagaaaggaggttgatgagataataaaagtgtgcatgaagcaagattgcatatctcctaacgataacatccgtaaaaggaggtacattgcaatgatagatttgtgttgcatggctggcaaccgagaccaactcattacccttctactccaaataacggaatgtgccgttactattctcctcattcattttcaggacgatgcttctgcaaaaggtctttcttcattttctgatgaactccttcctgtgctggagagactagagcatttgaaagaggacaaagttggacgtagtctgaagttgttccacagatccattactacactaaaggagatgaccatcagaaccataaccatctgaaggccgcagcctgtacaatgtacatgtttattaggatagtacacctcgctagatttgcagatgtaaaacattgttgtgtaagctctcatatatatatatacacacttttgccctgaggcaatgagctgtatgtcatgttttaagagtaaaatgtgatttttgaggggtttccatctaggaacattaacatttaaa

SEQ ID NO: 127516 - DNA, 2611 bp, Zea Mays
agttagttcatcggttctttgtaggttcgcgcgctcacgagtcacgtctagggtttggcggccaagggtcgtgacactacctttctgcctgcttgaagtggagtcgttgattggccttcatctagctcccgccagcgccctacgcgggaaatcgcagccgacaggcaaacgcctcgggaatcagctgtgccccgcgcctcgtgggccaccaggagctgttgctgcccccggtgtctccgccctcaacttccaaaccctaggggcggtagaggctccaaactcgggcgctttggccgtgaccgtccgaggtgggcgtcattgcgagttggtgacccacgggttgcggttgactagtgccttttcttttcttcctggactgaatggagcaaggggagaaccaatcagctgatagttttgttgtttcatcatcggataataatgagctggaagatttacctgtgaaggaaagatgctttgagcagagagaagctcttcctggggagcctcgctgtgttgtgtgtggccgatatggtgaatatatatgtgatcagactgatgatgacatctgcagtgtggaatgtaagacaatccttctttctcggatagttgctaaaacaaagccagcagtaaaagcagcaaagcgtgtgaaccttcctttaggcgatgagagcttttgtattaaggacatcaattttccaaatatacttactttagctgacagccggatcagttcactgaggagtaaacttgacatttgtgtcaagggtgatgctgttcctgatccaatcatgtgtttctctgcctgtggtcttcctgagaagcttgtgcacaatctcgagactgcgggatattgcatgcctactccagtgcagatgcaagtcatccctgcatcaatgagtaatagaagtttacttgtttctgctgatactggttcagggaaaactgcatcttttctaattcccataattgctcattgttcacgattaagatcacaagaatgcacaggcaatcaaggaccgttggctatagttcttgctccaacaagagagctatgcctgcaggtagaagagcaagcaaaggtgcttggtaaaggtttgcctttcaaaactgctctaattgtcggcggagatccattgcctcaacaaatttacagaattgaaaatggtgttgagttaattgttggcacccctgggaggctaattgatcttctcatgaaacacaatgttgaccttacctatgtttctgtattcgttttggatgaggtggactgcctgctggagaggggattcagggatcaggccatgcagatttttcagtcactttcacacccacaggttatgatgttttcagcaacaatacattcagaagttgagaagatgtctaactcactggctaataatgtgataagtatctcttgtgggaacccaaacagaccaaacaaattagttaaacaagtagtcatttgggtggagtctaagaagaagaagcagaagatttttgagataatgaaaagcaagcaacattttaaacctcctgctgttgtgtttgtgagttccagggttggagctgatctgttgtctgaagcaattactgttgctactggattagaggttgtttctatccatggtgagaaaacgatgattgagagaagagagaatttgcgaaggtttttaacaggagaagtatctgtcgttgtttctactggcgtcctggggcgtggaatggatcttctgaaagtacgtcaagtgatattgtttgatttaccaaattccattgatgaatatattcaccaagttggaagggcatcccggatgggtgaggagggtatggctgttgtgtttgtgaatgaggaggatagaaggattttcaaagagcttgttcaggttctgaagactgcaggagcaccgataccccgtgaaattgcaaattcaagatacacagctggtgtttatgttggtagcgagaggaagagaaagttgagctctaggtctcgttcttgaccaacatgtgtgaaagagttgctctatctttcttgaaatgaaatatgatgtttttgcatgtttttctgagactgtcttgtcaattcgtttgaagatctgtctatttagtatctacctaaaggataatttggttatctctagagttcatactattcctgaatttcaatcatgcacagacccaacaggggcaaacagtccatgattatttctcaatgtgtgatgtctgagatcaatacattggaaaaacataaacaagattcattgcttgtaaattttaacaaaatgtaagtcaaatgcatatgatacaagtgacttttcctgtgctcattttcagctacagtattttactattttttatgtttgtctctagtttctttatcagtaaatgaacatgcagtttgattgaaaattgattagctttattatatcttgtaggctactagagtattgtttcacctcctgagttatttcattcagttatgttggtgaagtgagatttgaatctgaatagtgcttcattactgaaaactgaacggatcattgtgattttggttgaatgttaccatgtacaattccatagcagtgagggtgtatgctgatcttaataaaca

SEQ ID NO: 127517 - DNA, 2573 bp, Zea Mays
agttagttcatcggttctttgtaggttcgcgcgctcacgagtcacgtctagggtttggcggccaagggtcgtgacactacctttctgcctgcttgaagtggagtcgttgattggccttcatctagctcccgccagcgccctacgcgggaaatcgcagccgacaggcaaacgcctcgggaatcagctgtgccccgcgcctcgtgggccaccaggagctgttgctgcccccggtgtctccgccctcaacttccaaaccctaggggcggtagaggctccaaactcgggcgctttggccgtgaccgtccgagttgactagtgccttttcttttcttcctggactgaatggagcaaggggagaaccaatcagctgatagttttgttgtttcatcatcggataataatgagctggaagatttacctgtgaaggaaagatgctttgagcagagagaagctcttcctggggagcctcgctgtgttgtgtgtggccgatatggtgaatatatatgtgatcagactgatgatgacatctgcagtgtggaatgtaagacaatccttctttctcggatagttgctaaaacaaagccagcagtaaaagcagcaaagcgtgtgaaccttcctttaggcgatgagagcttttgtattaaggacatcaattttccaaatatacttactttagctgacagccggatcagttcactgaggagtaaacttgacatttgtgtcaagggtgatgctgttcctgatccaatcatgtgtttctctgcctgtggtcttcctgagaagcttgtgcacaatctcgagactgcgggatattgcatgcctactccagtgcagatgcaagtcatccctgcatcaatgagtaatagaagtttacttgtttctgctgatactggttcagggaaaactgcatcttttctaattcccataattgctcattgttcacgattaagatcacaagaatgcacaggcaatcaaggaccgttggctatagttcttgctccaacaagagagctatgcctgcaggtagaagagcaagcaaaggtgcttggtaaaggtttgcctttcaaaactgctctaattgtcggcggagatccattgcctcaacaaatttacagaattgaaaatggtgttgagttaattgttggcacccctgggaggctaattgatcttctcatgaaacacaatgttgaccttacctatgtttctgtattcgttttggatgaggtggactgcctgctggagaggggattcagggatcaggccatgcagatttttcagtcactttcacacccacaggttatgatgttttcagcaacaatacattcagaagttgagaagatgtctaactcactggctaataatgtgataagtatctcttgtgggaacccaaacagaccaaacaaattagttaaacaagtagtcatttgggtggagtctaagaagaagaagcagaagatttttgagataatgaaaagcaagcaacattttaaacctcctgctgttgtgtttgtgagttccagggttggagctgatctgttgtctgaagcaattactgttgctactggattagaggttgtttctatccatggtgagaaaacgatgattgagagaagagagaatttgcgaaggtttttaacaggagaagtatctgtcgttgtttctactggcgtcctggggcgtggaatggatcttctgaaagtacgtcaagtgatattgtttgatttaccaaattccattgatgaatatattcaccaagttggaagggcatcccggatgggtgaggagggtatggctgttgtgtttgtgaatgaggaggatagaaggattttcaaagagcttgttcaggttctgaagactgcaggagcaccgataccccgtgaaattgcaaattcaagatacacagctggtgtttatgttggtagcgagaggaagagaaagttgagctctaggtctcgttcttgaccaacatgtgtgaaagagttgctctatctttcttgaaatgaaatatgatgtttttgcatgtttttctgagactgtcttgtcaattcgtttgaagatctgtctatttagtatctacctaaaggataatttggttatctctagagttcatactattcctgaatttcaatcatgcacagacccaacaggggcaaacagtccatgattatttctcaatgtgtgatgtctgagatcaatacattggaaaaacataaacaagattcattgcttgtaaattttaacaaaatgtaagtcaaatgcatatgatacaagtgacttttcctgtgctcattttcagctacagtattttactattttttatgtttgtctctagtttctttatcagtaaatgaacatgcagtttgattgaaaattgattagctttattatatcttgtaggctactagagtattgtttcacctcctgagttatttcattcagttatgttggtgaagtgagatttgaatctgaatagtgcttcattactgaaaactgaacggatcattgtgattttggttgaatgttaccatgtacaattccatagcagtgagggtgtatgctgatcttaataaaca

SEQ ID NO: 127518 - DNA, 1889 bp, Zea Mays
tgagcagtaacacaatcataatctatttatttcttttataagcaattatatcactgacattgatgtgtaacaaagtatcttgataggaacatgtgtatgtagagcttttcacgtacatagaactgcacacaattgcaaactttatagttcttgtaagttggatttagtaatagacatatatctatattactgaagcaacctgaactgcttgtgtaccaaccgacctagcgaaactctgatctgggatggtgacttgtgctgtttgatccatgcttttcagatgatgaagcgaccttggtcatctccgtttgagggtgaagctgggctgctgctgctcagcaactcttcgatcatttgcagtgcgatcctctcctcctcatccatcggcgtggctggtggagcagttgttgctgatgtggactgtgatgcagcatcagtggatgctgcatctttgttgagctccactgtcatgacccagttggagtcagcacgggctcctgcacgcttctgccaaacaccaatgtgggacttctcagggtcaaggcggagacaggtcagggacggtgatggcgccttgcagcatttgcggagcttcgcactgagaatctgggacaggttggtggtagaggagccgctgctgaagttgctgcgggcgtcccttcccgcagctggggtaggctcccctgtgctgcttctttggattgggaagttggtcttggcgttgcgtccgctcatcagcacagcagcctcatcatatgctctcgctgcctcctcagccgtctcaaagagctactggggccaatcatattgttgagtatcactggaagcgtggacactgcggcaaagcatataggtaagacttgtgctgaaacttagggtgttggaatatttactgcatatttttgagataacgtcaaaattcttttgcttcatttggaatctctagtcgtgttccgtcacccaattttttctctataaatatgtaatgggatgttgaaatttacagtgaattgttcttgaactgaatatagattgtgtgtttagagtgatttcagtgcgacctgtgtatgagaattgacaagggtgcctttgtcctggggtgttagttctggaattgcttggagatggttggcatttaagcttgtctgaggtagctgcaggtacagactggtgatgatgatggtgtgtgctcagttgatggatacttgttcaatgaagaaatataaaagttttttttttctgtcacttataatatgggagtagactgaactgttgttcagtggagaatttgatagtatgtttacattttggcttcgctatattctcacaatagaaatcaggttgcaaaatggttatgaagttaggctataataatctgtctacacgtaacttcatttcttctccattgaacatctcgtgtgcttcggtttgtagaaaatttcatttcatttcacttgaacttggctttctttcgttaacctctgaaactatccacaagacggtagctctaaaggtttatggtagtctgcttcagcaataagcttactcttgtcttaggatgacaaatgtttatagtaagatcagatccttcgctgtatccaaacattctaataattttgggttctttgaaagggagctggagtctttgctgaaaatgtttggttgcagattacgactttgcacacttaaatgttgtgttccctctcccacaactttcccgtttgggtgctttccagaaaaaaaaactgttgccattttgtttggaagtatcagtttgcacgcattgtttggatgtgaagtatcttaatggttttgactggggtttttcagcaagtcacaccttggaatatctttcacagccgtgcttttttagaaagggagaaaaagaa

SEQ ID NO: 127519 - DNA, 77 bp, Zea Mays
agaacacatggttatcaacaacttgggagagtgcttactaataaatagcaattacataattggacatcatcacacat

SEQ ID NO: 127520 - DNA, 108 bp, Zea Mays
atcttggcacgtacatggttcacattcggtttgccttctaaaatcgggtgtgacactgacttccttgagaaggccggaaccatagccgctcttgtcttccttgttgtg

SEQ ID NO: 127521 - DNA, 1556 bp, Zea Mays
cctaaatgatttgcataatgcacatgaatgcatagcactgacttcattccacaactaaaattcctcgcataaaaatgccgatagcgcctaccggcaaagcactaaaattactaagcaaataaatttagcttaccagcatcaaacgcgacccaaatctcgtacgaatgctgataaatcctggcttgagctttttgtcgcgcacttggtgaatatcacgttgctggctccgtcttcacttgactcttggaatttcttgatgacgcacagatcgacgacgaccttcaattaaagtctggagcgaactggtgaggtggggatcgagccggagatgacagcttcgacgacgatataggagggtggcatatatagagcggcacacacgacacgacgaactaagttgcaagatcggccgacgagggatttcaaggaacacgacggtcagtcggcgagctggcaagtttggatagggacggctgacgtgaggaccatgaaaaacatgaaatcgatgactgaccaagatacgattggtgagttgagcgactccgatgatttgacggccacagacgcagccgggataactaaaaatactacaacagctaaaaatcaactcgaagacgacgaccgacgacaaagaaaacaggggcgcgcgagctggtgacgagaaagagacaccgggcccaggcggcgcacgacggtttggggtcagactcggcgagctggagatgcacgatgcgaaggaactctgcaagcagagcgcgacgtaggagcacacgcagccccaaacgagctgggcaccagcgcgcgcaggaaaaaacagaggcgctagagctgccgaacgatgacgaggttacgaccgagctccaaagagcagtatgcgtggcgcgcagcaaccatggcgaacaggttgagcgcgtgcgcacggagcagacgcggctgcgcgcgacggggaagaaacagcttcgctgctgcgacagaggaagcaagcacgtacgcgcaggggaagtagggacgcgcggccgaggaaactctctgtcgtgccgagaagaacaaggagcagggagcagcgagggcacgacgagctgcagctgggctgggcgactgggtttcgagcgccagggagaaacagccgggcgcgacgcaagaatccgagctagggccgagctccatggccggcagagggactggaagggcgcggcaaggagctggggccaagcagccgccatggatgcagggacgcaatccggcgagctccatggcggtgggatagatgggaagcagtgcagccggcgaccctccatgggcggcgtccacggagaggggcggcaggggaagggcaggcactaggaaggccatggctgggaagggagatggagactgggcagagagacaaccacggacgaaagcggcacaggaaagcgagagtctagcgactgggcaccggagtagaggcgagctcgagctaggagatgcaggagcgagcgatgctgagcagataggaacaaaggctgagcgtgggctgattccacgtacggtgaaggaaaatatcgagcgtgggc

SEQ ID NO: 127522 - DNA, 297 bp, Zea Mays
atgaagaaggctcaccagaagcgggaggtgcacacgagcacgacccaattgttgttgtgcatcgtgccggtggacgaggatgctgccgcgggtgcggaggaagagaggaaggcgaggagtagcgacgtgacgatggtgagcgcgggagggtcctgcgacccggggctccgtccgccgaccgccatgatgacgccgacgaagcggggctgcagaatggggaagctgctggtcgtcgattaaggaggcagaggcgcggaactcgccgaggccggcggcaaccgacaagaggtgaaactc

SEQ ID NO: 127523 - DNA, 86 bp, Zea Mays
gcaggatcccaggagcagggtggctgtcactgtgaatcgcgcttcgtcgtgcgcacctttgtatgcgctaatgcgcaatggtgggc

SEQ ID NO: 127524 - DNA, 1056 bp, Zea Mays
cccccccgcactcgcatccaccacagttccgcaccgcgccgtgccgtcccgagagaacaagcgagtcagtcgtcaaagagaaggaaagcggaaggcgagccacccgccccgcccaccacctaccgcgaaggcttgaccgtggcaacatcatccatgtcctcgtcgtcgtcgtcgtcgtcgtcgtcgatgggaggctccctcgcgctcgccgcggccacggccgtcgcgttctccggctctctcgtcatcttctcgctctgccgcgcgcacctctcccatgtccccgagccggagccggagccggagccggaggagggcgcgccggagcacgccctgcgcccctgtctcttgtcgtcagagaggcggccgcgcggggcgaaggcgaaggcgaaggcgaggagacgcaggggcgagaagcgcgtgcggttcgcgcccgacgtcgtcgacaatgagggcgccccgcgcccgaccaggtcctccgcgcccgccaccgccgctgcgtcgtcgtcgtcggcggccacctgcagggacgcggcggggtcggaggagcgtatgatgcctgccaaccgtgaggcgctctaccgcggcatgctccgggaccgctccgcgcaccgggtcacctgctcctactgacgaccctcaccgccgcccggccgcggccagcctccgcgcgccgtttcgtccgcggcgggagagctcgatcggttgattctctttgtttcgttcgccgttaggcgttagcgttcggtagccgggcggttgacttcgggaggttcatcctttcgcagacggaggattttgttaatattagaattttagtattttttcttttttttgtatatttgtgtttggctgtagattaattaatgtttttcgtttgagcgagggaggaagttctgctctgtaaatatgccgccattttatccgaagaggaaaaggtaaaaaaatcaaactcgctgcttcagcacgagactcttgcacgaatacactaaaacgcaaccccattcacacaaaattctacaaaccgggcggtaaattcgtgctatgagaaggaat

SEQ ID NO: 127525 - DNA, 833 bp, Zea Mays
agctctgctctacctattttcatctcgccccaccgttctatgcgcctcagatcccagcctccacggggactggggccaccgtgacagcaacggtgtccagcctttcccaaccacgccttcgagcgcaccgggctcacagtcacaccgccgcgccctgcgactgctccgccgggagagccaactcttacgcctgctccgctcgctcggcgctcaagaccgtcgccggcgtggtcagcctcgggcagcagctgcaggaggtccgtatctagcggcagctcgcctcgtcgtccgggaccaagagtccaagacagaagcacactgaacgctcgcggccgcgacggtgtggaatctggaatgtcacaatgtggagagacggtagtcatctccgggcacatcgctcaagcaaaatgccatcagctccactataccaaccaatttcagatttgaataacagtgttggatcaaatatgatgcacccaaaatcaagtgaggaagaggaagagatgggagaacgaaacgcagcagtcccattcaagaatttaatccaagatcaatcacttctacaagtgcatacaatggcaagacttgaggcgtttaaatgttgaatggagaaaggacatagagtttgtatcataaccatcaggggacgattttggaaaattgagccattgtagtaatataatagtcttgctagagaatcatatgtataattgtctctgagagaaaaaaaactcagggcttgttcggttatttccgtttcatgtggattggagggtattgggtgggattgagatgaattttgatttattatggatctaaaccgacttagggct

SEQ ID NO: 127526 - DNA, 2377 bp, Zea Mays
tgcatgttcaagagcaagtaaaatatatactagtgtgcaagtgtttagcacgatgttgtcggagccgccgccgcagcagccacgggcgaggtcgttcgcggcggcggacgtggaggagcagagcgaggacgagaagcgttgggtgggctgggtggagaagagcctgaggcatgagacggcggaggcgctgggcgcggcggccaaggtgttcagcgtcccgcgctccctccgcgacacgaacccggacgcgtacgcgccgcacgtcttctcgctgggcccgtaccaccaggcccgccccgagctcatggacatgcagcgcttcaagctcgccggcgccaagcgcttcgagatgctcctcaccggtggccacaccatcgagcatatcaaggaccgcttcctcgtcggcggcctcgagctcaagatacgggccatataccacaggttcctggacctcaacgacacgactctggtatggatgatggccatcgacgcctgcttcttgctcgacttcatcgagaactaccaccgccgtgaggccacggacgtggtgtcctcgtcggccaactggatcaacgccgtcgtacgcgacgccatgatgctggagaaccagatcccgctcttcgtcttcgccaggacgctcgagctccgccacagcactcgtcacgaggccgccaaggcgctgcacgccgtcgtcttacgcttcatcatggacgtgtgccccttcaaggataagcgcggcgaggtggccatcggcgacctggccaagcatgcgcacctgctggaggtcctgtaccacttcctcgtcccggacgccactctcttggacgacagtaccaccggtggtggtggtgaccagggggtgatggtggaggaggaaatacccgctacggcggcggccgacggcgaggaggtggacgacgatgtcgaggcgcagcaggcgatgaagcctccgctcgaggaggaggactgcgagaaggtgaagcaggccctgtcgcaggcctccaggctcaacgtggcgccgctgcggttcattaagaagaacctcatcgcccgcccgatggccctggtggggaagatcgcgcacaaggtgccggcgctggccgcgctggtgccggtgctcagcaagctgatgcagtccgtgaacgtggaggcccagctcaacggcggcgcggagcaggcgccggaggacggggccatcacggcgccgcgtgcggacgagatccgcatcccgtcggtggaggagctggcccggtgcggcgtgcggttcacgccggcgccggagggcatcgaggggatcgccttcgaccgggcgtcggccacgctgcggctccccgtaatcacactggacgccaacacggaggtggtcctgcgcaacctggtggcctacgaggccgtggccgtgcgcggcccgctggtgctggcgcgctacacggagctgatgaacggcatcattgacacgtccaaggacgtgaagatcctacggcggagcggcgtgcttgtcaaccacatgaagagcaacaaggaggcggcgggcatgtggaacgggatggcccgggcgacgcggctcaccaaggtgcccaggctggacgccgtcatctcggcggtgaacgcgcaccggagcaggagcgcggcggcgcgggtgaggaagctgttcaggaagtacgtgttcaggtcgtggaagatgctgacgctgctcgcctccatcgggctgctgctcatgacagcgctgcagacattctgctccgcctatccgtgtgagaaccactggttcagcggcatggtgctgccggggacgacggacgacccagcgcagtagcaaaatccacccgaactccaacggatacgaacaataacttaattaaactattaaaattcataaaaatattaaaaatagatatactttattaattactattataatatattttaaaatttaagttctaattcactctatattaaaagatctaaaagataaaattttattgacagaattttatcttttttatatcttttattattaaatgaattagaacttaaattctaaaatatatttatatagtaaataatgaagtatgtttatagtttttttaaaaaaaatggtatttgctagtttgattatgagatgattacgtataaaatttgattgcacatgcagatttgctcagcgtcatgtggtcaaacgtggctttgtttgtggttcagccattacgcgaccgggcctgactcatgctcgtgcgtgtgtggttatatactatactcgtgtaaacagcttgttcctttttttcttcgtgcggtcttaaccagtctggccttagccttcacaaccgatattgtatttggcatataccagtttaatccagaatttgatgatcactaa

SEQ ID NO: 127527 - DNA, 598 bp, Zea Mays
acatatagataaacacccaactcctgtgagggcggtgtcatgaacctctccctcgcccttgatctcgcccttgtgacggcgatctctcccgcccccgctccctccatgccctccaccaccgtcaccgccgccaggtcgtctctcatccctgaaaaattgtgggaggaagatgcagagaatggagctaggtcgttcgatgctcaatcaatttctcggcaggcgacttcaattcctgggaatctgtggaagcaaaatcgaagcatgccaaaaacacttgaaaagtaccaaaaatgcagttttgcagggcctgaaacagcactccagaatagagagaatgagcaactgaaaagtagccgcaatgagtacctcaaactgaaggcacgtgttgataatttacagtggactcaaaggaacttgcttggtgaagatctcgagtgattaggcataaaagagctggagcacctggagaagcagctcgattcgtccttgaagcacataagatctacaaggacacaacacatggttgatcaactgacagaacttcagaaaaaagaacaaatgttttgtgaagcaaataagtgtcttcgaagaagagtaa

SEQ ID NO: 127528 - DNA, 1243 bp, Zea Mays
gctgcattttttttccatccagccgtgcggccgcaatgattcctccccgtctccccctcgccctccgaaagcgaagtgagcttctgcagataaggaaggaggccgacattatcgcaacacgccacctcatctaatcgaggcgagagacaggggaggaggaggaaaacggaagaaatcttcatcaagcaacaggaagcgagagcgtgcgatttcttttttcttcctttccggtgacgccaggtgaatcaccagccggccggtgcgccaaaggctagggttccgcggggcgcgggtgcgggctcgactttcgtagcctcgccgccggcgcgcgggaaccggatgctgctaagctgcgggtcgctctcctcctgggtgcgccgcttcgtcgcctgcgttggagcagtggttgttttggttgtgcccagcctactccgataatagctgttgatgagcccacaaaaggtttaagaattcaagggcgctcagtaaaaagacacaatttatctgacgacttttggagttcaagcccgcacgaaatggagaacagtgccttgcaatcccgacacagtatgtcctcaatcagcactgctgcacaacctaatgatcagcatgcttctggaagtagcagctccccaaatgaatttgtaaatcaaggtcttctactatggcaccagactagacagcagtggattggaaaacgaagacataattctcagggtcaacaaagtcaaggaccaaaaataagttgtaatgctacatacgagagcctgctcgggagctcgaaaccatttccacaaccgatccctcttggtgaaatggtgggtttcctcgtgatcagctgggagcaggaaggcctatacgattagagttggttattggaagtgtgctgtttcaagtcatgaatcgctgaaatgtacgcaacttctaggctgcgaaagcttgtgacctcatggatgtggactgtctcggagacaggatgacatccctcttatgcaaatgtaaaatattctttgttattttattactagtaattgtgtttacagcgttcagtgtaggagttcattgttttatactgagtacagttctctcacgttagctcgcgtaaaagaaatcagaacgtctgcagggatgccagggaactagatactgggagctgccttgagcctgatggccaaaatcgggtccagtccagccgatgtttttagctgtcatatgacttgagcaagcattttaccttactttt

SEQ ID NO: 127529 - DNA, 1356 bp, Zea Mays
gctgcattttttttccatccagccgtgcggccgcaatgattcctccccgtctccccctcgccctccgaaagcgaagtgagcttctgcagataaggaaggaggccgacattatcgcaacacgccacctcatctaatcgaggcgagagacaggggaggaggaggaaaacggaagaaatcttcatcaagcaacaggaagcgagagcgtgcgatttcttttttcttcctttccggtgacgccaggtgaatcaccagccggccggtgcgccaaaggctagggttccgcggggcgcgggtgcgggctcgactttcgtagcctcgccgccggcgcgcgggaaccggatgctgctaagctgcgggtcgctctcctcctgggtgcgccgcttcgtcgcctgcgttggtggttgttttggttgtgcccagcctactccgataatagctgttgatgagcccacaaaaggtttaagaattcaagggcgctcagtaaaaagacacaatttatctgacgacttttggagttcaagcccgcacgaaatggagaacagtgccttgcaatcccgacacagtatgtcctcaatcagcactgctgcacaacctaatgatcagcatgcttctggaagtagcagctccccaaatgaatttgtaaatcaaggaaataatatattatgacagagagtctctcacgtataggccaactcctgaaattggtcacacacatggccagatgtaaactatttgttcttatggctcccgaattccaaccctatagggtcttctactatggcaccagactagacagcagtggattggaaaacgaagacataattctcagggtcaacaaagtcaaggaccaaaaataagttgtaatgctacatacgagagcctgctcgggagctcgaaaccatttccacaaccgatccctcttggtgaaatggtgggtttcctcgtgatcagctgggagcaggaaggcctatacgattagagttggttattggaagtgtgctgtttcaagtcatgaatcgctgaaatgtacgcaacttctaggctgcgaaagcttgtgacctcatggatgtggactgtctcggagacaggatgacatccctcttatgcaaatgtaaaatattctttgttattttattactagtaattgtgtttacagcgttcagtgtaggagttcattgttttatactgagtacagttctctcacgttagctcgcgtaaaagaaatcagaacgtctgcagggatgccagggaactagatactgggagctgccttgagcctgatggccaaaatcgggtccagtccagccgatgtttttagctgtcatatgacttgagcaagcattttaccttactttt

SEQ ID NO: 127530 - DNA, 1238 bp, Zea Mays
gctgcattttttttccatccagccgtgcggccgcaatgattcctccccgtctccccctcgccctccgaaagcgaagtgagcttctgcagataaggaaggaggccgacattatcgcaacacgccacctcatctaatcgaggcgagagacaggggaggaggaggaaaacggaagaaatcttcatcaagcaacaggaagcgagagcgtgcgatttcttttttcttcctttccggtgacgccaggtgaatcaccagccggccggtgcgccaaaggctagggttccgcggggcgcgggtgcgggctcgactttcgtagcctcgccgccggcgcgcgggaaccggatgctgctaagctgcgggtcgctctcctcctgggtgcgccgcttcgtcgcctgcgttggtggttgttttggttgtgcccagcctactccgataatagctgttgatgagcccacaaaaggtttaagaattcaagggcgctcagtaaaaagacacaatttatctgacgacttttggagttcaagcccgcacgaaatggagaacagtgccttgcaatcccgacacagtatgtcctcaatcagcactgctgcacaacctaatgatcagcatgcttctggaagtagcagctccccaaatgaatttgtaaatcaaggtcttctactatggcaccagactagacagcagtggattggaaaacgaagacataattctcagggtcaacaaagtcaaggaccaaaaataagttgtaatgctacatacgagagcctgctcgggagctcgaaaccatttccacaaccgatccctcttggtgaaatggtgggtttcctcgtgatcagctgggagcaggaaggcctatacgattagagttggttattggaagtgtgctgtttcaagtcatgaatcgctgaaatgtacgcaacttctaggctgcgaaagcttgtgacctcatggatgtggactgtctcggagacaggatgacatccctcttatgcaaatgtaaaatattctttgttattttattactagtaattgtgtttacagcgttcagtgtaggagttcattgttttatactgagtacagttctctcacgttagctcgcgtaaaagaaatcagaacgtctgcagggatgccagggaactagatactgggagctgccttgagcctgatggccaaaatcgggtccagtccagccgatgtttttagctgtcatatgacttgagcaagcattttaccttactttt

SEQ ID NO: 127531 - DNA, 1217 bp, Zea Mays
aagcttctcgtctgagtacaaaaccaagagatgacagattattattaatgagaataaaacccagatgagggatgctagttagattctggaaatcgaactctcgcgcaacagcgagcacacctggctctggctgcagcctgcactagcaaccggagcctagctcggttatctgcatgtcaaattctgggagcaaaagcaagcagacatcaattgtgtacattctcaaatctgctttccatagatcctcagcgcacccagaaggtgatggaagaggccgtctcctttccagacgcgtctccggccttctcagcttgcgtgtgtacgtggccgcctctgccgctttatatggacaccaatcgtcatctccatctctaaacagactaacagagtgaggacacaaggacggtgaccaagcagagtgacgacgacgcgacaatcaagtccgtagctccggcggtagactttgatatggctttagctcgtctgtgcctcaacagggccatcgctggccgcgcgcaggcgctggcgaggccggcgctcgccgcagccccggcgacagatccgaaacttcactcgcttctctcaacctcggcagccgactctgccgcctcaggcgaggcaaaccgccgagatgtcgccgtgtcggagcgctccgcccccaatcgccgctgggcatggcgagacctccgcgacttcaccccgttcagcctcgtggacggtctcgggagcgcgctgtcgcaggtggcggagaccctgggccgcccgctggagcgcctggcgccgtcgcggctgctgtccgggaaggtgcgcgaggacgaggcgcggtaccggctgcgtttcgaggtgccgggcctcggcaagggcgacgtgcgcgtggccgtggaggacggggtgctggtcatcgagggcgagaagcgtgagcacggggaggagggcgacggcggcgagtggtggtcgaccagcgggtaccacgccagcctgctgctcccggacgacgcgcgcgccgaggggatcaccgccgaggtgaaggacggcgtgctgtacgtcaccgtgccgcgcaccggggagcgcaagcggaacgtcaccgaggtgaaggtgcagtgatgcgtgtcgtgtcactcaactcttgtgagtgcttcttgtttgtgagcccgtgactgttgtgtattttctccggaaataaaatttgtatcgtgtacagaaagcgaaagcacggc

SEQ ID NO: 127532 - DNA, 170 bp, Zea Mays
gatctcctctccaaagcaaaagcaggcacgggcatggccaggtgcgcttcactcggttccgcgcgatcatggttcacgatgatgatgacgattccgaatgcggatgatgccatctagcagctggaaacttcctgccgtttcagtcggtcaccgattacttcatcgtcgtt

SEQ ID NO: 127533 - DNA, 2896 bp, Zea Mays
aggtcggtctcctcccctctccccaccgaggttccccctccttccttcgcttccttttttccctgtcgccggcggcgacagggttccgttttccttgctccggcgggctgtaaatgcttccggccctcttcggtgcctcagatccggtggtgctcgttcttctggtcttgattcgagtgggaggggaaggggtcgcttcggtgttgggtgactcggagacatgcctgcgctctacgcttacggagatgacgggtgcctcgtctcggcgccggctgagctggccggactcttctgccgcggcgccgtgcagcagcggaagcgcacgctagtggccgcgtccgctgtggccgccgcggccgcggagtgcgtgagggcggccaagaagcagaggcagcttccgtcgctcgacgcgctcccggacgagtgcctcttcgagatcctgcgccgcgtgcccggccgtcgcggcgccgctgcctgcgtctcccgccgctggctcgcgctcctcggcagcatccgggtctccgagttcggccaggccgccgcggcggcggacaccccgtcgctgccggacctgaacgaggagttcgtcatggaggaggataaggaggaggtccccgcggatcggtgcgttgacagggtcctcgagggcaaggaggccaccgacgtccgcctggccgccatggccgtcgtcgccggatcctgtggcgggctggagaagctctccgtccgtggaagccacccggcccgtggcgtcacagaccaaggactctcggcggttgcacgcggcagccccaacctcagctcgctcgcgctctgggacgtgcctcttatcaccgacgctggacttgtggagatcgccgccgggtgccccttgctggagcgtctggatatttctcgatgccccctcatcacagacaagggcctcgccgcttttgcgcaggggtgccccgacttggtgtctctgaccatcgaggcatgctctagtgttggcgatgagggcttgagggcaattggccgcagctgcatgaaactgcaagctgtgaacatcaagaactgtcctcttgttggtgaccaaggcatctccagcctggtgtgctctgccactgcttcgcttgctaagatccggctccagggactgaacataactgatgcttcacttgctgtgattggatactacgggaaggccatcactgacctttcacttactcgtcttgctactgttggtgagaggggtttctgggtgatggctaatgctgctggcctgcagaatctcaggtgcatgagtgttacctcttgccctggagtcactgatcttgcgctcgcttctattgccaagttctgcccaagcttgaagaagctttacctgaggaagtgcggacatgtgtcggatgctggccttaaggccttcacagaatcagcaaaggtgtttgagaacttacagcttgaggaatgcaaccgtgttactcttgttggtattcttgctttcctcaactgcagccagaagttcagggctctctctttggtgaaatgcatggggatcaaggatatctgctctgtgccacaacttcctttttgccgttcacttcgtttccttacaatcaaggactgcccaggtttcaccaatgcaagcttggccgtggtagggatgatttgccctcagttggagcaggttgacttgagtggtcttggtgaggtcactgataatgggcttcttccattgatccagtcttctgaatctggtctgatcaaggttgacttgagtggttgcaagaacatcacagatgtggctgtctcctctctggtgaagcgacatggaaaatctctgaagaaagtcagccttgagggttgcagcaagataacagatgctagcctcttcaccatgtctgagagctgcaccgagcttgccgagcttgatctttcaaactgcatggttagtgactatggtgttgccatgctggcatctgcaaggcacctcaagcttcgtgttctctcactgtctggttgctctaaggttactcagaagagtgtgccgttcttgggcaaccttggccagtctctagagggcctcaatcttcagttctgcaacatgattggcaaccacaacatcgcatccctggagaaaaagctctggtggtgcgacatccttgcataggcagcagacaagatgagccattgctggaaggggctcatgtctactgggagccacttccagatgcagatatacgaccttagcagtagcacaaccagacggtcttcaggtttttggctcgcatgccggtcattatggtgggcttccacattgttcaaggaccagttgttttagggggcgctttctagcggagtgctcgtttttcacagatcacctctcagggggtttatctgttttttgagcctcggctgccatcactggcatcctgcccctagatccagacactggtccttgcccttacagtcataagttctttttaggttgccatagtgtccaggtcctctttcgttttactgttgcaggcgttggtgatccattgacagctctggactatcacagttctaactcaactgccagatgctgctggtgctggagcgtctgtggacttgtgcggtgtgtttggttgtcatgtttagagtcttgatgtgttgtgtgtgtgtgctgttctccatggtgtgtactggtcatgtagggttgcatcttttttacggtctctttgggatgcctggtgttcatggtgatcgtggccattgcgaggcgcttactagaagccttgccttgacagccttgtatggttgtttttttttgccagatccctgtttttacaggcagattgttgagtgctgtaagcttggcgaccctctatgaataaatgaaatatgtgtttatgtttgaaactttgtgctt

SEQ ID NO: 127534 - DNA, 1680 bp, Zea Mays
taacgttcgaactattctaaacacttcatcagcttaccgtttccacagctgacacgaatccgcgagatcggtagcgattttccggtccaggcaatttgtcgagcgcttggggaatatggcgctgctagcttcgtcttcacccgattcttgggatttcttgctgatgcacggaacgacgacgactttgagctaaagtcgggtgcgagctggtgaggtggggtcgaactgggactagaggacgacgaacgccatggcgggttagagactggatttaacaacggtgttgtatcatggcaaatagaaaatcgatgatcgaccaagaggtgatcggcgagttgaacgactctgatgatttgacggccatagacgcagccgggataactaaaaatactacgacagctaagaatcaactcggagacgacgacgggcacgcacgagaggagctcgacgcggaaacttgacacgccgttgcgagcagagaattttcgtgcgcacgacaaacaacgaaagagcaagctgcgcatgcgcagagagctcgacaacccgcagcagggactagcagggcgcgagctgcgcgcaggcgcgcgacgaccacgacaaaggagcagagacggcgagcacgcgcgtaggaaagggacctcggccatgggcagggactcgcgaccagcaagctgaaggagatggacgtgccatgaacggacagagggagcaggaggttcacgacgggagcagagaagtcggcacgcaggggagaacagcggccgagcaagagctagagcttcaccgacgtgccgagaggaaggctgcgcgcgcaggggagttgagcgccgagcgaacacagggagatgttgagctcgcgcgcaggcctgagggacgcgcgcgcaggcagagccgctcggcagagcgcgagcgagcagggagacgcggcaccagagctggggctaggagcgacggacagagatggagcgagcagagggagctggggagaagaagaccgcacacgaaggataagcagcctgcgcgtgaaaatatcaagcgcgcggcgttggggaagaagaggtgctccacggttgaaatagagaggagaaatatctgcacaacaggtcaggagatgagcatcgcgaaaaaaaaatcgagagccacgggcggccggagataggagtaggaaagatttttccatggcgcagagatgttttgcaacggtggaaaaacctgaagaaatggcggctggagattttctttccaagcgatgccgccagcctgtgcgctggagatcgaagagataagagaagggatcggcggcggaaaaaaatctccagcacaacgccgacggctccagtgcggcaagcaaaaaaatccatgggagggagagagtgacgtgaggatagggatgaaagagattttttttctcttttctttttttacggaaaaccgcagatatttttggatcgagatttttagcgatcacaaaagagtcgacagcacttgcgacatagtttgatttttgattcgaaacacgatatatttgatctgcggtcagaacacatgattccatggtcacggtaatttaccagagactcgaagctcaattataattctcggtcgcggagtcacggttttgatttagcgaatacttggaatcagatgaatttgcacccgtcatttatatccaaagttttg

SEQ ID NO: 127535 - DNA, 475 bp, Zea Mays
actttttctttacccagatttccctagatttctttctcgcggagtacggaacaataacgaatcaacgtggctattgacagaatcgacggtcgacgatgccgaccaccagagccgaccataacgagcacgacatccagggcacggcaggggatgacagcgttgtggtgaacaggaaatcgacgacgggcacaaaaggcatgacgctgggcataatgaaacgacagcgtgcccagatctcgtgtcgcccgaccatgcccgcaaccaatacccaccacgcttccgctgcgcacagtgatgcgacgaccagggccatggcgaacaaggagctgggcaggttcgatggccacagacgagcgcagatcggcgcgacagagacgaagaccaggcgtggcagcaggaagggcgcgccggtgagcagagaaacggctaggcgagcacagagagcagcgcgcgggaagcagctcggctgtgcacg

SEQ ID NO: 127536 - DNA, 198 bp, Zea Mays
atgaaggccttcgatgaagctatttcagagctggatagtcttggggaagagtcgtacaaggatagcaccgtcatcatgcagcttcttcgtgacaacctcaccttgtggacttctgacatgcaggaggatggtggcgatgaaatgtgggaccagtacaggatcatttacatgtataggaacattcaatctgtacgataa

SEQ ID NO: 127537 - DNA, 726 bp, Zea Mays
atggcgaaggagatggaaggtatggaaactgagtctgagagggaagggcgtaaccaaaggcggtctaagggtggtgatcgggagcatggtgagaaagagtttcgtgtggatgatcagccggaaggaagtagagagcgtcgtgagcaacagggtggaaacatgaggaaccggtttactcaagcagttcaggaaaagtttggggcagaagaggattcccaagcaatgaggggtttgttgcagctgacacagaggtccagtttagaggagtacgttcacgcttttgaagaggccaagtatactaatactttacacaaccccgggttgggagaaactttctttgtttctcaatttgtgaaaggcttgaagggggaattgcagggacatgtgttggcacaattacctcgaacactggatcgagcaatacttccggcgcagatacatcaagaagttgtggagatgaacaaggccaaatttcagaggaattatttagggggcaaagtgatggttaacacagcgaaaggagatcctagagcaataactggccctgctgatttggctaaggagaggcaactgagagattttcagaggctaaatggtttatgttttggttgtggagagaagtacgagccagggcatcaagctaaatgccttaaaagaggtggagcacaattacataatctgactatagaggatatggggttggttttgtcagatgaggcgttgtag

SEQ ID NO: 127538 - DNA, 110 bp, Zea Mays
tttttttctatttgtttccccgtcaggcccttgtgtcacgcttaatttatcaatgaaatcaacatgtctcaatgattggtgggcctcacgtaatagttgttcatctcctc

SEQ ID NO: 127539 - DNA, 1457 bp, Zea Mays
atttttccaccgacgtattcagatctttgcagccaccgttctatcttccttatcttcttctccagaacggcaatccttctgcccggtccttcctccagttcggctagcggggcagcgctccctgctgcttctccctccctggtactcctccagtcgcggcctcccactccccagccgatttctctgcgcgcgatactccctccagtcctccctgctcgcgtcgtgaattccctgccatggacgcgcgccgagctcctcgcgcgggtctctggtgcccagccgactagctcatctcccttttctctgatggcgcgcccaagcactgctcctgcaccgtgccgcgttccagctcagactaccctgctcctacgcccggttccagctcgctggagctcctgcgcacgtcggatcccagctcgcggagcttcctcctgctctgctcatcggtcgcgccctgctctcccagccatcttcctcttccccaccactggctcgaccgcacgccctcccagctcggccatggccaccgcgccgtggagccctgcgcaccgtggtgcttctttcctgcccctcccatggcggctcccctggatccctcctctgctcggtcgcctccctggagtccaagtccggacgccgctccagccttctcctttctctcttctctagccctgttcggcctcaagcttcagccatggtggcgtgtccatctccctggtatttccccaagccgcgcccctctgcttgactatggtcaccgtcacgcccaggatttggccgcgcctgtagtttccaaattcgtcttcagctcgcggcgctcatcttctgccccagtcctatgtcaacctcgctaaccacccatggttgatcctgtggttcgtgagggtgaatcacagtttgagattgaaaaaggagcttagaaggtgtagataatgaagctccagattgacgtttgccagatgttcggtggaacgcctgaatcaaagttcgtcgtcgttcttgtggattttggatcgatttggcttggtaagctagattcaggaaaagcacttaacttgtgatgtaaaattttagcttaaggacccacttctagtaagcttttctgaaaaaagagtctttgaaacttgatgctttgatagtcttttctttagtcgggtaattcttgctgagtaatttcatactcagggttttattacctgttgtttttcaggttatagttttgtgctgctgttgatggtgttaagtgccggtgggatcggccttcttataagtctaagtaacttttctatactttttattgagcatggtcacttgagctagcatatattttaaacttataaataatttataatatttcaaagtttatttctttgaatcactattgtaatcactccgataaacataatgtaaatttgatgtaacttgtaaaatttggtaataagagttccgctgcaaaa

SEQ ID NO: 127540 - DNA, 1808 bp, Zea Mays
gttccaaacaagccctgcgggtcgaaaaaatgtcaccgtgttcagttcatagaaggcggcatcatgagctctgcagtcagtagataagccgtaacctgcgcgattctattcttgcgacggaagcaaaatctgcacgagagacagacgacgagatggccgatgcggaggacgccgccgccgcgcgccgacgggccgccataaccgactaccgcaagaagctgctcaactgcagggagctcgagtcgcgcgtcggcaccgtgagagaaagccttaaaaatgcaaagagggattttaccaagactgaagacgacttgaaatctctgcagagcgtggggcaaataattggagaggttctccgacctcttgataatgaacgctttattgtgaaggccagcagtggtccccgatatgtggtcggttgccgaagtaaagtagacaaggagaagttgacatctggaactcgtgttgtacttgacatgacgaccttgacaataatgcgcactcttccacgggaggtggatccagtggtatataacatgcttcatgaagatccaggaaatgtcagttactctgctgtaggcggtttgtctgatcagattagggagctcagggagtccattgagttaccacttatgaaccctgaactctttcttcgggtgggaattaagcctcctaagggtgttctactctacggtcctccgggaactgggaagaccctattggcaagggctatcgccagtaacatcgatgccaactttttgaagattgtttcaagcgctattattgacaaatacattggagaaagtgctcgtttgattagagaaatgtttggctatgcacgtgatcaccaaccatgcatcatcttcatggatgaaattgatgccattggtgggcgaagattcagtgagggaactagtgctgatcgtgagatccagcggacgttgatggaactccttaatcaattagacggttttgatgagctcggaaaggtaaagatgatcatggccacgaatcgacctgatgttctggaccctgcgctcctgcgtcctggacgtttagacaggaagattgaaattccgctacccaacgagcaatcaagaatggaagttctaaaaatccatgcagctggtattgccaagcatggggaaattgattatgaagcagtcgtgaaactagctgaaggtttcaatggtgctgatcttcggaacgtgtgcactgaagctggtatggctgcaattcgtgcagagagagattatgtagtccacgaagacttcatgaaggctgtgcggaagctaaatgatgcgaaaaagctggaatcaagtgcgcattacagcgcagattttggcaaagagtaatgtatgatgctggacagatgcataaggcgtgtatcatcagggagctctgtcagatgcgatgcaaaagcgaaagaaaccagctatttatgttcaggctccaggcagctccactttttcctgatattcacaattttagtgaggaggattgtcaagctgaccagtgggggaaatcagtcgagaatttagtagttctgcgccagatggcctttgcttctgtaaatcgtacgtaatctgcttccgtgcgtcttagtctggtaataactctggttggacctgttctgtttccatgtacttttggacagtgtgcctgactccgcggtaacagaggaaaaaagaacattttgtattcatcctgaactacaattccccctcatttgtactattcacactcccattactgcgtcagggagtcgatcagacatgtgattaatttcggttatacgtttcgtcaac

SEQ ID NO: 127541 - DNA, 3135 bp, Zea Mays
atggcgaggacttcgggcccgccgggtcccccggagcccggccgccacgacgcgccgatgctgctgcgcgtgcacgtgatcgaggcgcggggcctgccagccatctacctcaacggctccagcgacccctacgtgcgactgcagttggggcggcgccgcccgcgggagaccacggtggtgaagcggagcctcagccccgtgtgggacgaggagttcgggttcctcgtcggcgacgtcgccgaggacctcgtcgtgtgtgtgctcaacgaggaccgcttcttgggcgccgagttcctagggcgggtgcgggtgcccctcaccgcgatcatggagacggacgacctttcgctcggtaccaggtggtaccagctccagcccaggagcggcgtcaagttcaggaagaaaaggcgcggcgaaatttgcctgagagtatacttatcggttagggccaccctttgtgatgacgcacatcaagctccaccgcaacttatcgatgatatatcgtgcagctcacacaggtcaatcgaaactaatgaatcaccattatcagctactgttaacagtctggatatgtcagcctgtgccagcatggatcggacatccctcaaaagttcggatggcttcaaccaaagcatgacggaggtccgaggtcctagaagcacagggccactatcttgtgtcagcatagagcaatcaattcttctggagcctgaagaagatgatggcagtgccatcgttgatacatcctcagtagtggaggtcatgtctcggtacttccggaaaactgctgatgctacacattctgtagcatcagatcctgtgtccctagaccagtttcgaagcacacaaatgaattctgaatgtcgtgaaaatgaagagggttgcacactgcctgaggtcagccttgatgaactgctgaaaaatatggagtccaaagaccaagcttgtgaactgccaggaaacttgcctggtggtgtactaatggaccaatcttacattattgcaccagctgaactaaattctttgctgttttctggaacttcagatttctggccagaagtttctgaacttcaaggaacaagtggattcaacattgagccctggaagcatgacaataatgagaactgtttaaaaagaacaataacttatacaaaagctgctagcaaattagttaaatctgttaaagccactgaagagcagaaatacttgaaggcaacaggaagttcttttgcagttttgtctagtgttagcactcctgatgttccctgtggtaattgtttcaaggtggagatattgtaccgtataatatctggttcccagttgccattagaacagaccacacaaattactgtaagttggcgtctgaactttgttcagagtacgatgctgaaaggaatgatagagaatggagcgaaacaaggccttgcagagggttattcacatttctctgaagtactgtcccggaaagttaaagtagctgaacttgccgatgctaatacgaaagataagattttagcatcactgcagacacagaaagaatcgaactggaaactggttgctcgcttccttggaagctttgcattcatatgctctctcagtacagcactgtatatcactactcatcttcatctagccaagcctaatgtggtgcttggcggtcttgaatattttggcattgaccttccagattccattggagagattgtgttttgtattattttgatcatccaagggcataatatcatgaaagtagggcgacgttttttgcaagcctggaaacaacgtggtagtgatcatggggtcaaagctcatggagacggttggttgttgactattgcacttattgagggaagcggtgtagtaagtgcagtttttacatgcaatggaaagaggaaaaccagctccgtcaaataccagacttctgaacctaaatggaatgaaatatttgaatttgatgcgatggacgacccgccagcaagattggacgtggttgtgcatgattcagatataccaaacaatgaaactcctatcggtcaaacagaagtgaactttgtgaaaaacaatttgtcagatttgggtgacatgtgggttcctcttgatggaaggtttccccaagggcaccagcccaaattgcatctgcggatctttttgaacaattcgcgggggactgaagttgttatgaattatctggaaaaaatggggaaagaagttggcaagaagatgcacttgcgctcatctcagacaaattctgcattccgtaagctcttcagccttccccccgaagaatttctcatcgacgatttcacctgccatctaaaacggaaaatgccacttcaggttgttccaccaaaactagcaacagttggcagtccatcattgatgatcatcctttgcaaggatagaggtcttgaagctaggcatggcgccaaagcactggatcctcaagggagactaaagttccattttcagacatttgtttcattcaatgatgctcacagaattattatggcaatttggaaattgcggtcatcaggtctggaacaaaaaggtgaggtgattgataaagaacctgaactgaaagagaacccttatgaagaaggttctctattggccaacgaagatgtaaaaatgtcagaagtctactcggccgttctttctgtcgacgtcagtgcgttaatggagatgttctctggaggtccactggaacacaaagtgatggagagagccggttgcgtcgactacttagctacagaatgggagctgctaaaccgtaatgtataccaacgtcatataaactttcggtttgacaaaagcttgtcaagatatggaggggaagcaacgaccactcagcaaaagtataacttaccgaaccaaaatgactggattgtcgaggaggtgatgaccctccaaggtgtccagcatgaagattactccagtatccaattgaagtaccacatgaccagcacgcccttgagaccaaacagctgcaggatcaaggttttgttagggattgcctggttgaagggcactaagcatcagaagaaggctgcaaagaatgtcatgatgaactccgccaacaggctgagggagatcttttcagaagtcgagaaggaggtcacatcaaggaaaggtaac

SEQ ID NO: 127542 - DNA, 114 bp, Zea Mays
tccaggaagcccaaggaggaagaagacctcctatgtgcctatgacgagtgggcccaaggtcaagtctaaaggtgcacaaaattgcagatttttgtgttgtgttaaaaaattaat

SEQ ID NO: 127543 - DNA, 1637 bp, Zea Mays
attagcccgcgcggcccgcacgcatccagctagctgctcacgcccgccacgcctctctttgtctctttcacccagtgacagcgcacagctcccaacctgctcgaagctcggctcagccgatccagtgcgccatggccggccgcgaggcaggcgactgcggcggagaggagccggcccgcgagatccccgacgacatcacgggcgagatcctgctccgcctgccgtcgcgctcggcgctggcgcgcgccgcggtggcgagctgcgccttccacgcgctcgtcgcctccccgcgcttcctccgccgccaccgctcgctgcatagggatcccggatcgctcctcggggtcttcaccttccctctcgtccccgacggcggcagaggtggaggcgacggctcgggcttccaccccaccgagcccccgcacccggcggcgtccaccgccagcgccgtcgccgctgcggccgacttctcgtttgggttcctcccagcggacccctccgccacggctgggtctgaggctgccgagtggatggtccgggactaccgcgacggccgcttcctcctcgaccgcgtgccttcgggaaccgggagcaccgtcttcaccgagctcgccgtctgcgacccgctgtcccgacgctacgtcctgctcccgcccattccggaggacctcgccgacaccgtccacagcgtgctcaccgtcttcggcggccgccgcgcgtgcgagcccttcctcgcgcccgccgagacctgcggcgcggacgacgtcgacgcggacccacctctcaccgtgttctggacggcccgctccccgaggaagatggtggccttcgccttctcgtcgcgcgacggacgatggcgtgcgctcgagtcgccgaactgcttcatctggcgcaggcaccgctccccgttcagctgccccatggcccccatcagcaccgtctggaaccgccgccactacgcgcacggctgcttctactgggtggactgcctcaccagccgctggctcgtgctcgacgggcgcaccatggagctctccctcgcgatgatcccgtcgccggccggctactgggaggagcacgtcgcagtcgtggaggccccggacgggaagcttggcgtattcgcgcacggtttccaccaccccgacggcaaagccaatctacactactatacgatcgtgcacgacaaggaagccgccggcgacacgaagcggtggcagctggagaagacgatccagctgccgtggccgtcagaccaccggtctttctgcctccggggcacggccaacgggtgcctcaacgttggcctcatcattgaagtcggcgagaagaagtcggtattcatgggaagccaccgcatcagggacgccgagctattcaagatcgacgtcaagagtttccagctccaaaagatctgccgagcacggtgcgccggcagtgctgccggcgagtgctgctggccatacttcggcttcccgccgtcgctgtccttgcccactgtgtgagaagcttgatgttactgagacaaaatgaattatgttacagcttcagagccgtccgtctgtatgtaacatgtataagcaacacttgtactcgtccagtttgtttacaaatgcaacgcatacatacatacagataga

SEQ ID NO: 127544 - DNA, 2225 bp, Zea Mays
gatcgagccggtctaactacctctcccgttcacctcccactgccgtttacctcacgctctctcgtggtcgttgcttcctggcggcggcgccgccctcttcgtcgggccattcaccggcgacgagcattcatctggaggagagcatcacactcatctaactgatattaggatgagtctatgtacaatagcacgccgactatgtctttcaaaaccatcctctgtgaatcgtctttcagtaatttgggctcatctatacagcaccgaggctgcaaaggacacgggtgctaagaagtacaagtaccctgatgtatacgacccatacgggcctatgtcgctaccgtcagagaaagttgtggatctagctgaccgcatcgctgctctccctcctgaggagatcaaacagattgctccagcccttctattcagactgaaccaagagccgccacaggctatctccggccagggtttcagttttggtgctcagggtggtgcgggggtcggtgccggaaaggctgaggaaaagaaagctgagaagacagtcttcgatgtcaagttggagaaattcgatgctgctgcaaagatcaagattatcaaggagatcaggacctttacggatttggggctgaaggaggcaaaggagctagtggagaaggccccagtcattctgaagcaatcgctcacaaaggacgaagcagaagcaatcatagggaagataaaggcagctggcggtgttgctgtcatggagtgaacgaagggatgaccatctcgacacaacacacttttatttcctatttttgttgccatgatcaagcatttgaattgcacattgcagtgcctttatgctgatggagaaaatagtttacatctacgttggtaaccaaggcgagagggaaactagagatttagttgctatgatgatattcatgacttgttctagaataagcagttctttgggctctacacaacttatttggtggagtgaatggatgttgccatcagggccaataccatgaatctgatgttcttgttgtatcctctatgagttatgaacacttcgcagttgcttaggtaccctgatatattctctatgtcagttacattgcagtgtaaaaaaagttctgttgttgtagatctggtatggttggatttagtttccagtaacaaaaactttgattcagttgaagtgttcctcattacaaatttgtaaagctggataagcattcgatgtcattcatatcaacataccagtggcgcaaggacaacatcattgccttgcccttcaaatttgaaccctatcctgcatgtgactccctcattccatcctccgtgcttggaggaagaagcaaaagtcagtcccgtcatcctcgatgctattccctccactgtcctcttttatctccggcggcgcaccaggcttgaagacaaagactgcctgcgcacctggtccggcgaagagccagtcgtgaacgtcccagatcacctgcaccggcgcctggtcgacgagcagcgtctcgttgccccggaacttccactgcaggctcttgacgtgcagcagcacgaagccgtccaccgtgatccacatttcgggatacctgctggagcccgcggcggcgagcgtgcagtcgatgacgatctcgtgctccttgctcctcttggcgacgagccgcgcgcgcgccgcgaagctgcggccgccgaacacgctctcccggcggcacaccagcacggcgtcctccagcgacgcgcgcgacttggtccgtttgcacgcgtccttcatgccgtcgccgagcaggaggacgacttcgtcgttgctcaccagagcgatgtagtagccaccggcgggctccgcgccgctgcccgccgcgaacttggccgagcgcaggtcccagaacatgtcgacgtggtcgccgccgcccacgtcgagcgccttgccgcccttcttgctccagaacggccaaggcttcagctccaccttgtgggtgaccggcacgtcgccgtcgatggagatggtgaaggattggttgatgaggctcctgctccaggtggcagtgacgaggcgctgttgatcttggcgaggaacacggaaacagtggagcactgcgccgcggccgccgccgaggacggcgccccggccctgccggtggcggagtcgtcgcaggacgtcgcggcgttgctgcacccgacgcgctcctccatggctcgcaggatttggatctcttgtgcatgat

SEQ ID NO: 127545 - DNA, 1541 bp, Zea Mays
cactgccgtttacctcacgctctctcgtggtcgttgcttcctggcggcggcgccgccctcttcgtcgggccattcaccggcgacgagcattcatctggtactcccttcccgtatcttcaccttcatagctgtgcgaaatggactaccccaaaccctaaatgttaagctatgagtatccagatctgacgcagttacatgcatatgtattataattgtacacacaaacttcgtttttttcgcaaaaaaaggatttatcgcatgcacatcatatgtccaccgatgtcctgtactggatcctcccctgcatttgaataggtgaccttgagctctctcctgaatatcggtgtgctcccacgcagaacacagaaactgggagactgaaaagtgggtggggggttcgtatgaaagggacacatttctggcacaagttattatgttttctatttgtgtaaatgggataccttaaaaacttgtaaaatggccactctaatcccgaatggcacctactgcctttgtaaatctatgtactcgatcccatttaaactatcatgtatccatgtttatgatgcttattgtatcagcgtgcttcattcagagtggactgtgaaagtttttcatcaagtctcatttagtactgattgatactagtttgttatgtttcaggaggagagcatcacactcatctaactgatattaggatgagtctatgtacaatagcacgccgactatgtctttcaaaaccatcctctgtgaatcgtctttcagtaatttgggctcatctatacagcaccgaggctgcaaaggacacgggtgctaagaagtacaagtaccctgatgtatacgacccatacgggcctatgtcgctaccgtcagagaaagttgtggatctagctgaccgcatcgctgctctccctcctgaggagatcaaacagattgctccagcccttctattcagactgaaccaagagccgccacaggctatctccggccagggtttcagttttggtgctcagggtggtgcgggggtcggtgccggaaaggctgaggaaaagaaagctgagaagacagtcttcgatgtcaagttggagaaattcgatgctgctgcaaagatcaagattatcaaggagatcaggacctttacggatttggggctgaaggaggcaaaggagctagtggagaaggccccagtcattctgaagcaatcgctcacaaaggacgaagcagaagcaatcatagggaagataaaggcagctggcggtgttgctgtcatggagtgaacgaagggatgaccatctcgacacaacacacttttatttcctatttttgttgccatgatcaagcatttgaattgcacattgcagtgcctttatgctgatggagaaaatagtttacatctacgttggtaaccaaggcgagagggaaactagagatttagttgctatgatgatattcatgacttgttctagaataagcagttctttgggctctacacaacttatttggtggagtgaatggatgttgccatcagggccaataccatg

SEQ ID NO: 127546 - DNA, 2743 bp, Zea Mays
acgtaacaaacttcatcagatcggccgccttttgcgccattcacgtcggcgtcggcggcggcggccagattagaatccacccacaccgagtcgtcgccaaagaaactaaacctctaatcccccgtcctccccgcccgtgcgcgcatatataatggtattacccccgtcgtcaaatgcaccgccacccaaccccatggccgccgccaccggaagaaccatgaagacgatggcgctcgtcgtcgtcctcgccgccctcctctgctccatctcggtcgccgctgcagccagcggcggcctttcttcgtacgtggtgtacctcggccagcacgcgcacggcgcggcgctgggcacgcacggcgccgaggagctgcaggcgctggagcgcgacgccgccgaggcgcactgcgacctcctcgccggcgtcttgggcggagacaagcagaaggcgcgggaggcgatcttctactcgtacacgaagcacatcaacggcttcgcagccaacctggacgccgccaccgccgccgagattgcggggaaacccggcgtgatctctgtgttccccaaccagggccgcaagctgcacacgacccggtcatggcagttcgtcggcctggccgggcccggcggcgtcccccacggcggggcgtggcggaaggccaagttcggcgccgacaccatcatcggcaacttcgacactggtgtgtggccggaatccgagagctttagagatgacggtctggggccagttccgtcccattggaaaggagcctgcgacaaaggccaggatgataaattccattgcaacaggaagctgatcggcgcgcgctacttcaacaagggctacgcggcggcggcaggcgcgctgaacgcgtcgatgaacaccccacgcgacatggacggccacggcacgcacacgctgtccacggcgggcggctcgcccgtgcccggcgcgtcggtgttcgggttcggaaacggcacggcgtccggcggctccccgcgcgcgcgcgtggcggcctaccgcgtgtgtttcccgcccgtgaacggcagcgagtgcttcgacgcggacatcctggcggcgttcgacgccgccatccacgacggcgtgcacgtgctgtcgctctccctgggcggcgacccctccgactacttggacgacggcatcgccatcggatccttccatgccgtccgccgcggcatctccgtcgtctgctccgccggcaactcgggccctgcactcggcaccgcctccaacctcgcgccgtggctcctcaccacgggcgctagcaccatggaccgcgagttcccgtcctacatcgtcttcgaccacaccaaggccaagggacagagtctgtcgatgacgacgctgccggagaagacctcgtacccactgatcgattcggtgaaggctgcagctgccaatgcaaccactaaggatgcgcagctgtgcatgatcgggtcgctggacccggcgaaggccaagggcaagatcgtggtgtgcctgcgtgggatcaacccgcgtgtggccaagggcgaggcggtgaagcaggccggcggcgtcgggatggtgctcgccaacgacgccagcaccggcaacgagatcatcgcagacgcgcacgtgctcccggccacgcagatcaagtaccgcgacggtctgctgctctactcctacgtcaactccaccaagaagccgaccggtttcatcactaggccagcgactgtccttggcaccaagccggcgccgttcatggccgccttctcgtcgcaggggcccaacatcatcacccccgggatcctcaagcccgacatcacggcgcccggagtgagcgtgatcgccgcgtggacccgtgccaactcgccgacggacctcgccttcgaccggcggcgcgtggccttcaactcagagtccggcacgtccatgtcctgcccgcacgtctccggcgtcgttggcctcctccgcactctccacccggaatggagccccgcggccatcaagtcggccatcatgaccacagcggctgagatggacaacaagggagagctgatcctgaacgcgtcgtcgttgccgtcaagcccctttggctacggcgctggccacatctcccccgcccgcgccatgaacccgggcctcgtctacgacctcggcgacgcggactacctcgacttcctctgcgcgctcaagtacaatgccacggtgatggccatgttcaagggcgcgccctacacgtgccccagcgaggcgccccggcgcatcgcggacctcaactacccgtccatcactgtcgtcaacgtcactgcggcgggcgccacggcgctccgcaaggtcaagaacgtcggcaagcccggcacgtacacggccttcgtggccgagcccgccggcgttgccgtgctggtgaccccatcggtgctcaagttcagcgccaagggggaggagaaggggttcgaggtgcatttcaaggtggttaacgccacgctcgctagggactactcgttcggagcgctcgtctggaccaacgggaggcagttcgtgaggagccctcttgtggtgaaggcggcgttggcttttgattagttctgctcattggtctaggggagctttaggaaagcaggtttagagaggatgcattagtttcatgatttgttaaaaagtgaggctgagaacttggcctctgaatcaataaattataataattatataagcaagctgtttctactgtgtaataaaaaccttaatctctgtagaaat

SEQ ID NO: 127547 - DNA, 2405 bp, Zea Mays
agacgcccataacgctgaatttggatagaaagtcaattctttttgtggaacaatatcttgtggagcgatcgagttcttcatgccccgatcgctgccttttgatcccttttgtttctggccggcgtgcgtgtgcgtgcatccaggaagctgatcggcgcgcgctacttcaacaagggctacgcggcggcggcaggcgcgctgaacgcgtcgatgaacaccccacgcgacatggacggccacggcacgcacacgctgtccacggcgggcggctcgcccgtgcccggcgcgtcggtgttcgggttcggaaacggcacggcgtccggcggctccccgcgcgcgcgcgtggcggcctaccgcgtgtgtttcccgcccgtgaacggcagcgagtgcttcgacgcggacatcctggcggcgttcgacgccgccatccacgacggcgtgcacgtgctgtcgctctccctgggcggcgacccctccgactacttggacgacggcatcgccatcggatccttccatgccgtccgccgcggcatctccgtcgtctgctccgccggcaactcgggccctgcactcggcaccgcctccaacctcgcgccgtggctcctcaccacgggcgctagcaccatggaccgcgagttcccgtcctacatcgtcttcgaccacaccaaggccaaggcatgcaactcctcagaatgccctcttgctagaccgccgaacagcggcctcacaaagatcaagggacagagtctgtcgatgacgacgctgccggagaagacctcgtacccactgatcgattcggtgaaggctgcagctgccaatgcaaccactaaggatgcgcagctgtgcatgatcgggtcgctggacccggcgaaggccaagggcaagatcgtggtgtgcctgcgtgggatcaacccgcgtgtggccaagggcgaggcggtgaagcaggccggcggcgtcgggatggtgctcgccaacgacgccagcaccggcaacgagatcatcgcagacgcgcacgtgctcccggccacgcagatcaagtaccgcgacggtctgctgctctactcctacgtcaactccaccaagaagccgaccggtttcatcactaggccagcgactgtccttggcaccaagccggcgccgttcatggccgccttctcgtcgcaggggcccaacatcatcacccccgggatcctcaagcccgacatcacggcgcccggagtgagcgtgatcgccgcgtggacccgtgccaactcgccgacggacctcgccttcgaccggcggcgcgtggccttcaactcagagtccggcacgtccatgtcctgcccgcacgtctccggcgtcgttggcctcctccgcactctccacccggaatggagccccgcggccatcaagtcggccatcatgaccacagcggctgagatggacaacaagggagagctgatcctgaacgcgtcgtcgttgccgtcaagcccctttggctacggcgctggccacatctcccccgcccgcgccatgaacccgggcctcgtctacgacctcggcgacgcggactacctcgacttcctctgcgcgctcaagtacaatgccacggtgatggccatgttcaagggcgcgccctacacgtgccccagcgaggcgccccggcgcatcgcggacctcaactacccgtccatcactgtcgtcaacgtcactgcggcgggcgccacggcgctccgcaaggtcaagaacgtcggcaagcccggcacgtacacggccttcgtggccgagcccgccggcgttgccgtgctggtgaccccatcggtgctcaagttcagcgccaagggggaggagaaggggttcgaggtgcatttcaaggtggttaacgccacgctcgctagggactactcgttcggagcgctcgtctggaccaacgggaggcagttcgtgaggagccctcttgtggtgaaggcggcgttggcttttgattagttctgctcattggtctaggggagctttaggaaagcaggtttagagaggatgcattagtttcatgatttgttaaaaagtgaggctgagaacttggcctctgaatcaataaattataataattatataagcaagctgtttctactgtgtaataaaaaccttaatctctgtagaaatttggtaatattggttaaaccgctcagaaatgttgttttaatctttttcaagtttctcaaaatttcaaagagacaaataaaactcttgactttaagttttaagctttccacagtttttggactcagaaaaaaggtacacattccacttcatttaaatttttataagttcatcagagtttcaaacataagttcgacaaatcaaacttttgacttcgaattttaagctttccagttcgctaccgaatcttaactagtcaaacttcc

SEQ ID NO: 127548 - DNA, 1407 bp, Zea Mays
tatttaatttgttttattttcttttcttctacgtatgtaatagtattatcatcttatttttgagtacttgatatatctcattgttgattatgtttgtagggctctacagcgtcaaggcaacggctagagcagctccttggttgcatggaggagcaggggcgcgaagtggcaagccatagtgcacctgggcaagagcgcgaggtggcaggccatagtgcacctgggcaagagcgcgaggtggtaggccatagtgcacctgggcaagagcacgaggtggcatgccacaatgcacttgagctggagcgtgaggcgataggctcaagtggacctatgctagagcaggaacacaatgcatttgagcaagcgtgcgaggcggcagaccacaatgcacctaggcaggaggacgagctggcatgccaaggttcaccaatgcgtgatgatgatgactatggggaggactacgatggagaggccgatgacgaggttgttacaacgacacaggcaacaaacttcaggtttcggcggtcccttagagttccaccgacacaacccttggaccaacgtagggtcataaaccctgcaggagagaggagctgggtggaggtggcatggagtggcaaaggtcaccgggcaccagttaacacagtgctgggatctatagctcgttttcactatctaggggtggtacaattcaatggggcagagacaggggtgtatcactgggctcactggggcctcaaaccatatggacccgaccgtactcaccaagacgcagtgtggtcatcattttgggaacaatttagattggacgaaacagcgaacgaagaacatgcaaaatgtgtattccacaatgctgctagaaaagttataaatggttcaatgtcagatgcacgggtcaaagttgttaccgtgtacttcaagaaagtgaagggtcaaagaatgaccaacaagcaggcatgtgaaatccacttaacagctaaggagtacaaacaaagtgaacatcttgaaaatccggttctgaaacgaagctttgcgcagtgcgctgtctttgactctttgtgctgtgtgaaagaacacagcattgacattgacgcccaagcagcaacgagtctccctgggaggagcgagcgagagagcggtatggccggtggcagcatggtgttcgagccccacgcgggcacggtggcgggcggcgacgtcgtgttctgcgcggccatcgtgtgcctgtcgctcctgtccatgatcatcttcgcggcttccggctcctctggcgctggggacggggaggaaggggtgaagccgcggcggcgcggacgatccaacgggcctgtgttcgtgggcggcaggggctgcggctgcggcggctgcggcgcgggggccggcgtctgcggcacctacctctcctga

SEQ ID NO: 127549 - DNA, 3695 bp, Zea Mays
ttcgcctccctcccacccggctcctgtcctcttcccctccccaaccagcctccctcaaattcgccgatccccaaatcccgctcccctacaccacggtagctgagaagacggccggcgaagatgatgttcacggagggcctcgacgagtcggcgatcagctggatcaagcagggcatggactccccagcctcagccccagcccccgcacccccacggtccccgctgtcggagcgcccgccgctgggacaggtggcggcggcgccgaggagccccgcgctgcacgccaggccgtgcggggccggcgcaggcgtcggtttcttctcccccaagggcctcccgcaagtgcgggtgaacgggacgcaccactcgggcctgctcggccgccactccgtgctcctctcggtcgcggactccgatgagtgggaggacgagagcgtcgcatcgtggggcatgcccgaggactgctacggcggcggcaacttctccgagaccggcgacgaggcgtgctccagcgactccagactcatgcggagggccatggaccgctgcggcggagggtgggatgaggaggtcacgtcgcagctgagcaggaagggcggcggcggcgggatcgtgcgggggcagtccaaggagttcctgcgggtggaagtgcgaggtgcgggagcgttcgatgccgggaagtgctccggttccggggcacaacatccagtggactccatctcgcagggacgctactttgaggagcaggtattggggactcctagtgcccctccaattgcaggggtcgaggaggatgttatgtttcatgcagttggtaaggacatcagagactgtgatagaaattcattgatttaacttgtcctggaaatggtgttttccttggcattcatatggtattgcaaacagaaagggctgaaatggatggagggcttgagaggaatggagtatcatcagtagcagatatactggcccaagatgttcatgagcttcatacgagctcaattgttcatgaagatggcgttgagaataacttattagctcagataccgagcttcactattaaaatacagaacttcttgcttcatccaaaacacaatagtcaagttgatggtaaacaaatgtatgataaggatggaaattgtactataaagggaaggaaacttgttaaacagattgagattgaagaaatgttcacatgcactctagaactgcaaagttcttgcaaaggtcataagagagattcaatttctccacaatatttgaagccagggactggtgaatctcaactcttttatctagagagccagggggatgttattcttgttgaagtacaagacaacaatagggttgtcataggccgtgcaaaaattcaagtttcatcattgactgatactcaacaggatgaaatcatcaggtggtggcctctatatcttgatgatcaagattgtgtcggaaaagttcagcttggtatgaatttatccatgtcttccaataactatgggtccgaaaagatgctgcaaggtggccctgcagtggataccatcatatatgacatggttctggaagcggcaatgagggctcaaaatttcaacagcaaaatgcttcatatcaatggtccatggatttggctgttggacgagttttctgattactatggaatatctgatgcatatagaaaattgaggtacttgtcttacatcatgaacgtggcaataccaaccaaggattgtttggaacttatatatgaacttatcgttccagtcacaaaagcacgagaagatagaactttaacaagacaagagcgaagtattttgatagactgtgaagatcggattaagagtctccttgcagctctgtttgaaaattacaaatcactggatgaatattctccaactggcttgtcagatttatttggccccataacagattctgctgcaccagctttggcacctgctgttcagatattcagtgtactgcatgacattctctccaaagaagcacaagacatacttaggaactatttgcagattgctgctgcgaaaaggtgcaggaggcatatgatcgagacagatgaattcttatcaagcaataacgacagtcttcttacggaccctatgactatatctgctgcatatcttaaaatgaagacattgtgcattaacatgagtcgtgaaattcaagctgacattaagattcacaaccagaatatacttccaagttccatagatctgccaaacatagcagcatccctatatagtaccgaactctgcaagcggctgaaaggttttctttcttcaagtcccccatcaagaccagtacaacatgttgctgaactgataaccgcaacttctgagtttgagagagatcttgaatcttggcaagtgagacctgttcatggcggcgtaatttcgagacagctctttcatgactacatcatggtgtggattgaagacactcgattgcagttacttgataattgcaaagctgagaagatatcatgccctgccgtgtcaacagtctcgccatttgttgagcaaatgtatgagcaaataaaagagagcataaatgagtatggagtggttatcaatagatggcctcaatatctgatgagtttagagagtgctgttgctgatgttgagagagaaattatgaaggcactggagaagcaatacatggatattctaatgcccctaagagatggcataccagaaaaaattgagaagcaggtccagagattaacaagaagacaatctatagctccctatgttgtgccaaatcagttaggagcattcatgaacacagtaaaaaggatgctagatgtgttacactgccgagtcgaagacattctcaagtcatgggcagcgtaccttactatatcatgtgggaacactgtttttggagagcaaatgaactccatcacagtcatgctgaagaagaagtacaagaaatacctgcaagcgatagtggacaagcttgtcagcaacacacaagctaatcggaatacgagactcaagcgaattcttgaagaaacaagagaggctgatggtgaaagtgatatacgagataggatgcaggctgtccgcctccagctctcggattcaattcacaatctgcatgaggtcttctccagcagaatatttgttgctatttgccgaggtttctgggatcggttaggccagattgtgttgagatttcttgagagcagaaaggagaacaggatttggtaccgaggatctgactatgctctagggatccttgacgatgtctttgcatcggagatgcaaaagctgctgggcagcgctctgcaggacaaggacctggatccaccgcagtcagtgattgacgcccgctccatcctctgctagggcgtgtggcaacagttttctctacagattgcttcagcaaaaggccggcgttggtttagtttttgttttatatatattccttggtgtgcagaatatgtacagatggagacaaccgattattcctgttcatagtgttttgctgaattgttcaaataaatagtggttaaaaaaactgtagcccgtaaacaggttagagaacacaatctgtacttgattgtgtactttctacctcagttcttgccttccccatctaattccatccaaatattgtaccctgaattgagtgaaccttgatacaactgattcttgttggctcatatgtgttcaagc

SEQ ID NO: 127550 - DNA, 322 bp, Zea Mays
ttttttttttgagaccgagtcttgctctgtcacccaggctggagtgcggtggccggatctcagctcactgcaacgccgctcccgggttcgcgccattctcctgcctcagcctcctgagtagctgggactacagcgcccgccaccacgcccggctagttttttgtattttttagtagagatggggtttcacggtgttagccaggatggtctcgatctcctgacctcgtgatccgcctgtctcggcctcccaaagtgctgggattacaggcttgagccagcgtgccgccctgctgtttctttactaatactctcttttattatt

SEQ ID NO: 127551 - DNA, 1460 bp, Zea Mays
atggggttcatggatctagcaacgccatagctagcgacgtgcgacggcgacatggtaaagctcttcgacatcatggtggaggccggcgatccctgcatcctcgctgacatccccgcccccgcacaccccgtcaacgccgtcaggtggcgatcggaggcggctgcatcatgcccaacatgactgcgtacgacgacaaccagttcgcggcggagaaggacgtcaagcagctctccacccacttcagcctctcctacctcgactactgtgttgccgaggtcgctacgctgacggtcgtgataaggaccagaatgattgagatagtgtcccatgggcttgcaaacttggagtcagtcatattcttcatcctcgctgtcgcgagctgcggaggagcttgggaccagcatcagctggcggaagaagaggatgtcgacccacttccagagcatcagctggcggaagaagaggatgtcgaccggcttccagagatgccaaccattaggcatgattcaattctagaagatcctgatggtgacatctcacaaccacaacacatcttggactactaccatatctctcaaacaccaatttatcgttgtacttcaaaacgtttcatgaacattctcattaatgccgtaattactgaaatcaatgaaaatattggtactactggtgtagtcagccaggagtgcaaggctattgtttctcaatgcggacaacagatcctagatcttttgctagctgagttgcttttgaagtactcaagcaagaggcagcccttccgatcttatgatatcaagatattttctggtcctaaacccatgaagatagttatgcacaagcttgttactgggatattgcttcttggtgcaggagttgagaagagtcgactatttcagcagcaaggaattgccacaagtattggaaaggataatgaggaagaagcttcgctttttgtcatactgtatttgcttctgaccagtgttatttttctaccattatttcagaaaatcactcgaggattccaagtttgccattccttcggaggaggcactggatctggaatgggcacccttctcatctcaaagatcggggaggagtaccctgatcgaatgatgctcacttttttttgtctttctctcacccgaggtttccgacattgtttactgatagtccatcaattggttgagaatgctgatgagtgcatggatcttgataataaggcacttcatggatcttgataatagtaggtcgactattttagtagcttcacgatgaagttgcttgaggaaggttttgatctttgtgcacatctgctagctctgcgacggtaccatttcatggaaatatctgactaggaagattcctttattgctcaatttatcttaaggagtaaggtaatgatgtaatgtttgtttatcatagtattttagctataggtcatgcttttttgtcaacctgta

SEQ ID NO: 127552 - DNA, 735 bp, Zea Mays
atggccagttggccacccgaagacgaaaccaccacaaatgtcaccctcaaaattttctccggaaagaaacgcaacgctgacctgcaacaaccgaagccgaccacaggcatccgcaagacagcaagtgaagctcagatcggcgaactgcggccttctgcgcttcgcctaggagcctacggagtactgagaacagagcagcggaggatcatggcacaccttcaattcttgcggcgccagaagcagcggagcttgagccggcgcgctaggacattggcgatcgcgacggcagcggcggcagccgcggcggcgtcagcgacggggtcgagctggcctcccgtgacgacgcggctgccgatgaggcaggcgacgaggagaaggggcaggcaccagagcacgaagtcgagcaccgagtcgaggtcgacgtcccagtcccactcccacaccctcagcatggccattgggagtccgaagccggaggaggcaagcacggacggagctggactggacgagcgagcgaggacgctgagaagggagggaaaaaaagaggaaaggtgtggaacgagcgagcagctagagcggcggcagctggatcaaggtggagaatcgctgcggctggactgcggcggatatggatcggcgcaggccggcggaaaaaaaaggtggctggggttttgcgattgcagcagcggggagagacgtgtttgtaatcgatcgtgtggtctcgtggtcggctga

SEQ ID NO: 127553 - DNA, 567 bp, Zea Mays
atggaccaggtctttggcgccgagtacgtctccctccacgtccgtcgatccaaccgcgccgccttcaacctctacacctccactctcggttgggcaagtggtgctctcgatccagaaaggagctcatctgctgatcgtgtttggtcagtcaagaggcaccttcaacgtgagttacagaactcttttcctgactctgattattgttttatatcaccacaatcaaaagtgacgactgacgagcaggctgttacaaaagccaagctaggttacgatcctctggaggttaatccagaagatatggttcgctttgcaatggagcagccacatacaatggctttgtattctgtatcagacgctgttgcaacatactatctatacatgacttatgtccatcctttcatcttttctcttgcaaccataatacctatgtcacctgatgaggtactgcggaaaggaagtgggacactttgtgaaatgctgctaatggttcagcaataccttcatctagatccaggtgttttatatgaaactctcaagtacttgagctgtcaaattgtgctgaagtag

SEQ ID NO: 127554 - DNA, 1826 bp, Zea Mays
ggatatttccgtcgccagcgctccgttcctgctcccgtgctgccgctcctgccctcttccatggcgcgtgccccatctccctcctcgcccctggcccctctgctcggagctccctcgccatggccctggtcgacgctctgccgggccgtgtctgccttggctaccgcgcccatgccgaactctctctccctcgcgtcttccttccccgcgcgcagctcgccttagctcctgctccttcaggctggctgcgcgcccatccctctgctcgttcttcaggccgccgcccagccgagattctccctcatccccatggcgcgctcctcctggtaccgagctcgcccatggccacgggctgcagctcgccccatctccctagcccccacgcgcgcgcaggcttcctgctcgctcggcttccctcctctcccttcccatggccgagctcttcgctgttgtccgtgcgcgcacgcctgctcctctgtccgcccatggccgctgttccttccctggttgcgggcgtgcggccggcgtcgagtcgtcggactcatccttcccttgctagcccatggaagcgtgccctgctccaactaggtccgaccgtggagctcttctctggtgccaagatgcagtctgtctttctcaacttcgctctagccgtcggagcagtagccatggctttctgtcctcggttttggccgtctcctctgcctccaatctatggcgccatcgcgagctcgccagccgccgttctccttgcctcctcaccggtcgttgaccttgcctaggctatcacatcttctcgtgctgttgtgcgtttgctgatgttttagtcatcgcccagctcgctgatggccagttcgttcgccttcgattagcccgccatgacgccgacgtctagccctggctccagtctcctcaccacggaagcacaaccgctgctcagtgtgttgatgccgtatgtgtggtgctgttgtgggttgtcgtcgttcgtctccgcgtcgtgtgtagcaacgtcgccgattcctccatggtgcttatcgtcgaacttcgcttcatcggtccaaagtgctcgaccacgccttgaccatggacatcgtgcgtcctcgtcaccaccatggacacaacttctcttctgtcattgtggacaccccgctatcctcgtgtgccggtcaccgtctctgagcctgattccgagatatcgtgtgccctactccatctcccagccgttccccgtgccgtcgatctgtgcagccttgacgcgccatcgtcgctgatagtttgcatctcctacgttgtgccatccttgttccctctggtcgcgacaacatcctattccaccaggtcgtcgggcgctactctcaactcgctatgaggcttgctgggcttgccatgttttaaaatgtagtcaaaaatttgcttgcaactgcggtctcgtcgtgtccgtcggtcttcaacttcagtgatcactatcatcttcaacaacaacgtcgtcgttgtctccttggtgctcgttgccaactctgctaccctgttcttatccgctacccgctgagtgcgtgatgaatagtttgaactggagtttgtcgtcattcctcgtcctcgccatggacgagtctgcatctccgcatgccgatgtgcctagaccgtcagtctcgcccttgctgttgaaagcatcaccgacgtccgcggataggtgtgtaggtgagtgtttgaaatatatgttgtgatcaacgccattttagtattcgtgtggtgatttacgtctttcctgtgttcatgtgttattcgtgataataagatcattgaataaattaatgggttggtgtgat

SEQ ID NO: 127555 - DNA, 372 bp, Zea Mays
atgtcgttggtggcagatgatgagaggaggtgggggttgcgtccatctagaacagattggccacaggggaggaggggtgaggtgttgcgcctagagaagagtaggcggcctaggttaggagcggtggcacctcggaaggtacaagcagtcgactgcggcctaggagggggtagcggtggcactatagggttagggctagatggggcttgcagtagggcgcatgggttgttgcgcctggagaagaggcgacaacctgagagcggcggctccactagaagggatgagcagtcgatgcttgggacgagggtccctagaagagatgaggagccgccggcggcctgggaggggtggcagcggaggggtgcaggctag

SEQ ID NO: 127556 - DNA, 471 bp, Zea Mays
atgatggtcctcgcctcagttgccactacctcgttcgccattctacttcttttctctctcccctcatgcctccacctctgcgccaccccattctcggccgagggcgcaggagcatgcgcctcctacccgtattcgtccgacaccagcctcgacaccgattcgcgcagtggctattgcacgtccacgaggatgtttcacatcatgcgtgcaccatcattttcgccgtcgtcggacatcccgttcgtgttcccggccttcgctctgttcttcctccccaacctactgcccccgcccacggtcacagccgtgagccgaccgacactcgttgacgcgggtatgacgcgagtcggtcatgctcctagcctttctccgtgcgtgccgtcgaggaggacatggtggcgcctgctacgcttaggttatcttggcgatgaggagtccaggtctgagatattggacaaccaaggcccatag

SEQ ID NO: 127557 - DNA, 119 bp, Zea Mays
gttgcttaattttttatggttctaaacagatattttttatcttctcatagtcatggaatcgtaacttttagttgtaaggttgtatgcatgaaagtgcaaaaagctggaatttgttttcc

SEQ ID NO: 127558 - DNA, 439 bp, Zea Mays
gagtttgggaaggttcaaaggaagcagaggaagaacatgagacgggagagaaggaagacttggaggacaaggaaatagttgttgatacatccgtgccgcaacccttcggcagacgcccacaaataccccagctacaccccttgcaacatgttgatccaagttgggccgtatacgcgtgtattccacttcctgggcctgcttgagcgcccgggctggtcttcgactgctccttcaccaccaatatctcctgattctccccagctgctaacacacctatcgaagtcttcaatgatcagcgcccagacgcccttatacaatacttcaggatggtactacaactcatgtcaggtatggctgttttgcctccataggagatcctcaaaacttaactgaagctttgaataatacaaagtgggagcttggcatggatactgagttt

SEQ ID NO: 127559 - DNA, 571 bp, Zea Mays
ctgggacaggtcaatcttcaaggatttgctcctcaggggaagggaaggccatggaatggtggagaagggtgagcgaacaggtgcaaggcatggcagaaaagggactcaattccttaataatccttggtttctggaccatctggaaccatagggaccgttgcgtcttcgacaagatcaccccaagtgtaaatgttgccattagaagggctgaggaagagagggagctgtgggagatggcaggggccaagagcctctctctcctaacaggtccaattcctgggttgtgaaggggtagttctcttggtgttgtaatggacgtttttctgtattttcgtttttggccaccgtaaggtggctgttttttcttgatgatgtgcacctctcctgcgcgtttgagaaaaaaacaacacaaaaaacagaacaagactaagggtctagatgtctaaggacccaaccacattcaaaaacctagcgagatccaaggatccaaggcccttagcaccagccataactcaacaaactgattcatcaagaaagcttctctgaatcttctcagcgaaggggaatcccc

SEQ ID NO: 127560 - DNA, 693 bp, Zea Mays
aaacggcccaagcccaaaaaggcaggctgatatctcagacatagagcccactcgtcgagcgcgctcgcacgccgcgaatcgccggaccggtcggcgacggagacgacagagcccaagtcgaagcgatccgattttgccggcggcagcgaccggagtatggggctgggaggccggggcgtggtgggagacaggtggtcgcaacgcatcctctggatttgcgccctgggcagcgccgtgagcctctacttcgtggcggtggagaggcaggctcagaatcgtgcgcgggcggtggcggagggcctcaaggcgctcgacggcgccggggatgacgtgtgacagcggtggacgctgccgtgcagagggcctcctttggttcacatgttcacagaacctcatagcgttgcaataatgtactaaacatctgtgctcagtctttgtagaattaaatgtggatcaatgtgagtgttctcctatttcacataattcatctgagcctttgttgctgcacagaaatgttgatccgtgccactacgtgagtgttttcttatttcacacaatttgtccatttaaggatccacatgatgtattccgtagagtggagtaaccagaattcaataactgtgtattcactgtgttttttattgtccaatacaatgcatatcacaaaatatcaatatgaaactgaagaaaatt

SEQ ID NO: 127561 - DNA, 535 bp, Zea Mays
atcctgtcgcggtcttcccctaaccgtttcttcccgttgccgcggtcccgcgccgctggtgtttccgtacaggcctctacttcgtggcggtggagaggcaggctcagaatcgtgcgcgggcggtggcggagggcctcaaggcgctcgacggcgccggggatgacgtgtgacagcggtggacgctgccgtgcagagggcctcctttggttcacatgttcacagaacctcatagcgttgcaataatgtactaaacatctgtgctcagtctttgtagaattaaatgtggatcaatgtgagtgttctcctatttcacataattcatctgagcctttgttgctgcacagaaatgttgatccgtgccactacgtgagtgttttcttatttcacacaatttgtccatttaaggatccacatgatgtattccgtagagtggagtaaccagaattcaataactgtgtattcactgtgttttttattgtccaatacaatgcatatcacaaaatatcaatatgaaactgaagaaaatttactgtga

SEQ ID NO: 127562 - DNA, 99 bp, Zea Mays
ctcgctttctagacgaactctcattgtttgttcctatgcctatattggggtttggataggaccttttcgcatgttgttgacgaagcaatcctgggctga

SEQ ID NO: 127563 - DNA, 725 bp, Zea Mays
atgattgatagtgagagggaaaaaatgtttcaaacaactgagtgcaggatcaacacaaaggtttgctcaaagttgaggttcaaaaccttttgctcaaagttaaggaggttcaaaatcatgttaatagacgatataatggaagtgacagatcaggtaagacctagtacttgttcatggagaatatggaatgattgcttcacaggcaagggcattttctggcaggaggacatcatccccttcttccagaacgtgaccatccccaaggattggggcaccgtccagcagtgctacatctacctctctggacaagtgaaagagaagctgggcaagattgacccctactttgtcaagctcggtgatgccatggtcacatggattgagcctgggatgagctgaacctggtgacccctgctgtcgcaaatggcaaggtcaagtagatggagtccctattttgccttcacttccccactggattggaaaagaaagtatgattgggtcctacctaggcctcatagatataactctttttgagaaggaagagagattaattcagcagcagattttataaattctttgttgtcatgaagcaggtggttcttttgtagttctcgtcgcaatcatttacataataaagacaataattttatattgtgtacttttgataatcaaagcactatttgtgttataacatgtctataaatgtgcactgctgctgtttcatctac

SEQ ID NO: 127564 - DNA, 1738 bp, Zea Mays
tcgtcggctgctcctgcccgcctccgtctcccacagcccacagtcccacacagccacggccacgccgccgtcctcgagccgcctgatgagctgcctccgccgcgcttcccgcctcacccggggtctctcttcctcctcggcggcggaggcggagacgctcccgccgccgcgcccctctgcgggtcgccgcgtggtcgtgacggggctgggcgccgtcacgccgctggcgcgcggcgtgggcgccacctgggatcgcctcgtcgcggggagatgcgccgtgcgctctctcgccgcagaggacctccgctttccggaggaagcagcggggaggacgctcgagcagctcccgtccagggtggtcgccgccgtgccgcgcgggaagggcgaggacgagttcgccgaggacacgtggaccaaggataaatctgtatcaggatttatttcctatgctctgtgtgcagctgatgaggctttaagagatgcaaattggttgccttccgaagatgataagaaggaaagaacgggagtctctattggtggagggattggaagcatctccgatatcttagatgcatcacaaatgatcatcgaaaatcgtctacgtcgtctcagcccatacttcatccccaagattttgatcaacatggcatcaggtcatgtcagcatgagatatggtttccagggtccaaaccatgctgctgtgacagcttgcgccactggtgctcactctattggcgatgctactaggatgatccaatttggtgatgccgatgtgatggtggctggtggaactgagtccaatattgatgctttgtctatagcgggattttctaggttaagagcattgtctacaaaatataattcctctccacttttagcttcaagaccttttgattgcggtagagatggatttgtgattggtgagggctgtggggtcatggttttggaggcacttgatcatgcaaaggaacgcggtgcaaaaatatatgctgaagttcgaggctacggaatgtctggtgatgcacaccacataactcagccacaaagtggtggtagaggtgctattttagccatgaagcgtgctttggaccagtcaggtcttcatgtaaatgaaattggttatgtgaatgcgcatgccacgtcgactcctcttggtgatgctgtggaggcgaacgcgatcaaatctgtatttggcgaccacgcagcatccggtgatcttgcaatatcctcaacaaagggagcaattggtcatctgctaggggcagctggatcagtggaagcaatcttcactgtgctagcaattcaccacggactcgctccgcctactcttaacctggagcggccggacccgctgttcgaaggggcattcacgccactagctgcgcccaagaagatgtcgatacgagcagccatctccaactctttcgggtttggtggaactaacacgtcgctgctgttctcgtgcccgccctagtcctagtgtaacggcgctctgttttctggtcctcgctggaagtgaagaggcttcctgtaatattcagatatgttccgcaaggcaccacccgcctttagctgaagtttcttcaagttgttttttttcaagtcttagttaaactctgtttcgttattttttttaaaaaaaggaaaaagatggaaatttgataggtgagtgagacgttccctttggacatcattagcgtaaaatctgtactactgctatgatataacgtgtccaaca

SEQ ID NO: 127565 - DNA, 111 bp, Zea Mays
gttgattgcaccaatatttgggttcgctaaatcaaacacatatttgatttcaaatttgaaattgaaaagggtgatagaaatagattttaagtctgaactctattttattcg

SEQ ID NO: 127566 - DNA, 2626 bp, Zea Mays
gcgcacccgccgccaccccgcgcccgccccaccgcgcgtcggctcgcgcgccgccacccagtgcggccccgccgccccaccgttaaggcaggttatgcggccgacaagggggcggcgtccgggaacccatagagtcacgtcgtgctggggaggcataggattcggatccggccgtggccgcacccggacctcgtcgaggtgatgcgggcgcaccggatcatggagtgcgtgcaggaggaacagcgccgctggtacggtgtcaaggagccgaggcaggtgctcgctgtcaccccgacctactcacgcgcgttccaggcgctccacctcatcggcctcctccactcactccgtcgaaatccttgcgcatactggcacggtagaccaactacggctcagcgaggaggacaagcagaatatgcctcttccagtccatggccctgcttgcaactcctcagggcatctgattggatggcacacgttcaactcattgcccttctctgggaagacggccacagttgttggtgaagcaacccctgttctgcctagggatttggagtgggctggttttgtgttgaactcgaggatgctgtggaaggaggctgacagcaagcctgactgggtgaaggatcttgatgctgtgggtgagaactttgaggagcgctggttaaaggcatcaaagcgcagtgccgctaagaaactgtcaaaattgtcgaggtcgcataatgagtcgttgttgtggatcaagaagatacctgatattattgctattgacgacgagatctattcaaatgatgatgatccagagagatgggacatgcagattttccgatcaattgattcgaattctgtcaagggttttccaaaagatccacgggaggccactagtaagaatcttgtttttgggaaaaatgtactgattgatatgagcgtgcatacagcatatgtgaatgtcatccgaggtgctcaacatttcatctatattgagaaccagtacttccttggctcttcatttaactgggattcacatagagatgttgaaaatgacaatgcaaatgatgtatgagataatctataaggccttgaaagaagtaggactagatggtacatatgagccacaggattacctgaatttcttctgccttggtaaccgtgaagctgaggacactacttgcacatctagtggaccattctcagccagtaacccacaggttagactgcagactattgttctgttttctgctgctgattccggtacactttagaaatgcccaaaactgaaggaggtactgatttccccaaaaaaatacaattatgctgcaacttggatatccaatcaggaccaagctcggaagaataggagattcatggtgtatgtgcactcgaaaggcatgattgtggatgatgaatatgtgataattggatccgctaacatcaaccagagatccatggaaggaactagagatacagagattgcaatggctgcataccaaccccagcatacatgggcaaatatgctttctgctcctcgtggacagattttcgggtacaggaaaatacagtgtacgtgttgaaactgttatcctgccccaggttgggatggacggcggtacatacgtgttggtagaactgtgagaagaaaagatgggaaaatttgctttcttggctgcgatggttatctgctcaaacaagatatgcaaattgcaaaactcttaaaggatagtattagttctatttgttcatacagttctacagctagttgtttcttgctttgttcatggattgcaatactggataagatcatgatggatgtcgtgtgtgttttaatcaccatttctaaaatttattctattggtaagacgattctaagatataggtcggagttggattccttgcatatacataaacagataaagaagcaaccggtttataacaaaaatatgtcttctgttttgcctgttgcccaattctcttttagtgtagcctacttacaataattaaaagaagagttggtgtctgtttgagtagacagctaagtgcatatataagtacgtgcatgattttgattactaattgtgattttgatgatctttcttttgaagacggtctaacatataagcgcatgatttagatgaacggaattactattgtgccatttctgaagaatcttactattttctcttgccttcttagaacaacatgggaagaagtgatgatgacagtccatcgccgccaagaggtcacatgagaagaactcgcagcccaagtccttgtggtagttatggaggccatggcaagcgccccacaactaatcttatggtgacgaatcttggtccagattgtaggattccgactctcatcaagtgactcctcccctcacgatgactttgcggacagatgtctcaattatagtggtggagctacgaacaacaatccgatgtcctgatcgagagcgatggagctaatgtttgaacttgtgtgtttgaacttgtgaactaaaaatgtgaactatggatgtgaacttatgtgaatttgtgaacttatgtatttgaacttatgtgaatttgtgaacttatgtatttggacttgtgtgaatttgtgatatgaatatatatccatgtgtttgaaa

SEQ ID NO: 127567 - DNA, 628 bp, Zea Mays
gcatgttgatcttgtttagttttgaaattagtcccctggaatgtagctcatgtacgaacagatagaatttataaatatatgtacagttctatctagctattctgagggatttgtaatgcattgtgctttgtaagttatgtcttaatgaagcatacccctcccttccctgatttactgtgtttttcgttgaaaagttcttttcattttccaagtttatgatgtgcttcatattgcatataacgatgagaatggatattcattgacactacacaactgtaactttgctgttatcacaactgcaggagttatcaccttcgtgaaccattttggtttattttgtaggattccgactctcatcaagtgactcctcccctcacgatgactttgcggacagatgtctcaattatagtggtggagctacgaacaacaatccgatgtcctgatcgagagcgatggagctaatgtttgaacttgtgtgtttgaacttgtgaactaaaaatgtgaactatggatgtgaacttatgtgaatttgtgaacttatgtatttgaacttatgtgaatttgtgaacttatgtatttggacttgtgtgaatttgtgatatgaatatatatccatgtgtttgaaatc

SEQ ID NO: 127568 - DNA, 1828 bp, Zea Mays
ttttttaccttaaaaaggtttagtaaaccctgctgtctgctggtcttcagttttcacggcgggttgtcgtggcctgtggctgggagcctgggtggctgtgggcaggagtatgccaagatgatcgagacaccaacaaaccaaacaccatccgccacgaccacgactccacgagagagcggaggaggagggggagcaatggcagagccgggccagcagttgctgcggtcgttcgtggaggtggcagcgggctcgcacttccctatccagaacctgcccttcggggtcttccgccggcgggggtcgccaccgcaggctccgctccccccggtggccatcggggacttcgcgctcgacctcgccaccgtcgccgacgcgggtctcttcgacgggcccgcgctctccggctccccgtgcttccaccaggagacgctcaacatgttcttggggatgggccgaccggcgtggagggaggcgcgcgccacgctacaaaaaatcctctcagccgacgagccagtcttgcgtgacaacgaagccctgaggaataaatgtcttattccaatgagtgatatcgagatggttctaccaatcacggttggaggttacacagatttcttttgttctgtgcaccatgcaaggaactgcggattcatcttccgagggccgcagactccagttaatccaaattggttttatcttccaataggatacaatggacgagcatcatctatagttgtgtctggaaccgatgtaattaggcccagaggacaaggacatccaacaggaaactccgctccttattttggtccctctcagaagcttgattttgagcttgagatggctgccattgttggtccaggaaatgaattaggcaaaccaattgatatcaatgatgctgaagaacatatttttggcctaactttgatgaatgattggagcgccagagatattcaggcttgggagactatacctcttggacctttccttgggaaaagcttcagtaccaccatatcaccatggattgttactcttgatgctttgaagcctttcatgtgtgaggctcctaagcaggaacccgaacctttaccatacctagctgaaaagaatcacataaactatgacattcctcttgaagtcttgattaagcctaaagatcaaaatgttgcactaattgtcacaaaaactaatttcaagcatctgtattggacggtgacgcagcagctaacacaccacactatcaatggatgcaacatgaggccgggggatatatttgcaactggcacactcagtggacctgaaccggactccctcggatgtctattggagctaacatggaacgggcagaaggagataccagtgggcaatttgacccgcaagtttctagaagatggagatgaggtcatcttgacaggatgctgcaagggtgaaggctacaacattggttttggaacttgcactgggaaggtcctgccggcacttccctgagccaacacgtctttacatcagttctcgagtccaaacactcaacaatctagcaagatgctatgtaactgaacaacgggggttgttttcgcataggaaactgatactctgttgtggaataaaatcggttcaccattttatacacattttctctctcaagaattgtgttattaaacttgtaaaaatgcaatgtctctcatctcttcatccatcgcccagtgagatttgaattctgtgagtatctgtgtatatgggcctggccgcccactagggttccatatactcttgtactcctgcagctagggtattgtattctatactgcaacatggtatcaaagctttatgtttc

SEQ ID NO: 127569 - DNA, 597 bp, Zea Mays
atggcgagcagaggatccactcgcgtggtcctgtgcacgcggctgggcgagcagggcgtggccgacgcgcagggagcagggcgctcagcgcgcgacagagaagagggagaagtaaggcgcgacaccaggaagctcagccaccagcagaaggaaccgccatggcgaccaagcagagaaggagctccgcgagcaggcggattggcgcgccagggagaaggagagcggctgggcgcgatgaaggggctcggctgggcgcagggaggagcgccgggcagagggagctggggaagagaagccgcggcgcgagcggccgagctgaagtcgggcgcgcaaggagctgcagccggccatggagagaccacggcaggcacttgcccatgggagatgcaggggagctcgactgggcgcggtgagctccagggcgcgcggtgcggcaacagagccggagctgagcgcacgcaggggagaaggaacggctgggaggaagaagcttggggagatggggaggagagaggtccgcgcgtagccatggagttgggcagagccgagcagggacagggtagaaggaaccgctcgacaggggagaggagaggataa

SEQ ID NO: 127570 - DNA, 802 bp, Zea Mays
ggagggggacaagaacgtgctgatcgacaaggtgacggtcaaggcccccggcgacagccccaatacggacggcatccacatcggcgactccagcaacgtgaccatcagcagcaccaccatcggcgtcggcgacgactgcatctccatcggccccgggagcaagatgatccgcatccatggcgtcaagtgcggcccaggccacggcatcagtgtcggcagcctggggcgctacaaggacgagaaggacgtggaagacgtgaaggtgacggggtgcacgctcgccggcaccaccaacggcctgcgcatcaagtcgtacgaggactccaagtcgtcgcccaaggccagcaagttcctatacgagggcatcaccatggacaatgtctcctaccccatcatcatcgaccagaagtactgcccccaacaacatctgcgtcaagtccggcgcctccaaggtggccgtcaacgacgtcgtcttcaagaacatccacggcacctccaacacgccggaggccatcacgctcaactgcgccaacaaacctgccatgcgagggcgtgcagctcgtcaacatcgacatcaagtacaatggatccggcaacaagaccatggccgtctgcaagaacgccatcggcaagtccatcggcttggcaaaggagctcgcctgcatctgaaccaattaactaacattttcatatattatatatataatcactcttcgtaacctctctctttctcacgtactctcgagtctccaccgtattatatattcgctggtttgtattttctttcttctttggatcatca

SEQ ID NO: 127571 - DNA, 1503 bp, Zea Mays
atgcccctgcccgcgtctacctcatcatccccgcccacccccgaaccccgcgcccctcccgagctccgccgcgtcatcccctcatttcccccagaaccccgtcgatccgtatgcgaggaggaggacgacagccccgagcccgttctcatctgcttgggaaccctagccgtcgcaggctccgtccgcaactgcaccctcctgtcagtgctccgcctccaccccatctccactgccctcccagttcttgatttctttccccttcggtcgttgatgacctctgtgccgccaccgctgggctcctctcgcatgccaacaaggccctccggtccgctgaagctaacggtgttgatggtgaccgtgccgccagcccctccgacgactctgcttccagtgcgtcctagcgcttccttgccgaccaagaagtataccaggtttgaggcccaggtcttggcgttgcgtgcggaccctgccacgttcaccgtggagcctgaagattctgagggctttggtaaatggagtgccttgttctcaattgacgagatgaaggaacagatagagacggtgctccatgaaagccctgaattggagagctttgtggagaggcttgtgccgtcagttgtggattttactcttctgcacgtatctacagtgaagtctaccatccttgaggttggaaacatcgaactatttgaactgaatgagattatccgctatactccaggaatccagccttacctcttagtggcacaagcgacaccgtctgtcagcctaaaaatgaaaagccaattactgaaagcggagatgaaatctcttatgaaggagcaaaggcaaaacatccaatatctttattattgggactacgaaggagatcaacagggagggaaccaacaaaggcactccatggggggaatggttgtggccagatttgttaatggtgttgcggatataagcgtcgtgtggcatctgtcgcgaccaagcattacgagacagtctcctctagcgctttgcactactcctatcaagtgctcaataacactaggacagtcaagtgagctggagaaattggttgtctcaagtccaaaggcttctaccaatcctttgaacataagcttgacgacggaaggtggaagcgtgtttcctatcaatgatccaataattaccattacggacactgtatctaatcccatggcatattgcttggctgctatgaagagcgaaggtgttaacttaataaggggttacagcgtgggcaactcaagaagcaaccttccagtgaactcaaatccttcttgtgttccccctagacctgccttgggaccgaacagctacactcgtgaagctaccaagggcgcctcgccgaatggcacccaatctagaggcatggaccttcggcgaaaatttccagatacccgtactattttcatatggcataacacactgacattaagtcttatgagagaccttgccaaagaattagcacttggaggaggaagaatgacctag

SEQ ID NO: 127572 - DNA, 459 bp, Zea Mays
atggagctcgccacgacacccgctgttctgcctacttgtgctcggcccagcactcgtgcttgccatcggcttgcattggcactcgcgtgcctgctcgtcgtcaccgctgcgcgctcgctcttcgtccatcgggtttcgcgtgtgctcgcgtttgcgttgagtcgtcgaacccatcatcccctgctcgactgtcaagcaaaccccctgatccgcgtcctgctcgccgtcaactctcggctcacaagctcattttcccttgtgcacatctccacagactctgtctcatcacgcgtgtgcgttatcgaactcgtcgtcgactttatctcccggagacggatcctggatttggatgaaaaggtgagacaagttcgtctagcatctgctaggggctcgaccaaatgtctaaattggacaaccgtcatcgtcctcgcggttatcgaatcaattcggttttggtaa

SEQ ID NO: 127573 - DNA, 1356 bp, Zea Mays
accgcaccctgatccttatctacgcgcgcagctatcctctactgaagctccatcgtgtcgcatctccagctccctgcgcatggtcgccgaaatcagccctgccctcaacaccggccatcacctgctccctccaatggtgcgtgcgccctccctgctccatctccctcggcgccgcgctcctctgctccagccagccgagcagctcggccgagctccttccctgctcgcctggtcgcgccctgcttccatggccactgcgcacttgcccctgctcgcttcttctcgcgcgcgcaggcatcttgctcgctcagcttccttcctctctcttcccatgaccgagctctctctctcgtggtgccctggcctcaccgggatcctggccgcgcgcccttcctgctgccacgcccagcctactcccctgcgcgcgcctgcttcctggccgcggtttctccctcccccgagctcgttaccatggccggcgtacgacttcgcgttcgccgaagctccctggcccgactctgcccagttcgcgccctgctcgcctctgtgtcacgcgccgtagcttccccctcccatctccctctcatctcctctattccgtgtgcgcgcgtctctagctcaacttggagctcgtttggccgcggtctcatcctggctctctggtgcgctggtccagcgtcctgcttcctgcgcgcgtgttctctctgcgccttgctgaagttccgcgcagctcccttctgtgctcgccctggtcccgacgcgcgctcacctctgttcctgtcgggtccgaccatggagctcgcagcgacgcccgctgttctgcctacttgtgctcgccccagcactcgtgcttgccctcggctcgcattggcgcttgcgtgcctgctcgtcgtcaccgctgcgcgctcgctctttgtccatcgggtttcgcgcgtgctcgcatttgccgtcgagtcattgaacccgtcatccccttcttgactcccaagcaaaccccttgatccgcgtcctgctcgccgtcgactctcggcaccacaagctcattttcccttgtgcacatctccacagaccctgtctcatcaccgtgtgtgttatcgaactcgtcgtcgactttatctcccggagactgatcctagagttggatgaaaaggtgaggcaagttcgtccagcatctgccaggggctcgaccaaatgtctaaattggacaaccgtcatcgccctcgcggttatcgaatcaattcggtttttggtaagccaatttattatttcggttaatcgaattagattaactaggcttattagtcgtattaattctcgtgtttagcaggcgcatcgtgtttgtgttagatgtttgct

SEQ ID NO: 127574 - DNA, 115 bp, Zea Mays
agtctcaaattttcggttttcaaatctaatttcaaacctgagtttatgcctcaaaatttaatgtacatacaaaactctagaatgatgcaaagcaaaattttatatgaattatttt

SEQ ID NO: 127575 - DNA, 3442 bp, Zea Mays
agtcagccaccatctgctccgcatcctcctccggcgcccatggcggaggaaaccctcgcgccctcgtcctcgtactcggtctcgtcggcaaagccctaaaccctagtcgacctccatttcggaaccctagccttcccgcgccgccgccatggtccgcagttgcgatgtccgttttgtctcctccggtgtcaagctcccgtgcgagtccacctccgcgctggccccgtccccgtccccgtctccggcacccgcgctcctctccgcagcgctcccgttcgcgcacatcggccgcgccatcgatgccgccgcccgccgcctgggctcctgcctcccacgcgtccctgttgcgcgggccgacccggctccgtccccgccacggcggcacggcaaggacggcggagggcccgaggagcgggtgctgatcagcgaggtcgcggtgcggggaaaggacggggagcccctggagctgcccgagctggaggccgcggccgccgcggcgctgcgcgcgtgccgccccaacgccgcgctcaccgtgcgggaggtgcaggaggacgtgcaccgcatcgtcgagagcggactcttccgatcgtgtatgcccgtcgctgtcgacacccgcgatggcattcgcctcgtctttgaggtggagccgaaccaagacttccatgggctggtatgcgagggcgccaacatgctaccgtccaagttcatggaagatgcatttcgcgatcgccatggaaaaattattaacattaggcatctggatcaagtgatcaagtctgttaacagatggtatcaggagcgtggcctaactgggttggtttcatatgctgagatactttctggagggattctgaggctgcaggtttcagaagctgaggttaataacattagcattcgctttctagacaggaagaccggtgaaccaactgttggaaaaacacagacggaaaccatccttcggcagcttaccaccaagaaagggcaggcttacaatagagcacaagtgaaaagggatgtagaaacaatacttactatgggaatcatggaagatgttacgataatcccacagccagttggagattctaataaagtagaccttgtcatgaatcttgttgaacgcccttcgggtggtttctctgctggtggtggaatttcaagtgggataacaaatggacccctttctggacttattggcagctttgcatattcacatcggaatgtttttgggaggaacaagaaattaaatctctctttggaaagggggcaaatcgattcaatatttagattgaactttactgacccttggattgatggagacaacaagagaacctctagaactgttatggttcagaactctaggactcctggaacacttgttcatggtggtgatcatcctgaccatgcgcctataacaattggacgtgttattgctggcttagaatatagtcgaccattcagacccaagtggagtgggacacttggcttaatttttcagcatgctggtgctcgtgatgataaagggaatccggtcatcagggatttctataacagccaattgactgccagtggacatgattatgatgatacactgttagctaagtttgaaagtatctacacagattctggagaccatagctctacaatgtttgttttcaacattgagcaaggtctccctgttctcccggagtggctaagcttcaaccgactgacagcacgcttgaggcagggctatgaaattggtcctgctaggcttcttctaagtgcctctggaggtcacatggagggaaattttccacctcatgaagcatttgcaattggtgggacaaatagtgtaagaggatatgaagaaggtgctgttggctctgggcgttcttatgctgtaggtagtggtgaagtgtcatgccgcatggtaaacttctttctcctctcgaccttactggctttttgttgttgtcaaatggactccacatggaagtatgacaggcacaactgaatggtaatttaccacagaatgccgtactggcaacaccgcaacaagggtatacatatctacataattgattaaaaatggtattatcctagtacgatttgtaatttaggtaaaatttctttctcagatttagttcaagaaaatcagaaaggaaacaaacaggtgggcatgctgccaaagttcaagactaatacagattagatatggaacgttttgcgcgcacacagtttttatctgtattgctgtatggaaccttctactcataggtgccaggcccagaagcagggcccaaaattctctgcaaatcacaatagtcctggaatatgaatatctagcaacgaatatttgagcaaaaaacaggatcaacattcttctgtcacattgtttattgttgctactagggcccaacatgaaaataaagtgaccagctcagttaaccatctcttacccagtcacattattgggctccttcgcctgtgctagtagcacaatgggctgcagctgctgctgtttatttcctctatagaagaacagtgattgcaggtgtgctcgctgcagcggtaagctcttccgatcaggccactcaaatgagaggatcttgtatgcctgggccatcacccaatggtcgcctgcggtagcttaacttgagctgctgctttcattgccctactttcatattgggcccaagtagcaataatgttatagatggatgctggttctgttcttattagaatatttgttgaacagtacagtatgctatcgttgtaatagcttagtacaactacaacaattgtactgagccccttttccatagataatctgccctgttcttcatgtctgaaatctttttcctgagaacctgtatacatagtcgtctacaaatgccatcatgcgtttgaagaaatgcatgatgttcatggtggtcttacacttctactttaatgcacattttacctagtctgatctcgcgaatgaagaaatcaatgttttaagtcatcatttgattactttatattcttgctctgaatgcagtttgggccactggaaggcgtggtctttggagactatggtagtgatcttggttctggtcctaaagttcctggtgacccagccggagctcgtggaaagccagggagtggctttggctatggtgttggcgtccgcgtggactcccctctgggacctctacggcttgagtacgcctttaatgataggcaagcaagcagatttcactttggtgttggctacagaaattaacatgtatattggtcacattctgattcaatcttgttcttctgagcattttgggctggtagaaactagtgccatgccttccattttttggcgatatcaaagcaagttttgtccagatcagatttcattttttttgtaacatatagttcctttacttctgttgagtgttcttcatctagagaaattaaatggaccctt

SEQ ID NO: 127576 - DNA, 1735 bp, Zea Mays
agtcagccaccatctgctccgcatcctcctccggcgcccatggcggaggaaaccctcgcgccctcgtcctcgtactcggtctcgtcggcaaagccctaaaccctagtcgacctccatttcggaaccctagccttcccgcgccgccgccatggtccgcagttgcgatgtccgttttgtctcctccggtgtcaagctcccgtgcgagtccacctccgcgctggccccgtccccgtccccgtctccggcacccgcgctcctctccgcagcgctcccgttcgcgcacatcggccgcgccatcgatgccgccgcccgccgcctgggctcctgcctcccacgcgtccctgttgcgcgggccgacccggctccgtccccgccacggcggcacggcaaggacggcggagggcccgaggagcgggtgctgatcagcgaggtcgcggtgcggggaaaggacggggagcccctggagctgcccgagctggaggccgcggccgccgcggcgctgcgcgcgtgccgccccaacgccgcgctcaccgtgcgggaggtgcaggaggacgtgcaccgcatcgtcgagagcggactcttccgatcgtgtatgcccgtcgctgtcgacacccgcgatggcattcgcctcgtctttgaggtggagccgaaccaagacttccatgggctggtatgcgagggcgccaacatgctaccgtccaagttcatggaagatgcatttcgcgatcgccatggaaaaattattaacattaggcatctggatcaagtgatcaagtctgttaacagatggtatcaggagcgtggcctaactgggttggtttcatatgctgagatactttctggagggattctgaggctgcaggtttcagaagctgaggttaataacattagcattcgctttctagacaggaagaccggtgaaccaactgttggaaaaacacagacggaaaccatccttcggcagcttaccaccaagaaagggcaggcttacaatagagcacaagtgaaaagggatgtagaaacaatacttactatgggaatcatggaagatgttacgataatcccacagccagttggagattctaataaagtagaccttgtcatgaatcttgttgaacgcccttcgggtggtttctctgctggtggtggaatttcaagtgggataacaaatggacccctttctggacttattggcagctttgcatattcacatcggaatgtttttgggaggaacaagaaattaaatctctctttggaaagggggcaaatcgattcaatatttagattgaactttactgacccttggattgatggagacaacaagagaacctctagaactgttatggttcagaactctaggactcctggaacacttgttcatggtggtgacccagccggagctcgtggaaagccagggagtggctttggctatggtgttggcgtccgcgtggactcccctctgggacctctacggcttgagtacgcctttaatgataggcaagcaagcagatttcactttggtgttggctacagaaattaacatgtatattggtcacattctgattcaatcttgttcttctgagcattttgggctggtagaaactagtgccatgccttccattttttggcgatatcaaagcaagttttgtccagatcagatttcattttttttgtaacatatagttcctttacttctgttgagtgttcttcatctagagaaattaaatggaccctt

SEQ ID NO: 127577 - DNA, 2333 bp, Zea Mays
agtcagccaccatctgctccgcatcctcctccggcgcccatggcggaggaaaccctcgcgccctcgtcctcgtactcggtctcgtcggcaaagccctaaaccctagtcgacctccatttcggaaccctagccttcccgcgccgccgccatggtccgcagttgcgatgtccgttttgtctcctccggtgtcaagctcccgtgcgagtccacctccgcgctggccccgtccccgtccccgtctccggcacccgcgctcctctccgcagcgctcccgttcgcgcacatcggccgcgccatcgatgccgccgcccgccgcctgggctcctgcctcccacgcgtccctgttgcgcgggccgacccggctccgtccccgccacggcggcacggcaaggacggcggagggcccgaggagcgggtgctgatcagcgaggtcgcggtgcggggaaaggacggggagcccctggagctgcccgagctggaggccgcggccgccgcggcgctgcgcgcgtgccgccccaacgccgcgctcaccgtgcgggaggtgcaggaggacgtgcaccgcatcgtcgagagcggactcttccgatcgtgtatgcccgtcgctgtcgacacccgcgatggcattcgcctcgtctttgaggtggagccgaaccaagacttccatgggctggtatgcgagggcgccaacatgctaccgtccaagttcatggaagatgcatttcgcgatcgccatggaaaaattattaacattaggcatctggatcaagtgatcaagtctgttaacagatggtatcaggagcgtggcctaactgggttggtttcatatgctgagatactttctggagggattctgaggctgcaggtttcagaagctgaggttaataacattagcattcgctttctagacaggaagaccggtgaaccaactgttggaaaaacacagacggaaaccatccttcggcagcttaccaccaagaaagggcaggcttacaatagagcacaagtgaaaagggatgtagaaacaatacttactatgggaatcatggaagatgttacgataatcccacagccagttggagattctaataaagtagaccttgtcatgaatcttgttgaacgcccttcgggtggtttctctgctggtggtggaatttcaagtgggataacaaatggacccctttctggacttattggcagctttgcatattcacatcggaatgtttttgggaggaacaagaaattaaatctctctttggaaagggggcaaatcgattcaatatttagattgaactttactgacccttggattgatggagacaacaagagaacctctagaactgttatggttcagaactctaggactcctggaacacttgttcatggtggtgatcatcctgaccatgcgcctataacaattggacgtgttattgctggcttagaatatagtcgaccattcagacccaagtggagtgggacacttggcttaatttttcagcatgctggtgctcgtgatgataaagggaatccggtcatcagggatttctataacagccaattgactgccagtggacatgattatgatgatacactgttagctaagtttgaaagtatctacacagattctggagaccatagctctacaatgtttgttttcaacattgagcaaggtctccctgttctcccggagtggctaagcttcaaccgactgacagcacgcttgaggcagggctatgaaattggtcctgctaggcttcttctaagtgcctctggaggtcacatggagggaaattttccacctcatgaagcatttgcaattggtgggacaaatagtgtaagaggatatgaagaaggtgctgttggctctgggcgttcttatgctgtaggtagtggtgaagtgtcatgccgcatgtttgggccactggaaggcgtggtctttggagactatggtagtgatcttggttctggtcctaaagttcctggtgacccagccggagctcgtggaaagccagggagtggctttggctatggtgttggcgtccgcgtggactcccctctgggacctctacggcttgagtacgcctttaatgataggcaagcaagcagatttcactttggtgttggctacagaaattaacatgtatattggtcacattctgattcaatcttgttcttctgagcattttgggctggtagaaactagtgccatgccttccattttttggcgatatcaaagcaagttttgtccagatcagatttcattttttttgtaacatatagttcctttacttctgttgagtgttcttcatctagagaaattaaatggacccttactg

SEQ ID NO: 127578 - DNA, 699 bp, Zea Mays
cttgagagatccaagaaatataaccatcccttttagaagattatgcaagctaactcctgcaataagagagtattttccaattaaaatgattgtagcttcaacgaagcaaagctgcacaaaatattgccacaagatacaacaagaaatgaaacagtccaaataattatgttatctagatttcgaaaataatatcaagggtgcgcatttgcttaaataagggcactgaattatttcaaaaggactcaatatgtcttaccaacaacagtgataataccactgaataacacttgtcaacgatgttttctcctcatatctttacttgttccaccaccatcatctagcttttctgaagctaaacaaagagaaatttttcttgcttggatcagctggtgtcgaaaagtctagctttggaataatcttaacaatgaaactgaagaaaagaactcctgcaaaaaatgtaaggttccccctgaagaatccaatgaaatttagagcattgtgtgccaagtctagaaaggagatgctgagcataagtcaagcaacaaaccatatagttagtttaaatagtatatagagcattaacaactaaacaacttagtcgaagaggatatttgaagttgcttgataattttccacttatagaagcccaagcactataagattaggggcatgattcaaaccaccaacagtgcacctaaa

SEQ ID NO: 127579 - DNA, 608 bp, Zea Mays
atgacaagtaataagatgtataatgctcagatgggatctcaaatgggaccccagttcacccgtccgtcacaatctggacagacccccaacaccaacgaaacacagggttctgagaccggtcaaggaaactcacagatggacatgcagtggtcgatgcctcctagaggacagattcttcctcctccacaaccagatatgcgatattggccgccagcaccatggggatatcctacacatccaatggggccttggggatgccccccatggccaacacagccacttccatcaccagcggtacgttcctgattcatgttgcttgctacttgttcactttgcaacaaattggccttctttttttgggactactccactgctgcttgtttcttgtgatgccaacactttaggctaggataaatgtttatcatgctttccaatatcttggtgtacatgtcattttgtgatcttcttggaagccacagtttgtgtttatcatgctttcctatatcttcgtgtacatgtgtgatttaatgccagcattttgtgatcttcttggaagccatattttgtgtttatcatgctttcctatatcttggtgtacatgtgattta

SEQ ID NO: 127580 - DNA, 297 bp, Zea Mays
ccatttaataaagttgttaatcagagttggtcaagtctagtgaattgctttgttcttggttgagcgtttattttgggctgggctgagtttcttatcccatttgtttcacttcagttggggcataaatgagctttaccactttgcatctagtttctgctatgtgaattatatgtctttatattctgtatgaacttcatgttttcccctccttgttatgttagtttcaaaggaggtgctgccggattttgctatatttatctttctttattacgcctcttgtgttgagtaagttaggtg

SEQ ID NO: 127581 - DNA, 477 bp, Zea Mays
atggctagcgtcaagggctccatgggaggatctccagcacgtagagaggaggagggcgaaatccgaatagggccgagcgccatgggaagaaccgagcagagcaagcagcggcgcggcatccatggaagagagcacgacacgccggggcagagggacgcgctgggcaccaagttcagcagaggagcacggcgagggagaagacgggcgcagaggagcaagcttcgtgcggcaaacagacagagggagcagggcgcgacgcaggcagccatgggagcttcaaggccgagcgccaagaagaacgagcagggcgccgcgacactgggacagggcaccggcagaggaaggccagggcgcgcggaaagaagcttggggcgcgccggcagaggagatccgagctggggcggcgaggaagctccacggcgggagtcgcggcgcaggacgcaggcgcacggcactgggcgcgtagggaggagctag

SEQ ID NO: 127582 - DNA, 1656 bp, Zea Mays
gggctcccccaccatccgtggcccgacgacgtccccatttccaagctcctcctcgcgattccaatccacgcacgcctcctccgcttccgcctcgctcaggcttatagtcagtgatggaacacaaggaggcgggctgccagcagccggagggcccaatcctatgcatcaataactgcggcttcttcggcagtgctgcgacgatgaacatgtgctccaagtgccacaaggagatgataacgaagcaggagcaggcccagctggctgcctcctccatcgatagcattgtcaatggcggtgacggcgggaaaggacctgtaattgctgcatctgtaaatgtggcagttcctcaagttgagcagaagactattgttgtgcagcccatgcttgtagctgaaaccagcgaggctgctgctgtaatccccaaggccaaggaaggcccagaccggtgcgcggcctgcaggaagcgtgttgggctgacgggatttagctgccgatgcgggaacatgtactgttcggtgcaccgctactccgacaaacatgactgtcagttcgactatcggactgcagcaagggacgcgattgccaaggccaatcctgtggtgagggcggagaagctcgacaagatctgaggcgggcattgggggagcgaaatggttgcaatctgcaagaattcaacatgctgtctttgctgcgttatcattgaaacttgccattcttgtctgctgctgcgtcccgtgaggttcaatactgtgatgcacacagcatccaggcagccgcaagaatttcatcaaaatggtttcccgtgttggctatgtcgtgtaagcttaattcagttattcatggtggtttcggtcggtattgtggtattcccatttaggtagctctgtaatgtattgctgtctcaagcgtgttacattccaattagtaatagtaatcagcaattgtctgccccatatattttttaaaaagtatgttcttgtgatgtcccagcaacatatcacattcagttaaacgctttgcatacgattcattatttcattcagagggccagatgctagaggctgagaggttgtcatagtgttttcaggccactgctctactatacccttatgttatgttcaagtaattgttcatatgtgaagttattgaccaatcaactgatcttgctcctcgtaggaggaagcaacctctgctgctcgtgtagagtcaagggtgcaataaagtggaattcttgttgatgaacacttcatttcatttttttgttgatgaacacttgatttcaaaaatcttcttttatttcagagctgtgattttgtatcaggacacagcttggtgtttgagtatgctgaatctggattagctacaacctacacaagcacaatttcctggtgaatgttgacactaggtgacctgaattctcaagcaaggcgtttcatattctgcaatctctttccagcgtgcgtacaacgggaacatgcagctcgcctttccgcatgtgattgcaacacgcctaacttgtttttgtatgattgtcacctgcaaagaattggaacaagtctaagcaacttgttttttgtatgatcgccacttgcaaagaagataatgatttgtacgaaatagtattcttctgctgggcatgaaatgttttcctccctc

SEQ ID NO: 127583 - DNA, 2372 bp, Zea Mays
cccaccatccgtggcccgacgacgtccccatttccaagctcctcctcgcgattccaatccacgcacgcctcctccgcttccgcctcgctcagggttagggtttcctctgctccccatctcattcttgttttttcatgttggatttgttagagaaggcttgatctatgcctgttggggcccgattcggcgtcccgggatcgattggtgcggttttattgacggggtgggggcaagaggttgcggtggtgttgattcgttggatacggggatttcggggactcgcatgttcgtgggttgatttggccttcgcacttcggttggtggtttctctcggttcttctgtgtggggaaaagaaaacgcgtttcttctctttcttatttttaaagttttaaaaactgtacaatggttgtttatcactttgtcttgtttaaaatcattagatttgtcgttccattttgcctgatttctcaaaaagtttatagcactgttagtagctagtgatttaaatgctctatcatggtggaaatcgtgtgcatctggttgagaacggtggattcgttaaattaacatccctgatttgcctgatttctcaaaaagtgtatagcagatttgatgcacgttgttctcgatttacatccctgagaatcttttttcccttgttttgtagagattcggatttgattatattaccctgattcgtttaaaaggatgggttgagctgtatttgcgcaacatattttgcgacagtgacttctcttcctaaaaattagggtcttgttccgtctaccacgatccattcttgctaagacggcattgaatgtttaatgtgcagcttatagtcagtgatggaacacaaggaggcgggctgccagcagccggagggcccaatcctatgcatcaataactgcggcttcttcggcagtgctgcgacgatgaacatgtgctccaagtgccacaaggagatgataacgaagcaggagcaggcccagctggctgcctcctccatcgatagcattgtcaatggcggtgacggcgggaaaggacctgtaattgctgcatctgtaaatgtggcagttcctcaagttgagcagaagactattgttgtgcagcccatgcttgtagctgaaaccagcgaggctgctgctgtaatccccaaggccaaggaaggcccagaccggtgcgcggcctgcaggaagcgtgttgggctgacgggatttagctgccgatgcgggaacatgtactgttcggtgcaccgctactccgacaaacatgactgtcagttcgactatcggactgcagcaagggacgcgattgccaaggccaatcctgtggtgagggcggagaagctcgacaagatctgaggcgggcattgggggagcgaaatggttgcaatctgcaagaattcaacatgctgtctttgctgcgttatcattgaaacttgccattcttgtctgctgctgcgtcccgtgaggttcaatactgtgatgcacacagcatccaggcagccgcaagaatttcatcaaaatggtttcccgtgttggctatgtcgtgtaagcttaattcagttattcatggtggtttcggtcggtattgtggtattcccatttaggtagctctgtaatgtattgctgtctcaagcgtgttacattccaattagtaatagtaatcagcaattgtctgccccatatattttttaaaaagtatgttcttgtgatgtcccagcaacatatcacattcagttaaacgctttgcatacgattcattatttcattcagagggccagatgctagaggctgagaggttgtcatagtgttttcaggccactgctctactatacccttatgttatgttcaagtaattgttcatatgtgaagttattgaccaatcaactgatcttgctcctcgtaggaggaagcaacctctgctgctcgtgtagagtcaagggtgcaataaagtggaattcttgttgatgaacacttcatttcatttttttgttgatgaacacttgatttcaaaaatcttcttttatttcagagctgtgattttgtatcaggacacagcttggtgtttgagtatgctgaatctggattagctacaacctacacaagcacaatttcctggtgaatgttgacactaggtgacctgaattctcaagcaaggcgtttcatattctgcaatctctttccagcgtgcgtacaacgggaacatgcagctcgcctttccgcatgtgattgcaacacgcctaacttgtttttgtatgattgtcacctgcaaagaattggaacaagtctaagcaacttgttttttgtatgatcgccacttgcaaagaagataatgatttgtacgaaatagtattcttctgctgggcatg

SEQ ID NO: 127584 - DNA, 1855 bp, Zea Mays
cccaccatccgtggcccgacgacgtccccatttccaagctcctcctcgcgattccaatccacgcacgcctcctccgcttccgcctcgctcagggttagggtttcctctgctccccatctcattcttgttttttcatgttggatttgttagagaaggcttgatctatgcctgttggggcccgattcggcgtcccgggatcgattggtgcggttttattgacggggtgggggcaagaggttgcggtggtgttgattcgttggatacggggatttcggggactcgcatgttcgtgggttgatttggccttcgcacttcgcttatagtcagtgatggaacacaaggaggcgggctgccagcagccggagggcccaatcctatgcatcaataactgcggcttcttcggcagtgctgcgacgatgaacatgtgctccaagtgccacaaggagatgataacgaagcaggagcaggcccagctggctgcctcctccatcgatagcattgtcaatggcggtgacggcgggaaaggacctgtaattgctgcatctgtaaatgtggcagttcctcaagttgagcagaagactattgttgtgcagcccatgcttgtagctgaaaccagcgaggctgctgctgtaatccccaaggccaaggaaggcccagaccggtgcgcggcctgcaggaagcgtgttgggctgacgggatttagctgccgatgcgggaacatgtactgttcggtgcaccgctactccgacaaacatgactgtcagttcgactatcggactgcagcaagggacgcgattgccaaggccaatcctgtggtgagggcggagaagctcgacaagatctgaggcgggcattgggggagcgaaatggttgcaatctgcaagaattcaacatgctgtctttgctgcgttatcattgaaacttgccattcttgtctgctgctgcgtcccgtgaggttcaatactgtgatgcacacagcatccaggcagccgcaagaatttcatcaaaatggtttcccgtgttggctatgtcgtgtaagcttaattcagttattcatggtggtttcggtcggtattgtggtattcccatttaggtagctctgtaatgtattgctgtctcaagcgtgttacattccaattagtaatagtaatcagcaattgtctgccccatatattttttaaaaagtatgttcttgtgatgtcccagcaacatatcacattcagttaaacgctttgcatacgattcattatttcattcagagggccagatgctagaggctgagaggttgtcatagtgttttcaggccactgctctactatacccttatgttatgttcaagtaattgttcatatgtgaagttattgaccaatcaactgatcttgctcctcgtaggaggaagcaacctctgctgctcgtgtagagtcaagggtgcaataaagtggaattcttgttgatgaacacttcatttcatttttttgttgatgaacacttgatttcaaaaatcttcttttatttcagagctgtgattttgtatcaggacacagcttggtgtttgagtatgctgaatctggattagctacaacctacacaagcacaatttcctggtgaatgttgacactaggtgacctgaattctcaagcaaggcgtttcatattctgcaatctctttccagcgtgcgtacaacgggaacatgcagctcgcctttccgcatgtgattgcaacacgcctaacttgtttttgtatgattgtcacctgcaaagaattggaacaagtctaagcaacttgttttttgtatgatcgccacttgcaaagaagataatgatttgtacgaaatagtattcttctgctgggcatg

SEQ ID NO: 127585 - DNA, 1814 bp, Zea Mays
cccaccatccgtggcccgacgacgtccccatttccaagctcctcctcgcgattccaatccacgcacgcctcctccgcttccgcctcgctcaggagattcggatttgattatattaccctgattcgtttaaaaggatgggttgagctgtatttgcgcaacatattttgcgacagtgacttctcttcctaaaaattagggtcttgttccgtctaccacgatccattcttgctaagacggcattgaatgtttaatgtgcagcttatagtcagtgatggaacacaaggaggcgggctgccagcagccggagggcccaatcctatgcatcaataactgcggcttcttcggcagtgctgcgacgatgaacatgtgctccaagtgccacaaggagatgataacgaagcaggagcaggcccagctggctgcctcctccatcgatagcattgtcaatggcggtgacggcgggaaaggacctgtaattgctgcatctgtaaatgtggcagttcctcaagttgagcagaagactattgttgtgcagcccatgcttgtagctgaaaccagcgaggctgctgctgtaatccccaaggccaaggaaggcccagaccggtgcgcggcctgcaggaagcgtgttgggctgacgggatttagctgccgatgcgggaacatgtactgttcggtgcaccgctactccgacaaacatgactgtcagttcgactatcggactgcagcaagggacgcgattgccaaggccaatcctgtggtgagggcggagaagctcgacaagatctgaggcgggcattgggggagcgaaatggttgcaatctgcaagaattcaacatgctgtctttgctgcgttatcattgaaacttgccattcttgtctgctgctgcgtcccgtgaggttcaatactgtgatgcacacagcatccaggcagccgcaagaatttcatcaaaatggtttcccgtgttggctatgtcgtgtaagcttaattcagttattcatggtggtttcggtcggtattgtggtattcccatttaggtagctctgtaatgtattgctgtctcaagcgtgttacattccaattagtaatagtaatcagcaattgtctgccccatatattttttaaaaagtatgttcttgtgatgtcccagcaacatatcacattcagttaaacgctttgcatacgattcattatttcattcagagggccagatgctagaggctgagaggttgtcatagtgttttcaggccactgctctactatacccttatgttatgttcaagtaattgttcatatgtgaagttattgaccaatcaactgatcttgctcctcgtaggaggaagcaacctctgctgctcgtgtagagtcaagggtgcaataaagtggaattcttgttgatgaacacttcatttcatttttttgttgatgaacacttgatttcaaaaatcttcttttatttcagagctgtgattttgtatcaggacacagcttggtgtttgagtatgctgaatctggattagctacaacctacacaagcacaatttcctggtgaatgttgacactaggtgacctgaattctcaagcaaggcgtttcatattctgcaatctctttccagcgtgcgtacaacgggaacatgcagctcgcctttccgcatgtgattgcaacacgcctaacttgtttttgtatgattgtcacctgcaaagaattggaacaagtctaagcaacttgttttttgtatgatcgccacttgcaaagaagataatgatttgtacgaaatagtattcttctgctgggcatgaaatgttttcctccctc

SEQ ID NO: 127586 - DNA, 1235 bp, Zea Mays
agatcggagagcgaaagcgaaaccggcgccgtctctccccaccctcgcggtcgtcgcccaccgtttttattacatcttcttcttggtttcagctgcgcacagggaatccgtgaagctcctgtgccagacacagagagagcaaaccgtgcagcggtgcaggccagcgcgatccagctcccatcagtgggcgcgcccgccgtctcttgcgaccctgtcttcttggtttcttggcggggtcgtcctgctcgtgtcgcgctgcccacaacccgcgttctgtcgcggcatccgccgtggatcttggcccgggttgtccctatatcacgcagaaaaaagggccatccccccccccccccccccttcgccctcgggttcgttactgagtgtgccggagtggtattcgtgttccgccgggtgccgaggtggcctcgcggtcttctgccgtctcatcgtcgcctgctccccgtcgcgttcatcccgaggcatatcttggtcttgtaattgtataaaaagaaggtttggggaatcaggtttatctaaccagtggacatggtatcagttaatcttgggttagttcattatgtactggaccacatatatggaacacttcttcatcgcaccaaactaggaacaccatttttctcaaaaggatggggaggtaccaaacttgatttgctagagaagatggtgaagcagttgtttcccgaggcacgttgccaaaactggccaccaactgctgtgcagccaatgtggaaaacagtatgggagacaaacaattcttgtctgcgagaaggagttttcaggactacatgtgatgagcgactaatcgatgcattgccacctgagagtcacaatgcaagagttgcttttcttacccctaaaaatgttacacctgagaagatgtcatgtgtggtccatcttgcaggcactggtgatcacacatttgagcgcaggcttcggctgggtgggcctcttcttaagaacaatattgcaactatggttcttgagagcccctattatggacagcgacgtcctagcatgcagcgtggtgcaaagctccagtgtgttagtgatctgttacttctagggaaagccacaattgatgaagctcgcagtctcctgtactggctgcagaatgaggctggttacggcaagatgggcatatgtgggctcagcatgggtatgtaatattggttttccttttattttttctgaacacgtagtagatctacgtttgt

SEQ ID NO: 127587 - DNA, 860 bp, Zea Mays
ataattttgaaatcaatgtgttgatgttatgtgtttgctggggagagcatgtctgagcacctgcattgcattgcatctttcttccggagtccggacgtttgttggcatatcttggtcttgtaattgtataaaaagaaggtttggggaatcaggtttatctaaccagtggacatggtatcagttaatcttgggttagttcattatgtactggaccacatatatggaacacttcttcatcgcaccaaactaggaacaccatttttctcaaaaggatggggaggtaccaaacttgatttgctagagaagatggtgaagcagttgtttcccgaggcacgttgccaaaactggccaccaactgctgtgcagccaatgtggaaaacagtatgggagacaaacaattcttgtctgcgagaaggagttttcaggactacatgtgatgagcgactaatcgatgcattgccacctgagagtcacaatgcaagagttgcttttcttacccctaaaaatgttacacctgagaagatgtcatgtgtggtccatcttgcaggcactggtgatcacacatttgagcgcaggcttcggctgggtgggcctcttcttaagaacaatattgcaactatggttcttgagagcccctattatggacagcgacgtcctagcatgcagcgtggtgcaaagctccagtgtgttagtgatctgttacttctagggaaagccacaattgatgaagctcgcagtctcctgtactggctgcagaatgaggctggttacggcaagatgggcatatgtgggctcagcatgggtatgtaatattggttttccttttattttttctgaacacgtagtagatctacgtttgt

SEQ ID NO: 127588 - DNA, 1712 bp, Zea Mays
gaagaagccatagccatccaggaagaagaagccatagcaaaagcagctgaggggggattagagaagaacagcagcgcatcagatagggagaattgaagctgatcttttgtatcatatatctttcctgcatgcttcatcagtccgacacttgagagaggttcgagagagaagttattaagctgcctccacactggtagcaagtgattgcatgcatgggggataggacatggcagcagccacatgcgcaggcttcttccccagacgcagggaccaaggtccaagcttcatcatcgtccgtccatggcaacatcatcagaaaggagccagctggaggcggcggatacgacgacatggccgagttcgatcaagcgctcttcctctatcttaacagcagccaggatcaagcatcagttattcaagatcaacctcaaactctcaacatcttcccttctgaaccaatgcatgtcgtcgagcctgctgcaccaaaggaatctatgggggctacgactaacaacacggcgtggaacaacgccggcgcaggcccatccaagcagccgccatccaaccttccgtcgaggacgacggcgactccggcagggccgcgaaaggacggcagcaaaccgccggcagccgtcaagagagaagggagcagcagcggtggcgccatgggaagcggcacaccgtcgacgtcgaaccaacaggagggccccaccaggacctcagacgccaagacgctgagaaggctcgcgcagaacagggaggcggcacggaaaagcaggctcagaaagaaggcgtacattcagaacctagagacaagcagggttaggctggcccatctggaacaagaggtacacagatcaagaactcaggcggcatggttcgacatggagcacgcgaggtggcaggaggagcacggcaaggtgatgcgccacctgcgggcggcgctggaggcggagtacgccgcgacggcgacgacgccagcggcggcggcggcggacgcgcagctccggcagctggtggacgcggcggcggcgcaccacggtgcgctggcggagctgaaggccgtggcggcgagcgccgacgcgttccacctcgtgtccggggcgtgggtgtccgccgccgagcgctgcttcctctggatcggcggcttccgcccttcagagctcatcaagatagcggcccggcacgcggagcccctgacggagcagcaggcgatgagcgtctgcggtgtgcagcagtgggcgagggacgcggaggcggcgttggaccacgagctgcaagcgatgcacagctccgtgtcggaggccatctcctccgacgcggcggcgctgctctacccctactccgacgtgcccggcttcatggccaccatgtccctcgccatcagcaagctcgcctccctcgaagccttcgtcagacaagcggacgcgcttaggctgcagacgctgcaccggctgccgcagatcctgacggcgcggcagtcagcgcggtgcttcctcgccatcgccgactactcccaccgcctccgcgcgctcagcgaactctggcacacccggcaaggacatgagcgagcggcgagcacccaggcggccaggcccagccagacaccgccctaccaaagtagagacggtttactatagacgttacaaagtagagatagtttcaaagatacagatagaggtgatcactgatcaggaattctgatgacccat

SEQ ID NO: 127589 - DNA, 333 bp, Zea Mays
gttcatttccatttcccatttctagttttcaaacttgagttcaattatgtgttttaaatgctcatccaaaattctagcatgatgcaattattttgaattcaaattcgaatctaggttcaggattcacattcatatgcatcattataacaacaccttcgcatgcaaaatataattttatgttatttatttctcatctcattcatttatgcttatgcttttaaatgtgcacacaaaatatgtattttaagaaatttagttctagttttaaaagatccttaagagtaaagtctagaagatatgatttatcaaaggaacaaattattactgagctcc

SEQ ID NO: 127590 - DNA, 818 bp, Zea Mays
cataactaaaccagaatcgaaaccactagatcgacgaagattcttggctcaaacaaatcatcgaacacttagcaagcgttgtgtttggacttcgtcttctccaccaaatcatgagatttctcctcacaatatccacacatatacactgattattagcaaggcacaacgtcgggtgaagaagcaagttgaaaaatattgagggctctcaccgagaatgggcgacgccggcactggagtggtccaaacacagctacgatgacacgtggcctgctgcatataacatcgagcaacaaacgagcgagaattaagaggtgctgctgcgattgtgcaaaaacctaggggaggcgcggatgcttgggctttcatccatggagaacaaaagaagaagggtgggctgctactattgacgtccatggaaggagttggggcggccatgggagatggctggaacagggaagtggaggttggacgagaagaagtgcaggaacaagctcgtccacagggggaagcggctggtgcccagagcgccatgggagatggctagaaacggccatgggagggagctggggactgcgagcaccatggacggggaggtgcaggggaggagaggagaggcggaggtaccggttggacacaagggaatggtgggcgggcagggagcagcatcagccaacattggtgcaggggcagcaaacggcacccacgacgagcaccggagggatcagagcaggaagggtgtccatggtggagctggaaggagtaccaaaagcgccgacagcttggtgccggataataagaaaccaagccccagaggctag

SEQ ID NO: 127591 - DNA, 2200 bp, Zea Mays
cgatcctcgccattccgacgccgcactcgcagatcttcccttcgtcctccacgccccacccctcgcgtcgccgctatggccgacgaggccctggaccagccgccagacgcggccccgtctccgtctctggccccagcgacgccgccggcccccgccacctcgtcccccgcggcgctgctccgcccgcgtcgggaggcgttcgagcatgggctcctgcccatccccaagctcatcttcccggagggcatgctagcgcagaccctcgcccagctcaaggagaagctcgccgcctcagtccccgacgggcgcgtgcgcgctgcggccctggctgaggcgctgcagatcccgcaggagcaggcggcgctcgccctcggcacgctcgcggcggtgctcccggccgaggaccccgtgcttggggacggcgccatggatggtgctgccgccgacatccgcgacgtgctgctcttcctctatatccagtcttacaagcgcctcgttccgcggagcgcgcacaaggactcgcccgccgtggcggacgtctggccgtccacctccgcgttcgatgggtacctctccgcgctctccccgatccagcttgttcgcagcaacagccgccgttttatgccttctcaagctgatgaagaaattcatcagttgtcctttctgcaaaagcatatggcgaatattcttactctcttggcagattctgttgagggtgagggtgacgattcactggtattgacaatggagacttttgagcaccttggatttctagttcagttctcagaaggaacttccttaagccaggctgctacattttttgcaaactcagacccagacatgcctgctgtgcctgtccctgctgctcaggttcttgattggatgtcacagaacatagctttttcgctggaatattcttctgagaggtccgtagctaaggaaagcaaccagcaaaccatgtctgatcttgatgtgaccatggctgaggccaatacaagtcactcacggaacagcacaccaagtgctaatcctgcatactacagaaatgtaacgtttgtggagggcttttccaaaacctctgttgtcaagcatgcatctgatgtcaaagggaattcaataaaggttttgaactgtcatgattctgttatctacatattagcaccactgaagtatgctactgtgtatggttgttctgatgctacggttgttcttggtgctgttggtaaggtagtaaaagtggagcattgtgaaagagtgcatatcattgcagctgcaaaacggatttgtattgccaactgccgggagtgcatcttctacctaggagtaaatcaccaacctcttgtattgggggacaaccataaattacaagttgctccattcaatacatgctacccacaactgcaggatcatatgatgcaagtgggtgttgatcccagtgtcaacaaatgggaccaaccttttgtattgggagttgtggatccacatgattcattatcccatcctgctggggttgcagatgttaaagctgaatcagcaacatgtctggatcctgatctattcaccagttttttgattcctagttggtttggggatgaagggcaagagcctataaactgcaatcctttcccactgcctgaaatttatgaggcattccaaagcaaaaagcgttctgctctggaagatatccaaaagatgattcgggagctacagcttgacgagaatcggaaaagggaattggcagctgcccttcatgctcagttcaaggattggttatacgcttcgggcaatatccgccagctctactgtctacaaggtgattaatggtgcaatttacaagactgattatcctctgccgactcctcaaaaacattcgacgattgtcgaagctgacctcttccttccatggaaaggactcccaccctgctcacctgcggtatttacacaagtatgtaaaaaatgaagatgtactattgcctattttttacagattcatttgcgtatttctccaagtcttctctttgctgcgagttgggtattaattaggatgtgatattgcttaatttcccccctgtttctactcattttttggcccttgataatgtccacgagtatgtaatagggactaatgaatcaaacgttgttaaataaacatttcattccgttttgctaaatggctcatcatgtcaaccctctatggacc

SEQ ID NO: 127592 - DNA, 3118 bp, Zea Mays
tgcaacacggcatctaccccaccggactcactatatctacggcccatcagcatacgcacagaccgcgcgctcggtcgactactggctagcttgtttcagtcgtccgatctgatctacagaaaaagcaggggcagggcagctagccatgattcagatgaacatgaagcagcctctcgtgctgcccgcgcaccggggcaatgtcatcggctcgcgcctggcgtcgtcgccctctccggtggcggcggcggcggcggcggccagcaggcggaggggcgtcgtgtcctccccccgctcccggctccagcgccacatgcggctgccgaggatcagctgcagcgccaccgaggaggccagcggcgccgtgtcggccgtcaccgtggagaagatgctgacggtgacggcctcggtgcaggcggcgccggccatcggtcagatgtacttccagcgcgccctcgacgacgccggcgacttcttcggcaagacgctgctgatggaactcgtcagctccgaggtcgacgcaaagacgggtctggagaagccgcgggtgacggcgttcgctcacaagacgctgcgggagggccactacgaggcggagttcaaggtgccggcgtcgttcgggcccgtgggcgcggtgctgctggagaacgagcaccacaaggagatcttcatcagggagatcaagctcgtcacgggcagcgacagcagcaccgccgtcaccttcggctgcaactcctgggtgcactccaagttcgacaacccggagaagcgcatcttcttcaccctcaagtcctacctgccgtccgacacgcccaagggcctggaggacctgaggaagaaggacctgcaggcgcttcggggcgacggccacggcgagcgcaaggcgtccgagcgcgtctacgactacgacgtgtacaacgacctgggcgacccggacaagaaccccgcccaccagcggcccgtgctgggcggcagcaagcggtacccgtacccgcgccgctgccgcaccggtcgccccaggaccaggaaggaccccgaggcggaggtgcgccatgggcacaactacgtgccccgcgacgagcagttctcggaggtcaagcagctcacgttcggggccacgacgctgcgctcgggcctgcacgcgctgctcccggccatcaggccgatgctcatcaagagggagctgcgcttcccgcacttcccggccatcgacgacctctacagcgacggcatcccgctgccggcgcagaccgggttgggcgccatccgcagcatcgtcccgcgcgtggtcaagctggtggaggacaccaccgagcacgtcctccgcttcgagctgccggacatgatagagagagaccgcttctcgtggttcaaagacgaggagttcgcgaggcagacgatcgcggggctcaacccgctgtgcatccagctcctgacggagttccccatcaggagcaagctggacccggaggtgtacggcccggcggagtccgccatcaccaaggagatcctggagaagcacatgagcggcggcgccgccatgaccgtggagcaggcgctcgcggcgaagcgtctgttcatcctggactaccacgacgtgttcctgccctacgtgcacagggtgcgcgagctgccggacacgacgctctacggctcccgcaccgtcttcttcctcacggacctgggcacgctgatgccgctggccatcgagctggtgcggcccaaatcgccgacgcagccgcagtggaagcgggtgttcacgcacgggcccgacgccaccgacgcctggctgtggaagcttgccaaggcgcacgtggtgacccacgacacggggtaccaccagctggtgagccactggctgcgcacgcactgctgcgtggagccctacatcattgccgcgaaccggcagctcagccggctgcacccggtgtaccgcctcctgcacccgcacttccgctacaccatggagatcaacgcgctggccagggaggcgctcatcaacgccgacggcatcatcgaggagtccttctggccgggcaggtacgccgtcgagctcagctcagcggcgtacggcgccacgtggcagttcgacacggaggcgctgcccaacgacctcgtcaagcgtgggctcgccgtgcgccgggacgacggcgagctggagctcaccatcaaggactacccctacgcgcacgacgggctcatggtctggaacaccataaggcagtgggcggccgactacgtcaacgtctactacaagtccgacgaggccgtcgccgccgaccccgagctgaaggcgttctgggacgaggtgcgcaacgtgggccacggcgacaagaaggacgagccgtggtggcccgtgctcgacacccgcgacagcctcgcggagacgctcaccaccatcatgtgggtcacctccggccaccactcggcggtcaacttcgggcagtaccacttcggcggatacttcccgaaccgcccgaccaccatccggaagagcatgcccgtggaggaggaggcgggccgggacgaagagatgaagaagttcctgaagcagccggagacgaccctgctggacatgctgccgacgcagatgcaggccatcagggtgatgacgacgctggacatcctctcgtcgcactcgcccgacgaggagtacatgggagagttggcggagccgtcgtggctggaggagcccatggtgaaggcggcgttcgagaagttcggcggcaggatgaaggagatcgagggattcatcgacgagtgcaacaacaacccggagctcaggaaccggtgcggagcagggatcgtgccgtacgaactgctcaagcccttctccaagccgggagtcaccgggaggggcatccccaacagcatctccatttgacccgtccgtcctctccatccaatgggggtttgccttattgcgtgcacgctagctagctgcttggaaataaaaataattaaaataaaaggtctcgtctgtactattgtattgtaccatggatcatatcgtacatgttgtgtcaatgcaaagaggcacgtttgagttaccattaggatgacattactagcagatcctttttatacagcgaaaatacatacacaaaaaaaaaagacaata

SEQ ID NO: 127593 - DNA, 2708 bp, Zea Mays
gtttcagtcgtccgatctgatctacagaaaaagcaggggcagggcagctagccatgattcagatgaacatgaagcagcctctcgtgctgcccgcgcaccggggcaatgtcgccggcgacttcttcggcaagacgctgctgatggaactcgtcagctccgaggtcgacgcaaagacgggtctggagaagccgcgggtgacggcgttcgctcacaagacgctgcgggagggccactacgaggcggagttcaaggtgccggcgtcgttcgggcccgtgggcgcggtgctgctggagaacgagcaccacaaggagatcttcatcagggagatcaagctcgtcacgggcagcgacagcagcaccgccgtcaccttcggctgcaactcctgggtgcactccaagttcgacaacccggagaagcgcatcttcttcaccctcaagtcctacctgccgtccgacacgcccaagggcctggaggacctgaggaagaaggacctgcaggcgcttcggggcgacggccacggcgagcgcaaggcgtccgagcgcgtctacgactacgacgtgtacaacgacctgggcgacccggacaagaaccccgcccaccagcggcccgtgctgggcggcagcaagcggtacccgtacccgcgccgctgccgcaccggtcgccccaggaccaggaaggaccccgaggcggaggtgcgccatgggcacaactacgtgccccgcgacgagcagttctcggaggtcaagcagctcacgttcggggccacgacgctgcgctcgggcctgcacgcgctgctcccggccatcaggccgatgctcatcaagagggagctgcgcttcccgcacttcccggccatcgacgacctctacagcgacggcatcccgctgccggcgcagaccgggttgggcgccatccgcagcatcgtcccgcgcgtggtcaagctggtggaggacaccaccgagcacgtcctccgcttcgagctgccggacatgatagagagagaccgcttctcgtggttcaaagacgaggagttcgcgaggcagacgatcgcggggctcaacccgctgtgcatccagctcctgacggagttccccatcaggagcaagctggacccggaggtgtacggcccggcggagtccgccatcaccaaggagatcctggagaagcacatgagcggcggcgccgccatgaccgtggagcaggcgctcgcggcgaagcgtctgttcatcctggactaccacgacgtgttcctgccctacgtgcacagggtgcgcgagctgccggacacgacgctctacggctcccgcaccgtcttcttcctcacggacctgggcacgctgatgccgctggccatcgagctggtgcggcccaaatcgccgacgcagccgcagtggaagcgggtgttcacgcacgggcccgacgccaccgacgcctggctgtggaagcttgccaaggcgcacgtggtgacccacgacacggggtaccaccagctggtgagccactggctgcgcacgcactgctgcgtggagccctacatcattgccgcgaaccggcagctcagccggctgcacccggtgtaccgcctcctgcacccgcacttccgctacaccatggagatcaacgcgctggccagggaggcgctcatcaacgccgacggcatcatcgaggagtccttctggccgggcaggtacgccgtcgagctcagctcagcggcgtacggcgccacgtggcagttcgacacggaggcgctgcccaacgacctcgtcaagcgtgggctcgccgtgcgccgggacgacggcgagctggagctcaccatcaaggactacccctacgcgcacgacgggctcatggtctggaacaccataaggcagtgggcggccgactacgtcaacgtctactacaagtccgacgaggccgtcgccgccgaccccgagctgaaggcgttctgggacgaggtgcgcaacgtgggccacggcgacaagaaggacgagccgtggtggcccgtgctcgacacccgcgacagcctcgcggagacgctcaccaccatcatgtgggtcacctccggccaccactcggcggtcaacttcgggcagtaccacttcggcggatacttcccgaaccgcccgaccaccatccggaagagcatgcccgtggaggaggaggcgggccgggacgaagagatgaagaagttcctgaagcagccggagacgaccctgctggacatgctgccgacgcagatgcaggccatcagggtgatgacgacgctggacatcctctcgtcgcactcgcccgacgaggagtacatgggagagttggcggagccgtcgtggctggaggagcccatggtgaaggcggcgttcgagaagttcggcggcaggatgaaggagatcgagggattcatcgacgagtgcaacaacaacccggagctcaggaaccggtgcggagcagggatcgtgccgtacgaactgctcaagcccttctccaagccgggagtcaccgggaggggcatccccaacagcatctccatttgacccgtccgtcctctccatccaatgggggtttgccttattgcgtgcacgctagctagctgcttggaaataaaaataattaaaataaaaggtctcgtctgtactattgtattgtaccatggatcatatcgtacatgttgtgtcaatgcaaagaggcacgtttgagttaccattaggatg

SEQ ID NO: 127594 - DNA, 341 bp, Zea Mays
ttgtgtggtatagttcactgtgacatgatagttttgtcacatattttttttccttttttccctctaggctatgtacaccctagttgtgtagaggccggaagttatctcagtgtcttgtatcacgctcgtatcacactgatgttattcgctaaggtcaatagtgatttccttttccaaaaaatataacttataaagtttcaaaagtagcctactgatttccattaaaagaacatcccataatatatcttaaaaaatccacaacaattacataaaagattatgtaaaagtataaaagtattagatagataaaagccacataaaatttaagttgcaaagaacac

SEQ ID NO: 127595 - DNA, 526 bp, Zea Mays
acccgacgagtaaagccatgccgctatagaatcgtactatcgtagtcgtcgccgccgccgccatcgcgccgctccggtctctggcggccaccgcatcatcttctcttgcgttgttctgtctgttacactgactttcttctgctcagcgaccgacgagttttgtcgtatcgcttcctcccccgcctctatgggtccttttggcggtgtcgagctggaattgggggtggatgtggaagcggaacagagagaggtgcaggctttggcctgcttcgctgatgcgacgccgcgggcgagtcagtgctggtgctgtggtgccgggtttgtcgatcacgtctgcaaattttgtggggaaacaccaattttgcagttgtttggtcatcggttaagcagactttcccttttttttaatcttagtaaagttgcagagtagaatggttgtccattactaatctagcatgttgtataccagcacatcaaagctcctttctgaaagcacgaattatataaaccctgcttggctgcttcc

SEQ ID NO: 127596 - DNA, 3837 bp, Zea Mays
atgtcggttgaggcatttacgaataagagctattctgagtttgatacattcagcttgctcatcctatttgtttgcttcatcactgcttttggtggatcagatataaagaatctatatgctctgagggatgaactcgtggaatcaaagcaattccttcaagactggtttgatatagaaagtcctccatgcttgtggtcacatataacttgtgtggacaaatctgttgcagtcatagatttgtcaaatatcccactccatgttccttttccattatgcatcacggcattccaggcacttgctcgtctcaacttaagtaggtgtgatttatttggtgagattccagaagccttgggaaatttgaagcatcttcagtacctggacttgagcagtaaccagcttactgggattgtgcctttctcattatatgatttgaagatgctgaaagaaatagtgttagacagaaacagcttgtcgggacaattgatccctgccattgctaagcttcagcaactcgctaagctaaccatatctaagaacaacatttctggagaacttcctccagaggtgggcagtttgaaggacctagaggtcttggactttcaccagaacagcttcaatggatcaataccagaagcactaggcaatttgtctcagctcttctaccttgatgcaagcaagaatcaactcactggatcaatatttccaggaataagcacattgttcaacctgttgacacttgatttctcttcaaatgatttggcggggccaatacctaaggagattgctcgcatggaaaatctagagtgcttggttttggggtccaacaatttcactggaggcattccaaaagagattggtaacctaaagaagctaaaaaaactcattctctctgcatgcaacttatcaggcaccatcccttggtcaattggtggtcttaaaagcctacatgaacttgatatatcagacaacaactttaagtcagaactcccagcatctattggtgagctgggaaatttgaccgtcctgattgcaatgagagcaaagctcataggcagcataccaaaagaacttggtagctgcaagaagcttactctccttcgtctgtccttcaataggttaactggttgtatccccaaagaacttgcaggtttagaagctattgttcattttgaggtggaaggtaacaaactgtcaggtcatattgctgattggtttcaaaactggggaaatgttgtatctataagactgggagataataagttcaatggttctatacttcctgccatatgtcaagccaattctcttcagtcacttgacttgcatttaaacgatctgacagggagtatcaatgagacatttaaaaggtgtaggaaccttactcaactgaatttgcaaggcaaccatttccatggtgagataccagaatatttggctgagttaccgctcacaattctggaattgccctataacaactttactggactcttgcctgccaagttgtttaagtcatcaacaattttggagatagatctcagctataacaagctcactggctgtattcctgagagcatttgtgagctccatagcttgcagaggttgaggatgagcagtaactacttagaaggatcaatcccgccggcggtaggtgctctcaagaatttgaatgaaatctcccttgatgggaatagattatctgggaacataccacaagagctcttcaactgcagaaacttagtcaagttaaacctgagctctaataatctgaacggaagcatctcgagatccatatctcagttgacttcgctcactggcttggttttgtctcacaaccaactctctggttcgattcctgctgagatatgtgggggattcacgaatccgtctcaccctgaatcagagtatgttcaatatcatggcttacttgatctgtcatacaaccggttgattggtcgtatcccaccagaaatcaagaattgtgttattctggaggagctacacctgcaagataactttctgaatgaatctattcctgtggagcttgctgagctgaagaatcttatgaacgttgacctctcttttaatgcattagttggacctatgcttccttggtccacgccattgctcaagctgcaaggcctttttctgtctaataaccacctaactggcaatattcctgctgagataggtcgcatccttcccaacatcgtggttctaagcttgtcctgtaatgcatttgtggctaccctaccccaatctctactatgcagcaagaccctgaaccgtctggatgtcagtaacaataacctctctggtaaaatcccgttatcttgtactggctttgaaggaacattgagctcgctgatcttgttcaatgcaagcagtaaccatttctcagggagccttgatgggtctatctcaaatttcgtacatttgtcttatcttgatattcacaacaacagcctcaacgggagcttgccagcagcactgtccaatctcagtttgctctatcttgatgtctcaatgaatgatttcagtggtgccatcccctgtggtatgtgcaatctatctaacatcacgtttgtcgatttctctggtaaaaatactggcatgcatagcttcgcagattgtgcagcatcaggcatttgtgctgctgatattaccagtaccaatcatgtggaggttcatacacctcatggaatggtaataacaatgaccatttgtgccgccattctcattgtggttcttcttgtggtttttgtgaaatggatggtgttgagaaacagttccttacctcttgtatccggccttgaatccaaggccacaattgagccagcctccagtaaagagttgctaggaaaaaaatcaagggaacctctaagcatcaatctttctacatttgagcatgcactgctgagggttaccatggatgatatcctgaaagctaccaataatttcagcgaggtgcacatcataggacatggtggttttgggactgtctatgaagcagcattccctgaaggacagagggtcgccgtcaagaggcttcatggtagctgccagttccttggtgaccgtcaattccttgctgagatggagaccattggaaaggtgaagcatcataaccttgtccccctacttggctactgcgctcgtggtgacgagcgtttcctgatctatgagtacatgcatcatgggagccttgagacatggctgaggacccatgaaaatacacctgaagcaattggatggcctgaacgtctgaggatctgcctcggttctgctaatgggctcatgttcctccaccatggctttgtgccccatatcatccatcgggacatgaagtcaagcaacattctactggatgagaacatggagccgaagatctctgactttggccttgcaaggataattagtgcctatgacactcatgttagcaccaccgtctctggcacgcttggctacattcccccagaatatgcgatgattatggaatcgaccgcgaggggtgatgtctacagctttggcgtagtcatgctggaggtgctcactggacggccgcctacagggaaagaggtggaagaagggggagggaaccttgtcgactgggtgcggtggatgattgcatgcagtcgggagggtgagctgtttgatcctcgcctgcctgtttcaggcctgtggcgagagcagatggtgcgtgtgcttgccattgctctggattgcaccaccgacgagccatcgaagaggccgaccatggtggaggtagtgaagggactcaagatggtccagctgatgaagcgtgattctcacaacccccagcatcatgcggtgcagccatga

SEQ ID NO: 127597 - DNA, 2313 bp, Zea Mays
atatatatatggctggagcttaaaagtccaatctgtgttcttttctacctctttcggtctccgctgagacttgaaacagcctttcatggatgtactgaagagaaaaagaaccttttgtaccataagatagtagaacagaattggtgtctcagatttcttcaaagttctgagtctccaaattggcaaaaagttgaagttaatgggggccatgtgcatgtgtccgggtccggcatctggaaatggaatggtactccaatatatattcggctcgcccctcaccaaccggtggaggacgacgaccggtcccattccccccgccccaacttgtcaggactcaagaggctcccctcctccctcgccgcggaacacgcgcgccgtcgtcgccagcccgggttcatttctccgttccttggtgcggtggtagccgagcgctccggccatggcgttctatcggggcctcaccgcagtctcgagactgcgatcacgcatggcgcaggaggccaccacgctggggggtgtgaggtggctgcagatgcagagcgcgtccgatctcgatcttaagtcccagttgcaggaattgattccggaacaacaggatcgcttaaagaagctcaagtcagagcatggaaagacccagcttggaaacataactgtggatatggtccttggtggaatgagagggatgactggaatgctttgggaaacatccctacttgatccagaggagggtattcgttttaggggcctctcaattccagaatgccaaaaagtgctgccaacagcagttaagggcggtgaacctttgcctgagggtctcctttggcttcttttgacggggaaggtcccaaccaaagagcaagttgatgcactatcaaaggaattgcttgcgcgctcaactgttccagctcatgtctataagacaatagatgctctcccagtagatgcacatcctatgacacagtttaccacaggagtaatggctcttcaggttgagagtgaatttcaaaaggcttatgacaatggattgccaaagtcaaagttttgggagcctacttatgaagactgcttaaatttgattgctcggcttccaccagtggcttcttatgtttaccggagaattttcaagagtgggaaatcaatagaagccgataattctttggactatgcggcaaatttctcacacatgcttggttttgacgacccaaaaatgctggagctgatgcggctctatgtaacaattcacactgatcatgaaggcgggaatgtcagtgctcatactggtcatctggttgggagtgctctgtcagatccttatctttctttcgcagcggctctaaatgggctagctgggccactgcatggccttgcaaatcaggaagtgcttttatggatcaaatctgtaattgaggaaactgggagtggtgttaccacagatcaactcaaagactatgtctggaagacactaaagagtggaaaggttgttcctgggtttggtcatggagttctgcgtaagaccgacccacggtattcatgtcaaagggagtttgccctgaagcatttgcccaaggatccacttttccaattggtgtccaagttgtatgaagttgtacctcctatcctcactgagctgggcaaggtcaagaacccatggccaaatgttgatgctcacagtggagttttgctgaaccactttggactatctgaagcacggtattacactgtcttgttcggtgtttcaagaagcatggggataggatctcagctcatctgggaccgtgcccttggcctgccacttgagaggccgaagagtgttaccatggagtggctggagaactactgcaagaacaaggctgcttgaagcttttcacaaatgctgctttttcccaaccttggctgttaataatttaaacgcgagttatagaaatagtcattttccctttggccgttgaataacgcaagagcaatatgctcaggcggaagaattttgtatcttccgtaacttggtgaacatccagatacttgatctgcggcaacaatgggcagaagagattaggacatgctgattgatctttatacgccaacacttgtttttctttaacattacttgttcgctgcagctttaagccagctgtttgtaactgcaatttatagcaatttatagagatttgggctatgacatgtatcatcatgtatgccagttatctcgtgttgcggcatttatgttttagttgatcagcgacatggctgaattgctgataatcgttgtacctgatccctgtccctggtgattttaaaccgtttttacggctactt

SEQ ID NO: 127598 - DNA, 1616 bp, Zea Mays
aggacgacgaccggtcccattccccccgccccaacttgtcaggactcaagaggctcccctcctccctcgccgcggaacacgcgcgccgtcgtcgccagcccgggttcatttctccgttccttggtgcggtggtagccgagcgctccggccatggcgttctatcggggcctcaccgcagtctcgagactgcgatcacgcatggcgcaggaggccaccacgctggggggtgtgaggtggctgcagatgcagagcgcgtccgatctcgatcttaagtcccagttgcaggaattgattccggaacaacaggatcgcttaaagaagctcaagtcagagcatggaaagacccagcttggaaacataactgtggatatggtccttggtggaatgagagggatgactggaatgctttgggaaacatccctacttgatccagaggagggtattcgttttaggggcctctcaattccagaatgccaaaaagtgctgccaacagcagttaagggcggtgaacctttgcctgagggtctcctttggcttcttttgacggggaaggtcccaaccaaagagcaagttgatgcactatcaaaggaattgcttgcgcgctcaactgttccagctcatgtctataagacaatagatgctctcccagtagatgcacatcctatgacacagtttaccacaggagtaatggctcttcaggttgagagtgaatttcaaaaggcttatgacaatggattgccaaagtcaaagttttgggagcctacttatgaagactgcttaaatttgattgctcggcttccaccagtggcttcttatgtttaccggagaattttcaagagtgggaaatcaatagaagccgataattctttggactatgcggcaaatttctcacacatgcttggttttgacgacccaaaaatgctggagctgatgcggctctatgtaacaattcacacgtaattttgcatccatccttgtttgtacttttattatgtttcagaagtactcgttttcctctcatactgtgacctgtcacctgtgttcttctagtgatcatgaaggcgggaatgtcagtgctcatactggtcatctggtaatatttgttctcttgttgtaatctttatattttttgttagtgtttcttaacgatccaagataatgacagctgtcggcgtgataccctattttgtaccatcattgcactttgcttttggtttgctacaatgtgattattactcctgtgacaatactttagtatgtacttttaaagcgaactgaattgttaatctggaaatacctttttaaaaagtgcatgatagcacttattaggaactggatcttggaacaggataagagggttagttttagcatatactttgctaatttaatcatgattcgccaggactaattcatattacttgttccatctttgttatattccatgtattccatagtagtgagtataaatttttggttctaacagtagtccgggtatgttgttacacttgtgtcggctattgtagatcaggagagctccatgtgatggaggatcataatgtgttggaagggggtctggggatcattgtagttgtagaagtattttttattgtgtactc

SEQ ID NO: 127599 - DNA, 2132 bp, Zea Mays
aggacgacgaccggtcccattccccccgccccaacttgtcaggactcaagaggctcccctcctccctcgccgcggaacacgcgcgccgtcgtcgccagcccgggttcatttctccgttccttggtgcggtggtagccgagcgctccggccatggcgttctatcggggcctcaccgcagtctcgagactgcgatcacgcatggcgcaggaggccaccacgctggggggtgtgaggtggctgcagatgcagagcgcgtccgatctcgatcttaagtcccagttgcaggaattgattccggaacaacaggatcgcttaaagaagctcaagtcagagcatggaaagacccagcttggaaacataactgtggatatggtccttggtggaatgagagggatgactggaatgctttgggaaacatccctacttgatccagaggagggtattcgttttaggggcctctcaattccagaatgccaaaaagtgctgccaacagcagttaagggcggtgaacctttgcctgagggtctcctttggcttcttttgacggggaaggtcccaaccaaagagcaagttgatgcactatcaaaggaattgcttgcgcgctcaactgttccaggtattctgtgcacactgctgtctgcttgtgttattgttttgaccaattaaatctacaatttatctgaacaaattgatgctaatgtctccctattctaaaattcaaaggtagtcacagatcatcgagaaatctatatatttctgttagtatgattgtgttaagtttatatgttcgatcttgccactttgctctctagcagctgataattaatatggttgcagctcatgtctataagacaatagatgctctcccagtagatgcacatcctatgacacagtttaccacaggagtaatggctcttcaggttgagagtgaatttcaaaaggcttatgacaatggattgccaaagtcaaagttttgggagcctacttatgaagactgcttaaatttgattgctcggcttccaccagtggcttcttatgtttaccggagaattttcaagagtgggaaatcaatagaagccgataattctttggactatgcggcaaatttctcacacatgcttggttttgacgacccaaaaatgctggagctgatgcggctctatgtaacaattcacactgatcatgaaggcgggaatgtcagtgctcatactggtcatctggttgggagtgctctgtcagatccttatctttctttcgcagcggctctaaatgggctagctgggccactgcatggccttgcaaatcaggaagtgcttttatggatcaaatctgtaattgaggaaactgggagtggtgttaccacagatcaactcaaagactatgtctggaagacactaaagagtggaaaggttgttcctgggtttggtcatggagttctgcgtaagaccgacccacggtattcatgtcaaagggagtttgccctgaagcatttgcccaaggatccacttttccaattggtgtccaagttgtatgaagttgtacctcctatcctcactgagctgggcaaggtcaagaacccatggccaaatgttgatgctcacagtggagttttgctgaaccactttggactatctgaagcacggtattacactgtcttgttcggtgtttcaagaagcatggggataggatctcagctcatctgggaccgtgcccttggcctgccacttgagaggccgaagagtgttaccatggagtggctggagaactactgcaagaacaaggctgcttgaagcttttcacaaatgctgctttttcccaaccttggctgttaataatttaaacgcgagttatagaaatagtcattttccctttggccgttgaataacgcaagagcaatatgctcaggcggaagaattttgtatcttccgtaacttggtgaacatccagatacttgatctgcggcaacaatgggcagaagagattaggacatgctgattgatctttatacgccaacacttgtttttctttaacattacttgttcgctgcagctttaagccagctgtttgtaactgcaatttatagcaatttatagagatttgggctatgacatgtatcatcatgtatgccagtt

SEQ ID NO: 127600 - DNA, 2008 bp, Zea Mays
gatctcttccccatcgcgagccctcgaatccagcctcatcttcgtctccgatctgccccccgctcagccgcggattctttcgctgcgtggtgggacggagccgagtagtgcggtggtagccgagcgctccggccatggcgttctatcggggcctcaccgcagtctcgagactgcgatcacgcatggcgcaggaggccaccacgctggggggtgtgaggtggctgcagatgcagagcgcgtccgatctcgatcttaagtcccagttgcaggaattgattccggaacaacaggatcgcttaaagaagctcaagtcagagcatggaaagacccagcttggaaacataactgtggatatggtccttggtggaatgagagggatgactggaatgctttgggaaacatccctacttgatccagaggagggtattcgttttaggggcctctcaattccagaatgccaaaaagtgctgccaacagcagttaagggcggtgaacctttgcctgagggtctcctttggcttcttttgacggggaaggtcccaaccaaagagcaagttgatgcactatcaaaggaattgcttgcgcgctcaactgttccagctcatgtctataagacaatagatgctctcccagtagatgcacatcctatgacacagtttaccacaggagtaatggctcttcaggttgagagtgaatttcaaaaggcttatgacaatggattgccaaagtcaaagttttgggagcctacttatgaagactgcttaaatttgattgctcggcttccaccagtggcttcttatgtttaccggagaattttcaagagtgggaaatcaatagaagccgataattctttggactatgcggcaaatttctcacacatgcttggttttgacgacccaaaaatgctggagctgatgcggctctatgtaacaattcacactgatcatgaaggcgggaatgtcagtgctcatactggtcatctggttgggagtgctctgtcagatccttatctttctttcgcagcggctctaaatgggctagctgggccactgcatggccttgcaaatcaggaagtgcttttatggatcaaatctgtaattgaggaaactgggagtggtgttaccacagatcaactcaaagactatgtctggaagacactaaagagtggaaaggttgttcctgggtttggtcatggagttctgcgtaagaccgacccacggtattcatgtcaaagggagtttgccctgaagcatttgcccaaggatccacttttccaattggtgtccaagttgtatgaagttgtacctcctatcctcactgagctgggcaaggtcaagaacccatggccaaatgttgatgctcacagtggagttttgctgaaccactttggactatctgaagcacggtattacactgtcttgttcggtgtttcaagaagcatggggataggatctcagctcatctgggaccgtgcccttggcctgccacttgagaggccgaagagtgttaccatggagtggctggagaactactgcaagaacaaggctgcttgaagcttttcacaaatgctgctttttcccaaccttggctgttaataatttaaacgcgagttatagaaatagtcattttccctttggccgttgaataacgcaagagcaatatgctcaggcggaagaattttgtatcttccgtaacttggtgaacatccagatacttgatctgcggcaacaatgggcagaagagattaggacatgctgattgatctttatacgccaacacttgtttttctttaacattacttgttcgctgcagctttaagccagctgtttgtaactgcaatttatagcaatttatagagatttgggctatgacatgtatcatcatgtatgccagttatctcgtgttgcggcatttatgttttagttgatcagcgacatggctgaattgctgataatcgttgtacctgatccctgtccctggtgattttaaaccgtttttacggctactt

SEQ ID NO: 127601 - DNA, 999 bp, Zea Mays
tgctgcttttatttttatataattgctgctgttgtgtgtatgaacataccatatattgcaggaagtgcttttatggatcaaatctgtaattgaggaaactgggagtggtgttaccacagatcaactcaaagactatgtctggaagacactaaagagtggaaaggttgttcctgggtttggtcatggagttctgcgtaagaccgacccacggtattcatgtcaaagggagtttgccctgaagcatttgcccaaggatccacttttccaattggtgtccaagttgtatgaagttgtacctcctatcctcactgagctgggcaaggtcaagaacccatggccaaatgttgatgctcacagtggagttttgctgaaccactttggactatctgaagcacggtattacactgtcttgttcggtgtttcaagaagcatggggataggatctcagctcatctgggaccgtgcccttggcctgccacttgagaggccgaagagtgttaccatggagtggctggagaactactgcaagaacaaggctgcttgaagcttttcacaaatgctgctttttcccaaccttggctgttaataatttaaacgcgagttatagaaatagtcattttccctttggccgttgaataacgcaagagcaatatgctcaggcggaagaattttgtatcttccgtaacttggtgaacatccagatacttgatctgcggcaacaatgggcagaagagattaggacatgctgattgatctttatacgccaacacttgtttttctttaacattacttgttcgctgcagctttaagccagctgtttgtaactgcaatttatagcaatttatagagatttgggctatgacatgtatcatcatgtatgccagttatctcgtgttgcggcatttatgttttagttgatcagcgacatggctgaattgctgataatcgttgtacctgatccctgtccctggtgattttaaaccgtttttacggctactt

SEQ ID NO: 127602 - DNA, 699 bp, Zea Mays
cttgtgatttagtctagatagcaatttagtcctctttttacttagcaaatctagttctgagtgagcactaatgtttggaacactaactgtgcaggtattacactgtcttgttcggtgtttcaagaagcatggggataggatctcagctcatctgggaccgtgcccttggcctgccacttgagaggccgaagagtgttaccatggagtggctggagaactactgcaagaacaaggctgcttgaagcttttcacaaatgctgctttttcccaaccttggctgttaataatttaaacgcgagttatagaaatagtcattttccctttggccgttgaataacgcaagagcaatatgctcaggcggaagaattttgtatcttccgtaacttggtgaacatccagatacttgatctgcggcaacaatgggcagaagagattaggacatgctgattgatctttatacgccaacacttgtttttctttaacattacttgttcgctgcagctttaagccagctgtttgtaactgcaatttatagcaatttatagagatttgggctatgacatgtatcatcatgtatgccagttatctcgtgttgcggcatttatgttttagttgatcagcgacatggctgaattgctgataatcgttgtacctgatccctgtccctggtgattttaaaccgtttttacggctacttat

SEQ ID NO: 127603 - DNA, 1406 bp, Zea Mays
ccctcatctctcctcccgtgacgtcgcgccacatcgtcctcttcctccgcgtgccgctgctaccgtggcccccttgcctgctcgcctccacggccacacgaaggccccctgtgttgctctcggatatgcgctgccatcgccggcgtagccggagctggccgtccacgcaaccctgccacgggagggcgacgcgttgatgctggagctcacaaggtgtcgctgctggagcagcgtacgacgacgaaggcgctgtggcagcacctggtgctagcgctacactactactgaattttgtgatgttgcaatttcatcttttattttgttttttggggtgatgcaaaaaaacaaaactcaaaagtctactaaaggccataaattgagcaatgttgctgcttcaagaaacaaattatcaacttattcccatctaacctttgatgggatttggtttagcattaaggaattctcaaaatcaaaatagcagtttcaagtgccagatgatgcaaggctttcagctagaagtgtagctgttctctgaaatctttgccaaaaggttaatttcattctaccttgcatgctacctgtttagcatgatcgttagtttattcgctaacaaaaaactttgccgaatggatgacttccttctgagaagactgaactgaataattatgtcaaagttgtttcagtagtttggcctaatcagtattgatctatggtgtatagtctacaggttgtactatatggttgattgttctgatttcgagcttggttagtctaatgttcttaattatggatgatgatcctttgaagttcatgcacgaagacttgccgttctgaaggcccttacttcctgttccactagtagttctgagatgatggaaaagctaaacgaaatcgtgtttgacatcttggaaaagtctattatacgtggtaatttgcaatatgcttctttaagtgcactcagaaggcatccacttgatctcggtaatcaagcattcctccaccgagctgtggaaggattaaatacaggaacatgacccctgaagcagctttggatcatgtacgatccattaggcctcgagtgcttttggcaccctcgcagtgctaaaagtttgcagaaatggcaccatcaagatcgatctggagaccaacaagatcatggacttcatcaagtttgacgtcggcaatgtggtcatggtgaccggcgggaggaacaccgggcgtgtaggagtgatcaagaacagggagaagcacaagggcagcttcgagaccatccacgtgctgcttggagctttttgctatgtctagttttctcctatttgttgtacaggaaaacatagaatggaattcaaatttggtggccacaaaagtgtggagacttgaattcatataaagttagccttaacatt

SEQ ID NO: 127604 - DNA, 2819 bp, Zea Mays
ccctcatctctcctcccgtgacgtcgcgccacatcgtcctcttcctccgcgtgccgctgctaccgtggcccccttgcctgctcgcctccacggccacacgaaggccccctgtgttgctctcggatatgcgctgccatcgccggcgtagccggagctggccgtccacgcaaccctgccacgggagggcgacgcgttgatgctggagctcacaaggtgtcgctgctggagcagcgtacgacgacgaaggcgctgtggcagcacctggtgctagcgctacactactactgaattttgtgatgttgcaatttcatcttttattttgttttttggggtgatgcaaaaaaacaaaactcaaaagtctactaaaggccataaattgagcaatgttgctgcttcaagaaacaaattatcaacttattcccatctaacctttgatgggatttggtttagcattaaggaattctcaaaatcaaaatagcagtttcaagtgccagatgatgcaaggctttcagctagaagtgtagctgttctctgaaatctttgccaaaaggttaatttcattctaccttgcatgctacctgtttagcatgatcgttagtttattcgctaacaaaaaactttgccgaatggatgacttccttctgagaagactgaactgaataattatgtcaaagttgtttcagtagtttggcctaatcagtattgatctatggtgtatagtctacaggttgtactatatggttgattgttctgatttcgagcttggttagtctaatgttcttaattatggatgatgatcctttgaagttcatgcacgaagacttgccgttctgaaggcccttacttcctgttccactagtagttctgagatgatggaaaagctaaacgaaatcgtgtttgacatcttggaaaaggttggccatccataatttgagtattctttgtacagttacattagtctttaaactacttttctcatcctcactaattatattgtcggcaatatattgtcgacaagaatggttctggatatattgaatgttcaatggtactcctattggataatcctatcagcacgacaagtgcttccatagcttatgatgttgaattttgctgctccatggcagcagcagcagcccctgccagttgaccattctgacgccttctcctagcattatgctttcttgtagcttcatttggaaaaggcagattgctcaaggaatttcatgcttagttgcaccacaccagggtatcatcaatcattcagccccattctactgatgtaaattgtgcaaatcctttttctttgagacttttgagagtggtctgtcgattacttgcaagaaatatgaacctttgtttctgtgcatgggcataaaacaaacagcttctagcctcttttacggtacttgcacttgcaagaaatgtgaactccttttcatttctgtatgtggacataatgccaaagcatccaggatttttcatggttgttgatgtctttacacagttcatctccaccagtatgccctcctcgtactctatataaacacatcaacagcaccgcaattagccacataaacacatctcgcagccacctttttttgttctgttgtaagtatactttcccttaccatctttatttgttagtttaatttgtaattgggaagtattagtggaaagaggatgagacgctatcatctatgtactctgcaaatgcatctgacattatatgggctgcttcatataatttgaattgctccattcttgccgacaatatattgcaaggtacatgtctaggagctatttaaactacgtcgacctcactaattataagcattgaaaaagcaacaattgctacagtgcacttaaacttgcagctcattattatctggctaagatgatgggccaacttagtttatttgatctaaaaattgtgagtcttatgttctgaactcaaacttgtgacaatttattttattttcgcagtctattatacgtggtaatttgcaatatgcttctttaagtgcactcagaaggcatccacttgatctcggtaatcaagcattcctccaccgagctgtggaaggattaaatacaggaacatgacccctgaagcagctttggatcatgtacgatccattaggcctcgagtgcttttggcaccctcgcagtggtatgtatgcaaccttttgtgattgcattataagttattagtacaatactactgcgttaagacactttatgacaccatgtgctgcatcaggttagtaagctgtcatggttctgttttaatacacgcaggtcactcaagtagatctaaagttattctttgagtccatatgtggtgaggttggtcgttctttactccaaacacaatctcccttctgtatagctaaaagtttgcagaaatggcaccatcaagatcgatctggagaccaacaagatcatggacttcatcaagtttgacgtcggcaatgtggtcatggtgaccggcgggaggaacaccgggcgtgtaggagtgatcaagaacagggagaagcacaagggcagcttcgagaccatccacgtgctgcttggagctttttgctatgtctagttttctcctatttgttgtacaggaaaacatagaatggaattcaaatttggtggccacaaaagtgtggagacttgaattcatataaagttagccttaacattagtgcaaacagttgtatcttagtttagatttagagtacacttatgtatgcgttgtttgacaatgcttatttatgatatattgaatggtacttatttatattatattaattataatgttgttc

SEQ ID NO: 127605 - DNA, 287 bp, Zea Mays
gacctagcgcgtgtattcaaagggagaaggtcgtgagagaggggggtgagtaatggagtccgccgtgaccaaccgggcgagtcgtcgtttccgtcgccgttcatcgcgctcggagccaaattggagcactatgtgcgaccggacgactccatccgtgttccggatcacttcaatggcgtgggcgagaattgtgtgtgactcgagtgcacccaattcgttgccgtcgaaccgcgccgtcatcgatccgcgcttcgccggagccaggggcctctgcactgcgagttccg

SEQ ID NO: 127606 - DNA, 1380 bp, Zea Mays
cttttgttccttatcccgtcggccgtcgctatctctctttccccttgatttttcctgccgccgctcagttcctggaagcaaatcccgccgccgaagacttgcttcttcccagccgagccctttccccacccgttcctccatctcactgtgtcggcgctctccactccacacctcgttcctgtgctggccatcttcttcctctgcgtggtggcctacccctgtcggtgcccagtccgagtgccgcgtcgcgccccccgtctcctctgctcgctcagcgcccatctcctacggtgcctggcagccgcttcctctctgctcgccgccgcacgccctggagctccaatcgtcgcgccctcggctccctcttgccgtgcgcgtcgtggcagctatccggccgcggagcagtccacgccatggagctccctacctgaccgcgacctcgccggaaagctctcgcggcgctcctcctctgctggcgctcgccctgccctctgccatggacgccgtcggccttgactccctctggccgcggcatccgtcttactccctgctcgaccctgtttctctcccaagcacctccgatggccttgctcgtctcgcccccaccagaaaaggccatcgggacatcgtgctggtcgcgagtctcctctgtgctccataatcacctggacgagcctcaactcatttacgacctccccctctcagcacgtcagtgcagatgtcatatttggccgcgctctgtgctactctagctcgcgttcattcctaggtttgagtttgtgtaccacttgttcgacaaaatgtgtgaaccagttgtcgacctcgccatggatagccgatgcgccatctatcgctcctcgccgatgtctccctctgccattcctacaacaggtgaggcacctaggatgtttgtgataaaaaaagggtttcagcacattgcacatcaggtacgataattaatcacgtgatgcggaggaccagaaatgagtcgaccacaagatgaggaccagaaatgagtcgaccacaagatgctggaaagcgtgagcttctccgcaagatgaagttgatggattaacctgaagatggacagatgaaacaagtataagaacaaaagatggtcgtcaagcgggcgtcgtctaacaaacactaacgtagtgtttgtcccaggcaagccccggtgcatgcaaccccttccttgtgtttttaaattatttgtacacactttaagtctagtgaatgttcattaggtttaagtgagttgcttggaaaccttttgatgcattggctaccttgaaatccattccttttatagatacttcttgtgaagtatcaaaatataatttacaaaaaaatgcttagtcctacttataagcagataga

SEQ ID NO: 127607 - DNA, 1401 bp, Zea Mays
cttttgttccttatcccgtcggccgtcgctatctctctttccccttgatttttcctgccgccgctcagttcctggaagcaaatcccgccgccgaagacttgcttcttcccagccgagccctttccccacccgttcctccatctcactgtgtcggcgctctccactccacacctcgttcctgtgctggccatcttcttcctctgcgtggtggcctacccctgtcggtgcccagtccgagtgccgcgtcgcgccccccgtctcctctgctcgctcagcgcccatctcctacggtgcctggcagccgcttcctctctgctcgccgccgcacgccctggagctccaatcgtcgcgccctcggctccctcttgccgtgcgcgtcgtggcagctatccggccgcggagcagtccacgccatggagctccctacctgaccgcgacctcgccggaaagctctcgcggcgctcctcctctgctggcgctcgccctgccctctgccatggacgccgtcggccttgactccctctggccgcggcatccgtcttactccctgctcgaccctgtttctctcccaagcacctccgatggccttgctcgtctcgcccccaccagaaaaggccatcgggacatcgtgctggtcgcgagtctcctctgtgctccataatcacctggacgagcctcaactcatttacgacctccccctctcagcacgtcagtgcagatgtcatatttggccgcgctctgtgctactctagctcgcgttcattcctaggtttgagtttgtgtaccacttgttcgacaaaatgtgtgaaccagttgtcgacctcgccatggatagccgatgcgccatctatcgctcctcgccgatgtctccctctgccattcctacaacaggtacgataattaatcacgtgatgcggaggaccagaaatgagtcgaccacaagatgaggaccagaaatgagtcgaccacaagatgctggaaagcgtgagcttctccgcaagatgaagttgatggattaacctgaagatggacagatgaaacaagtataagaacaaaagatggtcgtcaagcgggcgtcgtctaacaaacactaacgtagtgtttgtcccaggtgaagagcctacagagttttgctacttttgtgcaaaggtggttcccaagcaggaggaagaatcgaaaatagaagtctgttgctaaggatgatgctaagtgctggtgggctcggccttcttataagtctaagtacctcttctatacttcttattaaggatggtcacttaatctagcatatattttaaacatataaatgtttatacattcaaaacttagtgcaattactccgatcatgtacaatgtaaacttgatgtaacttgtaaaatttggtaataagatttccgctgc

SEQ ID NO: 127608 - DNA, 1023 bp, Zea Mays
atccaaattctcaaagaagcatagttaacaaatttgtctgacccatataggtaagattccatgggattgaagctttcttgcatccaccagggcagcctgtcccgccaggcacatcagccggcctcgccggcgcccgccagggtcatcgccgcagacgcgtcgctaaaggagctcccggcctcatcctcttcctctagcgtctcggacgtgctcggccggagcggcggcgacgacatggccgtggcgtcgtcgtcgttcttcatgtgcaactccgacgcgctgtacttcaacgagcccccgccggcgctgcccaccggcgaggtgctccggccggggcagatatacttcgtgctcccggcggccatgctcgggaggccgctttcgaccgccgacatggcagcgctggccgtgcgagcgacgacggcgctctcgtccagctgcaagccgcggcgccacgggcggcgccgggcacgtggcggcggcaagaagaagaaggcagttcgcgtcgtgcccgtgcgcgagcaaatggaggacggtggagaggacgccttcttcaacgagaagctcaaccaacagacgctgggggatttcgggatgttgctgctgagccaagcgaagaaggacgacaagcttgcggttgcggccgccgcggcgacggcgaggctcaagcgggcgctgagcattattcaagaagacgccgagtgaagcgagcaaacaggctgtggtcgatctcgaattctcttgttctttccagaaacttatttaggttgcgcttttgtactaagatgcaatagtgtattagaaaatgtctacaaatgtatgatacatcttccagacactacataattcagcagtgactgaactacaagaattaatgtaagtaacctgattcgttgattctcttttttttttttatttcggtgtacaattctccattttgtctgtcttgtgatttttctacgactgtgaaagactgaagaactttcggtctgaaatgaaatttgaaacattcaaactttgtat
